United States Patent Application Publication US 2008/0050393 A1 - sequence listing, part 10

SEQ ID NO: 39733 - DNA, 406 bp, Homo sapiens
  misc_feature (1)...(406): n = a,t,c or g
gcgaggactaatatggtggtaaaaataatgagaagtagtcagaccgtgaatatattttgaagtcacaattgacaggatatgacgtagaaagagtagtcaataatgactccaatatggaagatgagaacaaatggaagggcagagttcccatttactgaaataagtaagatcaatttggagagagaatgaaatcaagagttcatttttatatatggtaattttgagatgtctattagaaacacagctggagatgttaagacaggtatcagtctccagttcaggaaaggagtccaaggtggagatacaaatttgagagtcagcttatagatgttatccattagaaagttcgtatggatcnnaaaagaagatatctgaggcctgagacctttgacaccttagcatttaa

SEQ ID NO: 39734 - DNA, 401 bp, Homo sapiens
  misc_feature (1)...(401): n = a,t,c or g
cgttaacataatatagtttcaactgtctttcctcctggaaaaagtcaaaggtgtttcctgttgcatatgccttgatacatctctctttggggcatgtccttaattttaactcttcctatcaaagaagaaaccactcatttggctgagaaactcattgcttctgaaaaggcaagtcagaaatctttcttcatttcagtcatttctggcaaatgagaactaaagccagctcgaggtttagcccctactagctccccaccagcatcagatgcaactatgaagggaagctacttgtaatcatttcaaccaaatccaaaattcagagaatcaaattctctgttccacattccaacaggtccatcatcatgcagtttatcttccaaattaaaatgangatactctaa

SEQ ID NO: 39735 - DNA, 399 bp, Homo sapiens
  misc_feature (1)...(399): n = a,t,c or g
nnnnnnnnnnnnnnnnnnnnnnnnnnnnnnnnnnnnnnnnnnnnnnnnnnnnnnnnnnnnnnnnnnnnnnnnnnnnnnnnnnnnnnnnnnnnnnnnnnnnnnnnnnnnnnnnnnnnnnnnnnnnnnnnnngctcagctaataaatgcctttttaaagtgtaaatatctaccagaagggtcaggattatccttcactcaaatctatacattaatgaaccagttttgagaaacaagaaaaagggaatctctatgagagtacagcatgagtcagttaagtccccataagtggatgacggctcacagaaagacataaaagagagtgaaggaagaccaaaaccaagactagcctaagatctaggagataagagtacggnactgaaaaacccatgttcaggaaaa

SEQ ID NO: 39736 - DNA, 250 bp, Homo sapiens
  misc_feature (1)...(250): n = a,t,c or g
atagaaacaagattggtctcatgtgacaatcatcagagtttggagatgggcacgtagggtcatcgtgctgttctctctgttttcatatatgctttgaaagttctgtaacagttaattaaaaaaaaaaaaancnccctggntgaccncttagggnggccaagnggggaggatngnttaanccaaaaagttnaanaccancctaggaaacntaggganacccccccccngcnntttttaaaaaaaaaaaaaa

SEQ ID NO: 39737 - DNA, 379 bp, Homo sapiens
cttggccacatgagaaataactgaccagagagtctgaatctaacttcttattcagagaggactgtttctctgacagatggattttgtagcctttgtcgagcttttatatagaataatgctttttgttttgtgatttaactcattgccctcaggcttttcaatttgtatatgttgatttgaagagctcttcccatggagagatgtgtgacctggactacaggaaatataatgtgcaggaagagttggggaggggggcatttccttcctcgatctcccaaaatagccaagtaattaaatctattactgtagctagaaagcagaactattgtctatattgtcagcaacaccctaagggtgaagagaagctgccgcgaattcc

SEQ ID NO: 39738 - DNA, 397 bp, Homo sapiens
cgcaggcacatacaaaaatttagacatctaacagctatttggcaagccttaagaatagctggccccatttgtcagaggaaatctgttcataaatcactattcagatgttaaatggtttctgttctgttgggtttttttacagccacttgagtgtgtattataattaaatcaagcattggcagagtacaaaggcaaatgtttttgtgtgcctggaggggacggggaggttggttagtaacttggtttgatttctgttttcataaaccagatttttccagcattcctcttctgtgtcctgttgctttaccaagtatttacacaaagattgagttgtctgaatcctcattgccagtctaaaagattgaatctttaagtggcaagatccctgtaaccaggg

SEQ ID NO: 39739 - DNA, 382 bp, Homo sapiens
atttttctcaataggcatttcattataatctataaagtccccaactgttactgaagaaaaacaaaacattactgttaaaaagatccttaaatgtacagtatcaaatatactagtggaaaataaaaacagtatcaggtgaaatacctattacttaatggcttttctcataattcacaaagcatgccaccccataccagtatgcccacatcacagatatactggcatgactggagaaaatacaggcactctgaggaaacatacagtctatagctcgcacataagattcttgtcaagttgcagctctgaggctggagtaggtaaggacatgacatgataaaatatgtatcactgatttcagaattaagaaaagatgaagatcact

SEQ ID NO: 39740 - DNA, 395 bp, Homo sapiens
cattaatccattttctgtctatagatttgtctagtttaggtattttatataaatggaatacaggtaactttttattagtgatttttcacttacatgtgtcttgcatgtctcatgagatagctatgaataagttagccttcttttacaacttaaataacaattcttgtctgaccgggaaaaagtattaagttattgagagactgcatcccaatttaaaccaagaaccagactccttactagtattataactcaaaagaatgtgtaccattagcccttacctctggtggtgcttttcactgtgaattgttcagcagcctctcaacttcccgaaaataccacttaagtcttaaactcagacttgcatgagtttactgagatatgtttacctttgcagc

SEQ ID NO: 39741 - DNA, 379 bp, Homo sapiens
  misc_feature (1)...(379): n = a,t,c or g
tcataaaatttagcttcagaactatggtagaattgaaacagaattgtcttgctgtgtctgtagatagtttctaatggtgatgaacaattggaaaaagccatggaagagattttgagagattccgagaaaaggccaagcagtcttcttgttgattgtcaaagttccagtgagatttcagaccattcgtttggagatattccagccagccaaacaaataagccatctcttcagttaattttggatccgtctaacacaggtactgtattgaattcttagaaactattaaagaaatgggataaagtaatagtgaaaattttaagatgaaaatcagaaaaaattgttagctcttctcaagctttcagttcttgntgagagtttc

SEQ ID NO: 39742 - DNA, 397 bp, Homo sapiens
ccccaaggttcctggccctggtacaggccccctcctcttgactgcaagtgaaagcagtgaatgtaacaggctatcactcccataattaggtttctagtcagcggatgttgaattcttcaaaagggacattatcccaggtgggcctgacctaaccaggtgggcccctaaaaaataaaaacaatgaaacagcagagagacaatctccttctggccttgaggaagaaagcaaacagccatactgtgagctgtctacagggaggggtggcctctaaaagctgagggcctcagtaatactacagttagaagaaaatcaattcttcctacaacctaaatgcacttggaagaagatccctaagttgccttcattgctatgacttcagtaatgggtttacatctt

SEQ ID NO: 39743 - DNA, 377 bp, Homo sapiens
ctctgaacaaataattaatataagcagtggtaattcacaatggtggttaattaatccacagaacacttaagtttaagaacgctttttccttagcaaggaaaactgattattaagttcaagaaacatttattacatgcttttcacattctaagcactgtgctaggcattgtgaatacaaaggtaaatgagatcccactcttaacaatattaaaataattaaagttattaaacattagtttttctctgtgaaaaccaaggaattttaatggatcctcatacctaatatttggcacatttctccatatacattatcatcaatgttggtaagcagaactgaccaggtcaggaaaagtcacattgagggttaaagacaggac

SEQ ID NO: 39744 - DNA, 394 bp, Homo sapiens
  misc_feature (1)...(394): n = a,t,c or g
ggccagatggaccttccccaaaatggacttcccgattttcttttcgaggtccagagcattaagcctttgcacttccagggccacggccgaagccctcggcaggtggaggcgggaggagttgaggagattccacttctctacacatacccgtccagagctgcccaggctgtcttcgtcagactcgtacttccgattactgtatgagtggccatgttctcggggctcagggtcatccagctcaccccgcttctcactggggtatccgctgtccccactattctcagactcccggtggttgtctagatgatcatggtctctggatgccatgttatcnagggcactgaacactggccnatggaggagggctancntctgctgantggtgangcnaaga

SEQ ID NO: 39745 - DNA, 379 bp, Homo sapiens
cccaaaaaaggatataaggtggtagccttcacttacccactttctttctggtggatgcatgacattatgttatataccttaccaatacctccaaacctcacaaccgctgttgtagaacgaataatgtcctccattgaaaaatgagaaaattgaggcacatattagatgatttatgcaaaggcatccaactaccaagggcagaactcgtatagaacccggtccatctgacttaacaccagtgctcttgcccctaacctgagctgcttctctgacaggtgtattgccctttatattcatgttgcccagcagtgttcctggcctagcgtagctgccaataaaattgattgatttgatttgaatcatattcagcaccctggag

SEQ ID NO: 39746 - DNA, 397 bp, Homo sapiens
cttttttacctttacaaataaagagtggcaagtataagaaatactgtgagccaacaactttccatctcatgtcttctaaaatagaaatgagaatctttttctgaggtttccagagctcttgcaaaataatccaatcttaaaattctctgtatcttttaatgtactttaaactaatagaattcattcttgttgaatcttaagtttgccaaagttgcaagctaatattcattgttttccctgtctgcacccttcagtcagttggtcattcttaaattcatacacttgtaacacttggtgttatttcagaatatttagcatgataactgatcattatcatgatcattcattaaacctgccttgactgacaacgcagaataagtgtgaatagttgtgatct

SEQ ID NO: 39747 - DNA, 400 bp, Homo sapiens
tttggtagaagggaacagaaaaccaagaattgaaaaacaagtgatgtaaactccaaggggacccacaactggaattgagcagagtccctcctctgtcacacatctggaagaatgtggagacaggaaaatggctggacacagttgtgtttcagctacattcactcttaaaaagagttttcaaatggggaggggaaaagtgaaaggatttttataaaagtcatatggttagattctttcctcctccacttctgtccagcagagttttaaaaacaaaccctgcggagttcctggcttgctgacccccatccctgggttctcccaccccaacggaggcacatctgagtcaacgacatccacagctgcttcttcggcaccatgccgtgatgccgcaagaaaatga

SEQ ID NO: 39748 - DNA, 394 bp, Homo sapiens
aagatctacctctaatttatgtggtctttttttattatgtacttggattaggaatttttgtatttttgtttgtacaacaaaaaatatgtaaacatccccaaataaaaaaataggtgccctagatctgtgacactggaagtgctgttttcctggctcaatatcccttatttggctaagaaaaaaagggcagtttccaactcatttgtacttacatagccacagactcttctacttgtatggcttattaacatcaaaaatttatattctattattatatgtgatatattacactatactaccttataattatccccaaaccaaactgggcattaattctctcaacctatttttaaaaaatttaaggggaagggtaaaaaaactgtggggttttaaa

SEQ ID NO: 39749 - DNA, 399 bp, Homo sapiens
gaagatttgaaggtggttaagaactgtgcaaataccacaagatcattttgtgacctcacagatgagtggagaagcacacacgaggcctatgtcaccgtcctagaaggattcagcgggaacacaacgttgttcagttgctcacacaatttctggctggccatagacatgtcttttgaaccaccagagtttgagattgttggttttaccaaccacattaatgtgatggtgaaatttccatctattgttgaggaagaattacagtttgatttatctctcgtcattgaagaacagtcagagggaattgttaagaagcataaacccgaaataaaaggaaacatgagtggaaatttcacctatatcattgacaagttaattccaaacacgaactactgtgtatct

SEQ ID NO: 39750 - DNA, 397 bp, Homo sapiens
ctcttgtcccacatactcttcaagaatcttgccattcccatggcaagacgcagagtctcattccgctctccttcaatttaaggggtttgttgactcgcttgtaaccaatagtatgtggcagaagtgcctctgtgtgacttctcaggctaggtcctaaagggaatgcagcatccatccatcttcttagcccatgacgtgcttgctgtagagtcctgagcctcccattgagaagtctgaggaccccaaggctgtcacaccttgataaatccccacctagtccacgtggagagcctctaagatgtatggagagaaagatgcctcagctcctccagcccccacttttcccatccagctatcgcctgcagcagcagcaggagagaccccaggccagccccag

SEQ ID NO: 39751 - DNA, 385 bp, Homo sapiens
ttttgtgccacgatgcctagctaggcagtgaagaatttttaacacatgaacatactatagaggataaagaacaaagaatacttttggttcaccagtattatttaatagggctttgtataggtgcttcgccaatcaagtatgaagatattctctcattttcctagttactgtgaaagaatacatagaatgacaagaagtgtctgttttttactgttttattcatcaagtcaggaagtgttctaatctgcatttggatttgatgttcagtaatttcagtattgtttattatgtgatttttcaacaaagtcagaaatccgttctacagccacagcacttcctctcattaagtagatgagccttcagttcacaaatgtgcaaggctgat

SEQ ID NO: 39752 - DNA, 383 bp, Homo sapiens
ctgaagtgtgtactcagacgtgatgtgctccagctcctccagggtataggtggacatgtccatggagcaaggctcgccctcctccaggctccactgctggtagtattcctggttggcctgcacctgcttgacacaggccagtgcgtactgcagcgtggccagggtcccagagcggcccttgccccggcgctctggcggcagtcgaagcttgagctctcgaagtgctgtcatgagttccttctgagtccttgcccgggctgactgttcactgctgcagccactggtggacgggttgtcctgctctgagctggcactcaggaggctgtaggcaatggaactgctgggtggggatgggctctgagagtttgtgctcttgctgctct

SEQ ID NO: 39753 - DNA, 389 bp, Homo sapiens
  misc_feature (1)...(389): n = a,t,c or g
nnnnnnnnnnnnnnnnnnnnnnnnnnnnnnnnnnnnnnnnnnnnnnnnnnnnnnnnnnnnnnnnnnnnnnnnnnnnnnnnnnnnnnnnnnnnnnnnnnnnnnnnnngaatgtgctcttgcattctgtgtgtctacagacttaacaccacatggaagctgccagggcctctgattggcagcctgagccatgcctggggccttttgagccctgactggggcctgaacagcctgaatttggattgggctcctgaaaccattctgtccttctaggcctctaggcctttttcccattgtcttgctaatttcttctgcaagtggttgctcttcagcacctttaaatttctctcctaaaaatgcttgnccttccctaccacaggactgggttgcaa

SEQ ID NO: 39754 - DNA, 383 bp, Homo sapiens
  misc_feature (1)...(383): n = a,t,c or g
tgaaattttatcctcaatgatactctctccacttatatttcattctaggttcagtttagcctgtgggtgctgcggtatgtggtctctggagggctgtttgtcctgggtctctgggcccctggacttcgtccccagtcctatacattgcaggttcatgaagannnnnnnnnnnnnnnnnnnnnnnnnnnnnnnnnnnnnnnnnnnnnnnnnnnnnnnnnnnnnnnnnnnnnnnnnnnnnnnnnnnnnnnnnnnnnnnnnnnnnnnnnnnnnnnnnnnnnnnnnnnnnnnnnnnnnnnnnnnnnnnnnnnnnnnnnnnnnnnnnnnnnnnnnnnnnnnnnnnnnnnnnnnnnnnnnnnnnnnngccagtgggcctgagatttttc

SEQ ID NO: 39755 - DNA, 389 bp, Homo sapiens
  misc_feature (1)...(389): n = a,t,c or g
ctgagcaggaagggtaaaagacaggaacctgcttcactgtattaactagtccatgggctgagaccggggcatctcttttcttcatactgcaatgttgctagatacatgatcagacaccagagggttgggcattcttgcaataccttaacagtgctgaaatctgcagcatggtactaaggaagttaaagtttgaatgtaaccactttatttaaaaggtttttttctttaatttaaatgaaatgggggtcgacgcggccgcgaattccnnnnnnnnnnnnnnnnnnnnnnnnnnnnnnnnnnnnnnnnnnnnnnnnnnnnnnnnnnnnnnnnnnnnnnnnnnnnnnnnnnnnnnnnnnnnnnnnnnnnnnnnnnnnnnnnnnnnnnnctta

SEQ ID NO: 39756 - DNA, 382 bp, Homo sapiens
atgaaacattcatgagtaatactgcatttgatcctcaacaactctaacaacagtatgtcatcattctcactgaggaggcaaggaggttggaaagcttcagaaggaaagtacacattttgctttaaaaaagtcattgtagtgatggcattacggatgatactcattttcttctttatacttttctatattttaaacattggtaagaacgtcaaaaagacatatttgaactcagccaatcttataaatacaaatcagtacactatctcaagtttgttaatttcaagagcagtaggagaaaacaacagataacatatgttatatatctcatcctatccctcaattcaagattccagaggaattcctgcattttgctattgtattg

SEQ ID NO: 39757 - DNA, 389 bp, Homo sapiens
ggtcaggggctccagatcatcctcctccaagggccccgcaggcgcctccttggcctctggctcctgcttgccgctggcctccaagatggtcatgatggagttagggatgtgagcttgctggtggggggtgaaggagcggacatgggccagcaggggctcccggagctctgggcacttgtcaaagacggctcccagctgctggggcggcagctgcaggatgacctggaagctctggggctttgtgcgctggcagcacttgatgaagccctcccacaccttggggtacttccacacctgcttcatgatgaggcgggacaggatgttcatgacgaagccccccaggcgggggtacatggtcagggactggatgacggcctcatgagcagcat

SEQ ID NO: 39758 - DNA, 385 bp, Homo sapiens
  misc_feature (1)...(385): n = a,t,c or g
nnnnnnnnnnnnnnnnnnnnnnnnnnnnnnnnnnnnnnnnnnnnnnnnnnnnnnnnnnnnnnnnnnnnnnnnnnnnnnnnnnnnnnnnnnnnnnnnnnnnnnnnnnnnnnnnnnnnnnnnnnnnnnnnnnnnnaatgaatggtatttcttaacccagttaatgaatggtcttaggattcacggtttcatcaagacacactgaatcatttctattaacatcccattcacttgaggtttatttaggcattttgtctttatttgttaaatgctcactaatacttttatcagtggtgggtttcaggtgtctctctttcagaccctcaggattctcttcaacctgaactagatatatggaaagtagattctgagaagcagtatggtgttt

SEQ ID NO: 39759 - DNA, 369 bp, Homo sapiens
attcagggctgtcagcagcttattaatgttctgtgggttcagatcaagtaagttgctgtttgggtgagactcactgatttcagataatgccgctacggcattagccaccaccattggatttgaatctgctatgagatcccgtagagaatccagaaatccctgatcttccaccatttgggcattgatatcatggagttttgccacgcagactgctgctgttttccgaacatagggatcctcatccttcaagcacttgcggagcggctcacagagatattctgtaattttgtctacccggatgcaccccatggttctgactgccaaggctcgaatcaaaggattaggatcttcacagtccttcacaaagct

SEQ ID NO: 39760 - DNA, 369 bp, Homo sapiens
gttaattacatgaagttttgtttgaaggcacaaaaatatatgcttgaatgctggagtgaggagaaacctttaattctctgccttaggcctagtgaagatgcccagagtcatttagctgacatgctagacagcctctgaaacccatccacgcacattcttttcccactaaagaccacatggcaagacaatggcacagacatgactgaaactcagattctaacacaccagcactggaaaaagttttaggaagaaaagaggaaaagggcaactataaatattttattatgtcattttgtggggaaattcttgagttatataatattgattaaaacaagtttatcggccgggtgtggtggctcatgcctgtaa

SEQ ID NO: 39761 - DNA, 381 bp, Homo sapiens
gtttttgaactgttcactgctagctgaaccctaacctctgccagatactgctcttgtgttttgggggaaggctcaagaccatgattatccagcaagagctggtaccctccctgggtatgtaacaggaaagtagtcacttaaacacaggatagaacaacttacaaaggtaattaaagttcatacactactttttgcatgggagtctacaaacgtttccacaaaatgttttttcattaggacttggcataccatattacattttttcaagcagcttatacaatactttttgcaagactgtgccaactgacaggcagaatccagagtacaatttctaatatgttgcatctgaaagataattttaatatgtatatctcctatcca

SEQ ID NO: 39762 - DNA, 367 bp, Homo sapiens
  misc_feature (1)...(367): n = a,t,c or g
nnnnnnnnnnnnnnnnnnnnnnnnnnnnnnnnnnnnnnnnnnnnnnnnnnnnnnnnnnnnnnnnnnnnnnnnnnnnnnnnnnnnaatttcttaataaatgatgttggattatctaaatgcattgtctgatgttgacccatcatccttatattcctagaactaaaccagcttgctttctgtgaatatgatgttaaatttttatttgtttttgcatttacaaattttatctgacggttgccttgttagtaatatttttattctgattttggcataaggttatagtgcctattgctacaataaaacatgcaattcttaatatgtcatccttttattagcatgtcaggaatgtacaggccaaggaaaaagt

SEQ ID NO: 39763 - DNA, 315 bp, Homo sapiens
ctcacttaagcctcacaaatgagcatcatgtatggtgcatggcaattccagtccaccggctatttttgtacagcctgtgtaagaagaagttttatgttttttaatgtttgaaaaaatagttaatactattcaaagacatatgaaagtaccatgaaactcagatttcaatgtccatatatacagttttgttggacacagccatgctcagttgtttttatattatctgtgcctccttttacaccacagtggcagaacttggtggttaacaacagagactacatggccctcaatgctgaaataatttttttttttttt

SEQ ID NO: 39764 - DNA, 377 bp, Homo sapiens
gcagctcatacaggcaaagcactctgggtggtacttgaactccccagccaccataaaaggccctgtcatcagcagggagcacccatgacagaactccccaaacttcccccagtagtccttggggcagtagagcttcccatccttctcatagtaccagttggtgagggaatcctggcattctgaacaccggaagcaagagccgtgccaggtttcgttgacagtcctgtaccatatctggcttggagcaatgtggtccccacagcctggacacctccagacatcttcacccgccagcgcggacatggtcccgggagcgcggaaatgggggagaggaggcgggggacacagcagctcccctcagttccctacaactccct

SEQ ID NO: 39765 - DNA, 377 bp, Homo sapiens
  misc_feature (1)...(377): n = a,t,c or g
gggagataggacagaggatgcccatgggcagctccctagggtccaggggccattaacacacacccctagagagacctacccagcagaggtccccaaacccagtcaaagtaagtttagtataaaacctatgccaagtccttggcatgctttaccatttaatcctcacagtaacccttgcagaagggtactctcatcaccctcattctgacagatgaggccattttggtatcctcagggtaactgtaataacgatctcttaaaagtctgtttannnnnnnnnnnnnnnnnnnnnnnnnnnnnnnnnnnnnnnnnnnnnnnnnnnnnnnnnnnnnnnnnnnnnnnnnnnnnnnnnnnnnnnnnnnnnnnnnnnnnnnnnn

SEQ ID NO: 39766 - DNA, 365 bp, Homo sapiens
tttggtacctgtcccccccacacaattgttattttcttaagtgtctgagtataacacgtcccaaagaacatatgttcctgaggaagaaaaaaaaccaggctctagaactaatacacaatgaaaaataaatttaaagcagccttctggtctgacataagaatataaaaatgatatgagcaagaacagcttagtttacatacttttcagtcacagctgctgctccaaaaccacaatacctttaaaatgacattttaaggaaacagatacggcgtggctttagccatagttagatgtagctaacactgaattaaaggggcttttctttttatacacacactttatataaccctgtacactggtacaat

SEQ ID NO: 39767 - DNA, 376 bp, Homo sapiens
attgttcctttattaaatgacatctgtagaatcagatagtttcactgttgatacaattaacaacagactttcatatcaatatctttttcaaatacatacttatttttcccagatggtgctgtatgtagtcaagatcaaattttaaccaagtctttatttatcatatacttttaaagatttgggtttgtagtcagtattcaaaagcttcaatggtatatattggatacatgttgcactactattatcaaacgcaatcactggtgccccacctacttgccatcactcaaagtgttaaaagtttaaatattttctcttgtatttaaatttttggaaagtcatgtctagttagctctcctcaactcaaaaatctatgcat

SEQ ID NO: 39768 - DNA, 374 bp, Homo sapiens
gtcaaggggtctctgacacttctggaaggaaataaagacacactaagcaattgtcagagcaaccctcagttcatctggagaccagacctcggaagctaggtctttataatgttgagattgccaggggggaattaggagatccttaaatgcagaagacaggttcaatcttggcgtggtctcaacacttagcttccatttcaggccttacacagctggcacgagaggtaaagtctcatcgaatgtcagggttggaagggcgcctagagacagtcaaactagtggatggggaaactgaggtacagagaagctgagtgacttacccgaggtcactaacgtttagggggagcagttggggtagcctggctacaacctct

SEQ ID NO: 39769 - DNA, 365 bp, Homo sapiens
  misc_feature (1)...(365): n = a,t,c or g
nnnnnnnnnnnnnnnnnnnnnnnnnnnnnnnnnnnnnnnnnnnnnnnnnnnnnnnnnnnnnnnnnnnnnnnnnnnnnnnnnnnnnnnnnnnnnnnnnnnnnnnnnnnnnnnnnnnnnnnnnnnnnnnnnnnnnnnnnnnnnnnnnnnnnnnnnnnnnnnnnnnnnnnnnnnnnnnnnnnnnnnnnnnnnnnnnnnnnnnnnnnnnnnnnnnnnnnnnnnnnnnnnnnnnnnnnnnnnnnnnnnnnnnnnnnnnnnnnnnnnnnnnnnnnnnnnnnnnnnnnnnnnnnnnnnnnnnnnnnnnnnnnntaatacaattcaataaacagtagggcttgctgtgattgctggacgctgtcctcggtgct

SEQ ID NO: 39770 - DNA, 362 bp, Homo sapiens
ggcatgtctctctccaactcaccccttgtccttccctgccaggaattaagtactctcctaaagctggtgtttgtaattcccttggttcccttgaaggctgtaccatgtctgtatctctaaaaaacatgttcaattgtgtgtgaatctgaacttatataatggaactgccttgtgtgaattccacagttggaatcacacggtcagggctctatgtctagctttataactctgtgatgtcacttgggaaagctactttctatacctcatctgaataataagcaaaaggagacagcctacttcattagggatgctgtgaggcgccaatgagttactatcttaaaaagcacctagacagtgcctgc

SEQ ID NO: 39771 - DNA, 292 bp, Homo sapiens
gaagagcagcgccaagttttcctgagataagtattctttcttgaaagaactgggcctgctggctgtgctcctttttgctgcctctgtagtcacttttagtgtcaaattcttgctttgctcacaccgttagactggctttctgtctctgtacattttcttcataacccagagcactactctgagggccctgacacaagggccctgacacaacagccttgtgaagagttaaaaataaactggaaggtaaacagggcaaaagaaagatttcttttcttttctttttttttttttt

SEQ ID NO: 39772 - DNA, 372 bp, Homo sapiens
tggattgatgcctgcatcaatatttctcatcattattgtaatatttctgatcatgttggtgatccatcaaattctctttgggtcagagttaaagccagggttggacaaaaagaatctgcctatgcaaagtcagaagaatttgctgtatgccgagatggaaaaattggaccacctaaactggatatcagaaaggaggagaagcaaatcatgattgacatatttcacccttcagtttttgtaaatggagacgagcaggaagtcgattatgatcccgaaactacctgttacattagggtgtacaatgtgtatgtgagaatgaaccggaagtgagatccagtataaaatactcacgcagaagaaagaaagaaagaa

SEQ ID NO: 39773 - DNA, 374 bp, Homo sapiens
attttcctgtcatcttaaggtgaactgggcactcaaagacaatagggcgcagtataaaaagacaggtacatagtagtctgagccatctaaaattttctccagttataaatacaggaggttgatttgcttactaataacagaagagcagctttttatgcttctgggaaattcagtctctaccagtgactatcaaatgtgcaaaaaggcactgaacatactttgaaaaagcatgttcaataagaccactgtagggtagaatatgtttaaaagaacaaaatcaagaagtatttcttgtgatttttgaaagtaggttcaggaatcaatttccaaaatactacaggaattctagtcatgtctaaagcatctcagactct

SEQ ID NO: 39774 - DNA, 374 bp, Homo sapiens
gggagagccggtgctctggagtctgggtgaggggtgaaactctgcttgtttctgagcccacaaagccactgtctgtctctggggacgccatccaggtctcctccaggtggggcccaccgcctcggtgcaaaggcttctgtggaaggcgctcagagatgccgcttccctccaggctggtcatactactttggtgggatgctgcggacttggtgcctggagggtggggtggcacgccagggcctggaggggctgcctcagccttgcccaggcctgacatgtgcccgtctctagccagggatgcctggaaacctggtggcttcatagataccatcttctccgtggcctcctccaggggagccccatgacttttctca

SEQ ID NO: 39775 - DNA, 372 bp, Homo sapiens
  misc_feature (1)...(372): n = a,t,c or g
aaaaaaaggaataaaaaattagaaaaagaaacaatgaatgaaatgccatgaaaaggctgttcaccaaggcatttttataacccaaatatctgtaactacataactggttgaaaacactatgggccatccatacagccagtaaaaggtgataagagatagggaagagggagcgaacaacctctatgtaccactattggtataatacaatgatcaatatatactcttagtgataatgacaaggggaagaatagtacgtacagaaagctagcttttgtgttacaaaaaagaagtgggattgcaagtataccgtatacccatgtgtgtgccatataaatgggatcatataatatctagcttttgngnctggcttct

SEQ ID NO: 39776 - DNA, 379 bp, Homo sapiens
aaaaaattgtttataggagaaaatgaaatgtgaacctgatttcttagcagagcacagctctatgagaatccggcaaatttttcttttccatcaaaaaccctaagcttctcacaatttaaaaactaaagtttcagaagtaccctggagattcgaagcaaattatatataaattgtctaccctttattgcccaataatattgtaacatatgtcagtgtttttagggatttatgaaatttgtgttttgttacagccctcatactgcagactgtctttcctggtttctgtcaattaacaaaaatgtcactgtgtgtcacttagcacctcaaaaatgttcaggagtgccctgtaacttttacggctttctccccattaatgctg

SEQ ID NO: 39777 - DNA, 378 bp, Homo sapiens
  misc_feature (1)...(378): n = a,t,c or g
gtggaacatatgctttcactgtttgtgcaatatgcatttatttcttatatgaatgctttaaagtcatttgaggttagatcttttaattcctattttctgcttcattggtcactttttttttattgtagtataagatgttagattctgtaatcttcacattcattttagcaggtactgagtgatgctgtatatacatnnnnnnnntgttttgatttttanaccnccacatggnatgcttgactatttcntatttcanatgtntgctaatncagacnnatgctacancatgagagnggtataaacananttgntancnantgtganattatagactttaagagttantcattntgtgnanncttaatttnanataagcta

SEQ ID NO: 39778 - DNA, 385 bp, Homo sapiens
  misc_feature (1)...(385): n = a,t,c or g
tatatatacacacgtatatatacatacatatatacacgtatgtatacatatacacgtgtatatatatacgtgtgtatatatacgtgtgtatgtatacgtgtgtatatatatatgtggtatcactttacctgtctgagaggctaaaattaaggtctcagactggcaacttcattcatgtgttcatcttatttttaaatttatttgtttttaagctnnnnnnnnnnnnnnnnnnnnnnnnnnnnnnnnnnnnnnnnnnnnnnnnnnnnnnnnnnnnnnnnnnnnnnnnnnnnnnnnnnnnnnnnnnnnnnnnnnnnnnnnnnnnnnnnnnnnnnnnnnnnnnnnnnnnnnnnnnnagctaattttttggggtttttgtagtgatggg

SEQ ID NO: 39779 - DNA, 389 bp, Homo sapiens
ctacaggaagtcgacttggattcaccttctgtacatatatctctatatacttttgaagattatttctatataaatagagcaccaaatcatggacaaagtcaaatcgatcacacacaatgataagtggtagctgatctgttagttttgcttccttaagaaaattcttgactcgctcaggatcgtagcagttgctttctctacagattctttctacttctttgatttgcccagtcttgcaagctgcctgaatatatttaaagtgcacatctgggtcctggctaaagttaacaatggatcccagaaaataaaagagaccttcaaaactcttgaaagattcaaaaagttcaatcagagactgagttgacagttgttcatgatatttagaagcg

SEQ ID NO: 39780 - DNA, 371 bp, Homo sapiens
taagtattttacctttttgtggctattaccacattatattaggtcagccatgtggaggacacagagctctctgagtacctatatgaacaaaattttttcaagtttctgatagaaatgttcaaaatatcccatttctttctaattaatgatgtttaaacatacattaggtaattaaaagcaaatgtaatttccctaaaactgttaaaaacttgtcataaaaataaaaatttcatgaaaaacataggtggggtggtgattagaaggtcaggataaggggacattctggaaaattctgtttcttgacctaactgctgattatatgggttctcagattgtaaaaatttatcaagctgtatacatacaatgtcata

SEQ ID NO: 39781 - DNA, 373 bp, Homo sapiens
  misc_feature (1)...(373): n = a,t,c or g
ggaatatccatcttccttttttatgattgtgctccatctcctaaaatcctgcctcttaagccattcttcaagtggtttaaaccaataacaatagcagtagctatcatttattgagtacctaagaactgccaggctctgcacccaataccttattacattgtccattattatcctcactttacaaatgagggccctgaaattcaagaaggttaaataactcatgcaaagtcaaattattcttagcacgataaatacactctctttatgcagcccataccaaaaatctttttttgcaccctggagcctgaatgagctatnttttcattctattatcccaaacaatttatcccctaaaacagtaactccataaagg

SEQ ID NO: 39782 - DNA, 375 bp, Homo sapiens
  misc_feature (1)...(375): n = a,t,c or g
ggaatatcttgtttaaagtaagacacaattttcctgccaccataaaggggaaagcacaaagcagggtggcctctttgcatcttgaaggcaacccatgtgacagttggacatgctgctacaatctatttagtgggttaaagtaaggcttttccatgacatgattgcctatgaagaaaattctgagaaataaacctccaaaatcctcttagaactaataagcaagtgtagtaaggtcaaaggatataagaccaacacacaataatcaattccatttctatatactaacaatgaacaggaaaacaaatattaaaaactcagtactatttacaatcactccaaagataatgaaatacttaggtacaggattgnatgatg

SEQ ID NO: 39783 - DNA, 399 bp, Homo sapiens
tgttcatatggggcaatgtggacacatgtcaatgtaatggagaaaagggaaaaaaaggaaacttgagatagattaactgaatactttttcaaagaagaagtgatggcttggttgtggagaaggcagaaattataggttaaattagtattctttaacaaactaccaataaatttcatttagccatgctgacctcctgtccatcatcaactgggttaaacaagactgatcaacaccgagtgcttatgtcacaaaatgaagcaacagtcaatattgtctcaagccaaggaactttctgaaatgcattcgatttaaataaataacccgattacgagcctgaggaagtttatgaatgatgcacaggaaatggagccaaatcttttagagatgatatttgagtgc

SEQ ID NO: 39784 - DNA, 385 bp, Homo sapiens
  misc_feature (1)...(385): n = a,t,c or g
cgctgaagagatggctgacataaatctctgaattctacactttactcattaatgcaccaattagaaatggtaactagtcaccatgagtttaccgttcccttgtaataaaagctttatttatttatttttggcaaaaggaaaatgttgttttctcttgcgttcacaaaacttagggtataaacctagaatctaagtttaaatatcatgcacaaataaataggtcaaaaggaaaaagaaaatttataaaaaagaataaatttaaatatggaaaccacagacacaaattatactaagttgggttaaaataagtgaggggataagacaaagggctctttctctggcctttgaagatgntcaatttaaaaaaccaagcaaataaataaat

SEQ ID NO: 39785 - DNA, 399 bp, Homo sapiens
  misc_feature (1)...(399): n = a,t,c or g
cttctttcaatttttctcctccttcactggctctttctctctggctcttctgctgcatcctctgcccctgcttctgccttaccactagcctggcctcagccctggacttcgttttctccaggtggtcacatccattggcttgaaaggccatcttcgtgtttgaaggctccttaatttatattcccgcccaatccactcccctcggctccagcctcatttatccaactgccatttcaaggtctttgtatggatagtgacaggcagctcgaacagaacatgttcaaaacagaacttctgatttgctccctcctccttcctcctcccgcatctgntcctccaccattttcacccagttagctaatagcagtaccattatcactggtggcttggggggacttc

SEQ ID NO: 39786 - DNA, 385 bp, Homo sapiens
  misc_feature (1)...(385): n = a,t,c or g
caggacagggaaatctatctatagagacaaagtagattagtggttgcttagggctggagtagggaaggtgagaatgcggtgatgggagagaagggagtgagagctaaagtgtacaggtttttgagatgaaaaagttttaaaattagtagtgatagctgcacatcnnnnnnnnnnnnnnnnnnnnnnnnnnnnnnnnnnnnnnnnnnnnnnnnnnnnnnnnnnnnnnnnatctcagtaaaactgttaaacaaaataaatgaataaagacttccaaaaacaattaaaaaaatcagaaatccaaatgtcaatcaactcaaaaatagaaaaatattgtataattatgtaatgcatcactgaaaatgaatcacagttaaatatatcaaaa

SEQ ID NO: 39787 - DNA, 379 bp, Homo sapiens
  misc_feature (1)...(379): n = a,t,c or g
attcatcataaacttctttttgataaatggattctaacagagacaaagaacttagggcttaccatcaaaacctttgaagttctgtctggttctgtatgtgaaggctctcatggtgttatcattgcactcttttaccaatcccactgcttctgcccctagtaacattctaatcttggaggcaccaacaagatataagttctgattttctagtgtttcttgttcatatttatttaacaatggtctaaacaacaactgggcaccttcaaaaacaaaagataagcacaatcttagacaaacatanaagtttcaaaactaaaaactttctaaataaatataatgnttctagtctggtagaagaaaaagaaattatattagcaat

SEQ ID NO: 39788 - DNA, 394 bp, Homo sapiens
acagaggggccctgggtaaagcattatctacatccactttcctggcgtctccctaaatccagacatcacacagggctgcacaaaaagtcagcctcaactgcctgagactgacagccacaaccacccagccccaccagcctgtgatgaccagtgatgccgcaagcagacacccgtgttcccaggagccattccccaagactggagagacatcacctgccaggccgctgcccctcagcctccagctcccgtcggtctgcgtcagcatttgtctgaacatcgcacctccatcatctacaggggaaattgatgtcgatggcatgggagaggaatgtaactacagcctattctaaaagcacgcatttattttattttatttcagaaatgtatgcattat

SEQ ID NO: 39789 - DNA, 320 bp, Homo sapiens
ggtttacagaaattgctggtagctaactttgctttgaagtcttaaaagttcccaaacagactccaaaatgaaggcttgaaactggaacagtggggcctctggaacttaggagagattccaagtgcatgttatgggacagagtggcttgttaagaaagtatagagacatctgtctttccaccatctgactcagtaaaactgtctctttcccagaggggcctttcccagccacccccagccaaagtagcctttcccaaacggtcccgctacgctgctgctttctccacagcactcatcaatcagtcgacgcggccgcgaatt

SEQ ID NO: 39790 - DNA, 316 bp, Homo sapiens
  misc_feature (1)...(316): n = a,t,c or g
ctacataggcacattgtttttctcatttatctaaagatggaaccgtaacacttaacataccttgtttatggggcagatttgcttacatttttgagctttggtaattagccagtcgagctagcctttcccttgtgaatttgcagtacacagttgtgtgtgtgttttatgtgtgtatgctgccatcccatctgaatttggctccttcctcagtggcctaattaattgcaactgttggaaagtgnttatcngatttggntcattgggantntgatgnggaacacaaaatacagctgtcaatgctttaggcgcctaccca

SEQ ID NO: 39791 - DNA, 326 bp, Homo sapiens
ttgtttaacaaactttttttccccttttgccctccctgagaggactaatgtatgcaggatcccagggtttgcatccagaggaggctttgcgcaaagccacgaatcaactgtttgtgtgcctggttctagtggaaatttgattgaggtggttgaatggaaaacagagaaggtattgtaattaaaagcctcaggagggctatggcatcttgataacgtggtcattcccagtgaaatcccaaactagatagtgaaacttggcgtcttgcttttagtctgtttagaaaggtgaattcacagttcaacgctttattaagcaaagcagcagt

SEQ ID NO: 39792 - DNA, 314 bp, Homo sapiens
tacagaatttcagagaagtactgcttaggtgtaggacattctttatctcataggactcactagatgcatgtttacttaatatctttatgtagagaatggaagcctagtgagaaagctgttggaaatattcttattttctataaggactgtcgaagggcgatttgatagtcctataggcaagtatgttaaactagtaaaaggaaatctcagaataaatgacttagaaaagaaaatcatttataattactaatagtttttatgtattttcactaagaattctaaggtttttagttattctgttaaactctgctttg

SEQ ID NO: 39793 - DNA, 315 bp, Homo sapiens
  misc_feature (1)...(315): n = a,t,c or g
tggaacctcacttggcagttcttcctgcccactttcctgtatctttaacctatcccccacttttagctccttcccatcatcatttaaattactcaaacttcttctgttttaaaaacctctccctaaactcagggagaggtcttctgcacacacattgagccatctgctcttcctggtgccttctctacagcagcctgagccatgtctctaatctatgaatctcatcatgttactcccccatttacatcacttctccttgcctcagggattaagtccaaactccttaacagcccctgctntgccctgccttgcaag

SEQ ID NO: 39794 - DNA, 312 bp, Homo sapiens
acaggattggtcagggtcttcagtgaaagggaattaggagtgttgggatggaactgacagagaaattaatggaaactggtaaagacatctggtttaggtcagcagagcaacacaggaaaaaggagagccttatcagttgtggaaaggaaggacagttttttagttaggctagctagggagatggacttcttgcagaggtggctactgatctgttggccttcatgagttgggtgttattagtagatagctgcttttgaaatattacttgttatatggaacttaaaagtaaacacaacacttgttctttgatct

SEQ ID NO: 39795 - DNA, 315 bp, Homo sapiens
  misc_feature (1)...(315): n = a,t,c or g
ctcagtagagcatagaatgccgaacataaagattgagtaatgtgcgttgtacagcagcaactgcaaagtgaattccacgtttnnnnnnnnnnnnnnnnnnnnnnnnnnnnnnnnnnnnnnnnnnnnnnnnnnnnnnnnnnnnnnnnnnnnctnnnnnnnnnnnnnnnnnnnnnnnnnnnnnnnnnnnnnnnnnnnnnnnnnnnnnnnnnnnnnnnnnnnnnnnnnnnnnnnnnnnnnnnnnnnnnnnnnnnnnnnnnnnnnnnnnnnnnnnnnnnnnnnnnnnnnnnnnnnnnnnnnnnnnnnnnnnnnnnnnnn

SEQ ID NO: 39796 - DNA, 314 bp, Homo sapiens
gtcgagtggcaccctagaagacgctctgtgccttcggaggtctttctgcctgcctgtcctcatgcctctcctcctcttgctgctcctgctgccaagccccttacacccccaccccatctgtgaggtctccaaagtggccagccacctagaagtgaactgtgacaagaggaatctgacagcgctgcctccagacctgccgaaagacacaaccatcctccacctgagtgagaacctcctgtacaccttctccctggcaaccctgatgccttacactcgcctcactcagctgaacctagataggtgcgagctcacca

SEQ ID NO: 39797 - DNA, 323 bp, Homo sapiens
  misc_feature (1)...(323): n = a,t,c or g
cttgctcagagcccctttagcggagagggtccggtcccagctctggcagcagctgctcacgtagtagcagtcaggggaggtgggggtggggacggtaaggtgtccgagcagctccaacaaggagaggccgtcactctggccgggataacaattcagatatccagcgtgcacctgaatagtagaaatccagcatccttttctaaaaacaaaacaatagcaaaattcagatctgagctactctgtagcatttctttttttagagacagagtctcgctnnnnnnnnnnnnnnnnnnnnnnnnnnnnnnnnnnnnnnnnnnnnnnnn

SEQ ID NO: 39798 - DNA, 313 bp, Homo sapiens
  misc_feature (1)...(313): n = a,t,c or g
gttctttctgcagtgttatgtgactctaatttcctgggagtaactgagaatgaagctgcatggtgctgtagtattatgtcatccagaccccagacatttctagaccaactttatgattttctctacagctttaccacctttattattatttacttcatactttttttgtaattaaatttagtttacaaaacatccttgtcnnnnnnnnnnnnnnnnnnnnnnnnnnnnnnnnnnnnnnnnnnnnnnnnnnnnnnnnnnnnnnnnnnnnnnnnnnnnnnactgaagacaaaatatttttgtcttatgcaatatt

SEQ ID NO: 39799 - DNA, 324 bp, Homo sapiens
cgtccatcttcctctgccgccgtcggggcttctgaatgagccccaccaggaaggtgcagccgctctccccatcctcctcgtcctcatcctcctcctccagcttgatcaggtactgagggttcatccagaatgtgttcgggtagttcctgcaacctcccgcggtggagccccgcctccagttcccatccattttggtgagtttccacttcttgtaggtatcgctggtgagagtgtctggggtcaggttacagatctccaggcgggaatagtgcctcaggaagtcactgaaagacatccagaattctccatcttcatgccgtctgg

SEQ ID NO: 39800 - DNA, 314 bp, Homo sapiens
  misc_feature (1)...(314): n = a,t,c or g
caagagttgaggcaggggctgggagccaccaagttcagggtattctccacagacctcttttgttatcctgaaggcaaggcttgggggagagggtgtgacctgtgacataagcccctttgctaacatgtggctaggtgtcttgttggcttgttgcattaacctttatcataacatancaatagcctgacacanaanactgcacctgatagttgncttancacatctcaaaattaaatgtttatgaatagactactttttcaagacaatgctatttcctganacgtagtactttttctgntaactccattctttga

SEQ ID NO: 39801 - DNA, 325 bp, Homo sapiens
aaataaatgatgatatatacatggaatagattatgaagttattaaaaccatgttccagaatatttaatactcatggtatataagtaaaaaatgcaaattataagacagtacgaagcaatgtaatcccaatttaattttttaaactccaagtatagaaaactagactaaaatacaaaatacatgaatgataattgtatcttagaattttataatgggtgagcgccagctttctagttcatagacagcatcttctcactgtatcttcacatggtggaaggggtgaataagcgcccttgagcctcttttataagggcacctcctaata

SEQ ID NO: 39802 - DNA, 315 bp, Homo sapiens
  misc_feature (1)...(315): n = a,t,c or g
nnnnnnnnnnnnnnnnnnnnnnnnnnnnnnnnnnnnnnnnnnnnnnnnnnnnnnnnnnnnnnnnnnnnnnnnnnnnnnnnnnnnnnnnnnnnnnnnnnnnnnnnnnnnnnnnnnnnnnnnnnnnnnnnnnnnnnnnnnnnnnnnnnnnnnnnnnnnnnnnnnnnnnnnnnnnnnnnnnnnnnnnnnnnnnnnnnnnnnnnnnnnnnnnnnnnnnnnnnnnnnnnnnnnnnnnatggtatatttaaatgtaagttattatgatgttgatggtgtcagtgataatttgtttcaaggaacaattttgagtgtctttgg

SEQ ID NO: 39803 - DNA, 327 bp, Homo sapiens
  misc_feature (1)...(327): n = a,t,c or g
gccacacaaagacccactatcctttagctttttacaggataaatttaaactgtaagttagaaacacaaaaaaataatcacaagtggctctaacattcaaacgaagtaaacgaattgtgtaggagatatttgatcagggctgcctgccctgcctccacgctagagtgaaacttggatagtgggtctctggggtgctttcacaactggaagacaacattgggtcactgttgacttggatctgagtctgtcgtcatcttaacgtantttgaaggaaagagaccagtcaccccgttgatctctccttgccaccaatcaggatcatctttgt

SEQ ID NO: 39804 - DNA, 327 bp, Homo sapiens
gctccatccatgacttcccaggctttgaccccaaccaggatgccgaggctctgtacactgccatgaagggctttggcagtgacaaggaggccatactggacataatcacctcacggagcaacaggcagaggcaggaggtctgccagagctacaagtccctctacggcaaggacctcattgctgatttaaagtatgaattgacgggcaagtttgaacggttgattgtgggcctgatgaggccacctgcctattgtgatgccaaagaaattaaagatgccatctcgggcattggcactgatgagaagtgcctcattgagatcttggctt

SEQ ID NO: 39805 - DNA, 318 bp, Homo sapiens
ataatttttcatgtttcctttgaaggaatctccttaactacaaatcagttcttatcaacaaatatttataaaccaaatatgagttgcttgattatgtttcaaatattaatcatgttctgtgtagaactcttggaatataatatacagcagaagcagtctcaaatgctggagatgcaagtggagctcagcagtatgaaagacagagcaacggaactgcaggagcagctgagttctgagaaaatggtggttgctgaactgaagagtgagcttgcacaaactaaattggaactagaaacaacactcaaggcacagcataaa

SEQ ID NO: 39806 - DNA, 322 bp, Homo sapiens
  misc_feature (1)...(322): n = a,t,c or g
nnnnnnnnnnnnnnnnnnnnnnnnnnnnnnnnnnnnnnnnnnnnnnnnnnnnnnnnnnnnnnnnnnnnnnnnnnnnnnnnnnnnnnnnnnnnnnnnnnnnnnnnnnnnnnnnnnnnnnnnnnnnnggagngagacaagagtntnantccatnacccaaagctnaagtgcagnggtgcggtntnggttnactntaacnnnnnnnnnnnnnnnnnnnnnnnnnnnnnnnnnnnnnnnnnnnnnnnnnnnnnnnnnnnnnnnnnnnnnnnnnnnnnnnnnnnnnnnnnnnnnnnnnncagtaaaaatggggttttgccacattgg

SEQ ID NO: 39807 - DNA, 321 bp, Homo sapiens
ggcatggtgcctttttattaactggctttaaaacccatctcggagtagtaactacccaaatgctgagaatattgggacccctttctcctaccctcatggtttggaaacgtgtggactggttgactctcaggccctaggtgcctgcctagtctccctgcttgctagaaagtgacaaagcacatgctaccaaaaagattctgcacagatgccagaatcatgtcagaacacaaggtcacatacagtactgtcttccccatttatatcagcccagaggacaatctactctcttacctttggaagacaaaatagaggctaactttt

SEQ ID NO: 39808 - DNA, 324 bp, Homo sapiens
  misc_feature (1)...(324): n = a,t,c or g
aaacattttaattgtttaaaatgtactctttgtctatttcttgctattttttctttttgatattctggaatatatccacagacctgtgttggttttattttgtttaattcttgagagggaaacattctgttcaggtctgaaatttgcttttgggtcccttgttgtatacccgaatattgttagaatcagctcttagttcttaagctagatgcagggctgaaccacattgacatctgggattagttgagtggggctggaggggtaggccttaggccctctcaggggagcttgagctctgtgnactttctttgcaagttggtgaaa

SEQ ID NO: 39809 - DNA, 320 bp, Homo sapiens
ctgccttctttcttctttagaatataacctggttttcagtaaagtaccaatacatggattaaacatattctctctcacatggttaacattctggatgttccagaaaatcatattcgatgcattcttccagttgttttaagatccttgggctatctgtgacaggaaagtccaagaatggagttcctgggctatcagcaggcagctgtctctgggtcttaaatgcaccatttagagtcatgaagaatggcatcaactgcctgatgctggaaacagaatgttggcgcagaagcgggaattcactcttcatggtgatctcatca

SEQ ID NO: 39810 - DNA, 326 bp, Homo sapiens
gtgacgccgagggcctgagtgctccagtagccaccgcatctggagaaccagcggttaccatggaggggatcagtatatacacttcagataactacaccgaggaaatgggctcaggggactatgactccatgaaggaaccctgtttccgtgaagaaaatgctaatttcaataaaatcttcctgcccaccatctactccatcatcttcttaactggcattgtgggcaatggattggtcatcctggtcatgggttaccagaagaaactgagaagcatgacggacaagtacaggctgcacctgtcagtggccgacctcctctttgtcatc

SEQ ID NO: 39811 - DNA, 328 bp, Homo sapiens
gtacttattctggtatcagaactcacacttcacttattacagaaggaaaaagaaatttgtttcctaaacttgctttgccccattaccttgtaatctagaccctttggtaaaatttgcatttttgataactacagtaatgttcattttacttgcctgcatctgggctctacttagagaatatcacataatattacataatctgacaattggtaccagtttaaatccatcaacgtcaactacaagtaagccctctactctactttaaaaatctcttcccatttcttcagtcaacagtttttctgtttttcacaatgcctatgtcagatag

SEQ ID NO: 39812 - DNA, 327 bp, Homo sapiens
catttaatgagtttcctttggtgttatacacagaatgtcctccactctaaggttatataagtatttttaaactatcagaaaatgagtcacctgtgagagggtagggagagttaactcaaaaatcccactcacaataacatcccttcaaaaaatctagtaataaacttaagaaataagtaagagtcacatgaagagaactataaaactttaccaatggaaacaaaggcttaaaaaaaatgatatgatatattcctagatttgaaaagtttaacattgaaatatttcaattagctccaatttaatacattattttaaaataaaaacacc

SEQ ID NO: 39813 - DNA, 327 bp, Homo sapiens
gcttactggatgtctaacacttttgcattaccagaagatagagaatgcttggagggacacttcattatgaaacacttgcttaattcctatatatagcataagaaaacatctgtgtgattgtctgaaatgttccaggtcttcacaggcactggatctgtcatagtatctagacatacacgtagaagactcggaggagatggtagggagtcacttgccttatatggatttgctgatagttgtgtcttcagagaaagaaatgaagtcttcaggatactataaccctccttaaaaaaaaaatccatgctccaaaatttattctgcctctgg

SEQ ID NO: 39814 - DNA, 334 bp, Homo sapiens
ggaatattatttttaaactacagaaaatcaaagataaagaagaaaaaccttgaaagaatccagaagaaaaatatatatatctttcctagcaaagaacaaaaaattatatctgacttctcccttagtactcatgcaagaaaagagtggagtgacatgtttacagtgttgagagaaatagaacaccaaactagaattctgtaccctgtaaaaatatccttcaaaagtggaagagaaataaaaactttctcaaacaaaaaattgaggaaatttgtcgccagtagacttgccttgcaagaaatgctaaaagaagtctttcagagagaaggaaaataac

SEQ ID NO: 39815 - DNA, 323 bp, Homo sapiens
gttttccaaatatttgtcaagatatgcaatttacagctttcacggcaatgttcatttcatatattctataactaggtatgcttggattcttgattaagccattaaatgtccactttaatagcctatgttaggtggataaattgatactcttcatttgagaggattagcttttatatttcctattttcaatttaaattcacaaattcaacattcaattaactatgatctcagcccttagaatccctagtgtatagaggtttctaaatggtctaacatgcaatgtcttaactaaatccagattctaagtctcactttgcatatcc

SEQ ID NO: 39816 - DNA, 325 bp, Homo sapiens
  misc_feature (1)...(325): n = a,t,c or g
ctgccctccaggtaaccactagttttctcaaatctgtcttccaatttactaattctctcttttgttgtaactaaacttctgtttaacttgtctgctgaggnnnnnnnnnnnnnnnnnnnnnnnnnnnnnnnnnnnnnnnnnnnnnnnnnnnnnnnnnnnnnnnnnnnnnnnnnncgataaagactgtctcaaaaaaaaaaaaanaattnaccntnnntntttaaanncagcctgntttactctttttnnnaactngaatnttggcctaanaagctnggntatatgnnannggccnatttacccaantnaagggnnancttttttt

SEQ ID NO: 39817 - DNA, 368 bp, Homo sapiens
  misc_feature (1)...(368): n = a,t,c or g
aactgctactgaaaaattttttaaatgcctaaatgttcaactctcacctcatcaatatgttaacaataaaaactttaagctatacttcattccaggagcaataaaatttaaaggctctaactttatgtattaatatattttttaaaagagaagtaacattcttttaaagtaacattctaaattacttgagcagggctttaatcccattgataaactgattaagttgcaataactgcaaatacactaagggatctagcaactaatgcgtcagcaaaacaataaaataaactgcacacacatttatcatctatatacacaaacatgtaatatttgctatctaattatcagatgtatacangacccttccc

SEQ ID NO: 39818 - DNA, 358 bp, Homo sapiens
  misc_feature (1)...(358): n = a,t,c or g
cccagacttgtggtccaaactgatagtggaaattgcataaggcaaacgaggattttgcatattttctgattttctgacttctgaagcagtgcaaaaatccatataataatttggttctgttttgactgtttgcatctacattggttcactgaagtggtagaaggtggagaattaagactcatttttcagttgacaaaattgaattttagaactaaaagaaaaaaatacttttctttcaaggctcacattgttatacatgtaataatacatgtgaggataacaaaatgctttatgaatttatgtggtatgaactcagaatactggttatatagntttagtatggttataatttggtgct

SEQ ID NO: 39819 - DNA, 356 bp, Homo sapiens
  misc_feature (1)...(356): n = a,t,c or g
nnnnnnnnnnnnnnnnnnnnnnnnnnnnnnnnnnnnnnnnnnnnnnnnnnnnnnnnnnnnnnnnnnnnnnnnnnnnnnnnnnnnnnnnnnnnnnnnnnnnnnnnnnnnnnnnnnnnnnnnnnnnnnnnnnnnnnnnnnnnnnnnnnnnnnnnnnnnnnnnnnnnnnnnnnnnnnnnnnnnnnnnnnnnnnnnnnnnnnnnnnnnnnnnnnnnnnnnnnnnnnnnnnnnnnnnnnnnnnnnnnnnnnnnnnnnnnnnnnnnnnnnnnnnnnnnnnnnnnnnnnnttnttaataaaannacctctgaatgataagtaaacagccaaccncccagganaaaaangantaanggattttt

SEQ ID NO: 39820 - DNA, 358 bp, Homo sapiens
  misc_feature (1)...(358): n = a,t,c or g
cttttgcatgtggatatccagttgtccaagtaccttttgttgaaaagactattctatcctcatttaattttcttggcacctttgttgaaaatcagttgacaataaatgtgagtgtttatttctggactctcaattctgnnnnnnnnnnnnnnnnnnnnnnnnnnnnnnnnnnnnnnnncagacagagttagactctgtctcaaaagaaaatgaacaagaaaaatctgtgcaacttgtgtangnaatttcatttatacagtcttcagtcatgggctgtctacnaactttcatnaataaacaaatgagcttgcccttnagggttgccttctggggccaaatgtngnctntnagacaagcc

SEQ ID NO: 39821 - DNA, 368 bp, Homo sapiens
  misc_feature (1)...(368): n = a,t,c or g
tgtgaatccaattttagttttaccaaagaaattgtaccataatacactccttgccctcaactgcatgcccattagaaatgagcatgaacactttctggaattaacaatacatcacatattcatgtgtcgaaagtattgccatgtgtagaaagtgtttacaagtcaaatgggataacagagtaaaccaggcacatcaacttgtatgaatgtgatacagtagcactgttcactgtgtaagatgctgcatttttctttaaacttttggaatgatttgtactcccaacaatccacactagagagagttagccccattacaangttcagagggnttgagttctttttnagtggtaatctanaacactnttttt

SEQ ID NO: 39822 - DNA, 72 bp, Homo sapiens
gtttggttctttcttttcttatttatttgcctaactagtgttccatctagtttattaatttttttttttttt

SEQ ID NO: 39823 - DNA, 376 bp, Homo sapiens
agcagttacatttacttcagaacaggaacaagaaaagccagatgctgtggaaatatatctccaatgtgctgaaaaaaaataatgccaacattaaattcaatatacggaaacaaaatcttttaagaataacatgagagtgtgatatcagtgaaaatagcaaagtaagaacttccaaaaatcccttctttcccaaaagcaatttttaaatgccaaaaattggccaaatcaacttttttttttagaaatctagaaatttaaccaaaggcttgccacaatctggagaacatttcttaaagaaaaatggttaaatatcctaagaacataaattttgtaatattttaacctgccctattccatccccccacccccaaccctt

SEQ ID NO: 39824 - DNA, 336 bp, Homo sapiens
  misc_feature (1)...(336): n = a,t,c or g
gatattcctgaataagtccatctcaaaagtttgggattttcctcctcttaactttcttaatatttggacatgcagttgtcgccaaacttgggtattcatggaatttctagtaaatgaaatacctatactttgatactgaagactgccaaatacataggaattttctttcttaaaaaacagtaatgaagactatatctcctttcccagcactgaatgttttactagcactgggtgctcaccatgcaactgaagaaaatgtggaaactcaaaaggtcaggacagacttccagccttgcactgatggtactggcttcattttaaaaattacccntattt

SEQ ID NO: 39825 - DNA, 220 bp, Homo sapiens
taaaagagttactgttgtcagtccagtttacaaacagctctagaaaactgttttgtactgaaaagatggaaatgatttcttaaatgttgttgtcaaccctcaggactggtacttttcagtaaaagcaattagattctcactgtttgttatgctgttaatggtgacagagtctttaaaaacagagaacctacaactggctttagaagtttaaggtgtagcc

SEQ ID NO: 39826 - DNA, 345 bp, Homo sapiens
gggattccagttaaactccatgccagatactccgggtcctcatgccttatcttgagcaaattcccactctcctgggatgagccctgcatgagtaaaaaacatgaggttcgttgccccataaaaccaaccgtataaacgcttgctatgtctgtgaccgtgtggacacaagtgaatgagcaaaggtgaaaatgggggtataataatattactgtaggttctactttatggacacaactctagagtggtgaggagacctgcacacaattcctggcccacataccctggctgtgcaaggcttagcaagtcaatgcaccccgcacctcaggggccccatgtgaacaatga

SEQ ID NO: 39827 - DNA, 338 bp, Homo sapiens
  misc_feature (1)...(338): n = a,t,c or g
cagagcttgccctgagcctcagctccacgtccgatgatgaacctccctcctctgtcagtcatggagcaaaagcatctactacaagccttagtgggtctgatagtgagaccgaggggaaacaacacagctctgactcttttgacgatgcattcaaagcagactctcttgtggaaggaacttcttctcgctatttcatgtataatagcgtctcccagaagcttatggccaagatgggcttcagggaaggtgaaggattgggtaaatacagccagggtcggaaggacatcggttgaggcttcagtcanaaaggtnnannagncttgggtctgaactccggg

SEQ ID NO: 39828 - DNA, 346 bp, Homo sapiens
tccaaaatagagaatgcactctttgttagtgttcaaacagagtgctgtaaaggagtttcctgaattataaggagggttggactagtttattaaagtccctcaaactccacacctataatttgaagttgcttattttaaaatgaattcattggcaatgtttagtgtttggttcatgattcctttgttttcaatattaagaaaaaatcttaatactattctctctgtctctttttttatttttgtatagaaaaagccctcttttgtttttttaggtatattgaggtgaaagttgtagagtgacagattactccaccacccctttcagtgagactgacagcaccttggc

SEQ ID NO: 39829 - DNA, 404 bp, Homo sapiens
  misc_feature (1)...(404): n = a,t,c or g
tttgaaggccnnnnnnnnnnnnnnnnnnnnnnnnnnnnnnnnnnnnnnnnnnnnnnnnnnnnnnnnnnntctcgaggatccgaattacnnnnnnnnnnnnnnnnnnnnnnnnnnnnnnnnnnnnnnnnnnnnnnnnnnnnnnnnnnnnnnnnnnnnnnnnnnnnnnnnnnnnnnnnnnnnnnnnnnnnnnnnnnnnnnnnnnnnnnnnnnnnnnnnnnnnnnnnnnnnnnnnnnnnnnnnnnnnnnnnnnnnnnnnnnnnnnnnnnnnnnnnnnnnnnnnnnnnnnnnnnnnnnnnnnnnnnnnnnnnnnnnnnnnnnnnnnnnnnnnnnnnnnnnnnnnnnnnnnnnnnnnnnangtttgnnnnnaatgnnttgaaccnccaannnccanctanacngaggta

SEQ ID NO: 39830 - DNA, 325 bp, Homo sapiens
gttgtaagcttttttaagtataataggtcgcaggcagctttggtagcctatatctagaactattttttttctttaagagacagagtctacaacatttcccaggctagacttgagctcctgggctaaagtactcttcccacctcagccttttgtgtagctggcactacaggtgtgtcactgtgcccagctctggaatttttaaactccaaataaatatctatagtataattttcatatagccctatttaatgtttctatagagagaaaaagggatatagaattgtgccatgtaacctttttatatttttaagttacttttataagc

SEQ ID NO: 39831 - DNA, 327 bp, Homo sapiens
  misc_feature (1)...(327): n = a,t,c or g
caactacctaggtggccataacaaaaaaagcagaaaataacaagtattggccaagatgtaaaaaataatgtaaaaagatcagcaagattgcaggatacaagataatgttacaaaaattacttgtatttnnnnnnnnnnnnnnnnnnnnnnnnnnnnnnnnnnnnnnnnnnnnnnnnnnnnnnnnnnnnnnnnnnnnnnnnnnnnnnnnnnnnnnnnnnnnnnnnnnnnnnnnnnnnnnnnnnnnnnnnnnnnnnnnnnnnnnnnnnnnnnnnnnnnnnnnnnnnnnnnnnnnnnncataacaagcttctcatacgatataaaatgaa

SEQ ID NO: 39832 - DNA, 236 bp, Homo sapiens
ctcgaaaattatgttagaggcaccaaatggggagcaggttctagtcattcatcaaagaaggagctaaataaaatcaagatttaacagaaggatcacacatttgaggtagggtttggagtttcagtcatgaagtcggtgcacagtttatatagggttcaacttcttgtctgtaggtgcctgtctctattcacatttaaagccattgttgaggaatgtagtatctttttttttttttt

SEQ ID NO: 39833 - DNA, 332 bp, Homo sapiens
ctggaactggagcttactgggacttgcctgtttaccacctcggggcaacccaccctggggcttgttcagctgtcatgaccccaggtcagggccaggcaaggagtgaacctgtcatggagctaatgggccccagctctggcaagtggacacacagccccataggtgggactgagctttctaggcccatgggggcaggtaaaagcagtttgctgtggttaacataacctaggctctaaggcagtgaagaacaggatgtcatccccaaatataccgctgtggtacaagaattattctgagtaaaagcacatgcactgaagagctctctgtactct

SEQ ID NO: 39834 - DNA, 316 bp, Homo sapiens
ccaaaagcaaatagttaatcagaggcagaaccaggatttataattgaagtctgagtctaaagcgcatgcttcttttatgatatgactttgtctgcagaaataggttcttggcccagcactgccctaactggttgtatgacacttagggtgagacactatactactctgaatcttagttttcccatcggtaaaatggttacaggagcaggcaaagttcaggtttatcttcacgtaacctagaaaaggaggagaatagaagtctagatagatggggatataagcaaataagtaattaaccaatacaaatcagtatctt

SEQ ID NO: 39835 - DNA, 327 bp, Homo sapiens
  misc_feature (1)...(327): n = a,t,c or g
gctgaacagtgcatagagactggggaccagtttgagagcttaggctgccctaggccctgcccagcttctctaaggcaaaaagatttaatatatcagcatgattgtgacacattggaggcataccagttgggaaacactggtttgaactattttcatatctagctatttcctcttgtgaatggggcagatggggacaaaccaatagtaagtgacctgaaatcacttttaatggttttcagaaagcatctggtcacctgagatctatagagaagaaaccggaataaatttcaaaaaggatatanatacaacttagtatgccggactgtt

SEQ ID NO: 39836 - DNA, 315 bp, Homo sapiens
cttacttactgactgtgtaatttggacaagttacttagcatttagcatctctatttctttaatcataaaatgaacatattaacacttacttcctagggctgttgtgaagataaactgagttgaggtatgacagtacctagcatgtagtaagcatcattaaatggtgtctgttgttttcacatattgtaaagaagaaagcttcgtgcatctcttggaatttctgaggacggtgaagccacagctgggaaagtctcagggagccaggagttgctggcctcctgctttgcatactcaaaattgctggaaaggggctat

SEQ ID NO: 39837 - DNA, 324 bp, Homo sapiens
cagacacctatgcaactgtcattcaccctacacaacaggtgatcccacacaaccacaactgtcattcatcctacacaacacagatgcccatacaactgccaggtttctgagagtcacgctgcctaggagagcagtggcccgggcggggcaccactccagcagagctcatccaaggccactgacatgtcttattccaccctccccatcctgccagaaaaaaagcttagctgcggggagaggggagaaagaaaacagtataggttctaaaattcatcactgctcggggacttgtcttgaaagagtgcttttccccaacacacgtca

SEQ ID NO: 39838 - DNA, 322 bp, Homo sapiens
  misc_feature (1)...(322): n = a,t,c or g
gtccagtgcagttcctagcccatggtaagcaccaaaggtttgctgaatgaatgagggaatattttattgttcaataaggaannnnnnnnnnnnnnnnnnnnnnnnnnnnnnnnnnnnnnnnnnnnnnnnnnnnnnnnnnnnnnnnnnnnnnnnnnnnnnnnnnnnnnnnnnnnnnnnnnnnnnnnnnnnnnnnnnnnnnnnnnnnnnnnnnnnnnnnnnnnnnnnnnnnnnnnnnnnnnnnnnnnnnnnnnnnnnnnnnnnnnnnnnnnnnnnnnnnnnnnnnnnnnnnnnnnnnnnnnnnnnnnnnnnnnnnnnnnnnnnn

SEQ ID NO: 39839 - DNA, 311 bp, Homo sapiens
  misc_feature (1)...(311): n = a,t,c or g
nnnnnnnnnnnnnnnnnnnnnnnnnnnnnnnnnnnnnnnnnnnnnnnnnnnnnnnnnnnnnnnnnnnnnnnnnnnnnnnnnnnnnnnnnnntatttgagctattttcataggtacaagggaaaaaaagaactctcttatttgtagggcaatctctgtttccattctaaatgttttctgttctagggctttaagctttttgtttcccatatttattatcggttaagtcctttacttaggatgccaaaagactagttctcagtttacgggcattcagactaaaaggcttaattttcaaacaaagcacaataaa

SEQ ID NO: 39840 - DNA, 256 bp, Homo sapiens
  misc_feature (1)...(256): n = a,t,c or g
gtctaagggtgttatttgtatagtcacataataaaaggtgaaaatcctcatcagaaatnnnnnnnnnnnnnnnnnnnnnnnnnnnnnnnnnnnnnnnnnnnnnnnnnnnnnnnnnnnnnnnnnnnnnnnnnnnnnnnnnnnnnnnnnnnnnnnnnnnnnnnnnnnnnnnnnnnnnnnnnnnnnnnnnnnnnnnnnnnnnnnnnnnnnnnnnnnnnnnnnnnnnnnnnnnnnnnnnnnnnnnnnnnnnnnnnnnnnn

SEQ ID NO: 39841 - DNA, 310 bp, Homo sapiens
ctcgctactacattttctaatgtgaataacacaactgttacataaatagagtaaaaagaactcagtcaatgctttcctttaattctaaaaaatttgactaatccagtaacagaaactcaagaagctataaggataaaatcaccaattgttactttgtatcttaacttgtaagaatctctaggattgcccacaggatgaaatcacattctaaaattactacttgaatttcatttatatggattcattttcaaatataatgacctgacaaactagcatttttgttagtcttaactctaagagcacataatca

SEQ ID NO: 39842 - DNA, 341 bp, Homo sapiens
cctattctcagccaatgaatgaccttttccaatatgctgttacacaaaagggtactgcaaaagacagagggaaaagtacttgggccttaaattccatcggcaacaacagaagtttcctagtatcagtttgtcaagaaaggggggttgatcagcataacacccatacgttgggggccatcacagtaaccaatttgttgccaaatgcagctcacatttgaggtaggtcttttaatacgattttaagtggctgatagaattgtgattattcttatatttaaataatctctggtggctgtcagaacactccaggttccacaactcttgacgagcacaaaacctgt

SEQ ID NO: 39843 - DNA, 324 bp, Homo sapiens
  misc_feature (1)...(324): n = a,t,c or g
ttctcctgccccaagagagcctgtagccatggagaaacccagaacatcagcactcctgcctctcagaggaaggaaactgaggcccacaaaggtgaggagatgccttctggaaagtccacctgccccacaggacccctttcttggaaaacctcctacccaagccacaagctaggccccaagccccagacttctctgactgaatgaaaactgaacactnnnnnnnnnnnnnnnnnnnnnnnnnnnnnnnnnnnnnnnnnnnnnnnnnnnnnnnnnnnnnnnnnnnnnnnnnnnnnnnnnnnnaccctggccaacatggcaaaatcc

SEQ ID NO: 39844 - DNA, 335 bp, Homo sapiens
aactgatgccacagcagattcactagctccagtgcttgaatttagccaaaaatggcttataactagtattctgaggagatcctggccaaataatatgtcgtaaaacctttttcattaggagtataaaaactcataaaactggtacttgtagtctatatttgttgcaggcggtggtgtttttatacttactgaaatcattcaagtggaggcatctgctacaaaacaaaatagtcctcacagcttagggcatgaattgggtacagctgagaaatgtcagctgtgtaaacagcctgaaatgtgttaccaacaaaaatataattaatttctttccaaag

SEQ ID NO: 39845 - DNA, 333 bp, Homo sapiens
  misc_feature (1)...(333): n = a,t,c or g
gttcattcttaattcattgtttacttcacatttattatggtactttaaaaggtaatatatttaggtttatctatagtttgagctataaatgatttagttttaacaggcaatttgaaaactgtatttttgagattgcacattaaatgtttacttcacacgtcatgttgaagttttagtccatctatttttcatgaccttaaaaatttttttctattcttttcatgaggattaatattgctttctttttaaaaacccaaatgattgagtaatatacaggatactgattatatgggctaagcattttattaataccgtatttgnatgtcctgtatt

SEQ ID NO: 39846 - DNA, 332 bp, Homo sapiens
  misc_feature (1)...(332): n = a,t,c or g
gtttcttctctgtccaaattcaacaaagtcaaaatcacattttgttctgtcacaaatcatataatattatttctaccatttttctttttttaatcnnnnnnnnnnnnnnnnnnnnnnnnnnnnnnnnnnnnnnnnnnnnnnnnnnnnnnnnnnnnnnnnnnnnnnnnnnnnnnnnnnnnnnnnnnnnnnnnnnnnnnnnnnnnnnnnnnnnnnnnnnnnnnnnnnnnnnnnnnnnnnnnnnnnnnnnnnnnnnnnnnnnnnnnnnnnnnnnnnnnnnnnnnnnnnnnnnnnnnnnnnnnnnnnnnnnnnnnnnnnnnnnnnnnnnnnnnnnn

SEQ ID NO: 39847 - DNA, 310 bp, Homo sapiens
cttgggtggccttgacaagttatgtaaggttttgtttcttcagaaagacactgcatttttagaacatctctaggcacaaaaattagtcatgtaactgaaagacaagaaaattttaagcatatattataaataaatgtgaatattaggggtgtgtatccaaacacatgaatagctcttaaaagaataagacaaaaagatcaaacatatttgaaatcagagagatgtcttttgggaactgaactcttgccatgagcaggagaaaaccagaaaggtcttcatgggttctggtacctgttcaaccattaattca

SEQ ID NO: 39848 - DNA, 340 bp, Homo sapiens
ccgctcctctctgaactccatccagtttccccaagtctctgataatgttgtgacacagggctggatgcaaggttccagctgctgactcaccaaactccttaaatgtcaagggacttgatgcacacacacgcacgcatgcacacgcaaacactcgtgcacacacacacgtcgctccatctgggaggtggagctcccagctcccagaatacagctatccttgcctagtccgtggagcacccttcctgcagccacaatatcacaagtgactgtgggtatctatatggacacggacactctcaagcattttcctgccatacagaacttaaaagggggaaaaaaa

SEQ ID NO: 39849 - DNA, 336 bp, Homo sapiens
  misc_feature (1)...(336): n = a,t,c or g
gtggaaatagcattttaaagaaacttaaagaaattaatgaccaaaaggtatattcactcaagctgtccttcaagtatcacagccacagaaaaccagtttggaacattccagaactctggggatatataaatgtgcctttcctgaggaaactaccaaaggatgatcttcatttaagcaaagaataactagtgaaactttacaaaagaactgacattgagtattccatctctttaattgganacanagactacangtngacgcgntcgccaatnacagatcnatgantcgganattctgaaaaacccccgcngggcacttnactgtgcatcgtgcacc

SEQ ID NO: 39850 - DNA, 336 bp, Homo sapiens
ggaaattaaagaagtaatcagatgttgattgaggttatctgcttcacttcaagcagaagcaaatcaagtggacttcccttgaagacagaaatttctctattgatagagctaagggtgtttcatgatgctgaattctttgtggctccttttcacataaaagtaggaagccattttccctggagtggaagggaggatgacttcccaggaatatgagctttgagccaaagaggcaggaactgggaggctctcagttacacttgagaaagaattatttctctcaatattgttcttcttttcctccagagccccagtgtgagcctgggtgcaagctctgat

SEQ ID NO: 39851 - DNA, 341 bp, Homo sapiens
  misc_feature (1)...(341): n = a,t,c or g
aaaaatgtaaagaaacagtggtttttacaaggggaggcagcggtctaacgcagtgtttttaaatcataggtagtattagatcacaattggcattttaaaaaatgaaatagaataagaaatatcaaaataaatcatgtataataaataaaagtacagttttgttaaattgtttcagttatatataaatgtgtatagaactgtgatataaaatctacttctcaatcaattccatggatttagaattggatatttaaaaaaatctgatcnnnnnnnnnnnnnnnnnnnnnnnnnnnnnnnnnnnnnnnnnnnnnnnnnnnnnnnnnnnnnnnnnnnnnnnnnnn

SEQ ID NO: 39852 - DNA, 342 bp, Homo sapiens
atagtggagtcatgggactttttaagggccggaagggactatttagatcatccagtcccaccctgtcattttatggaggaggaaactgaggcctagataagataaccagttagtgggtccactgacctttaggacagtagtctatccgtaagagacaacatggagaaagaaatacaacgtttttatagtgaattatcatcttacaaagaatattcttcccatatcgcacttttaaaaagtgggtaccttagtcaaataggagaaaaaaccacttgagtagtttcatcctcaggttttaggtgaggaaactgatactcagattaaataactttaagcacacag

SEQ ID NO: 39853 - DNA, 313 bp, Homo sapiens
  misc_feature (1)...(313): n = a,t,c or g
ctcaaggatgaaggtctagtccctctccaaaaacaagtacacttccgtgtccctcaggatgtgccagtgttgacacatttgtgagtcattaccagcccaactgggcacatagtgctgtatcttgcgatggttcactgtggttaccagacagggccaggttcgtggatgtttgacctgtgaggttgctcagcaccccatnnnnnnnnnnnnnnnnnnnnnnnnnnnnnnnnnnnnnnnnnnnnnnnnnnnnnnnnnnnnnnnnnnnnnnnnnnnnnnnnnnnnnnnnnnnnnnnnnnnntgccccacacagcat

SEQ ID NO: 39854 - DNA, 334 bp, Homo sapiens
  misc_feature (1)...(334): n = a,t,c or g
nnnnnnnnnnnnnnnnnnnnnnnnnnnnnnnnnnnnnnnnnnnnnnnnnnnnnnnnnnnnnnnnnnnnnnnnnnnnnnnnnnnnnnnnnnnnnnnnnnnnnnnnnnnnnnnnnnnnnnnnnnnnnnnnnnnnnnnnnnnnnnnnnnnnnnnnnnnnnnnnnnnnnnnnnnnnnnnnnnnnnnnnnnnnnnnnnnnnnnnnnnnnnnnnnnnnnnnnnnnnnnnnnnnnnnnnnnnnnnnnnnnnnnnnnnnnnnnnnnnnnnnnnnnnnnnnntgtctgctcttaaagagattaataaattagagggaaaactcagaatgtctttgtaatttag

SEQ ID NO: 39855 - DNA, 327 bp, Homo sapiens
  misc_feature (1)...(327): n = a,t,c or g
cccgttttccatgagacactcccaagggcctcttgcctttctgatgatactgataatattacctcctcatggagttgtgcatatcagagaatgacagcttccccaatccccagcacctctctattcacctaaggccttttttagaaacaggtaatagtttggggtggtttatgaagagcacctagtatgatgtgggggattaggaacatttattattccacagaagagaagaaagctaatggcccatgaaatggtggccaggagaggagagtggggttttgggtttgtgggggtaacagntaaagagtcaaaccatgaattccatat

SEQ ID NO: 39856 - DNA, 328 bp, Homo sapiens
atttgtttttattctgaaagcaaaaggtactatgtataacagtgttacaggaaaatgagttataattcccaataatcgtactacaaatttttagaatataatgtttcataaatgggataccaattcaacactttaacttttcaaaataaaaacaaatgtatgactatatcaaatttaaaagactgatacatacatatacatgcacaaacatacttgtatccctaaaggtcgcaatgcgttggtgaagaaaaaatgcaagattgattgcagctatatcagatcttatacaaatatgaacaaaagaatttttgttctcatgcagaaaaga

SEQ ID NO: 39857 - DNA, 333 bp, Homo sapiens
ccgctttgtgctacagatacagacactgatggccccagaggtaacttggtgaagaccactaccggaaaaagaaagttaaaatctggaccaccaactcctagtcctctgactaggagggtctatctaccacaccacacatcctggctcatccagaaacaaagtttctaggaaagcgtcagccacatatgcaacctaaggaccagggtgtgcataaaccgagggtctaccagcaagaccacctctcctgcagtttatagccctggccaaaccactcactctccaggctaatcgaggagatagttcggaataaacaccaggtatcggtactgacaa

SEQ ID NO: 39858 - DNA, 326 bp, Homo sapiens
tttgcatgagaaaattatttccaagtttactaacatgaaaactgggaagctctttgatacctgcacaacactgcagctcccattatgacattacaaaaaacatacaggaccataccccaaattggccatataaacacaaagtcaaactaaattacatttagaatgtcattcaaaactaccgtttaaaaaatgtaattttagcaagtcaaaatttcaatttcaacttgttttctcaaggaaactttttgcgataatattcaaattagttgaaataacttttagcagactcagaatcaataaggatgtgattttaggtttcaggatat

SEQ ID NO: 39859 - DNA, 333 bp, Homo sapiens
tggcgcttgagttggtcgggggcagcggcagatgaggaaactgaggcttggtgaagttacgaaacttgtccaaaatcacacaacttgtaaagggcacagccaagattcatagccaggctgtaaaaattaaaatgaacaaattacggcaaagttttaggagaaagaaggatgtttatgttccagaggccagtcgtccacatcagtggcagacagatgaataaggcgttcgcaccggaaaatgtagcttcccggttaaggtaagagctgatgtttctataagtctgtatgtggaaaagaactgacaatctagtgtatgtgaaatctcattaataa

SEQ ID NO: 39860 - DNA, 332 bp, Homo sapiens
tgaactgggactgggagaaggacaaggctttctggcctaggaggtaatacttgccaaccccaacgcttagataagactcaaaatgatgctctttcttcaatgatgcctgaacagatggctgtaatatactcctaattggttttctcatacttggtccctttcccaaaagctccagtccactgaatcattctcatgtcaactttcctaaaccttacatatctccaatcaggtcagtcgtctcctgatcaaaagagaaccaagtatgcatcgtcactttgcaatggggccccctaaggtaactgcgctcatttttgttctgtgcctctatggca

SEQ ID NO: 39861 - DNA, 326 bp, Homo sapiens
atgatgggtgatgggaaacccatagaggatttggagcagaagaatgatataattaaaattttattttagaaacatttttctggttgtcgtaagaggaaaaatatttagccccagggcattttggcagagagttaggaggctattgtaacagcccaagcaatagacaataattgtttggattaggcgggtagcaatagaggtgatgagaagtcgtagcttctgtaggtatttggaagatatatattgtgaaggatttgctgatgaattccctgtaaggggtgagatgtaaagattcatagaacattaagatattttggtcagatcat

SEQ ID NO: 39862 - DNA, 333 bp, Homo sapiens
  misc_feature (1)...(333): n = a,t,c or g
nnnnnnnnnnnnnnnnnnnnnnnnnnnnnnnnnnnnnnnnnnnnnnnnnnnnnnnnnnnnnnnnnnnnnnnnnnnnnnnnnnnnnnnnnnnnnnnnnnnnnnnnnnnnnntgttttaaagcaagtcaagcaagctacctggactaaatattcttcttcacaaatttttgcaattttagattgtatgaccactctaagttctcatccagctctaaaatactgtaattatgttctaatatcaaatcaaagtccaaatcatttaaggctatggtccaaggtttaaaacaaagtaatttttgaaaactctttctataagcttaatatggattaaact

SEQ ID NO: 39863 - DNA, 327 bp, Homo sapiens
  misc_feature (1)...(327): n = a,t,c or g
aaaaggttcatcttgcctcttatttcaacagtagggcttgagatggcccagagcacctggcttcagaccaacccaaatgaccctctctatcttcctttcctgggagtgggacagatctgactttaggaacatagaggcttgattccttcccttcagatggatcttcagcatttctttgcatgtgctttgtgcagctctacttaaaaattattaactttactaagtcttgctccttcaatacacatcttttagatgttctttgtgatgaaatgggagnatgcgaacagcacttnctgctgnatactgaaatatgnatgattgctttgg

SEQ ID NO: 39864 - DNA, 331 bp, Homo sapiens
  misc_feature (1)...(331): n = a,t,c or g
gcaaaacttaatacaaaacacatcacagacctaatagtgaaatgtgaaactaaaaaattctatgaagaaaacacagaactaaaaatctttgtgacannnnnnnnnnnnnnnnnnnnnnnnnnnnnnnnnnnnnnnnnnnnnnnnnnnnnnnnnnnnnnnnnnnnnnnnnnnnnnnnnnnnnnnnnnnnnnnnnnnnnnnnnnnnnnnnnnnnnnnnnnnnnnnnnnnnnnnnnnnnnnnnnnnnnnnnnnnnnnnnnnnnnnnnnnnnnnnnnnnnnnnnnnnnnnnnnnnnnnnnnnnnnnnnnnnnnnnnnnnnnnnnnnnnnnnnnnn

SEQ ID NO: 39865 - DNA, 326 bp, Homo sapiens
gccaatgctccctataatcagacattaactggatataatgactacatcaagatgagcattaatcctaagaaacttgtaatgggtgttccttggtatggttatgattatacctgcctgaatctgtctgaggatcatgtttgtaccattgcaaaagtccctttccggggggctccttgtagtgacgctgcaggacgtcaggtgccctacaaaacgatcatgaagcaaataaatagttctatttctggaaacctatgggataaagatcagcgggctccttattataactataaagatcctgctggccactttcatcaagtatggtatgg

SEQ ID NO: 39866 - DNA, 332 bp, Homo sapiens
  misc_feature (1)...(332): n = a,t,c or g
caaccactctccagcacattaattcttacagttagcttctaacagcatataaaaatgttttgattgttttatgttaatctgtgtcctgtcccataaaagtttaacctacaagaggaaggatattatctctcttattcaccgctattttcttatatgcttaaaacaatgtctgccccattgtagatactttacaaatatatgctgaataaaatgatgaactgacaaatataaataatatgtatatatgtacatatgtatatgtattaattaaagcttttgaggctccatatgtaccanagtactaattgctctatctttattataccaagaaa

SEQ ID NO: 39867 - DNA, 332 bp, Homo sapiens
  misc_feature (1)...(332): n = a,t,c or g
gtcccgttgaactctttacttgtcccttactcctccccactcccgcccagctttctcgatgctttgcctttctcagacctttctcctatctcttagagaagtatttccctaatatcttttgcagtttcataaactgtttttctcatctttacttttttgtttttgatacgtgtttttagataatatcgagcattatgtgctatgtcacaaactcttagccattgactgttattagagtcagtgtagttgcttcattctaaacaaaaatcactctggtccagtgacattctattgggaggcattgctttaatgacctntaacagcaatgagaa

SEQ ID NO: 39868 - DNA, 311 bp, Homo sapiens
ctttgtagcgctctcccctgattactgctggctctgtcttcagagttgctactactctccttaaaactggagctgaaggatagacaaaaattcctttccctaagtggcagccgattaggaggcctgggtacagtgctgcgcttctttttcagacatggagaggtaggcaatcaaaaactattctcagaattactcctggaaatgcagttttcttctttaaatttaatctataatggcattctttaaacgtttaatcttattattttgattcaaaatttaaacactagcattcatttaagctaacttttcat

SEQ ID NO: 39869 - DNA, 321 bp, Homo sapiens
ggaggattaaatggggtcatctgtggaaactgctttaagccagtgctgggattctagaggcacttagcattagttcccatctttactgctacctttgtatgggtctgtctggaagcaatgtgctcctgatagtctgggagtagaaatctgtgctcacctgtgaccccaggttgttactttcttactgtcctatcttgtaagccaaagccctttccccaagaatcctgagattagtggtacttcccttgtggggtctgctgagcctaaggttgggttggaaaagaggaggttggttgctaggggtcagacaaatgttatctt

SEQ ID NO: 39870 - DNA, 165 bp, Homo sapiens
ctttaactctcactattatatacatataaaaatgtgtatctttaatattcagaattggaattaatgaattatagagttgtaaacagtgatgataattataggatggtgccctccctttgatactctagaacagaggttcttttttttttcctttttttttttttt

SEQ ID NO: 39871 - DNA, 304 bp, Homo sapiens
cacacatataatttttgaaacagagaaatttgaacatggactagctgttagatattaatgaattattgttaattttgctacttgtaataatgcattgtggttacataaacccagacgtactttttcagtttgttagagattcacactaacatatatgtagatgaaaagacatgtctgggatttgcttttaaatactctagcaaaaatgttggtgggagagatgaaacaagattggttataagttgttcactgctgagacggaaggataggtatacgggagttcattattctagtctcctttgtg

SEQ ID NO: 39872 - DNA, 310 bp, Homo sapiens
  misc_feature (1)...(310): n = a,t,c or g
gcggggtgctggcttgtggggaaataatattatttaaaaaatttttccttgtagaaggtcaacatgagttgtgtaaaccgaagagtgtctgagataagtcnnnnnnnnnnnnnnnnnnnnnnnnnnnnnnnnnnnnnnnnnnnnnnnnnnnnnnnnnnnnnnnnnnnnnnnnnnnnnnnnnnnnnnnnnnnnnnnncnnnnnnnnnnnnnnnnnnnnnnnnnnnnnnnnnnnnnnnnnnnnnnnnnnnnnnnnnnnnnnnnnnnnnnnnnnnnnncaactcaaagtggggagagggcttcgtcgacgcgg

SEQ ID NO: 39873 - DNA, 292 bp, Homo sapiens
  misc_feature (1)...(292): n = a,t,c or g
gtttggggctaggttgatgagcattattatttctgtcattagacaggtatacttctgtcttatttaccaatcttgtgtaattgcattggcttactaataaaaacttaagtctaaacaatgttcttctggcgtctactcatactgtattcttctcctgacatcactgtttgtctccatctttttacatcnagtgggctgaanatgcngcattnganaagtnattgcatctctttcntctagntntatttctttgctnccntacanctcnntnntgnntnanttgtnagctttt

SEQ ID NO: 39874 - DNA, 313 bp, Homo sapiens
aaatgataaaacgttaaaaaccattctccttaattatcatttaaattttaaaattatatgcctttccacagaacgctaaagtagctaccttatttgttgaattcatttaaaattcttgatctttctttcaatatcactgatatccacttaagtgaattcttatgattccatgttactaccaacttatgtttcccctagactggcctgccatcaactactctcattgtatttgcttcattatgagctatatgtaagtcagagtacctgtgaggaaggccctcttgactttcatttaaattggataattaaaatt

SEQ ID NO: 39875 - DNA, 367 bp, Homo sapiens
  misc_feature (1)...(367): n = a,t,c or g
cnnnnnnnnnnnnnnnnnnnnnnnnnnnnntnnnnnnnnnnnnnnnnnnnnnnnnnnnnnnnnnnnnnnnnnnnnnnnnnnnnnnnnnnnnnnnnnnnnnnnnnnnnccgcgaattccnnnnnnnnnnnnnnnnnnnnnnnnnnnnnnnnnnnnnnnnnnnnnnnnnnnnnnnnnnnnnnnnnnnnnnnnnnnnnnnnnnnnnnnnnnnnnnnnnnnnnnnnnnnnnnnnnnnnnnnnnnnnnnnnnnnnnnnnnnnnnnnnnnnnnnnnnnnnnnnnnnnnnnnnnnnnnnnnnnntcanctgcccatntttnntntgnaccanatntcntaatgnnaanacattacgaggncatatncngaacgc

SEQ ID NO: 39876 - DNA, 327 bp, Homo sapiens
  misc_feature (1)...(327): n = a,t,c or g
ccaaattcaaggagacccttcctgcaccctgccccaacccaagcgcatttttatttgactagattattgaaaccaaaagaaccctttgagaccgagtgggatgattgcttagtggaaataggtcaggcagaagatgggtcagatggggacctcaaaacttaattttagttttttaaaatgttagtattttctgaaatggtactcagagttagtagataaccccctttaaattgtgcatgtttgtgtacatgtttctttttttctgcagagagagaatccctatctttcataattcataaccagtataacctaaacaagntaatattc

SEQ ID NO: 39877 - DNA, 295 bp, Homo sapiens
  misc_feature (1)...(295): n = a,t,c or g
accaaagtgagctttgttagtgagcattcacagagggtaggagctgagtccacgaagttcacatcatgccaaggaatggatttcctcccagggccactagcattacttgtgggttatcaagtgttactgctcacacattccagagcttctggaaaagccgtaaggaaatggctttcagaaagccatttctgtcctagaggagagaggtcctggatttcactgaaccagaacttgatggntggatntgttnatgantnantnnngtagtngggngcncnttcttttggatattttc

SEQ ID NO: 39878 - DNA, 325 bp, Homo sapiens
  misc_feature (1)...(325): n = a,t,c or g
tggggccctggatgactttccagcctcttcaactgacttgctcccctctccttttcttctctttagagacccagcccagggccctcccacccttgcccagacctggtgggcccttcagagggaggggtggacctgtttctctttcactttcatttgctggtgtgagccatggggtgtgtatttgtatgtggggagtaggtgtttgaggttccngttcttttccttnccaagtctctgngggtggaaaggangtntanncnggcgcnaattncaaatctatgantcgtaaaaactgtnnnnccccgcangttnantttaacngtca

SEQ ID NO: 39879 - DNA, 330 bp, Homo sapiens
tgatcctttatcatttctcctttgaaatgggaaaagagtaaaattccccagagaagattgtgtgtgtgagcaataacaaaagtaagcgagtgggagagagaaaagaagtgagtataaggcaaaaagggtatgagcagaattctgtggctctccagaaataagagaggaacatagcatgtattctgtgccactgatgggacaggaagtttgacagtttataaaactcggtccaaattaccccaagtactcattagaaataataaaaaaaaaagtgaacaataattgcccattttaacaaaaacatccctctcccaagcagctgagatttat

SEQ ID NO: 39880 - DNA, 345 bp, Homo sapiens
ggagattgtcttgcattgttgggccaagtggccttataccaccacgcccatccaattagaataactttttacatgttgtatttttaaaattcataactcataatctaaaatttatgctcagcacagctaactttggagacctaccaagaatggtgcaatgattcagcagctactcatggtaagacaagagtatctgggtgtaacctgtatgaaacctgcatctcacaaccactgctccttctccccagccttccagccctggtgtttcccatcgggggccatgtggcctggaacacagaggctgggctgcccaaggacaggccccctggcctacaaaaaggacag

SEQ ID NO: 39881 - DNA, 327 bp, Homo sapiens
gcagcttttaacacaacaaggtgtatttctcgctcacattgcaatccaatctgtgttggaggcagggacagtgttccctgtcactccaatctgtagcttcaccacctttcaggccttgatcccccactgcattctttgcactgccagtcagcaagcaagaaagaacatggaggggacacagtggggtttggggccagtctgaaatgggtatgttactgcctcccacattgcagtggccagagcccagttaccttctactggagggaagctgagctgtgccttacctgtgcatcctggaaggagagaaggtgatgggtgctgatgagc

SEQ ID NO: 39882 - DNA, 336 bp, Homo sapiens
  misc_feature (1)...(336): n = a,t,c or g
ggagaaatgatttaacctgagcctaacctgctggggttttaacagagccttatttacatgaggtaagggaaatacccaactacaggtcattcaagccatcctgggggtgaggcgctgagaaacaggatatagttcaaaatccataaacaagctcactaaaagactgagaccttggctcnnnnnnnnnnnnnnnnnnnnnnnnnnnnnnnnnnnnnnnnnnnnnnnnnnnnnnnnnnnnnnnnnnnnnnnnnnnnnnnnnnnnnnnnnnnnnctanncccattttttacannaaantatgaanacttanccnggcatgtanacacatgcctgtgatt

SEQ ID NO: 39883 - DNA, 321 bp, Homo sapiens
  misc_feature (1)...(321): n = a,t,c or g
tgaacaatgcaggggtttagggttgccaacccctgcacagtcaaaaatccacatagaatttttgactcccaaaaaactaatagcttactgttcaccggaagcatatagatgacataaacagacagtcaacacatattttttgtatgagttatatacttcattgttacagtaaagtaagctggagaaaagacnnnnnnnnnnnnnnnnnnnnnnnnnnnnnnnnnnnnnnnnnnnnnnnnnnnnnnnnnnnnnnnnnnnnnnnnnnnnnnnnnattttctttgcttcaagtagcttgaggaggaggaattgggggntggtct

SEQ ID NO: 39884 - DNA, 288 bp, Homo sapiens
gaagcaaaaggaaaaaggaggttccattttttgggcggaggatgcatcacacttgcccatgtctgccaggcttggcctgtttacggacttcatttaaccgatttatttgtttagcccaaaagtaatcgctctggagtagaaaccaaatgtgaatagccacatcttacctgtaaagtcttacttgtgattgtgccaaacaaaaaatgtgccagaaagaaatgctcttgcttcctcaactttccaagtaacatttttatctttgatttgtaaatgatttttttttttttt

SEQ ID NO: 39885 - DNA, 431 bp, Homo sapiens
  misc_feature (1)...(431): n = a,t,c or g
tggangnctttgaanggcnnnnnnnnnnnnnnnnnnnnnnnnnnnnnnnnnnnnnnnnnnnnnnnnnnnnnnnnnnnntctcgaggatccgaattccnnnnnnnnnnnnnnnnnnnnnnnnnnnnnnnnnnnnnnngnnnnnnnnnnnnnnnnnnnnnnnnnnnnnnnnnnnnnnnnnnnnnnnnnnnnnnnnnnnnnnnnnnnnnnnnnnnnnnnnnnnnnnnnnnnnnnnnnnnnnnnnnnnnnnnnnnnnnnnnnnnnnnnnnnnnnnnnnnnnnnnnnnnnnnnnnnnnnnnnnnnnnnnnnnnnnnnnnnnnnnnnnnnnnnnnnnnnnnnnnnnnnnnnnnnnnnnnnnnnnnnnaagtnagnnaacanaaccccttcataaattcttccanaagtaagngangaggagccatttccnanctcat

SEQ ID NO: 39886 - DNA, 331 bp, Homo sapiens
  misc_feature (1)...(331): n = a,t,c or g
ctcaacttaaaaaaaaatnnnnnnnnnnnnnnnnnnnnnnnnnnnnnnnnnnnnnnnnnnnnnnnnnnnnnnnnnnnnaaatatgcatactacaaaaactgactcaacacaaaaattaaaaattttttaaagactcaagaagaaagagcaaaatgaatagacctataacaaacagattaattcaataaccaaaagaacttccaaaaagaaaaactctaagaccagatggcttcactggtgagctttaccataaacattttttttttaaattaacaaaaccccttcataaattcttccaaaaataaaagaagaggagccatttcctaactca

SEQ ID NO: 39887 - DNA, 322 bp, Homo sapiens
gggaatctgaacggtaaccagggtcctgaaatggcttctgttccccgcccccaccccgggtaaggccagccactgtcacttccccaggccaggctctcccaggatgaggccagctgcatgcctcagatttgcaagtatcatcatcccattggcttccatgtaagacactggcttgggctgggctggaaggatcatggcattattctacagcaggcctccagaggggaaagccctcatccaaggctgcactaagtgaaaaggcaggcactgggggcagagctgcagagtcaacaaagcagggagcaggatggtggaaagcaca

SEQ ID NO: 39888 - DNA, 320 bp, Homo sapiens
caccatggtgcacctgactcctgaggagaagtctgccgttactgccctgtggggcaaggtgaacgtggatgaagttggtggtgaggccctgggcaggctgctggtggtctacccttggacccagaggttctttgagtcctttggggatctgtccactcctgatgctgttatgggcaaccctaaggtgaaggctcatggcaagaaagtgctcggtgcctttagtgatggcctggctcacctggacaacctcaagggcacctttgccacactgagtgagctgcactgtgacaagctgcacgtggatcctgagaacttcaggc

SEQ ID NO: 39889 - DNA, 319 bp, Homo sapiens
  misc_feature (1)...(319): n = a,t,c or g
nnnnnnnnnnnnnnnnnnnnnnnnnnnnnnnnnnnnnnnnnnnnnnnnnnnnnnnnnnnnnnnnnnnnnnnnnnnnnnnnnnnnnnnnnnnnnnnnnnnnnnnnnnnnnnnnnnnnnnnnnnnnnnnnnnnnntnaataatttaaaatgnatncanngnttntntgcccnggggcntatnccgtngaatcctaaaannttcacttttttagggtaatagnngnnagtncnncnanntnntatntntactactccagatngcttancttgtttaatccttgtatcttatngtaatcctttttaanangttnnnggggatt

SEQ ID NO: 39890 - DNA, 324 bp, Homo sapiens
gttgaaacacagctaaattattagcatattactggcactagtaagtgtattaataacacacttcataatatgaaaacaattatattcagtttcaaatttcaaatgagagattactttaaataatataaaaacttcatgatgaacttaggagttttaagagttgacagaaaaatacctcaaaaacaatgtgaattcaaacaaaaataaaagttatttataaaatactaagataattacttcagactaaaatttcatagttgttttcttcacttaggacttatggaaaaactgaaggtctaaatatcaggtttaaattaggattga

SEQ ID NO: 39891 - DNA, 325 bp, Homo sapiens
  misc_feature (1)...(325): n = a,t,c or g
ggaggatctcttgagcctgnnnnnnnnnnnnnnnnnnnnnnnnnnnnnnnnnnnnnnnnnnnnnnnnnnnnnnnnnnnnnnnnnnnnnnnnnnnnnnnnnnctanaantaantnctaanttangcntaaaangtaggttctnaaactactntaaaaagtncaaattattttgagtagngganttttagggttctaantattgtnaaaatatcctnattaatcngttantancctgntagtacttatggccccantgtaaattnttttanccagnctnattnggcagtactgtnttttacntagtaantaancntctnntttgcaa

SEQ ID NO: 39892 - DNA, 333 bp, Homo sapiens
ctgcttcctccactggtaacatgcctacctgttcactcccctccctcagcttccattctaacccttcagagcttaacacctcacaggtcccattatcagtcctcattgctcccattgttcattacctttttatttagcacttaatataagatgtaatcataattaacattatctgctttaaattccataagggaaggggatgtgttttcgcaggatccagcatggggctgggatttaacaaatgtctgttgactgaacgtcccaagcctgcatcttcatctgtaaaatgccataaatgacacccagcctttagatgacaaaaacagttctcat

SEQ ID NO: 39893 - DNA, 323 bp, Homo sapiens
  misc_feature (1)...(323): n = a,t,c or g
atctgtaccttcttcatgtgcttaacatcacaaaccacaaattattaatattattataattaactgtagtataattattatttatgtctagttccctactgaactgagctcttggatatcaaggatatgttttattagtcttatttacacttatttatttattgtatttgtttcattattttattatgtattatatatgctattattgtacccaatttctaggcatttcatgttgtgaatgaatatatgaatgaatgtattatattactgntatcatttggaataatgatgctaattataataccatatttattacaacttta

SEQ ID NO: 39894 - DNA, 332 bp, Homo sapiens
tggcatttgattcgagtgtaattggttaggccaaggtagtcgattgtaaggaagactgcagaaggttttgccctttgtaattcctaagaacaagcatggtattatcatagggcatgagaacttcacttaggtatgatgaacttcaggcatgagtacagatcagatcatacagcttcaaagccaaagttatacctgccttagcatatgttctgccatatgctaactattgcttttagacttgttttctgtaatgagcattctttaaaatgtcttgtatgttgaaaacctagatgagacttgttacctagctctgttttcttctcattcttctg

SEQ ID NO: 39895 - DNA, 322 bp, Homo sapiens
ggaaccacaccgacctcctttctgttcatatactgtgcccactcactcccgcttcactgccttagttcctactgttcttccccaaactctcagcatgattaactccttgggaaagttcaaatctcttcagcttaactgacatctcagtgggcccttccccagccactctaagtggctgtgtaataacctctctcccctgacagttctccttattttagcaccctattcgtttcttccatggaacttggtgttttgaaagtattcatttacttactgtatgcctccccagctccatcccaccctgccagattctcagttatct

SEQ ID NO: 39896 - DNA, 331 bp, Homo sapiens
gtttgtttctccaagaatttggtctaaaggaggggaaagtggtgggagctggaactggagcagcaggcaggaaccagatcacggaaggttttgtcaatcctattcaggagtttgaatcttaacctgtgggcagagggaatgtcagtagggttctaactaaggacctagtcagtcttactctttagaaagatcgctttagaaataatgtctcttatgtgaacaactgcaattatttttcttaattctcatctcccctccctccatacaccatttccaaagtagaaaacaagatgatgtgtcttccctaattaaaaatcaaaacaaaattaaa

SEQ ID NO: 39897 - DNA, 319 bp, Homo sapiens
  misc_feature (1)...(319): n = a,t,c or g
gcatttagtttctcttctttctttcctttttcttttccttgtaaggataggttaaaagcaggcatagttgaattattcttaatatccactgtcctcatcctcttatcctgncattctgtaaactgacctaatcctcccctacgtttaggacttangctagtgaaactgaccttctnagctacaatgaggactatatgctactttcttagtacaaaattnattgagggtgtganancttgatctantttttnnntnttnngcaanaattnnnnatggncnttntaatnnntnnnttnntnnntatatnnnnattttatta

SEQ ID NO: 39898 - DNA, 321 bp, Homo sapiens
  misc_feature (1)...(321): n = a,t,c or g
gccaaactgtggatggggataaaaggaaggtactggaacctgagcccttgattagttaaagaagcagctgccccctcacctccgcctctcccactggaaggttgtgtgtcgacgcggccgcgaattccnnnnnnnnnnnnnnnnnnnnnnnnnnnnnnnnnnnnnnnnnnnnnnnnnnnnnnnnnnnnnnnnnnnnnnnnnnnnnnnnnnnnnnnnnnnnnnnnnnnnnnnnnnnnnnnnnnnnnnnnnnnnnnnnnnnnnnnnnnnnnnnnnnnnnnnnnnnnnnnnnnnnnnnnnnnnnnnnnnnnnnnnnnnnnnnnn

SEQ ID NO: 39899 - DNA, 330 bp, Homo sapiens
cacaggtaatattcacagtatttaatggacaaggcacagacctggaccaatcagaacagaactggctacaaacagttcacagtcacacacaaaggtgaacggaatcaatgtaagtcatgacccaacaccaaaagagaaactgtagcgtctatcagttaaccttacaagcttcaaagtcagagagacccaagttcaaatctccactctaccagtttctgtagaacctcaaattgctcaattgtctcctccaatagagtaggcataataattcctacatgtgaaaagtaaatgagtcaatgcatataaaactaaaaggtggcatactgtaag

SEQ ID NO: 39900 - DNA, 320 bp, Homo sapiens
tttcagtaatgtctcaaaatgcacacagaactttgaaattagtagaccaagaaagcaagaaggtgataaaattaaaatagatctacatgatctatttcaactataaaagaaaaatatattgaaagaaaaatataaaagaaaaacagttgacttacatataataaacttcccctaatttctctgtaattgctaatattgaatttctgaatacctaggatattattaaaatagcctttaatttatgtaattatctaaatagtagctatgttgctcatttcccacaatataaaatttactctttaaagaaaaatctgtaaggg

SEQ ID NO: 39901 - DNA, 327 bp, Homo sapiens
  misc_feature (1)...(327): n = a,t,c or g
nnnnnnnnnnnnnnnnnnnnnnnnnnnnnnnnnnnnnnnnnnnnnnnnnnnnnnnnnnnnnnnnnnnnnnnnnnnnnnnnnnnnnnnnnnnnnnnnnnnnnnnnnnnnnnnnnnnnnnnnnnnnnnnnnnnnttgtacatttttaaatgtgaattttatggtatgctgactatatctcaatataaatgactgaatgaaagggaatgatagctaccgcatttagggtggtgggtgcctctagggatagaggaggcaggggcttangggatgctcaatggtatcagtaccattctaggttttagtttggatgttcattttattatcatg

SEQ ID NO: 39902 - DNA, 320 bp, Homo sapiens
ctagaatccacaccacatgaaacacaaattgagtagtgtatgacccacctgaattccaaagcattctaaaactcccgtattttccagcctagcagttagctcctgctgcaagacacaccctcttgaccttgctgctagactgtatgggccccctgaagtcatagtagctggctcttactcatccccacattcacttggcatagttgatgttcaacaaatatctcttggttgcataacattgaacgagccaagtcacctaagaaatccttaatttatacacaggttcttagggtacctgaatagggcaacacatcagaagt

SEQ ID NO: 39903 - DNA, 318 bp, Homo sapiens
  misc_feature (1)...(318): n = a,t,c or g
cacaagcggaagtccctagagggtgacatgcccagagagggcatggaggctccatgccacttcccacatgacctcatcctatgcatctcttcatctgtacccattataataaaacagtaaaccctaactgtttgctgaggtctgtgccactctggcagattaatggaaccaaggagagggtcatgggaaccccgatttatatagccagtcattcaaaagttccggaggcctgcaannnnnnnnnnnnnnnnnnnnnnnnnnnnnnnnnnnnntctcactctgtgggatctgaaactatctccaggtagataatgtcag

SEQ ID NO: 39904 - DNA, 319 bp, Homo sapiens
ctctgatttatattaataaatatattgacaatttaggaaaggtctaaaggattctatgtttcctaaattgtcaatatatttattaatataaatcagagcactttaggcccttcatgcataaaagattagctctcattcacctaggaaacaaatattctcaaaagaataaaagcaaccatttgttaaaagaacaaaatgaaacactcccttctgataactaaggtattttttagtacatatgtatgttaaaatattcctgaatttctgaatctaatgtaattattatgaatattaaaggaaaattcaagagagtgaacat

SEQ ID NO: 39905 - DNA, 327 bp, Homo sapiens
gggggatggagcaattcctgcaatgtatctagactgcatttcagatttgaggcaaaaagaaatcactgtggcttgtggttatcttcccattcctgccccctccctgtgtgtaggcagagaccgatcctgtcttttgcacctcataactcccctgcttggggtaactgtgctttatcaccttctcatccacccacctgttcatccattcgtcccccaccaaacattttggagtacctactatgtgccagatgaacacagctgatccatggtctctgctttcaagggcctacacgtttgtgggagagacagacattttaataagaaacg

SEQ ID NO: 39906 - DNA, 318 bp, Homo sapiens
  misc_feature (1)...(318): n = a,t,c or g
agnnnnnnnnnnnnnnnnnnnnnnnnnnnaggagagaaatacagttatgcttttgttacagaacaaggtgaggttgctcctgagaagagaaagtgggaatagttttatggagatcatagcatttgaatttatccttgaaggctgagtaagatttgagtttgcagagtagcaaaggagggaatggccagtggaggagattgtataagccaaagtgtggaagtaggaagcatgatacctaaatggggaaagggaagngatttttttttcctattttgcttctggtttttctatnctttagcattatttatggagacactc

SEQ ID NO: 39907 - DNA, 328 bp, Homo sapiens
  misc_feature (1)...(328): n = a,t,c or g
gaaaacatgcacggataggatatattggattgccttctgttccctttcagtatatgtnnnnnnnnnnnnnnnnnnnnnnnnnnnnnnnnnagttcatcagtttgctgttctctgcagtgagcagaatcagatgggcaatatttgtcctgggagacctgtgccgcacccaggtccccgtgttaacgtgtgcctgcggttgnggntggcnccctcgggtggtagctcttctactgnaatgagacaagcctttcttctgtcactgcagaatttataaggggccgtgagcagtcttcccaagcatgatccaggancagctnatagagggtgg

SEQ ID NO: 39908 - DNA, 320 bp, Homo sapiens
  misc_feature (1)...(320): n = a,t,c or g
ccagtgagtggatcatccagtgatcgtgagggacgggtgctaccaggcagggaaagaagctctctgtaagcagggaagcctgctcagaagtgaagctggtatggcccttgcaaaacgggaaggacacagaaaagcaccaggagcatgtgatgggggcgtcgacgcggccgagaattccnnnnnnnnnnnnnnnnnnnnnnnnnnnnnnnnnnnnnnnnnnnnnnnnnnnnnnnnnnnnnnnnnnnnnnnnnnnnnnnnnnnnnnnnnnnnnnnnnnnnnnnnnnnnnnnnnnnnnnnnnnnnnnnnnnnnnnnnnnnnnn

SEQ ID NO: 39909 - DNA, 320 bp, Homo sapiens
gagaacccaccatggtgctgtctcctgccgacaagaccaacgtcaaggccgcctggggtaaggtcggcgcgcacgctggcgagtatggtgcggaggccctggagaggatgttcctgtccttccccaccaccaagacctacttcccgcacttcgacctgagccacggctctgcccaggttaagggccacggcaagaaggtggccgacgcgctgaccaacgccgtggcgcacgtggacgacatgcccaacgcgctgtccgcctgagcgacctgcacgcgcacaagcttcgggtggacccggtcaacttcaagctcctaagcc

SEQ ID NO: 39910 - DNA, 330 bp, Homo sapiens
  misc_feature (1)...(330): n = a,t,c or g
gtcagggaatcaggaaaaccttcgtaaagaaggagatatttagctggctttaaaaaaatattggcaaggtttgaatggaggaatgattttttaggcagagagcagtcagtgtaagtcaatgctaagtcaaggatgtatgtagggaatggggagtggtttgttttgcttgaaacagaagctttggagagagattctaggctaagaaatgtgaaaattatcttcaaggcagtgagagaggactttgagcaggagagtgatataattagccacatttcaagagaaggtatcttttgacagtttttttttttngtttttttttgaaanggagcc

SEQ ID NO: 39911 - DNA, 321 bp, Homo sapiens
  misc_feature (1)...(321): n = a,t,c or g
nnnnnnnnnnnnnnnnnnnnnnnnnnnnnnnacaattctgacttaaaagactgtttgttagtgccgcctttgaaccttagtcttacatgaggaggagtagatacatttatatatttatttggaaaaggtcgaataaaggatttgcaatttgattcagaaacgtcattaatttttaaaatttatttacttgcttatccttttctgaaaagactgtgaaacagttgcctgaatatttcgtttgaggggcagttaaaaacagaagttgtggaaaaacaatgtcggcaacaatttatgaaaggaaagcattggacatatttaatt

SEQ ID NO: 39912 - DNA, 330 bp, Homo sapiens
  misc_feature (1)...(330): n = a,t,c or g
taatttgnctnatttctcttcataataatgactttgagaatatttgtactgcactctttttccanaattaaccacaacttttcacagtaactgaattaatgccacaatggtacattcaaccagtggggcttcaggatgtgaaatagacaatattctgggccactgttactaccaaatactttctttacctttaagtctgtatatttttatctgtaaagtgacatccatagatgncactgtacacttcatagaaatgagtacacagaataatactcatggcnnnnnnnnnnnnnnnnnnnnnnnnnnnnnnnnnnnnnnnnnnnnnnnnnn

SEQ ID NO: 39913 - DNA, 330 bp, Homo sapiens
tgctcttatccctgcagggaaagtattaacatttgtttatcacttgcagaactaagtgatatttaccacagagtagacaaatattttcaagcccaaaatcaagtggtatcacttttctgctgagaatgtttcagtggtttcctttgctcttgggataaaacttaaatccctcaccctacccttgctccaaccctccactttccttctcccatgtggtgatttggccatacagctcttgtggctgatctgaactgactgagctttttacccttttgctcttgctgttcttacagcctgggaaccccctggttacctcttggcttggtgtgg

SEQ ID NO: 39914 - DNA, 205 bp, Homo sapiens
tttggatgtcagtttggaagtgggatcaataggttagtattattggattggatcagtgggagaggaatcaagatctcctagattttttgcttgagcaactgggtggatgatggtgtcatcgttaagatagagaaaattctgggaagaggaacaggtgtaggagagaaaacgaagttctggaagagaagtaatttttttttttttt

SEQ ID NO: 39915 - DNA, 321 bp, Homo sapiens
  misc_feature (1)...(321): n = a,t,c or g
gtaactaacttgtcacaatacaaagcatcacacttttattggtaattaacttgtctacctcctctgctaaaccaaattcattatgagcacagaatttatttctgcccctcaatcattgatgatatctctggtgaatgaatggaaacttgaagttaacaaatacacatatcgataaatgtatacgttgatgtacattgataactacagtatatacattgatgacctgcttctgtcacttcatattaaaaaccatgcatgggtnnnnnnnnnnnnnnnnnnnnnnnnnnnnnnnnnnnnnnnnnnnnnnnnnnnnnnnnnnnn

SEQ ID NO: 39916 - DNA, 316 bp, Homo sapiens
cggttgtgtgtgtggaggtgaagaatgggaagggaaggaggggtggggagggctggtgcttctgaggttcccaaagttcctggactcgaattttctgttggcaaataagctggtcagaacttaggaatgtggtaagttgatccaggaagaagttgaaggtttctatctgtgtttttctgtgcggttgtgtatgtgtaacacgtttgcagaaatagttgaagcttattattttcttcaaaagatcttattttctagtgtgtaaatcacaggtaattaaatatgagttaaagtaagagagagacccttgggctatctc

SEQ ID NO: 39917 - DNA, 321 bp, Homo sapiens
attctattaatttgtcatcttagaatcatgatattattataataacaatagcttactttgatatacatgtggctcccaagcacagctaaacataagaattgctgggataatttttgaaaaatacagataccagaatactaactgtattgccaaggagtgggacacagctgtctgtattttataaaaactccccaggtgctcctgtgcaggatgggagaaaatgctatcattgcatagtttctactagccagaaataacagttacagaataatactaataactattacaggaacaataccaccaataaggacaccactaaaa

SEQ ID NO: 39918 - DNA, 314 bp, Homo sapiens
ctcaaatttaagagctagaagaaatctctctaagctccatgcatgagggttctcaacaggtggattttactccagtgtgatctcactagaccatttatttgagggtcacccaattgtcagtatatgtatatgagagagaatatgtacatatatatctgagagaaattctctaatcacttgtcctgtgtgagtatatgtactttgccagttttcttttggggtgaggaggagggacagtgtattagagattttactgttcaaaatgtagacttcctcagttttcagtaaaatactctaccctgctatatgtggat

SEQ ID NO: 39919 - DNA, 320 bp, Homo sapiens
ataaaattcagttgtctcacatgaagtaaggataagaatcccaatataaaaaccaccatatggtattaaaaaaaagggaaacagtacctgcacaatcaaaaacttatctaaaatttaaaactaaatcatgatagagaatagcagctctggagacatattggtgaactgctctaaatacaaaaatcaattcaagtgtttagataaaaatttttctggaaagtgatccactccttaaacaaaggagaaacaaaagtataatatagtaacacagaaacacactgcatgggcatgaagagttacaggggacagaaaacagtcca

SEQ ID NO: 39920 - DNA, 314 bp, Homo sapiens
aagaccttctactcctcactttttctgattggaatagcttggtgaagagatggctgggaagaaatctttgaaaactggacttaagcgtatttttgaaaatttaaattttaaagtactctacaaacaacttggagtttttcacttcagtgtgacctaagcagatgtgtagatttagaggtcaaatgagaagtgtgttataaatacagcatgctagataattgccttgtcatgaatatccaaaattgggggtgataatacatttagaaaccagtttctgctgacaagcatgtatcagctcacttttggataaccca

SEQ ID NO: 39921 - DNA, 318 bp, Homo sapiens
cacttttctacatctttctgtccccaaagtctttaccagtcaagcacatcatgcagtttttttcgttcctttcccaacgtacaccctacccaacccttagagctctttatcctcctcttgtattgcagattgatcgatatgcctgctgcagagctgctgttaaggttcttctcttcaccattatcctgaaaatttctctggcctctgtcctttgttgagttgactattttctggacagtttcccttgttcttggtttactttcttgttttaatggagtacatactttagggccttccctgtgaaggatacatgggaag

SEQ ID NO: 39922 - DNA, 319 bp, Homo sapiens
  misc_feature (1)...(319): n = a,t,c or g
ctgagatgccaactcaatgtcttccaccaaatgtcagcctgaccagcatagctaaagtagctccttctcctcactcatgctttacaggacttatcactatctgaataacttgtctttttaattgtacatgcattacatttaattaaatcaaaacacttctatatttcaaaacatctctttagacaatagtttttaaaaagcaattttagaattcttcacaccaaccgttgacgcggccgcgaattccnnnnnnnnnnnnnnnnnnnnnnnnnnnnnnnnnnnnnnnnnnnnnnnnnnnnnnnnnnnnnnnnnnnnnnnn

SEQ ID NO: 39923 - DNA, 315 bp, Homo sapiens
gaaaaggaagcaaaccagtggcctacagatctacttcaggtagctggaaaattaagaaggcaactccaaagtaagcagaaggcagaaaagaacagagaacagaaatcaacaacagcagcagcattatctttcaaaggacaaggttaaacttgtaatctggccaaaattaacttatttaacagactgcttaatgggtgtcaactgtagtactagtgactccatgaactgatttctttggctgcatgtgaagtgggcggagtgttatcaaaaagtactggggcataaaatgtctgagaacaaataatacagccagag

SEQ ID NO: 39924 - DNA, 321 bp, Homo sapiens
ctctcaataaactctgcccaacagagggcaaacaatcacaactgaaggtggtcagtgccacaacgaaagtacgcactggacacaggaggggtggggcaaacagtaccaagaacaatgctgagagacgtcagaaaaaggctcctaaaggtaatcctggaggcaagttgtattttaacaagttgagaagtaaaaggctatgtgaagacataacaaaataaggcataactcaaagagctacaaagatctcattattagtgtagcttgaagcatgatgggttaaagaaattaggaaggaaaagtgtactgagactacactctggg

SEQ ID NO: 39925 - DNA, 320 bp, Homo sapiens
tggttctgctttgaaggtcacaaagcttcccaaagctgttaaaggtggtgctaactccctttactgaaagattactcttcagctgtaccagtggatttcccctaacagcgctcccagaagatgaacagactctcttattgttggtaataactgagtttttaaagaggacaccatcattggcaataatttaaatgacttttctaaggtattttcccaactgtttttctctttttcctcttccacttgagcaaatgtcatgaatttccttttttttaaaccaccaacacaagtattttttttcttaaataatgtgtatactt

SEQ ID NO: 39926 - DNA, 357 bp, Homo sapiens
caataaccagaaaaacccaagcacatttcacattcaaaaaatcacttttgccttggtctaaaaacatcatcatctctaatgtctacccgaaaccagctgacagtattccatttgctaccggataaatctaaaatcttgagcacgccccagaagcactcacaattggaccccagacttcgatggtatcatctcttgctattgctccctcactgcattctcagcatcctttcatcttgctatacctttcatttcttggggactttgtgtatcagttctcactgcctagagagctgttctcccattttcctccagccaagcccccactcattctgcaagactcagtttaactggaactca

SEQ ID NO: 39927 - DNA, 368 bp, Homo sapiens
cccttttatatcatttaaaattattttcttaaactggaccataatgacaaaattatgtcaacaggctcaaactgcattagaaatttttatcttcataaagatattttactcagtaaaggaaaaatttctactcatgaatacaaaatttcatgcttgtagaattagatgttcattataatttaaaacaacattctctctgttgatgaatggtatacattatagtgacatatttctttatcaaaaatatttataagcagaaataactaaagcactgcttttcaggttactaaatgccagggagtggcagaggagggatttttacaaaaaacaattaaatgctaaccaaaataatagcaaatgcctcagaa

SEQ ID NO: 39928 - DNA, 357 bp, Homo sapiens
  misc_feature (1)...(357): n = a,t,c or g
ggaaaagcagtttttcattcttccaaaaattgtaccaaggtaaagcaaagctctagatgatgcaggcatgttatgtaagcgttagcagtactgccctcactatgtgctcattggacagtagtgcaaccccaagaaaaagatggttagcagtttttgttgttgttgttaacgaaataaaacaaaaaacagctcattgctagtaaggaaactattttgtgaaactttcttctttttatgtgtgcatatactaagtcacaatgtaaatgtatttcttagaatgagtctcaggtcgacgcggccgcgaattccnnnnnnnnnnnnnnnnnnnnnnnnnnnnnnnnnnnnnnnnnnnnnnnn

SEQ ID NO: 39929 - DNA, 357 bp, Homo sapiens
gaaagggattccttttgactggaaaagatcaagaatggcttcatgaatgagatggttctaagctgggctttgagcatggcaagatttccaatgtccagagagggtagggtggggcatccaaggtagagaaaacccacaggagcaaagaaatccagtgcatgtttggggaaccacagggaatccatggtgggtacataagaggagttttaggtgaggataacataaaaaaggaacataaaaaggtctgtatgtcattaatctgaataatggcggcaaatgtcaccatttaattcagtaattcttgcggacatctgtaaaggaagtcgacgcggccgccaattccaaatctatgaatcg

SEQ ID NO: 39930 - DNA, 136 bp, Homo sapiens
ggagtctcccagttctcaaaattgggaaagcatttttgcaacatatatcatggagctcatttccatttccttaatatctaaagagttcctacaagtcattaagaaaaagaccatcaactgaatttttttttttttt

SEQ ID NO: 39931 - DNA, 363 bp, Homo sapiens
ggaaaggcttggctggatagttctgattcagggtctcttatgcagttgcagtcagatggtggctcaagttgaaacagcagggaaatggagcatctgggagctagagctgaaacaacagcggggtggagcctctgggggctggccagacatctctcttttcatgtggtgtcaggaactctccatgtggtcttgatgcatgaaatagtctggggtttctcacagcttggtggcctcagagcagtcagactgcttacatggtgggcaaaggctttaaaagcaaacattcccaatttggttcccttttataatttctactttaatgtgtttatgttgcttagtggtcagattaactagggattcaac

SEQ ID NO: 39932 - DNA, 352 bp, Homo sapiens
ctgccactgataactaagaacttcagaaccattactattctacttcaccaccctgctgctaatcaattctgaaagacacaaaataaagccaacgctgaatatcctttcacattagaaaggaggtgaatctcagtttacttgccactccccattttaatcatctttcttaaataagatctccacagtaatgaccgtaagtcctggtggagactcagctgactgcatatggcatcagtgtaaagaataaagaaaatgccataaaaactaaccactctcacccccagcatttaccaaggactttcttatgaggcattagacagatgctcctgatagccactacaatttggaagcc

SEQ ID NO: 39933 - DNA, 351 bp, Homo sapiens
ctggaatagacttccgtgttcccaatggggtcaggagatcggtcttatttccccaagatacagaaaggcaggacctagtttcaatcctccctggctcataattgagcccatcttcatacctctttcttcccgtcttctatgggtaaattccagagtggttgagttttaagctcctccccaggctctttcccctcattcttagagcccaacttcagtaccaaacactgccacccaaattgtccagcccccaaacacccacaggtagggtgctattcgtccttctttgataccccccaccctgcgccctcctccggttaagtgcattcaaaacttctgccctaacactcctag

SEQ ID NO: 39934 - DNA, 350 bp, Homo sapiens
gctgccttgtcacattccctgataccctgcagctctagttggtaaccattttccatgctgtatattcctatcaattgtcttatgttttgaccaaataattatttcataagatggaaaatattaaaataatatattaacattcgtaaataataaatcctgaaaaggatcatgagatccttttcatttaacttctttgggaaaattcatattgggccagctcttcatccctttgtacatcagaaaatggtttctctatctttagtaaagaaggaacatttaccgaatacctactatttgatacattgtcttatacaatcctcataatatctctatgtgatgtcgacgcggcc

SEQ ID NO: 39935 - DNA, 359 bp, Homo sapiens
  misc_feature (1)...(359): n = a,t,c or g
gctacaacaaataaataaaaatacatatatctatttggtacattgatttccatttcttgcgagggtnnnnnnnnnnnnnnnnnnnnnnnnnnnnnnnnnnnnnnnnnnnnnnnnnnnnnnnnnnnnnnnnnnnnnnnnnnnnnnnnnnnnnnnnnnnnnnnnnnnnnnnnnnnnnnnnnnnnnnnnnnnnnggcnnnnnnnnnnnnnnnnnnnnnnnnnnnnnnnnnnnnnnnnnnnnnnnnnnnnnnnnnnnnnnnnnnnnnnnnnnnnnnnnnnnnnnnnnnnnnnnnnnnnnnnnnnnnnnnnnnnnnnnnnnnnnnnnnnnnnnnnnnnnnnnnnnnnnnnnnnnnnnnnnnnnn

SEQ ID NO: 39936 - DNA, 348 bp, Homo sapiens
  misc_feature (1)...(348): n = a,t,c or g
nnnnnnnnnnnnnnnnnnnnnnnnnnnnnnnnnnnnnnnnnnnnnnnnnnnnnnnnnnnnnnnnnnnnnnnnnnnnnnnnnnnnnnnnnnnnnnnnnnnnnnnnnnnnnnnnnnnnnnnnnnnnnnnnnnnnnnnnnnnnnnnnnnnnnnnnnnnnnnnnnnnnnnnnnnnnnnnnnnnnnnnnnnnnnnnnnnnnnnnnnnnnnnnnnnnnnnnnnnnnnnnnnnnnnnnnnnngtagtgactagatttcaattattttcaccttcttttctttatttcttctcttttcatttcactaatgacataagcccatacaatagaacgtaaatcctcataatgtgaaaacg

SEQ ID NO: 39937 - DNA, 357 bp, Homo sapiens
tccatctctacttcagaccgcccagttcgcttggccagaacagttttcagcctccggagccggccttcaacaatccacttgtttttcctgtagctggacatactctccagagtcttgtcaatctcattgatgatgagggtggagccattgagctcatgcacaaggaaggccaggacagcagccttctgctggggtggctgggcctgaaaaggctgggtgcgcaggcggtcacagagggctggctctactccatatgccataaggaagcagcgcaggatctctgacacattgtctcttgtcagtgggatctcagacaccttctcccccaagatctttagggactgacagtaggaggga

SEQ ID NO: 39938 - DNA, 343 bp, Homo sapiens
gaaaggtcctgtgttgtgatttttacagttggacaggaagaatcagagtcattagttagccttctgctcagagccaaggaatgtcgttaagagatgttatgcagactgaggttataaaaccaaattacctccactgagcaaatcacctgtattcagaaacagcagggaagttggaaaactagtcggtagtgggggtaggactgaagggatgtgatttttcttttttaacgtacaatgcaacagtggctctccctagattttgtgctaaaataagaacattttcacacattttaattgctctgtggtaacaacagtgcgaactccatccacaaacatttattat

SEQ ID NO: 39939 - DNA, 346 bp, Homo sapiens
  misc_feature (1)...(346): n = a,t,c or g
nnnnnnnnnnnnnnnnnnnnnnnnnnnnnnnnnnnnnnnnnnnnnnnnnnnnnnnnnnnnnnnnnnnnnnnnnnnnnnnnnnnnnnnnnnnnnnnnnnnnnnnnnnnnnnnnctgtattgtaaaaatacaannnnnnnnnnnnnnnnnnnnnnnnnnnnnnnnnnnnnnnnnnnnnnnnnnnnnnnnnnnnnnnnnnnnnnnnnnnnnnnnnnnnnnnnnnnnnnnnnnnnnnnnnnnnnnnnnnnnnnnnnnnnnnnnnnnnnnnnnngagttcttttgcataccctttactcaggtcctctcatgttaacgttttacataactgtagaacatttatctaaagta

SEQ ID NO: 39940 - DNA, 346 bp, Homo sapiens
ctcctgtttctcaattcagaacaaacgtgagctgatcctccgttgtgcagaaggtcatgtcctctcaatttcatttgtcttactgtctgacaaatccctgctggtagccgccatagtccagtcttactggaatgatagttaaattacttcagctttagagaaggccctatcaccttagagctcttattcataaaacaaacaaaaagcaacccttcctatatcctacctatttacagatgacctagaaataaacttgataaaatcaaaccaacctgacttctcccatcaaacattccttcctcactcgtttgtttcaaccaacgtcaccgacattaggtcaaacagc

SEQ ID NO: 39941 - DNA, 319 bp, Homo sapiens
aaaaatttacctctgatttctaaattattcccacatctctaaaccacagtgacttttgagttgttaaagtcagggaggaggatttttaaagtttgtgtaagttaagtgtgtttttccttcatgtagactttagattcttctgagttctgagtaaagtgttttttcaagagaagtcagttgaaatgttagagacagaagataagcccaaagagatggaaagcttcctcaattaaaataataaaagacttccatttatagatattgaagtatgtttacctgctgaagttgattgattccctattcagttttctttttattc

SEQ ID NO: 39942 - DNA, 318 bp, Homo sapiens
cttcacagtccttttactgtgctagatggagtcaagttcatagaagtggataacttgcccaagatcttaccaccaacttagtggtagaaacaactacaccaaggtccccacccagctctgacttgaggtcacctcctgcagtcctgaccactttaaagagcacagactttgaaggagacggccaattcattgctgattctgtcaccgacttgctaagcagaccgtagcaagttacttaagtgctccaggtttaagtcccctcatcagtaaaatgcaaataatggtggtcgacgcggccgcgaattccagatctatgaa

SEQ ID NO: 39943 - DNA, 326 bp, Homo sapiens
tttcatttctaatatgcttccagtccacgacctaccctgtaagaagaatcaagacagtgatttgcagttagaattacctaagggaacttttgaaaaaactgctgcccagtcacaccacacattaaagcaaaatttctgggggcaggatccaggcaccagtgccttaatgtctgatctagatgtacaaagacaaacttctgaactggctgtgtggtcaggtaggtgggctttggagattatacctaagttgtctgatttttactggcagaatggctctgaacaaactattcatctctctgggtctccttttccttagtaaaatatgg

SEQ ID NO: 39944 - DNA, 116 bp, Homo sapiens
cgccaccattcatttggccccaggtatgtgctgacctgttcccaaggagttgctgcttttctgtctataaatctgcatgcttgcattgttggcaagactgtctttttttttttttt

SEQ ID NO: 39945 - DNA, 325 bp, Homo sapiens
aaaaaaaaaggaggtaaaatatatgctttctttcagctaatgtaattgcatatctagaaaaaaacaaatcaactggaaacaatttagagcaagatgatttagtcaggtgactcgttattgggttaataaataaaagctttcctagacaaataaccacttaaaatataagaaaatatttctgtttacaacagtcatcaaaaatgatcaaatatctaaaaataagtgaaatgtgatacacatatgggaagaaaactttaaaactctcctgagagatattttttaaaaaccactaaaataactggaaagatatattttgttcttgaga

SEQ ID NO: 39946 - DNA, 314 bp, Homo sapiens
tgttggatggacctgaggaaggacaggagccagaggccccctgaggagctctgcgccgcagaagtaaggctatcctcgctgcaatggtgaccattacaatggggacagttgccacctcatcaaaatgaaggaaatcagttcaaattctaaaaaaaacctacatggcacagccaattctagaattgtccactcttgcttcacttggtttgagtaggatggggctgtgtgtttgaaaacatctaaggaagaaaggggggaacaaactctctgaaaagaaagtagaactttcactaaatattgacccaaactggaat

SEQ ID NO: 39947 - DNA, 313 bp, Homo sapiens
ctttattcttcctggctgggagatggaaacagctaaagcaattaccttgtgcacagagacggaagtcacatattaaggatgcagaggtaccctgacagccttcgggtttctccctctggtctgtgtcgtgtgaaatgaaaataaaccatttgcttgaaaccactatatattggaatttttcgttaccgtcttacagtctattccttagttattacatttttcaggtaagttttataatagcttcagttagaaacagcagaaaaatcaataaacatgaaaatgatgaacccatccaaatctacatattcatttg

SEQ ID NO: 39948 - DNA, 320 bp, Homo sapiens
  misc_feature (1)...(320): n = a,t,c or g
ctcctataagtctttcacccaaattccctgattattaatatttaccacatcagctttattttctctataagtgtacattattattattattattattatattannnnnnnnnnnnnnnnnnnnnnnnnnnnnnnnnnnnnnnnnnnnnnnnnnnnnnnnnnnnnnnnnnnnnnnnnnnnnnnnnnnnnnnnnnnnnnnnnnnnnnnnnnnnnnnnnnnnnnnnnnnnnnnnnnnnnnnnnnnnnnnnnnnnnnnnnnnnnnnnnnnnnnnnnnnnnnnnnnnnnnnnnnnnnnnnnnnnnnnnnnnnnnnnnnnnnnnnn

SEQ ID NO: 39949 - DNA, 312 bp, Homo sapiens
  misc_feature (1)...(312): n = a,t,c or g
atttttagtagagccaccacacccagccagttacatagttttttaaannnnnnnnnnnnnnnnnnnnnnnnnnnnnnnnnnnnnnnnnnnnnnnnnnnnnnnnnnnnnnnnnnnnnnnnnnnnnnnnnnnnnnnnnnnnnnnnnnnnnnnnnnnnnnnnnnnnnnnnntcattataatttatttaaccagtttcctgttgatggactttggggtttccggtttttgataatacaacccgtgctgccctagccagccctctgcatcgatcttgagtgttgagtgagtgttttcacttaggttgctagatgaga

SEQ ID NO: 39950 - DNA, 313 bp, Homo sapiens
  misc_feature (1)...(313): n = a,t,c or g
ctttgccaatgatttccattccctcaatgctcctggtctaagccacgcctaactcctccccactggagaacagtagaggagagtgctcttcctggtgagtaggggcagaagtaccacatacaggcttcttgtctgggtagaggccatccattaaaagatcgtaagcaccagccannnnnnnnnnnnnnnnnnnnnnnnnnnnnnnnnnnnnnnnnnnnnnnnnnnnnnnnnnnnnnnnnnnnnnnnnnnnnnnnnnnnnnnnnnnnnnnnnnnnnnnnnnnnnnnnnnnnnnnnnnnnnnnnnnnnnnnnnnn

SEQ ID NO: 39951 - DNA, 323 bp, Homo sapiens
ctctaagctaccagctggatcttaattgcatgatcggcctccaggagacagaatgttccagccaggaggcatgcatacccacattctggctccaggaaacatgtacccgatcatgaggtaatccttctgagttccagctactcatcacttcctgaagttgcccaggtgggcctaggccaagggacccacgggtggaagaatcagaaagctcaggtcctcacaactctaaggatacctggccatggtggggactggcagcatcctcacctcacatgcatccagagaaaacccagactgtttccaggtaatggaaaatgtccagg

SEQ ID NO: 39952 - DNA, 312 bp, Homo sapiens
aagagataatatgtaagaaaagagataatgcatctaggaaaaatcacttctttttcctttcccagtacctgaagacaagctcactttatctgctaaggccaaattactctatacgtacatacttgattaagcacttatcacatggtacttttattatcagtttatatatctagctttactcctcaggagcagtaacatttgcctttctgtattttgaaaacgaccttgcacagtggactggcttaaaagcagatgctcagggaatgaattaatgcatctcatgctcactggaaagatcacatagtaatagac

SEQ ID NO: 39953 - DNA, 312 bp, Homo sapiens
ctttttgttctcggtttaggatagagaccatggttcggatctctgtttgtccatctttgaccgaagggctgggtcacagccaagtgactccgagccaaatgctggcagtcaatggcagtaagatgcttccgcttaaaccgtctcactgtttcataccagcaggtagaagaaaggggatattcattagttatcaccgattctacaagctagccagcacattatactcaagtttctgcatagtgacacgattttgtcaacaccccagccaaccgttcccccctccccttgccccccaactttgtcctttcaatt

SEQ ID NO: 39954 - DNA, 321 bp, Homo sapiens
tgttaaaggaaaaaaagactgtagaagtgttcctgactagatttcaatccttttttggtttctggacccttttgagaatctgatgaaagcttgagggtggtgatgcttgtcacaggggcagctgccacaggggcagctgtggctcgctccagcacattctccaaaagggattccctttcaacagttgtttaaataagatggcaagaagatggctctcaagactataatgaaaagataacaatagaggaaatggcagaagagcagggtgggtagttctgcacgtgatcgaagcatcggtgttcagactatgggaggagcagg

SEQ ID NO: 39955 - DNA, 312 bp, Homo sapiens
ataaaatttagtaatgggaaaaaaatgaaggcttaacatattccttctgaatttaaaataattaaattttctgcaactttagttagcaatagatcatttcactggaaaaatcttagttgtgatatctgtgttgctaaattcaaaaacatactctcatagctgcagaaattaagatgattagtatcgaaaccagtaagctgagagagagaaaggagggagaggagagagagaaagcgcatgtgcgggtggaaaggagagagaaagagggagagggaagaagggagagagaatgagacaagcaaatggtacaaa

SEQ ID NO: 39956 - DNA, 312 bp, Homo sapiens
ctgctgcatagtagatggcaatgacaggaaacatcctgatcattcgtcctgaagactactttctgttactgctaaaatttaatagtattatcatcctgcctcctaaatttttacatcaaaataattgttaagcacaggacttagaaaataatttgaaaggcgatgtcatttaaaataatttttaaagtgattttgtagattcatagcactacactttataaatacctcatctgaagaaacctttgtgttagacgttcccaaatagctggcaaactgcccatgaaatgatctcagttacaaactgtgatttct

SEQ ID NO: 39957 - DNA, 321 bp, Homo sapiens
  misc_feature (1)...(321): n = a,t,c or g
tagtagatggtatgacctaaataatgtcatccataaatgcttcagcacatagcttatattaacaaggatgttcccttatataactgtaatacgattatcaaactcaggaaatttaacactgatacaatattattattattattaatttttaaaattttttaatttttattttactttaannnnnnnnnnnnnnnnnnnnnnnnnnnnnnnnnnnnnnnnnnnnnnnnnnnnnnnnnnnnnnnnnnnnnnnnnnnnnnnnnnnnnnnnnnttattatttaaaatatatttcatctttaaaatttttctaattattccaataa

SEQ ID NO: 39958 - DNA, 313 bp, Homo sapiens
tgggagggaaggggtctgtgggaaaacaaccagaacttacaatgaggatgggggagtctaaggattcagaaggaagctggaataggagacttaaacagcagtccctcacatcaacaaataccctgagtggggaagctgggaggatctacaaaaaggaactatttctaccatttcttttgaaatgtaagggttttcatcttttacctccaaacttttggagctcaactgaactttgcgtaatccatctgacatatttagttaagcctactatggccaagcaaatgtgagagatagatacccaagtgagtgtaat

SEQ ID NO: 39959 - DNA, 277 bp, Homo sapiens
ctctcaatcttctaatttccttctcagttcacctgcagaattggaaactggagactcagtctcccttcactccagtccagtaatactagggaagacactcagaaaaatgcctgcatggctggtttcaaagaaaggattccttcagaacagctttccgtctcctttctccgagtacaggttacgagcaaagaaacggcaacatcattcttttatctggttcaagcataactttgctgggcaagttttttttttgttttgttttgtttttttttttttt

SEQ ID NO: 39960 - DNA, 329 bp, Homo sapiens
  misc_feature (1)...(329): n = a,t,c or g
gaaaaaaaggtgcgtgactttcacctcaattaaaaaaaataaaacatataaaaacctgtcagcagggcatggtggcgcatacgtcgacgcggccgcgaattccnnnnnnnnnnnnnnnnnnnnnnnnnnnnnnnnnnnnnnnnnnnnnnnnnnnnnnnnnnnnnnnnnnnnnnnnnnnnnnnnnnnnnnnnnnnnnnnnnnnnnnnnnnnnnnnnnnnnnnnnnnnnnnnnnnnnnnnnnnnnnnnnnnnnnnnnnnnnnnnnnnnnnnnnnnnnnnnnnnnnnnnnnnnnnnnnnnnnnnnnnnnnnnnnnnnnnnnnnnnnnnnnnn

SEQ ID NO: 39961 - DNA, 329 bp, Homo sapiens
ggcagatatctgccccacattatttaatacttaattccaaaaaaattaattccataaaatgaaagtttatgctctattccaaacctcaagccactggtattgtcatggctttattgaatatcctggcttgtccatagaggcacatagatcaggtttctttgaagcaaagggactttctatgatatgtcttgtaagaaaatttccctattgttgacatttgcaagatctattattgggagcactttattgacttggtgacactcccgcagccttctccagctgtttcccagtatcacatatgcaaccaagtcacaattcttcactggaga

SEQ ID NO: 39962 - DNA, 341 bp, Homo sapiens
  misc_feature (1)...(341): n = a,t,c or g
ggcacatgcgnnnnnnnnnnnnnnnnnnnnnnnnnnnnnnnnnnnnnnnnnnnnnnnnnnnnnnnnnnnnnnnnnnnnnnnnnnnnnnnnnnnnnnnnnnnnnnnnnnnnnnnnnnnnnnnnnnnnnnnnnnnnnnnnnnnnnnnnnnnnnnnnnnngatcaagcttgttttttagatacaatatgtgaatttagcctaagccatacgtttaaaatatagccatttggcattaactttttaattaactaatcaagagaagagggaaaaccaatcttgtctcacaatgtgcactctacctttttgctgtactaaattaagtataacttaaaatatatgacaa

SEQ ID NO: 39963 - DNA, 330 bp, Homo sapiens
  misc_feature (1)...(330): n = a,t,c or g
aaaggagggagggggagagagagagaaaggagggagggggagagagacagaatgcctgccagatggtgggataacaaagatcnnnnnnnnnnnnnnnnnnnnnnnnnnnnnnnnnnnnnnnnnnnnnnnnnnnnnnnnnnnnnnnnnnnnnnnnnnnnnnnnnnnnnnnnnnnnnnnnnnnnnnnnnnnnnnnnnnnnnnnnnnnnnnnnnnnnnnnnnnnnnnnnnnnnnnnnnnnnnnnnnnnnnnnnnnnnnnnnnnnnnnnnnnnnnnnnnnnnnnnnnnnnnnnnnnnnnnnnnnnnnnnnnnnnnnnnnnnnnnnnnnnncctt

SEQ ID NO: 39964 - DNA, 329 bp, Homo sapiens
ggaagattgtagtggtgaggcaaagaaaggataagtaattgacccaaggtcacacctagcaggtggtgaagctgagccatgggtcttggcttcaagaatctgtgctcttacccaccatacctgctgctgccggattcaaacccgaattgcattaaggaatcatcataacctgtttgattgaagctataagggaactttgagcatggtgaatggggcgctctatggaaaaggggttctgggaagcctctgtggaagggaggtttgttaagtgaactcccctggtaaacggagtgattggcccccaattagcttgctgttcggattaactg

SEQ ID NO: 39965 - DNA, 331 bp, Homo sapiens
  misc_feature (1)...(331): n = a,t,c or g
nnnnnnnnnnnnnnnnnnnnnnnnnnnnnnnnnnnnnnnnnnnnnnnnnaaccaccacgcctggcccacatattcttaagggttgggggggattctgtgagaatttttaacaacttttcatatttgattatctttaagtttaaaaaataattacagaatggtttaaaaaatagagatttccannnnnnnnnnnnnnnnnnnnnnnnnnnnnnnnnnnnnnnnnnnnnnnnnnnnnnnnnnnnnnnnnnnnnnnnnnnnnnnnnnnnnnnnnnnnnnnnnnnnnnnnnnnnnnnnnnnnnnnntatgtattaaaatatatttttttaaaaca

SEQ ID NO: 39966 - DNA, 322 bp, Homo sapiens
  misc_feature (1)...(322): n = a,t,c or g
caaacactaaacaaacagtaagatattaggtataccttaatacccataaatttgaaatttttgattatagacaattatagacaattcctagaaaaatatcatttaataaacctgaaccaaacaattaacaactctgattagtcctatgatgtttaaagaaattaaactgataggtaaaaaacactcccacccaccaaatttcaagcacagacagcttcagacactggaaagtgtttgtttgtttgtttgtttgttttaaccaagtataaaataaagaagtaattcggctgagggtggcggctcacaactgnaattctagcac

SEQ ID NO: 39967 - DNA, 314 bp, Homo sapiens
  misc_feature (1)...(314): n = a,t,c or g
tctaaatactaagtttcttgtatagcaattttcaaccacttatgaaagttttaagttatgcttttcacttcccataaaaatgtgtcaagagttttgtgaggcttgtgtttcagtttttagtttttttgttttttgttttttgttgttttttttttttnaancncaanggggtntnganctggggntaagnaaaagncnttaacttnnggntnggaaangggttnatnancttncaaangaaancntcngangnnttagnaatntacttcaancaaantanngaacccnccntggggggaccnggcncaaaaaaa

SEQ ID NO: 39968 - DNA, 325 bp, Homo sapiens
tacagaggtgccacactgtcccccactggggacccactgtcatcctcttgctgcaaataacttgcataggaatccccctctccacaggtctgtggagtacattccttggcacctgcctaggtagaagggagaagagcctagagtcacacatgttgtatcttggacccataggagataaatagtatgtgaagtccagacaatcttgtttttcttcatttattagtttctgtccaggcaatcctatcacagccactaaagcaaagcagaacaaaaacatttgtgaaggttagatgtcagcggtgttaggatgttccatgtcttatgt

SEQ ID NO: 39969 - DNA, 325 bp, Homo sapiens
  misc_feature (1)...(325): n = a,t,c or g
attcccatttcccaaggctgcatggttaggaagttgcaagctggcatctgaacctggcattctggccccgggccacctgtatatatatatacatannnnnnnnnnnnnnnnnnnnnnnnnnnnnnnnnnnnnnnnnnnnnnnnnnnnnnnnnnnnnnnnnnnnnnnnnnnnnnnnnnnnnnnnnnnnnnnnnnnnnnnnnnnnnnnnnnnnnnnnnnnnnnnnnnnnnnnnnnnnnnnnnnnnnnnnnnnnnnnnnnnnnnnnnnnnnnnnnnnnnnnnnnnnnnnnnnnnnnnnnnnnnnnnnnnnnnnnnnnnnnnnnnnnnn

SEQ ID NO: 39970 - DNA, 316 bp, Homo sapiens
  misc_feature (1)...(316): n = a,t,c or g
gaaacaataccatctgaaagtagggtttttgccacttagggtttggtgtttattagctcggatttcagatgggataggaaatcccccagtaccttcagatgataagatattttagagatttttgcatgtggtatgatttctgtgcttcacacatgctcgtgcaggctaaaagttggaagggaaatgattaagaaattattaaatgcaaggactgaaaattgagaggaatctgagtttttatttttatttttttaattttannnnnnnnnnnnnnnnnnnnnnnnnnnnnnnnnnnnnnnnnnnnnnnnnnnnnnnn

SEQ ID NO: 39971 - DNA, 328 bp, Homo sapiens
gatctccagaacttactcatcttataactgaaggtttgtatcaacaactccccattccccaccctccaaacccagcccctggcagctgctgttctgctgtctgcttctaggaagtaactcagttttgttatctctagaactcatctttgtgcccatgttctcagtaaatatgtgttaacgaatgacttcatttttaggatttgcctaaatatcatttttactttcacttaagggattattttagtttcaactaaaaattagaacatttccttgaaatccactctgtttagcaggctagacacagtttctttccccatgcagggattaa

SEQ ID NO: 39972 - DNA, 311 bp, Homo sapiens
  misc_feature (1)...(311): n = a,t,c or g
ggggacagggcctcagtnnnnnnnnnnnnnnnnnnnnnnnnnnnnnnnnnnnnnnnnnnnnnnnnnnnnnnnnnnnnnnnnnnnnnnnnnnnnnnnnnnnnnnnnnnnnnnnnnnnnnnnnnnnnnnnnnnnnnnnnnnnnnnnnnnnnnngtgatatcacttataattatgtataaaacacagttaactccattttgaagacagtgaagtaagttttccaactatcagcaaaatatacattacattcaaatattatcactgacttaaaccacatagaaaattttaaactacttatgccattttattctca

SEQ ID NO: 39973 - DNA, 311 bp, Homo sapiens
gccagaaataattttttgaatcacactgttaacagtgggaaaatctctatagtggaaaagctgcaaagttttaaaagattctctctgaaatagtttttatatattatttcagagaggttatatattaaggagcagaattctaaaatcctgtcttcaccttgctctttacaaaatttctagtctgggaaagccagaaataaatcaatgaatactggaagctattatgggaaccaagtaacttcctgaagtgaattactctaaacttaacgaaccattcttccaatcttagggctaaatgtcatctaaagcca

SEQ ID NO: 39974 - DNA, 315 bp, Homo sapiens
gctagaaccaatcccacagaatacagaaggaccactgtataatttttacaaaaaacttctaagaaagttcaagatttctaaatcataaaaccacttacaccattccctttttcatttgcatatcatcgctgaatggaattatcgtaagaattcacatggattgtacatttaaattcagaccaaaaaaatcaatgcatataaaaagataatctgtatccaaagaatagaagacacttaaaaataaaaccggatgtgtgcatctgctacaaactaggtatccctaatcagaaaatctgaaatctgaaatgctccaag

SEQ ID NO: 39975 - DNA, 324 bp, Homo sapiens
  misc_feature (1)...(324): n = a,t,c or g
caactatgtgccagacactgttccaggtcctgaggatcatgacagacacatacctctgcccacagagttaccatctagtcagggagacaggtgacataataacataggaaatggtgatcagtgctaaggagaataaagtaaaacagggaagggggatagaagagtcgtaggagttgaaatcgtagtcaaagtaagttgagaagggagtcaaggaaggcctggctgagatgatgacattggagcgaagacctggagaagtgtgatatgcgggggaagtcgacgcggccgcgaattccnnnnnnnnnnnnnnnnnnnnnnnnnnnn

SEQ ID NO: 39976 - DNA, 327 bp, Homo sapiens
gagaggtcttgggttacagctgggtcagaggcaatcagtatatccatttggacacccctgaaccagcctccgtggattagagtctgagttggggaactcggagaggacagagtggacatctgtggaacatcagttctcttgcattaatggctcataatgcacagactatatcctaagcattaattcaggaaagagttatttaatagggtctctagagtccctgatggccagtgtataccaactcgtttataattcaaggactgagttagaagatctttaatgacccctcccattaaaaaaactttggtcagatgttgacctctttgg

SEQ ID NO: 39977 - DNA, 323 bp, Homo sapiens
gacttaacagaacaatggaagctcatcataatcagggaaacaagaagaaaagagaatcactcaggctcctttctggcgggggagtggagaggctgggaaacacaatgacagtgaaccatgggaagcagggggcatggccactggatctgaaagggaccggctaacagtcactaaatgtccaaggcctgggcttgagcaatagcctcaggtatctccatcacttacacagcactcattcgttcagtgagatgtcatttattaagcagttacaatgctgcaggtgctgtgcaggagactggacatacaaaagaagaatttgaccc

SEQ ID NO: 39978 - DNA, 326 bp, Homo sapiens
  misc_feature (1)...(326): n = a,t,c or g
cttacatttacatcatcatcttcatttaccttcactattgtagaaattaagtctccaatccctaatgtagcacattggtttaccaattgcatatcactatcttctgtgtcattcattagatgaaaaaaataagccttgctcaaaaatgaacctatccatgagttgtataggaacaagatttataacctcagctggctgatactatttagcaaaaacatttctccacgtagttatggtccctttgtnnnnnnnnnnnnnnnnnnnnnnnnnnnnnnnnnnnnnnnnnnnncacacaattattttacttgtgataagctttgtttttg

SEQ ID NO: 39979 - DNA, 321 bp, Homo sapiens
tgattaaaggaagtatctccagtataattacagttacttataacaagagtatttgaaatttgaagaaaaaggttagacaatttataatgaaatataaataaatatgtataatatataaggcattattaataagtgtatatgaaatagtcatagaatgaaaaagattaatgtaattcattgaagtaaacatacattctgaataagaatagaaaaggacttggaaaatattgtttaataatattttatataaatacaaaaatgtatatattagcccaacattatttattttggaaaggatatgacacaatgggaattttcata

SEQ ID NO: 39980 - DNA, 332 bp, Homo sapiens
ctctcatacaatctgtggcagttcctttgtccttcagtctgttacagtcttgacaccttgaagaatattagtcattttgtaggctatcaatttgcgattgtttaatctttcctcattattacagtaagattacacatttttggcaagagtaaaacagaaataatattgtattcttcttagtgcatcatatcacggggtatgtcagcatgtcctactactggtgatgttcaccttgatcacttaattaagatggtgtcttcaggcttctcctttagtaaatatcttggggacgatactttgaaactatgcaaatatcctatttcatttcaaag

SEQ ID NO: 39981 - DNA, 333 bp, Homo sapiens
gcagagctccaataactattagtaaatctagaagtttcacactatattcctatttaaaaatctgctccaaaatcctgacaagattaactgacaggattttaaaatttctatacaaataaaatggcaacaagcatccctaacagttgaaatgtagttaaacgaatatcacctctttttttctcaaggggtcataaaactaacagctcatttgtcacccccatccccccaccatatatatcctccctttgcctgttgctgagtaaagtcaactaagagcagacattccaagtcaattttcctgagcaactgatgcctaggtaaagaattattaca

SEQ ID NO: 39982 - DNA, 320 bp, Homo sapiens
  misc_feature (1)...(320): n = a,t,c or g
gttagctctttggtataggcctttccaggcacaaatataaatagatacagttgtcccttggtattcataggggattggttccaggacccctgaagataccaaaattcaaggatgctcgagtcccatatataaagtggcatagtgtttacgtacacacatcctgtatattctgactctnnnnnnnnnnnnnnnnnnnnnnnnnnnnnnnnnnnnnnnnnnnnnnnnnnnnnnnnnnnnnnnnnnnnntttaatttgtattgntgtannnnnnnnnnnnnnnnnnnnnnnnnnnnnnnnnnnnnnnnnnnnnnnnnnnagtg

SEQ ID NO: 39983 - DNA, 332 bp, Homo sapiens
  misc_feature (1)...(332): n = a,t,c or g
caactgtcaaaccagaaaggacttgttccctggccaggaattgaacctaggccaccacagtgaaagggcagaaccgtaactcctggacacagaatggagtgtctccgttgttcttcccagaaggaatgtaaagcaggcacttttgaccttgaataggattttaactttgttttaggtcagatctgctccaaagaatagctataacattactttgtgtccctttaatttaacctttccaacaattgtttagaataaaagnnnnnnnnnnnnnnnnnnnnnnnnnnnnnnnnnnnnnnnnnnnnnnnnnnnnnnnnnnnnnnnnnnnnnnnnat

SEQ ID NO: 39984 - DNA, 322 bp, Homo sapiens
atcttaagcatgcacagagccatccaggaagccttctgagtgggtggcaccatgggttctgcggcaacacagggtccatttgaaaaaaaggagaccagaacttacaatatgctcctcttacctctcttccctatctactgtactcttattccttattacagtcagggtgatatgagtgatgggatgtaactccttaccacggctggtattgcttggccccaaggtgctatattctttctcagctagttcaaggtatccttaatccttgtaaaaagtttaatatttctctagtattgtaagtcgaaaccaggagagatggtga

SEQ ID NO: 39985 - DNA, 332 bp, Homo sapiens
aaaatatttacattcttataacacaggacagtgactttcttctttcaagattgtagctcacagaatggatacaggattcaattgggggttcaataggatagaaatggagagattcctttgtgttggactataggcattttcctaaggagtatagatttatactttgcattttcattcatcatcccccagaatcatggtcaaggagtaggtcactccacacagctgatgctcaggttattcccttgtgagaattatgagaataaagctcccaagatatgtgaaagtgcttaacacagtacctggcacacagcactcaataaaagtttggctct

SEQ ID NO: 39986 - DNA, 322 bp, Homo sapiens
gaaacactctgaatttgccagcctttctaagaactaaatctaaattttttaaatatgcctgactgaatcctatactttttgaggtacaatgtattactttttggtacagatataattatgtttttatacatttgacaccacaaaattggtatgatattcagtgtgtttgcaaacaatgaagattttaatttgtcgaaggtttactgaaatggaaaatttgattttgttttaactccaaaacattcttacctaagaaggtatattcctgtaacttttatgtgcctaagggatttattgtttcttggttcactgcttttcattg

SEQ ID NO: 39987 - DNA, 324 bp, Homo sapiens
tcctgatgtatccaccacaggtcagggatcctcctggttccacatattactgtgacttccaagataaactcataaaataagtccattaaaaagtaaaacagcttcatatttctccattaaattttgtaattctagttaattcatcattcatctggcacatagatccattaccacatagcatctattccaacaagttagtgatccagaaaatcaataaatagaaaagaacagttacagaatacaaccaactagcattatgggaaatgattctatgttttttcatgttcattgataatcaatcaaggttatgtatatatttgttaa

SEQ ID NO: 39988 - DNA, 333 bp, Homo sapiens
ccgcaatcaggtggcgaacatcccgtccttcattgtccgcctggattcccagaagcgcatcgacttgtctctgcgctctccctatggggtggccgccccggccgcgtgaagaggaagaacgccaagaagggccagggtgagggtggggctggagacgacgaggaggaggattaagtccacctgtccctcctgggctgctggattgtctcgttttcctgccaaataaacaggatcagcactttacaattggaaaaaaaaagaaagaaaggaaagtaagagtagcaacctcataggcagagtagctctgaggatcgttggttgggtattttaatg

SEQ ID NO: 39989 - DNA, 324 bp, Homo sapiens
tttgtatcaggaagtagtgatattccaggggatccaaacaatgaatataaattagccctcaaaaactatattccttatttaactaaattgaaattttctttgaaaaagtcctttgatttttttgatgaatactttgtcctgctaaaacccaggaacaatattaagcaaaatgaagaggccaaaactcggagaaaggtggctggatattttaagaaatatgtagatatattttgtctcttagaagaatcacaaaacaacacaggtcttggatcaaagttcagtgagccacttcaagtagagagatgcaggagaaacctagtagct

SEQ ID NO: 39990 - DNA, 335 bp, Homo sapiens
ccctattacacagactagctatgctatttatgcccacacagaatcacaagagttgatgtacatttttaagctttttaattagaaggaaaatactaccacattgatcattataatagtcttaagcacatagtacacaagtttcaaatctcctaaatcccacttcttgcccagaggcaatcaatgttaattgtttggcatatgtatttctggacatatctcttatgtctttacatagaaaaaaacaaattctacagttggtgataagtgctaaagagtatttaggagaaggggagcttaaagcgctaaataagggaagacacatcactaagggggta

SEQ ID NO: 39991 - DNA, 357 bp, Homo sapiens
  misc_feature (1)...(357): n = a,t,c or g
nnnnnnnnnnnnnnnnnnnnnnnnnnnnnnnnnnnnnnnnnnnnnnnnnnnnnnnnnnnnnnnnnnnnnnnnnnnnnnnnnnnnnnnnnnnnnnnnnnnnnnnnnnnnnnnnnnnnnnnnnnnnnnnnnnnnnnnnnnnnnnnnnnnnnnnnnnnnnnnnnnnnnnnnnnnnnnnnnnnnnnnnaaaaatcagaatttgatggctcacaggataatgagatgctgcgtagaaacaaggaaaaaaacttcaggaccagggcctcaaaggcacagtgccatgggatccatctctatctcatgctcctctttacttgtttggctcattctggtttcattctcttccactgcagacagacc

SEQ ID NO: 39992 - DNA, 449 bp, Homo sapiens
  misc_feature (1)...(449): n = a,t,c or g
tttggaggnnnnnnnnnnnnnnnnnnnnnnnnnnnnnnnnnnnnnnnnnnnnnnnnnnnnnnnnnnnnnnnntctcgaggatccgaattccnnnnnnnnnnnnnnnnnnnnnnnnnnnnnnnnnnnnnnnnnnnnnnnnnnnnnnnnnnnnnnnnnnnnnnnnnnnnnnnnnnnnnnnnnnnnnnnnnnnnnnnnnnnnnnnnnnnnnnnnnnnnnnnnnnnnnnnnnnnnnnnnnnnnnnnnnnnnnnnnnnnnnnnnnnnnnnnnnnnnnnnnnnnnnnnnnnnnnnnnnnnnnnnnnnnnnnnnnnnnnnnnnnnnnnnnnnnnnnnnnnnnnnnnnnnnnnnnnnnnncccaaanagngnnncntgagggatnctnctccatgatccaatcacctcctacctagccaannnnnnnnnnnnnnnnnnnnnnnnnnnnnnnnnnnnn

SEQ ID NO: 39993 - DNA, 358 bp, Homo sapiens
ttctattataaaatgcttacgtgtgttccagagcgactattccagtgtcaccatttaatcagaatgacatgcctgttcatgattctagaattcaggttgtttaaatatgacagtaacctatgcagtcatgtgatcattaatcacccacaagttcagggacgccaaagatgatccagaggtaggcatctggctatttcaacttcacgaggccaaaatggaagttaaagagctaatctgggctgaacagaagattctggcagaacactgacactgaatccaaccttcacgcatcctctctccacatcattctttaggccttaactctttatgtcgacgcggccgcgaattccagatctat

SEQ ID NO: 39994 - DNA, 346 bp, Homo sapiens
tttctttgtgtttatcttgcttgggatttggtacgtttcttgcatctgtgggtttatgtttctcaacaaatttcaaaactttttggtcaccatttctcctgatatttttctaccccaatctctctgtcctctctccttctgtacctgtaaaccacataattgttaagctgcataatatccttgaagatattatagctttgttcattttccttttgtctattttttctctgtgctttgatttggatggtttacattgatctatcctcaaattcactgatcctttcttccacagtatgttatctgcagctaaatccatctggtgaatttttcattttatttatttatt

SEQ ID NO: 39995 - DNA, 380 bp, Homo sapiens
  misc_feature (1)...(380): n = a,t,c or g
gtgcgttattaataagcaagcccgaggcactcaagtgcaggtgtggtgcccgctggccagccagccagtcaccaagagttcttcacatcttggattccagcaagtcctccttctcctaaaaaaggtcgacgcggccgcgaattccnnnnnnnnnnnnnnnnnnnnnnnnnnnnnnnnnnnnnnnnnnnnnnnnnnnnnnnnnnnnnnnnnnnnnnnnnnnnnnnnnnnnnnnnnnnnnnnnnnnnnnnnnnnnnnnnnnnnnnnnnnnnnnnnnnnnnnnnnnnnnnnnnnnnnnnnnnnnnnnnnnnnnnnnnnnnnnnnnnnnnnnnnnnnnnnnnnnnnnnnnnnnnnnnnnnnnnnnnnnnnnnnnnnnnnnnnng

SEQ ID NO: 39996 - DNA, 382 bp, Homo sapiens
gtcagtcaacaaatacctacccaagataaaagaggaattacttggatgtccaacatgcaatttaaaaaacaagataacccaaacatagctgttttggctgccgtcatcttagcacacaaaattttgaaaacattttaattcatgcaagtcaagttcattcttaaatattacatttcattcctctggaaaactgtaacagccaatggagaaacagtaaacatgtctcttctctacattttcactactatggaaatgagaaagaaaagtgaagtaggactgcacttacccatttccattctcaaacccttctttacaatagtgctagatgaaaagattgttacaggccaggtgtggggtggggagcttttcctgttgttttgca

SEQ ID NO: 39997 - DNA, 376 bp, Homo sapiens
  misc_feature (1)...(376): n = a,t,c or g
nnnnnnnnnnnnnnnnnnnnnnnnnnnnnnnnnnnnnnnnnnnnnnnnnnnnnnnnnnnnnnnnnnnnnnnnnnnnnnnnnnnnnnnnnnnnnnnnnnnnnnnnnnnnnnnnnnnnnnnntaccccntaancncncagtcaaactgccaaangntaangncancntgaaaatntttaangcacccananaaanctgacntcntgtncanggccagncagtntatttancagntgactgntgatcaaagtnttttaaaaatcaaaccaaaanctttngatcaaaaaaaanggnggncaaanggcaggggnatgacntnttcaancagctgaantttttaaaantngccagtcaanaantntntncccaccaaatctt

SEQ ID NO: 39998 - DNA, 343 bp, Homo sapiens
cctagcctctcttttacccagggcagtttaaccttaatctctttcatataggttttaataagaacaagggttgtttttgcttaaaagattgaaaacacatggaccattaaatgggtggtctacaatctgtggaaagatttttaaaactttaaaactatagttgaaaatgtattcattcattcattcattcagtacgtcctgtgtgtctgatagtagaaagtatcctagagatagaaaactgattaaggtatggtctagcggaaaattcggaaaatagaaacaattcttagcagttataatacagtgtaataaaggctatgataaaaaatgaagtacagagtgg

SEQ ID NO: 39999 - DNA, 334 bp, Homo sapiens
  misc_feature (1)...(334): n = a,t,c or g
cagaaatgtgttttgaggtttttttgcctgggggttggggagctgaagctggtactgaaaaagagaataagtgagttctgaaaagaattaaatttaatctttgacattctaagtataaatatgttagtagaacatcctcttaaaaatgtgaggccagcagtagaaatttggaatttgataacatttaagagttgcacaggccaggtatnnnnnnnnnnnnnnnnnnnnnnnnnnnnnnnnnnnnnnnnnnnnnnnnnnnnnnnnnnnnnnnnnnnnnnnnnnnnnnnnnnnnnnnnnnnnnnnnnnnnnnnnnnnnnnnnnnnnnnnnnnnnnn

SEQ ID NO: 40000 - DNA, 329 bp, Homo sapiens
cgcaaacattttagagtgactgatgcccacacaggccgcggggctagtaatcatcaggtctgccatcctttcctcagcacttttgggggccaagagggccaagaagccatttttcaatgacaaaaaccattcatcctgatttatggtctttctgttgtcctgacctttatattctcataaaagtcttttaattttagtgtcgtatgttagcaggaatatatgtaagaaatttgtgtaaagggcagatatatccaagtctgttattttatcattgcacataatgcattcacacttggagatcatgatgagagtggcaaccaaggtcgacg

SEQ ID NO: 40001 - DNA, 368 bp, Homo sapiens
  misc_feature (1)...(368): n = a,t,c or g
cttagtcacatggcaaaaggtatgcatgctaaaaagagaggggtgcgtagccactgttaaataaaacttgggagagaccattgttttggactgaattcctgcactgggccccaacaggccaacccaaatggagtcactcatgttaagtgccacgtaatcaaactaaaactttaaaaagcagtaaaatcccaaaacaggccaggttgccaaaaagaaaaaaaaaaaaagggngnccagtnancntgaggggcntganaaaccangtnccntttgttgtcaacccggccgcaanttccaaatttntnaatcgtaaatcntgaaaanccccgnaggttcatttaaanngggcntggngcnccntttaattt

SEQ ID NO: 40002 - DNA, 362 bp, Homo sapiens
  misc_feature (1)...(362): n = a,t,c or g
gcatcttggagccgtgtcagctgcagagactggagtccggggcatgatggggatgtacctgaaacctagtgagagtcatcctgactctggggaagagccgttcaaagatgagaaagataaagtaatttgccacccccaacccctcacaggctagactatccatggatttcaggtcgacgcggccgcgaattccnnnnnnnnnnnnnnnnnnnnnnnnnnnnnnnnnnnnnnnnnnnnnnnnnnnnnnnnnnnnnnnnnnnnnnnnnnnnnnnnnnnnnnnnnnnnnnnnnnnnnnnnnnnnnnnnnnnnnnnnnnnnnnnnnnnnnnnnnnnnnnnnnnnnnnnnnnnnnnnnnnnnnnnnn

SEQ ID NO: 40003 - DNA, 392 bp, Homo sapiens
caggccagtacataatttaaagaacttacagcaaagagatcttcataaattgagaattacgccttccttattactatagtcaaaatttagtaattctagtaattgacacttcaatctccaagggagagactataaagagttcactaatgagaactttcttacataattaaagcaaacacattatagacagtatctcagaacatgtagattaaactctttgaaaccaaaaatttaatttctaaggggctcttttatttgttcataagttaacagtatcccatctgtctccatcatgttaaggttttatttcatgagataagcatagaatgttgacagcttttcagctctcttgacaaaaatatccaaagacacttggcatctgagctgtcttt

SEQ ID NO: 40004 - DNA, 325 bp, Homo sapiens
  misc_feature (1)...(325): n = a,t,c or g
acaatcattcataaaaactgtttttaaaaaaaactttaaaaaaaaaaagcaaaaaagtattttatttttaaattcaggagatattaacagtaaaaacaaaaatatgaaggggaaggatatacactaacttcacatagcagatactcctagaaagaaagaaaaaatggaataagaaaaaaagttatccagggagctttacctctatgttttacagtatttgggtagaggcagtttagcccacagtatgagaagattactatctgttaaatatggaccacagatataaagatggtcgacgcggccgcgaattccanatctatgaatc

SEQ ID NO: 40005 - DNA, 329 bp, Homo sapiens
ctccggataatgcctccatcttcaaataaatcctctcctttgaaatcaaggagctcaatctcaaaaaagagagttgcattcgagggaattttagggagactgccagccgagccatatgcatattctggtttgcacagtaaatggcatatctctcctttcttcatggtagccaccccaatgtcccatgccttgatgacttggcctttgccaagactaaagacaaatggttcatttctatcatgactggaatcaaacttctttccatttgacaattttcctttgtaatggacataaactttgtctccaatcatcggcgtttcctcaccatt

SEQ ID NO: 40006 - DNA, 322 bp, Homo sapiens
tgtgtactgaaacaaaagtgttaaaagagaatggttttcactattaggttggtgtgtaatattcgtgataactctgatgtttatctagtcttattttaattagggaaaaaacaaaacaaaacataaaagagattgtcttgacccatactactatttaatgtggccccaccatttgaaaagtactattttaaaggaaagcttatgtttctgtgtattggatagatctcattacaagttgaatatcccttatctgaaatgctttgagaccagaagtgttttggattttggaatatttgtgtatatacacaatgacctatcttgg

SEQ ID NO: 40007 - DNA, 328 bp, Homo sapiens
  misc_feature (1)...(328): n = a,t,c or g
tttttttcaatgtagacacactgtacatgctacccacctgttagtcatttagtatccgtatcagttattagactagctgtcaagggatttcagtgcttctgttcaaggaacccctattttagttagnnnnnnnnnnnnnnnnnnnnnnnnnnnnnnnnnnnnnnnnnnnnnnnnnnnnnnnnnnnnnnnnnnnnnnnnnnnnnnnnnnnnnnnnnnnnnnnnnnnnnnnnnnnnttgtgtgctgagcttgctaagatctatgataagaacaaatcttctgttcatgaaattgtgtataataaattgttatacttgttcttttttatta

SEQ ID NO: 40008 - DNA, 329 bp, Homo sapiens
ctaggataataccttgtacataatggtatttagtaaactgatagctcttgttattgtttttcttctagctgttatttttattatcacaaagctagatatttgatcaaatatttccatttccttgattcttcaggatattttcatgctatcagccccttccaaacttaattttcttctctatttaccctaaaaccaatgttactctgaagcatttctttactgatactgccacagcatcctttgaccttatctttatacctacctgctgtggaaactcccaatagcaaataattcctattctgcttctctactctatatcctcgaatgtt

SEQ ID NO: 40009 - DNA, 322 bp, Homo sapiens
  misc_feature (1)...(322): n = a,t,c or g
ctgcaatcttgccaaagagactttgtaatacatgtagtctagacaaacgattcagtccaagaggtgctaacttcagacaatgcagcactataatcctttaaacaacgcaatttgttttactcattatcttttcttctaggctgaaatagactagaaggaaaatgctccctaattaaaaattggtattgtttacaggaaaaattgtataattttgcattagaattacaagtatatgttcaaatcgaatttgcctcctccccccagccnnnnnnnnnnnnnnnnnnnnnnnnnnngtcgacgcggccgcgaattccagatctat

SEQ ID NO: 40010 - DNA, 321 bp, Homo sapiens
tctgtgtcctaatttattatgactacatagcccacattcctctgcccacgcatccgtggagtccagagcccagaaagcctcctgctgccctgccagaccgttgagctcctcaagagcgaagtgtggcacaggctgatcagctcatgcagaatggcagggcttcagctgcccaagtgtgtgcgtagccagagcacagcattcatgaagctgtctgactccacctccacctctgataatgcgtgggtgcttttgggatagagcaggagccgaacaggcagtcgacgcggccgcgaattccagatctatgaatcgtagatctga

SEQ ID NO: 40011 - DNA, 326 bp, Homo sapiens
  misc_feature (1)...(326): n = a,t,c or g
caagaattaagctccctgagctagggccttgtttgccttttcctctactgtttttcccaatgtatgnnnnnnnnnnnnnnnnnnnnnnnnnnnnnnnnnnnnnnnnnnnnnnnnnnnnnnnnnnggaaaaataccaaaatgcaactagcttttgtgctttggaaggaagactttagtgtcttaaaattcccaattttatagcaattaagatttgtattttttttaaatggttaagcagtctttgcgatttggaaaagtgagaaacagttcaaaggactcatatttggattaaatgtgagattcacaaagtcactcaattaacattt

SEQ ID NO: 40012 - DNA, 325 bp, Homo sapiens
gcccccgattaggctctgtcagtgtgataaaacaaatagttttaactagaaaagggaaagcatgggtccacattctgttataaatggatggtactttaattcatttccccacctccctaaacatggaccaaagtgtactatattattttgcaagctgggtagaaattcatgcctaaggtcatgccctttcatgtttaccagtgaattatctttctccagttttctattgtgcatctgggaaaattatgcttacatatccaatgtaaagaaaacattgagtttatatagatttgaaaccaagggggtttagtatatagtaaacata

SEQ ID NO: 40013 - DNA, 322 bp, Homo sapiens
ccttacttagcaatgctcgtaaaactctatcacatagaaaatacacaagttattatgatagtattttggtaacaaaattcacttgaaggagttcaaataaattgacttccttttccctcacaccaacattagtaatgttgagcaggggttcaataccagttatatgtaagtaccacattttgcttcatcaagagacgagttcccgtttctcacagaacttacactaaaactgctcataaatatacaggaagaaaggtgtttttctcaaattaataaaagtctagttagcacattcaatctgtgttttcacatgcattctttt

SEQ ID NO: 40014 - DNA, 330 bp, Homo sapiens
ctgagtaagatgtagcaagcacactgtaccctgtatctcccactgaatgcaaccatgaaatctggaaaggatgcatggagcagctgtttgaaggctctgaaaaggaaatagcaggcagatcagggaagatcatcagaactcaaaggaccactgaactagcagtgagtctgaaatagcttttcccttgaatgtccccagcctgaacttaaatgcggctggaaacatgaaatgagcaattctccagaagcactcggcctcaaggagcaagaaaagaaacaagtgctcagagaaatgatagaaaaatccccattttcttctcttttctctcat

SEQ ID NO: 40015 - DNA, 331 bp, Homo sapiens
  misc_feature (1)...(331): n = a,t,c or g
nnnnnnnnnnnnnnnnnnnnnnnnnnnnnnnnnnnnncccttgttttattctaggtgtgtaaaggttaggtgaccactcaactgctgggcttggacgttgcagagtaagaagtaggaattagactacaatctatagacccagacatttgtctcatatcatcaccagtcatatataaatgaaaaactatgagaaaaaagtgaaaagcaacatatgcatacaactttcaaaaataagaaattaagaaactacttacttctacaatgtcgtcatcaaacaacaaccaaaaatcatgactcttaactattgcaatataatggcctcgattgggac

SEQ ID NO: 40016 - DNA, 330 bp, Homo sapiens
  misc_feature (1)...(330): n = a,t,c or g
nnnnnnnnnnnnnnnnnnnnnnnnnnnnnnnnnnnnnnnnnnnnnnnnnnnnnnnnnnnnnnnnnnnnnnnnnnnnnnnnnnnnnnnnnnnnnnnnnnnnnnnnnnnnnnnnnngataacgtttcctgcccaagtgttaaaatcatgctagccaactgattttcttcttcacagattgaaaatatttaactcactatgtgacacaatatcctatccatgtccaggtatcacataaagccattcacctaaaatcactggcaatatgattcccacgcctatgaaaatgtatctataaaaaacaaattaaaatatctaaataaggctctttaa

SEQ ID NO: 40017 - DNA, 324 bp, Homo sapiens
attattttcccattttaaaaatttcaatccaatgtcacttatcttctgcctatagtaatttatcgcttctaatcttctacaatattcatatgttttgtcctcaaaacatttgtgttttttggaagcctggtcccatgaaattctctaagaaaaaaacagaaagttccaccatcatctacatttaacatataccacaaatgttatgctgtttcacatattttcaaaacacatatttggatatttaaaatgcacgaccaaaggctctgagaagtcttgcagatttttagaaaaagatgtttctcttgggtcaacctggcttttccc

SEQ ID NO: 40018 - DNA, 331 bp, Homo sapiens
accaggtgctctgggtgtcttaaataactttaatttactaaacttcactccccctcccccaccccagccctttcttttcagaagacacatttagacaatcaccattcacctccaattcaaaagaactgctgcccagtgactccgtgctgcacggaagaatatcagctccaggtatggaaacattgttggctttgcttctactgttgattgcttaagaattacttttctgaaatgtgtgaattttcagatactttcagcttacggatgtagttattcatataaggttaggttttagaaaagaaggagagtcgacgcggccgcgaattccaga

SEQ ID NO: 40019 - DNA, 309 bp, Homo sapiens
  misc_feature (1)...(309): n = a,t,c or g
aagatttaaaagtagaaaacacaggatttaaaattgcaaatatctaggtattatgactaagtaaaaaatgcatatgaaaaaagattggaggnnnnnnnnnnnnnnnnnnnnnnnnnnnnnnnnnnnnnnnnnnnnnnnnnnnnnnnnnnnnnnnggagtcatggcttcttggagaaatgaccaactccagggctgagcaggggtaatataagaagagcatggacacatcaaactaaaaagcttctgcacagcacaggaaatgattaatggagtgaaaaggcaatctacagaatgggagaaaatatttcc

SEQ ID NO: 40020 - DNA, 315 bp, Homo sapiens
ggaacaactactgaatctgcaggaatagaaaacaagttcctaaatggaatgtttctgcaaccttggttttaataaaaaattaagaaattaagaccctaaaatacatattttacttttcccatttatctgcttttgggtttcaggaaattgggagcaccagctctagagaggcagcagaattcaacaaccaaaactctgatctcttctgatcagttctgtgaggcaagactccagggctgggtgagatctaaacaaggccctcaagaagggtgaatctgaacagaactggggaaggggagaccctctgtagaattc

SEQ ID NO: 40021 - DNA, 311 bp, Homo sapiens
  misc_feature (1)...(311): n = a,t,c or g
ggtggacttgggaggaaagccgtctgccaaagcctgaagcctccaagccataaacaaccccaatggcctcccacgaagttgataatgcagagctggggtcagcctctgcccatggtaccccaggcagtgaggcgggaccagaagagctgaatacttctgtctaccagcccatagatggatcaccagattatcatgaatgcaaaattacaagttcttgggtnnnnnnnnnnnnnnnnnnnnnnnnnnnnnnnnnnnnnnnnnnnnnnnnnnnnnnnnnnnnnnnnnccatccagatcctgaatgcagcaatg

SEQ ID NO: 40022 - DNA, 416 bp, Homo sapiens
  misc_feature (1)...(416): n = a,t,c or g
tttgaaggccttgatgtcntatctattcgatgatgaagatacccaccanacccaaanaaagagatctctcgaggatccgaattcgcggacgtgtcgactgatcatctccagacacattcctggccacaaaactttatgctgagcttcctccagcagcagcagtggcagcagccagcagcaacagcagcagcaagaagacacgagtttgctgtgcaccaggcatcttttttcagagcagcatcaagctaccttgagtttgcttcacaccaggtactctaataagtgctttaagtgagttatgtaatttagtcttatgaggttggcactattatttccttttcacagactgagagagtctgtcaaataattacaatacctcataaccagttaagtaacagagccngngatttacatct

SEQ ID NO: 40023 - DNA, 316 bp, Homo sapiens
  misc_feature (1)...(316): n = a,t,c or g
ataagagctaaagtccagggaagaagcaaccgctacacaccctctaaaagtgccaagcctaccagtaaagcaggttgtctacccagaggggtgcctttttatactttggccctgaggggcactttttcctaatttgtacaaaggctccagattgagcagcagaggccctggaaaactacttccttgtgccgcccagaagactacccctccagtcatgggttactcaaccacaagtggccttatcagactctctggagaatttgaagctggggnaagggatggatatcangaggcngtggttctcaaattcaggttg

SEQ ID NO: 40024 - DNA, 318 bp, Homo sapiens
  misc_feature (1)...(318): n = a,t,c or g
caggcatgtaccaccatannnnnnnnnnnnnnnnnnnnnnnnnnnnnnnnnnnnnnnnnnnnnnnnnnnnnnnnnnnnnnnnnnnnnnnnnnnnnnnnnnnnnnnnnnnnnnnnnnnnnnnnnnnnnnnnnnnnnnnnnnnnnnnnnnnnntggcctcagatttttgatactcttaaaccttctgatccttagtttctctctccaaaatactctttctaggttaaaaaaaaaanggctnttatattnggggctatgtaaatgaaaangttttttaggttttcttgatttancantananacagggtctccctgtgttg

SEQ ID NO: 40025 - DNA, 322 bp, Homo sapiens
gaagctctccactctgccttgctggcacttctccactccccgatagggtcctctccacttacagaacgtaatctgaacatgctaactgcccatgagacacagctttcaaggcttttgtaagtgccatgataactctgcctatgatctttactttaaaataaaaaaccagcaataattcagaaaggaaataatggatacggaattaggaaaactaagcagagattctctgttaggtctttttacgaatagtatctcagagttagtaaaatatggactgcttttgccatcccaaaataagtctaaaaggaaactgcagttcttt

SEQ ID NO: 40026 - DNA, 315 bp, Homo sapiens
ataacagtattcaatacataatcagaaaaaagagatgtggaggaggaggagagaaacttcccaaggagctcccttgggtgctgctggctcctaattagtgtaacctgttaatcacatgttgctcggtgttagagcggtccctctgtgctctgcctggcagggcgctgttggcctggtctccctcactatttctatttgcaagcatgggctttctttccagcagaatctggttcctgggaagagtaatgttccaaaggcctctgatatgcctcgatgccctcctgtcgacgcggccgcgaattccagatctatgaa

SEQ ID NO: 40027 - DNA, 309 bp, Homo sapiens
ctttaaaactagacagatgctgcctcttactccaaagaccaccttccattaaggaaggagggacacttgcaatactgtgacctccaaccccatgggtttcccatctccgttcttacccaggaagtcctggtcatgtcatggccacataagcttagtggaaaaaaacaccattgatacaactgtcattgtgaaagtatggaggtctggagcctctcataagcctggggttttgggtcatcaggcaaattgaggttccaatcttggcccccttctttactagctctgtggtatctccaggtgtcttcagtt

SEQ ID NO: 40028 - DNA, 347 bp, Homo sapiens
  misc_feature (1)...(347): n = a,t,c or g
gtgaggatgcctgaaaaatcacaaggcaggaaatcatactatattccatttcccctcagcttggtttttgagacaaaaagaaagttctcaagaagaactagttttgattatactttaaaactacaagagtaaaaacagtaaagtctaagattttttaaatccaaaaccatttagactcttatgtcgtttcatcctgtctgtaagcttggagtacacaaagcataaagtacagaaataaagtttgaaaaagnnnnnnnnnnnnnnnnnnnnnnnnnnnnnnnnnnnnnnnnnnnnnnnnnnnnnnnnnnnnnnnnnnnnnnnnnnnnnnnnnnnnnnnnnnnnnnnnn

SEQ ID NO: 40029 - DNA, 335 bp, Homo sapiens
  misc_feature (1)...(335): n = a,t,c or g
ggaaaattaaatttagctcaccttgaattcttctaaacagttaagaagttatgtatcannnnnnnnnnnnnnnnnnnnnnnnnnnnnnnnnnnnnnnnnnnnnnnnnnnnnnnnnnnnnnnnnnnnnnnnnnnnnnnnnnnnnnnnnnnnnatgacagtgagacctcatctatacaaaaaattaaaaaaaaaaaaagaaagaangaanttacccnggcatgggggcntgngcctgnggncccagtanctnaaaaggctgaggcggaaagattacttaanaccaggnggtcaaggntgcaatgggccttgatcactccnccacncaccagcctggc

SEQ ID NO: 40030 - DNA, 341 bp, Homo sapiens
  misc_feature (1)...(341): n = a,t,c or g
taattctnnnnnnnnnnnnnnnnnnnnnnnnnnnnnnnnnnnnnnnnnnnnnnnnnnnnnnnnnnnnnnnnnnnnnnnnnnnnnnnnnnnnnnnnnnnngagaccatttattaatgctggggtttttttagttttttgtttgtttgtttgttttctaatcggtatttttgtgaccccttcttctgtgttccagtctggtttcttgcaaacaagtccttcccccttcctcttctcgatgcttcccaggtcctccaggtctgacccagctgggtgacttctgagaacatccataagtactatagctgngcttcntggngtaaactaaggcangaagaagggag

SEQ ID NO: 40031 - DNA, 335 bp, Homo sapiens
  misc_feature (1)...(335): n = a,t,c or g
ccaacttgtattttaaaaaaataactcagaaaatcttcttactctgcttaaaattccaggaaactcattcaccatagtgttttactgagaaaatctcagtagagaagataccaatataaattctcaacaattcttaattctgctcaccaagataactgctaaaaggacctgttatcttaactctcagcttctttaagacaggaattctaaggatagagtaaggatttagcaggtggcaggaacaagggggtctgacaaggtcagtcactcttaggtcacctaaataatgatgccacacccattctggcagccctggaggntcatatgcctaaatc

SEQ ID NO: 40032 - DNA, 327 bp, Homo sapiens
aaacaattaaaggccatgaagaagcccctagagccgggtttcacccactgctttaggtattacaaaagccaaatgaatattcagctaagcaaatgaacttaaaaccagcaattaaaacaaaagcctccttgatgctaagaattttttcatgctaatatggtaattcatttataaggaagcagataaaaagtatgaccacacataccatgccttacacatccaaataattgctttcctgtatgaaatagtcactttgtgaagttatgcatttattctcatgaacagccatttaaatatttcagaatcaatttttacttttttcagaag

SEQ ID NO: 40033 - DNA, 312 bp, Homo sapiens
gaacatgtatccaggcttggaaccgtaggacccaagcagagaagctctcgggctaggaagatctgtgcagggccgcctgggagacctggacacaggcctgctctatttttctacagggtcagaaacaggaccgggtggaagggatggggtgccagtttgaatgcagtctgtccaggctcgtcattggaggagaacaagcaaaccctgagggctccactaggacttcaaattgggggttggatttgaagacttttaagtttccttccatgccagaaagtctctcattctaggcctgctggcccaggtgagtcc

SEQ ID NO: 40034 - DNA, 313 bp, Homo sapiens
ttttttttgagccagtaacaagatatttttaatatttttcaagttaccgaaatgtgcgtgaaatttgtatttaaaagaatttataaaggaaattaataccacttttatctatgtacaaataaacttaatgggggggttttattagcattagcagtattttaacacatagcctcttggctgccataaaaattatttattatcattttattaagatggtaattgcttctcacgtcttaaacttttccccaaatctcttgacaagaaaaatcagaaataaaaatcagcatgcacgaacatcagttttatttgatgt

SEQ ID NO: 40035 - DNA, 315 bp, Homo sapiens
  misc_feature (1)...(315): n = a,t,c or g
gtgtcnnnnnnnnnnnnnnnnnnnnnnnnnnnnnnnnnnnnnnnnnnnnnnnnnnnnnnnnnnnnnnnnnnnnnnnnnnnnnnnnnnnnnnnnnnnnnnnnnnnnnnnnnnnnnnnnnnnnnnnnnnnnnnnnnnnnnnnnnnnnnnnnnnnnnnnnnnnnnnnnnctgtctcaaacataaaataaaataatatnnnnnnnnnnnnnnnnnnnnnnnnnnnataaaatagaaaatcagttttctttaagaacagcaactgacacattttaatgtgtacaagtctgcttcaagaactaacaagttaatacatagct

SEQ ID NO: 40036 - DNA, 338 bp, Homo sapiens
  misc_feature (1)...(338): n = a,t,c or g
taagccttgatatttttaagttattcnatagcctttttttctcttctttatttctttcctttcctttaataatactttgctgtatttctccacatatttctctatgttcataagatactatataaacaaacacctatactaagttgatcattttcctagaaatgtaggccagtcacatacatttctttgcaatttacttttcttacatacaaaaatataagggacctccagctaactgcaggactcccataagatggaacattatgcacatattgaaaactaaacatgagatctttagatctacaagggatctaagagatcacctagtctagtggtcc

SEQ ID NO: 40037 - DNA, 337 bp, Homo sapiens
ctcatcaaattttactatgactatttcaactgaaaacattttcatattgcatttaaaaagttttgacggtttacttttattttagaaatcaaattatttcatgaaaaccaaatactcttcaccttaaattgtcttttttactcccatgaaaatctgtattcatcttcacaagaaaaaaatgcaaaattacattctttaaagttcaaatactaaaattcttgtatagtattttatgtgacattggaaattttaaaaaacatgtaataaaaatcccagtcacgcatgaagttatagccttgcctgcacgtattgcctgtagccccagccacccggaggg

SEQ ID NO: 40038 - DNA, 342 bp, Homo sapiens
cttcaatgcctttgagttaagaaagtcttgatactgttcagagaaaaattctcctaagtcacacctaagacagtgtcaaaccctttgccaccatttgtgtattgtttgcctctctggcaaggtgtttcggctcctgcagttgggtgtgttttgctgacccctggggctcaggagctggtttattgatctgcagtataattccaaagccccgtgttgaccaagggagtttgaattaagactaggatagtggaagcccttggctggactggctctaatcctatagcaatagtcaaagaataaatttatctctgggtatttattggagccccgagtaatcttaac

SEQ ID NO: 40039 - DNA, 340 bp, Homo sapiens
tctttctgtccctccacataatttcccacaccagagctttccccctatttgttctccctggaactttcatcccttagatctttacatgactgtctacttattttgttatctcagctgaatgtcactttctcaggtatagctgcctaaacatatgaactaaagtaggtgaatccatttctctcttttccacaaacctgatatcttttcttcagtgcactatgactctctaacattttcttctttgttaaatgctttttgggttagtgtctgtctcctccactgttgtgtaacttccatgacagtagtgaccctctctgtcttactcaaatagaatgatttg

SEQ ID NO: 40040 - DNA, 341 bp, Homo sapiens
ccaatttctgactctacatccaatcagagaccgttataaatatgtattctgctatctccttttcctgtcagttttagttagtataagtcaatctctcagggctgatctcccctaggaatgaacaagaataagcctttaggccttcaaagcaacaatgtcaatctagccagcctttcctaaaggactgctataaatgccatcttcccattgtaccacaacattcccactaggctcttaaaaccctcctaagtttactaagaagattaaatggaataacatatgtacaggcacaagtacagaatgaaacaggcacttaaaaaatgtcagttcccctctccacc

SEQ ID NO: 40041 - DNA, 332 bp, Homo sapiens
atttctacctcctaatccctaaaacctgtgaatattacctaatacagcaaaagagtgaatactgcattatatggcaaaagatatgatgaagttaaggatctgaaaggaggagcttaccctggattatatgagtgggctctaattccaatgacaaatgtgctcataagagagaggctgagggagatttaacaaaaacacagaggcaaagacatagaggaaggaggaggcaatgtgaccagagaggcagagggtggagttatgctgccgcaaactaaggaatgataaacactgtcattcttcagcaaattccagaagctagaagagccaagaaa

SEQ ID NO: 40042 - DNA, 332 bp, Homo sapiens
ctgggtgtgaaattgcctcttctgtgatgagctctttggtttggcagtttggtagcccctccaaaacaggttcaaaataggcaaaaacaggtccaatacatacaaaataagcaaaacaaaggcaaaaaaggccaaaacaaagattcttggggcagaaagccaagctattcttttgtcataatctctctctcaaaagaagaaacctgaataaactttagttttatagcaaacccaatatactaaaacatcttgataggtttcatgtggtcaatacaatgtgcaaaaattttaagttcagtcagtcggtgtttatacaaactgcataaaacatc

SEQ ID NO: 40043 - DNA, 341 bp, Homo sapiens
  misc_feature (1)...(341): n = a,t,c or g
ccttaagaaaaatatacaatatgaannnnnnnnnnnnnnnnnnnnnnnnnnnnnnnnnnnnnnnnnnnnnnnnnnnnnnnnnnnnnnnnnnnnnnnnnnnnnnnnnnnnnnnnnnnnnnnnnnnnnnnnnnnnnnnnnnnnnnnnnnnnnnnnnnnnnnnnnnnnnnnnnnnnnnnnnnntaaacataaaacttgataaagcaatgggatgaattattttaaaatgatgcttttcccaatgtatttaagtcttgatgctagataaatttgaatctaaagaggctaaagctactcaacgttaacccagcatagaacaatttcatttctctcaatctgcttag

SEQ ID NO: 40044 - DNA, 331 bp, Homo sapiens
ttttaaaaggacataatttggtttcagtaaacaaagaaaagctgaattgttaacacaaatttgctgagtagggatgttccaaagaagtgacaagaggaacgtaaccttttaagtaactcaactatgaaactaaaattatttcagtaaaaaatgtacaatcgtaaagcactgaactacttttattttgctcagagtggtctgagaatagaggtagaaattacagaatatgaagcacaacgtatttacatactgaaatttacaatattggaattttctcattaaaatattatctatttgaacttagatattgaatacttttagaaaaaccaat

SEQ ID NO: 40045 - DNA, 329 bp, Homo sapiens
gttcaaaccaagtctagcaaaagccaagttgtaactaactgccttggacttaaacattcaggctcacatgagttctctatttattctcagaatttaagagtcaccaaaattggtttatttttgcctttgctttagtattcttatgtcttattatctattttcacacttttcttcagcaatcagtaaaacattggcctattatatacaggcagtaaaggaggagaaaaggctaagacaggcctccttacaccttggactttttttctcgttctttcctcttaagtaatatagggctattctttgggcatgattttcatttctgtctggaa

SEQ ID NO: 40046 - DNA, 340 bp, Homo sapiens
  misc_feature (1)...(340): n = a,t,c or g
tcaacataataaatttccttatgacaaatttaaacatataaaacaacaaaaaaaattgttgttttatatgagtgactctataaatcttttgagcatgttacatttcttaacatatcacatcacattttatttgtctcatctggccagtagttgaccattttcattttgtgaagaattttcccacactaacctgcatgctttcagtcgacgcggccgcgaattccnnnnnnnnnnnnnnnnnnnnnnnnnnnnnnnnnnnnnnnnnnnnnnnnnnnnnnnnnnnnnnnnnnnnnnnnnnnnnnnnnnnnnnnnnnnnnnnnnnnnnnnnnnnnnnnnnnnn

SEQ ID NO: 40047 - DNA, 332 bp, Homo sapiens
  misc_feature (1)...(332): n = a,t,c or g
ggggattcaaaattaacatgcagtcctgtccttaagggttgtatatgagttgagatgggaaatagtcctataaatagaaagtatgtgtatcctaagagctataacagatgcttgaaatgtaacacagaagagggagtactgaatgacttggggatagctgaattcaatacatgcagcaaaagtttattattactaannnnnnnnnnnnnnnnnnnnnnnnnnnnnnnnnnnnnnnnnnnnnnnnnnnnnnnnnnnnnnnnnnnnnnnnnnnnnnnnnnnnnnnnnnnnnnnnnnnnnnnnnnnnnnnnnnnnnnnnnnnnnnnnnnnnnnnn

SEQ ID NO: 40048 - DNA, 341 bp, Homo sapiens
gggagaggacaacttggaatggtccacaaacttgtgctttggcatcagatagtcctttcattccccacccaccccaagctggtactagggtaaagcatttgaggcaccaagggtgcaaaatttacatctgaatctgatagactactaattaaaaacttaccttcctcaccctcaattctaaaaaattaacacctaatgactttcattgtgttatttatttggtaaaccgttttgtagcagtaggggcatgatgtcaagcagaggcatgatgtcaagcagatgtctgtctaatcactgaataaatcacttaccagcattgagatcctgggcaaaataacttc

SEQ ID NO: 40049 - DNA, 340 bp, Homo sapiens
ggctatttgagatattatttttaaataacatgtttactttgtgaaagctcttagttagggaaaccagaggtcagcattgcagtttgtttacagatctgtgaaatggctttgccctgctacccccttatttgtatcagatttcatctttcatgctaccctctcttttccaaattcagtttcctaatgctcttggttaccccactttggagattaccccggcttgcctaggatgcatctctccaactttcaatgcctaaccttggctagttaaccatcttgaaacacattcatatcaaagcattaatgacagaaaatagcttaatgtggtaacttctagtca

SEQ ID NO: 40050 - DNA, 342 bp, Homo sapiens
  misc_feature (1)...(342): n = a,t,c or g
attttatatactatcttttagccataaggcaaataaataaaataaaatgcaaacatcataaaatttacatggtaaagctaaccttctttatcttctttatgtatttaacttacttannnnnnnnnnnnnnnnnnnnnnnnnnnnnnnnnnnnnnnnnnnnnnnnnnnnnnnnnnnnnnnnnnnnnnnnnnnnnnnnnnnnnnnnnnnnnnnnnnnnnnnnnnnnnnnnnnnnnnnnnnnnnnnnnnnnnnnnnnnnnnnnnnnnnnnnnnnnnnnnnnnnnnnnnnnnnnnnnnnnnnnnnnnnnnnnnnnnnnnnnnnnnnnnnnnnnnnnnnnnnnnnnn

SEQ ID NO: 40051 - DNA, 228 bp, Homo sapiens
ttggatactgttctctagtttctggtctgaaagaaaaatttaaaaattaactgatttttaaaataacattataataattgggaaatagcattattcaaaaattaactcaaatattttgatggctatgtgcaagacagaattccgaatattacgcatggatagctatgaagatgaacgagttcaggttccagctctttattttttttaattttaatttttttttttttt

SEQ ID NO: 40052 - DNA, 343 bp, Homo sapiens
ctgaattgaatgtgatttttggtgagattgaaattgtgcaagtccaggcctatcagtggcaagtaggaggaggaggtgagaagtggagggaagggagaggatgctgacggtctactttgcacagggaggttgagaggcagatgacattggatcacagaggaacacgtgctttaccatattgtttaaagttgcagagaaaatcaactcaggggagaaccaaatgtaattataaaagtgtccagtatttggagaaagcaatgaaaaatgatgtggagagtgatgtcaaagtgttgaactgccatccttcgtatgcgagaggcattttctcataaacaaatggtgg

SEQ ID NO: 40053 - DNA, 332 bp, Homo sapiens
tgaaatgcctggagatgtccaactcctgcaagtttggcatgttgtccagtgcttgaaagaaatttctgtatccttcctctgtaatcttgtgattgattgaaagctttaggttctcaagtttctggaaacctccactgattgctactttggcaatttccaccacgctgtcatcattcaaagtcttgaaaaatgagaggactcggagacaatgaagctgctgacactgctggatgatcagtttggccactcgataaattccatccccagtaggaaggatcaattcttccaggttactaagagaacctaaaatgtaggctgtcagaaaagaccaa

SEQ ID NO: 40054 - DNA, 339 bp, Homo sapiens
gggtaagtcaaacacaccaagcaggcactcaattttaaacattcataatagaactgcaaacacaaccactaacatgaagcacatgaagtgtatttaaggtacgtaatttgtatatataaaactgtgtacacatgtgtagtatataaatactacatgcatatacaaacacatatgaatgggtgctaaaacctccgtgtgaaagtttgctgaagaggaagaggatatctacacgtgcctgacagattgcttccaaggtgaaaggaccttggtaacagagaagtctggcaggcactgtcttaatcatcaatctcagtgtccttgggcaggtgccgagccaac

SEQ ID NO: 40055 - DNA, 333 bp, Homo sapiens
agaaaatctcagcttgctttacaaagggtgctgcataaaataccggcaccatccaaaagcatctgcaatactacagccccatgcagaggtgtccctgaagaagggttgttaaaggaaatcctctgcgtaggcataacttcaggcaatgtacttggtggtttgttctacctggagggagagatggccggaagtacagatctacactgatttatgagtggtgactaacagtttgattgtatgctgaggttatgtagaagaaaaatgattagaaaagtgttgataaggagatctagggaacaggtatgtagacagacctctccaactgggcataaa

SEQ ID NO: 40056 - DNA, 330 bp, Homo sapiens
ccgacgtccagacacagaactactggagctggagaggctaagtggctcgcggcttctaacttagcttcgccattgccccccgccccgcttcccactgccagagctagatttacatctcttgttcttagttctgcctcctggatattgaagctgcatctacattttaaacctttctagcctttagaatttggggatttatatgcgatccagtgttaggacacagcaagctgaagacttcttttacatggcaaaaccagccctctgacactgtgttttccttaatagctaatgagacagctgtttagtgacggcaacagggattgatgcaga

SEQ ID NO: 40057 - DNA, 336 bp, Homo sapiens
  misc_feature (1)...(336): n = a,t,c or g
ctcagtttgcgcctttgtttcgtttgacagccctccagggagtcatagtgattgctggagacggtgaactaacactgtggggacccttgtgctaaacgtgtcaagtggcacaacaaggataggaacacgggtcctttggactccacagcttctgctccttccagattaagccacactgctttctccaagttgttactgtagtaacatcattttggctgcagtttgtggatgggttggaagatgggaagtcaatgcagaagcaccgttgaaagtattccactnnnnnnnnnnnnnnnnnnnnnnnnnnnnnnnnnnnnnnnnnnnnnnnnnnnnnnn

SEQ ID NO: 40058 - DNA, 102 bp, Homo sapiens
cttgcacacattacaggtctctggaaataagatgcttaaacaggttctataatctggttcttgctaggtgagtgtcccctgacattgctttttttttttttt

SEQ ID NO: 40059 - DNA, 328 bp, Homo sapiens
  misc_feature (1)...(328): n = a,t,c or g
gcatcataaatgttgatatgtctggctggctggtgttatgtgaaataccttcaaagttttatgaacctttgattccttaatttcttcattgttcttttcagattacaaaagtagttaatatttggaatcaaaaatcataagaaagggacagtccttcgtaatctcattcattgctcagctagagtcatatcaagtttattttttctccgcttgtgttatgttaatgctttttctcttctctctttttgtttttttttttttntttngaaacggagtctccntttgtcgcccaggntgcanngcaggggggnnanntnggntnactgca

SEQ ID NO: 40060 - DNA, 332 bp, Homo sapiens
ctggactctagttatttaaaaagcagtaatataaacaacatttttgctataaatgaggaaatttgaaatatgcatgcacagatagatgatattatagaattatagttaacttccttaagagaaataatgctactgctgttacacagaaaaatgcctgtattcttaagagatgaaagattaagtattaaaggatgatatctacattttactttcaaatgattcatgaaaaaagaatatacacacacatatataaagcaaatgtgacagcatgttaacaactgctgaatctagaatggagggcacacaggttttaattatatttgttttcaatg

SEQ ID NO: 40061 - DNA, 331 bp, Homo sapiens
attgcctcccctgggtgctcttcatcttggattattccttgggcctgaatgacttgaatgtttccccgcctgagctaacagtccatgtgggtgattcagctctgatgggatgtgttttccagagcacagaagacaaatgtatattcaagatagactggactctgtcaccaggagagcacgccaaggacgaatatgtgctatactattactccaatctcagtgtgcctattgggcgcttccagaaccgcgtacacttgatgggggacaacttatgcaatgatggctctctcctgctccaagatgtgcaagaggctgaccagggaacctatat

SEQ ID NO: 40062 - DNA, 346 bp, Homo sapiens
  misc_feature (1)...(346): n = a,t,c or g
ctgtgggctagttataagattaaataagtttaatatagtacagtgcttagaaccatgcctttcatatggtgagccctacctgttttaagctatcattatcactatctttattaattattattagcactctccctgggatatgctgaagtctctccaaattcatttccatctggagtgatattctttaaagctgggcaagactgagcaaaagacaccaggatgctgcctttgtcgacgcggccgcgaattccnnnnnnnnnnnnnnnnnnnnnnnnnnnnnnnnnnnnnnnnnnnnnnnnnnnnnnnnnnnnnnnnnnnnnnnnnnnnnnnnnnnnnnnnnnnnnnn

SEQ ID NO: 40063 - DNA, 334 bp, Homo sapiens
ttaacattgtgatatattatatatttataatttaccatctcttgatgagactcttatttctttatataggtcagtcttgcaagtaccattttataagcagctgtgaaatttaagtgaaatgttctttgtaaacatttgtactattttaaatgaataatgaccttatgaagtatgctatctgtaggctgaaattataggtacatctgttttcactatatgatattaagaaagcgtgaaatgacttaaatgttcatttttttctgtatagatactttatcatgttttcatgattttaggaattactgctttgttgatattcaaagtgtgaaactaa

SEQ ID NO: 40064 - DNA, 346 bp, Homo sapiens
  misc_feature (1)...(346): n = a,t,c or g
ccacannnnnnnnnnnnnnnnnnnnnnnnnnnnnnnnnnnnnnnnnnnnnnnnnnnnnnnnnnnnnnnnnnnnnnnnnnnnnnnnnnnnnnnnnnnnnnnctcatgccattggattcagtcccgccctgtccccacctgggaatcattcctttgtctagcatatcaacgctgtatttaccacatgccctttagtcactgagtagccctctcaattatcagactgaannnnnnnnnnnnnnnnnnnnnnnnnnnnnnnnnnnnnnnnnnnnnnnnnnnnnnnnnnnnnnnnnnnnnnnnnnnnnnnnnnnnnnnnnagtctcccatatcaactgcgatgctggttat

SEQ ID NO: 40065 - DNA, 333 bp, Homo sapiens
aatatttctatggaatttttagattgtcattctttgccatcaaaaatccgtatttaattttccttgagaatacactgaatgacaatctaaaaattccatagaaatatttagaatattttatctctaatttgcccagaagacatctatactataaatacaggctactttatatagctaagtgtttttatcctttctgaaaagtattatttattttaagggatctgagaacccctgcttaatgtttgaagttagaaatacagatgcatgacaacagattatcatcaacaaagcaggaaatgggggaaacctaaacaaataatttggggcttcttt

SEQ ID NO: 40066 - DNA, 344 bp, Homo sapiens
ggacatctttaaataccctcaagaggagcaacctcgtcagcagcgaggaaggaaacagcggcgacagccctgtactgtgtctgaaattttccatttttgttgggtgctttttatatatgcaaaaggtaatttccccatgattagtgatgatttggtcaattcttatcacctgctgctgtgtgctttggacttagtttatggaaatgcacttcagtgttctaatcgtaaagaacttgtgaaccctaattttaaaggcttatctgaagattttcatgctaaagattctaaaccttcctctgaccccccttgtatcattgagaaactgtgttccttacatgatggcc

SEQ ID NO: 40067 - DNA, 334 bp, Homo sapiens
  misc_feature (1)...(334): n = a,t,c or g
gtcgacgcggccgctgaatccattggtcagaaaagaaaaaaaaaaccaaaaccaaaataaatttcactctcaagtaattctcctttcactgatacnaggnttnaannggttggngacntaggttctatnntccttagccanaacagtnacntataaattaggaaaattaagggctatgtccatacaaacagtgcatggctatatggaatttctataaatcctttgaanngcttatgaangagggattnagtgngaactcctgangcaagnggcataaagatnccncnnctccactttgttntccaaaanntttccctaccttatannnaggaaa

SEQ ID NO: 40068 - DNA, 342 bp, Homo sapiens
  misc_feature (1)...(342): n = a,t,c or g
tacgcattaagcaatcactccctattctcccctctccctagttcctgataactactaattggcttnnnnnnnnnnnnnnnnnnnnnnnnnnnnnnnnnnnnnnnnnnnnnnnnngtggctgcttcttccacttagcgtgtttttagggttcactcacatttattcagcatgtatcagtaccagaagcagccacatgattccagtcgacgcggccgcgaattccnnnnnnnnnnnnnnnnnnnnnnnnnnnnnnnnnnnnnnnnnnnnnnnnnnnnnnnnnnnnnnnnnnnnnnnnnnnnnnnnnnnnnnnnnnnnnnnnnnnnnnnnnnnnnnnnnnnnnnn

SEQ ID NO: 40069 - DNA, 328 bp, Homo sapiens
  misc_feature (1)...(328): n = a,t,c or g
nnnnnnnnnnnnnnnnnnnnnnnnnnnnnnnnnnnnnnnnnnnnnnnnnnnnnnnnnnnnnnnnnnnnnnnnnnnnnnnnnnnnnnnnnnnnnnnnnnnnnnnnnnnnnnnnnnnnnnnnnnnnnnnactcctctgcccatttgtgtccttgaagaaccagatactttctatatgctcctgcatacttctatttagtttgcatcctttaatactacagtgtccatggcagcttgtattcatggcatataggttacatggggaaaaaagaaagataggagaaaaatgaagagatcaaggcattattcgtcgacgcggccgcgaattcca

SEQ ID NO: 40070 - DNA, 340 bp, Homo sapiens
tgcagctcagaaaggaacatactctcaaaatatttacttatatcaattcctggacacagaggcaatgtctatgctgcttcaaggaatataagcatttggagatttttaatcaagtagtgtgtgcacttattaacttagtgattgcccaagttcaagtgctccgggaccagctttgtaaacattgtactaccattaacatagattccacgtggcaagatgagagtaatcaagcagaagaaccactgaatatagatagagagtgtaatgaaggaagtacagaaagacaaaaatcaatagaaaaaaaatcaaactctacaagaatttgtaatctgactgagga

SEQ ID NO: 40071 - DNA, 328 bp, Homo sapiens
tttgtatcttgcagctgtaattcattaagatgaggtcacgcaggagcagggagagccctaattcaatgactggcatccttataagagggaaatctggacacagagacacaggcaacggccaagtcacaacacaggcagagactggagtgattcatccacaagtcaagtgacaccagggatggccagctaccaccggaagctggaagagtcagaaagggtctccccaaaagcccccaaaggaagctggacctgcttgagcttcgacttccagactccagaactgtgagagcagcagctcctcttgcccggcgcggtggctcacgcctgt

SEQ ID NO: 40072 - DNA, 337 bp, Homo sapiens
tttaatgtttcttcctgtcatccatcttgtacagccaggtccatgtactttcttttgttcagtacctagtatagctctagagacaatgaagtgctcaatacatttttgttgtgtactgtaattatacttttttgacatacaaatatgtaagtttatggtagcaggaaatctcttgttctttgtatcctccaaaggtcctaacatagttccttgtatacaagggacactattcaacgactgaatgaattgttgacggttttaaaataaactttgcctgatatatcgataatacaattggcctccatatctacaggttccgcatctgcagaatcaaccg

SEQ ID NO: 40073 - DNA, 255 bp, Homo sapiens
  misc_feature (1)...(255): n = a,t,c or g
tagagacnnnnnnnnnnnnnnnnnnnnnnnnnnnnnnnnnnnnnnnnnnnnnnnnnnnnnnnnnnnnnnnnnnnnnnnnnnnnnnnnnnnnnnnnnnnnnnnnnnnnnnnnnnnnnnnnnnnnacattctttaactgctttttttaaaaattggatggtttggcctgggcaacaagagtgaaatttcatctcaaaaaagaaaattaggtggtttgtagttttctccttcttctgtaggaaatttttttttttttt

SEQ ID NO: 40074 - DNA, 316 bp, Homo sapiens
  misc_feature (1)...(316): n = a,t,c or g
cttagatgaagaaacttcaaaaaaaaaatactgctccttgngaancanaanaaagattttactgaaagtgatgtttgtattggancatcattaaaggcataaaggaacttgngaacaaactacttggtaaaancagcctggtgatgttgattggttgatactttaggaagcgggaaatgtcttactgganatagttccttcatttcaacagtcatttgtgatactgttttttaatatttgccataggatagttaaaaggtaatggancaaacttcagatttataagtttttaattaaatataaagggggcaaaagt

SEQ ID NO: 40075 - DNA, 326 bp, Homo sapiens
tgaaaacctcatttctttcatatttactaatgtttaccatttctcccagaacagaggcctgtaaggaaaaaaatcctaccatgtgccctcagcattctggcatattttagatattggggatatagtaatggatcctgagaaatgactcaatctcttatcagttttttgggtatttctcagggcaataagacagcatcctccagaggaggtctaataactccagagagtaaaaagagctcgtaccagtgtgagtgtgctctctgcacaagtcttttgcaacatgtccaagggtgcatggctgcttgggtgaccagccatctcagtct

SEQ ID NO: 40076 - DNA, 323 bp, Homo sapiens
  misc_feature (1)...(323): n = a,t,c or g
cctcaactttctcgttacacatccttctaaaaaagccattaaaaatgtttctnnnnnnnnnnnnnnnnnnnnnnnnnnnnnnnnnnnnnnnnnnnnnnnnnnnnnnnnnnnnnnnnnnnnnnnnnnnnnnnnnnnnnnnnnnnnnnnnnnnnnnnnnnnnnnnnnnnnnnnnnnnnnnnnnnnnnnnnnnnnnnnnnnnnnnnnnnnnnnnnnnnnnnnnnnnnnnnnnnnnnnnnnnnnnnnnnnnnnnnnnnnnnnnnnnnnnnnnnnnnnnnnnnnnnnnnnnnnnnnnnnnnnnnnnnnnnnnnnnnnnnnnnnnnnnn

SEQ ID NO: 40077 - DNA, 309 bp, Homo sapiens
ggggaaatggggctgtgaggaggaggattataacttaggcctagcctcttttaacagcctctgaaatttatcttttcttctatggggtctataaatgtatcttataataaaaaggaaggacaggaggaagacaggcaaatgtacttctcacccagtcttctacacagatggaatctctttggggctaagagaaaggttttattctatattgcttacctgatctcatgttaggcctaagaggctttctccaggaggattagcttggagttctctatactcaggtacctctttcagggttttctaaccctg

SEQ ID NO: 40078 - DNA, 318 bp, Homo sapiens
ttttaaaacttgtcctaacttttaatagcacgttaaaagttggactaggctttagttgtctcatccataaaaggggtataatagcacctcgttcacaggaaggatgccgtgaagattaaatgagacaatacaggttgatgtccatggcccagtacatcatagacactgaaacagatgttactgtcctttgcctttgaaaggcaggccgtaccccagattgtaggaacagtgacatattcggggatggccatatccaatcacagtgtttcttttcattatcttaatgcttgggcataatttaggattgaatgagtgtgg

SEQ ID NO: 40079 - DNA, 307 bp, Homo sapiens
atgggatacaagcagaaagcacttacacattttgcttacttgcctttgctcatctaagagtgttgctcaggtactctgcaggtgagaatattattttcaagtcacgtttaagagtttctaagaattgtgttaaacttggattttggaaaacgttaatgatagtaaataattataatatgtccttcttattgcaccatgcttatttcatagttgattaaacaaacatttgatattttcatcaattttggaagctgcatagagaaaatcttaatcagttcttggagatttacttattgagagtctactt

SEQ ID NO: 40080 - DNA, 318 bp, Homo sapiens
  misc_feature (1)...(318): n = a,t,c or g
gaaccagttgctttctagacttgttttcagctctctaggatttcattttgattagactcaagttaataccacaattttttataactagtggcttctttttggttttgcctttattttcttggtgaatatctttagctccctcggggggagggggcggcggggggaagagtgggagataaatttggcatcctttgtatttctgaaaatgacctgatttttttgccctcatgcttggattgataatttggctacatgttggtttcataattgaaaataatttcccccttgaactcataggcattgctttactgncttctg

SEQ ID NO: 40081 - DNA, 307 bp, Homo sapiens
ttttgacataaacttcacttcattgtgttggtgcattaaagtattttctttgaaattcaaatttttgcttttaatctgtcttctccctggaatctgacagtagccacaacaatcctcttcaagtggtagatttattcccttaggcctataattagactttcaagaactaaacaagaaaataccagtaaacctcactttatataatcatgcaatcgaatactccttatgcaaatggcattagaaggctgggctatgacatcagctgtaggcacgcctcccttgcacaaggagcttctgcatatgccag

SEQ ID NO: 40082 - DNA, 322 bp, Homo sapiens
ctgcatcctgcctccccagctacactgcagaattcagagagtagacattattgtcacctccttgtgactcagcacccagcattcattacacatacacagcatgtgttcaaataatatttttgccaataataaatggagtgctaccaacaagaaggttttaagcttttcacagaacttctctccaaaaagcaaattctttagacctaattctgtacaaaaataaatgcaggaatgttcttctggcattccacctgattcactgtgaccactcaggcataatttagctccataaagatgactgttgtatgtgttgtttttcacc

SEQ ID NO: 40083 - DNA, 307 bp, Homo sapiens
tctaggtaggataggtttaaaaacctgattgcttctaggttaacacattttacatttatcctttatgtggtgtgataagttcagttggtcaatgacttgatttctcttaatgcctccagctctttcagaatcatttaagttttaggtacagcactacaaggtcatcttcaggtttgtccacccctttagggttggctcatctaaatcttttcctaaagagataggaaaagtggtgaccctctctactggtatttacattcaaaatggagttcatgctttgtttatgaagaagtgagaaatcaaaatt

SEQ ID NO: 40084 - DNA, 319 bp, Homo sapiens
gcagaatttgctttagatttccctgccttcccctcatgtgtttctcttctacttttaaagggcatgtgattacagtggcccaactggataatccaggctaatctcgctagtcaacttattagtaaccttaatcacacttgcagtgtcccttcatagcagtacctagttaagtgcatgattgaataactgggtaatgggacttctcgggagagatctttgacattctgcttaccatacccctctgggtaccactttgttgtgatggtaacctcataagcagccatttaaaagagattttaagcatcttaattttgaaaat

SEQ ID NO: 40085 - DNA, 310 bp, Homo sapiens
tcagaagttcatatgcttctggaacatcgaaagcagcagaatgagagtgcagaggacgaacaggagctctcagaagtcttcatgaaaacattaaactacacagcccgtttcagtcgtttcaaaaacagagagaccattgccagtgttcgtagcttgctactccagaaaaagcttcataagtttgagttggcctgtttggccaacctttgcccagagactgctgaggagtccaaggctctaatcccaagcttggagggacggtttgaagatgaggagctgcagcagattcttgatgatatccagacaaagc

SEQ ID NO: 40086 - DNA, 316 bp, Homo sapiens
atttattgaagtacaaaatatacaaaactaaattatactttttgatatatgtgcaggtcataaagaaaagcaaagaagaagaaaagtcagaatagtaatctctagaggaacagaagagaaaaatgatagcaaagaaatacacatatgatttctgggatgccaacaatactccaatttctcgagatgatcatgttataagtattctttacacggcacatctacatgtgcatgtgcatactttaaaaatgtattttatttttcagagttaaaaaagagaaaaaatagaaaagtagtactactgctctctggcaaactg

SEQ ID NO: 40087 - DNA, 309 bp, Homo sapiens
aaaatagtttctgttcattccaaagtcttaaagccaacattttaaagcaaaaatttgggtggagtgtgtgacgcgggaaggatttggggcttttttcttaatgttctcagactgtttctaaaccagatctatttaggggaatcttataaactgtgctttcaaaatctttttagtcatgtgtttgagagttctgggtatgtagacaacagacctcattgaggctgcagccccttgttcaattatgtatctcctctacctgagaataataactgcctgcccagacatctgggttctatggttctaaatctg

SEQ ID NO: 40088 - DNA, 313 bp, Homo sapiens
  misc_feature (1)...(313): n = a,t,c or g
ttccccttccaccatgattgtgagtttccnnnnnnnnnnnnnnnnnnnnnnnnnnnnnnnnnnnnnnnnnnnnnnnnnnnnnnnnnnnnnnnnnnnnnnnnnngtatctttgcagcaatatgagaacagactaatacaatcatcttctctttttactctgttttaaatgaaataaccggttcttaaaaataatgttccacgaatgctcaaagccaactcaacagagttttcaaacaacttgtttcctaaagctctccattattcgagctttttatggccaggaaaaagcccagttgggtgttcacaggtttgg

SEQ ID NO: 40089 - DNA, 306 bp, Homo sapiens
gtcaggtctctaatttctccaccttttttctctactcccctatagggaactttagctgagttgggttgtttcctgaatttgctgttcaatttcctgccccaaatcctcgtctgttctttcttatcagttttaccttacctaaaagctaacagggatccaattttcttcatgaatctactgatggcctacttatctggcatttaatcatgtctttaattatgtccttagtcatgtccacttaccctactggtaaatgagatggtaaatcattttaccacttaatagtttggtaacctgggacaggtt

SEQ ID NO: 40090 - DNA, 307 bp, Homo sapiens
  misc_feature (1)...(307): n = a,t,c or g
attttaactggggtaaactcctagagacggattcttaaagagtatgaatatttttatggttcttgacatggtatctaaattgttttgcaaaagaattataatccaaacagcaatacatgattaactatttctccataaactcactggcactgggtgttatttttaaattctccactatttaaagagtaagaaagacttnnnnnnnnnnnnnnnnnnnnnnnnnnnnnnnnnnnnnnnnnacatttaagtaaatgcctatatgcatatgtttctctcctcttcctatctctttaaaaaaaagcttcat

SEQ ID NO: 40091 - DNA, 311 bp, Homo sapiens
ttcagttacacctcattgttgtcaggaaaaaacaaaacaaccagctgcttcagcatggcatttaagacttcataatctgatcatatttatctatgggcagtcatcctgaaatgttctttctcttacaggctattctccagccattcttggatttatttgaaaaggaaactgaaatgtagccaagtacatggggtttgaattcagaaggacctggattgaatcctggttttgccacttactctgagaactttgtgactttgaatcactacctctctgaacctcagttttctcgactgtgtaataggggtaac

SEQ ID NO: 40092 - DNA, 309 bp, Homo sapiens
ttcagaagtcactcacaacaaaagatttaattcaaaatttaggtgaagattacttctatgctaaaattttaggagtcatttaacattttcctttagtatgtttgattataattttcaatgtgtgtgctacttttggaattcttttaaaggttcatgtttttaaaacaaagtaaactgcctcttaaaaaaaaaaagtcactcacaactacttggctgtcactgatgggctgtgcatgccacagtccctggaggaccctactgcagggctgatgattcacagcacgtgcagaccaacaaaaacaaactgcc

SEQ ID NO: 40093 - DNA, 305 bp, Homo sapiens
cccacatacttgcatgcattcatactgtgtattcagaaatatttaaaaataaattacagataataggtatctctttatttgaccctggaaatattatgtcttgtataatgttgccagccattcatgagtgacttgaaatgtcaactgacctttggcctgccatggtgttttagtcagagccattgatgaatggctcaccatggggcagagaagagagaagagaatgataatttttgatagttttgtaggttttttttttcttttatctcagtctcattcggttgcccaggctggggtgcaaaggt

SEQ ID NO: 40094 - DNA, 311 bp, Homo sapiens
aagtaagagaaaaagcatttatttaaaaataaacttaatttttgtttggtaatacaatcatcttagaatagtgtctcttaaaagggagagagtaaaagaatcactgcttaaaagtggttgtagtcttttttttctttggtattgcatagcaccagatgacaaaatttgtgaagctggatttcagacctgtaacagtaatgataatagctagtatttattaagtgcctgccatgcaccatcagctattcaaataactttacatatattttttcatttcgtcttcatgacaattctatgttgtaggttattag

SEQ ID NO: 40095 - DNA, 297 bp, Homo sapiens
  misc_feature (1)...(297): n = a,t,c or g
caannnnnnnnnnnnnnnnnnnnnnnnnnnnnnnnnnnnnnnnnnnnnnnnnnnnnnnnnnnnnnnnnnnnnnnnnnnnnnnnnnnnnnnnnnnnnnnnnnnnnnnnnnnnnnnnnnnnnnnnnnnnnnnnnnnnnnnnnnttatccaattgtcccattcnnnnnnnnnnnnnnnnnnnnnnnnnnnnnnnnnnnnnnnnnnnnnnnnnnnnnnnnnnnnnnnnnnnnnnnnnnnanagcgagactgggtctcaaaaaagaaaaaaaaaantnctatgcnggccaagggggggggct

SEQ ID NO: 40096 - DNA, 308 bp, Homo sapiens
attaatctgagttttttttttgagggttcatttgttcctgacatcgtttctgtttattcccaggttttatttttcttctggtgatccatggatgcctattttaagtgagaatatcaggagtctaattagaaactctaaaagtatgtgggtagggcctgtcaactagttggcttcatgttaagttgattagttagctaccttgacattttcttgatggactcccaagtattattatgttctcttgttactacgttacatagtttctctctcattttgttttttcataagagttttctaattgcttgctt

SEQ ID NO: 40097 - DNA, 304 bp, Homo sapiens
gcaagtttccttatctgtgcctgcagcctgatttttttcaggcagtttctttaaaggagttttaccaaagaccagtttttagctgtctgcccaactagttttccttttttcctcccttggtatgatttactttctttcttgttatattttatgtatccattgtatgtttttaaatttgaggttacaagaaggcttgcaaatactgtcttataactcattattattattattatttgagacaagcatagctcaaagtttcctttactttttactctgcttttctcaaacaggagtctgtcactgt

SEQ ID NO: 40098 - DNA, 306 bp, Homo sapiens
  misc_feature (1)...(306): n = a,t,c or g
nnnnnnnnnnnnnnnnnnnnnnnnnnnnnnnnnnnnnnnnnnnnnnnnnnnnnnnnnnnnnnnnnnnnnnnnnnnnnnnnnnnnnnnnnnnnnnnnnnnnnnnnnnnnnnnnnnnnnnnnnnnnnnnnnnnnnnnnnnnnnnnnnnnnnnnnnnnnnnnnnnnnnnnnnnnnnnnnnnnaacaaaggaaaaacagtattctatgtcaagttcctcggaagaatgtcaaataatttctgaatcccttagcactgagtgcagggtcagacacagagtaaatattcaatcagatttatgatccttataa

SEQ ID NO: 40099 - DNA, 310 bp, Homo sapiens
cgcggccgcgtcgacgcaaagagaaaaggggcattatcccgctggatgcacactgctgcgtggaggtgaggggcaggatgggggtggaggacatctcagggcccagagtgtcctcaggggcatgagaagacaagggggtcaggagaggggcaaatggagaaaagccacagtgacacaaattcctgcttagattagtgtgacccaaatatatctggatgcctcaaggccattctcatccacgtcagcacttaaaactaaaactgcaactcaagcaccaaagtaattggtgaataatatggaatttgctcaa

SEQ ID NO: 40100 - DNA, 306 bp, Homo sapiens
  misc_feature (1)...(306): n = a,t,c or g
tgataacctagatggctactgagtgattatgggacacatgcaatacacagcatggatacgctggacgaagaaattatgtatgtcccaggcaagacagagcaggacactgcaagnnnnnnnnnnnnnnnnnnnnnnnnnnnnnnnnnnnnnnnnnnnnnnnnnnnnnnnnnnnnnnnnnnnnnnnnnnnnnnnnnnnnnnnnnnnnnnnnnnnnnnnnnnnnnnnnnnnnnnnnnnnnnnnnnnnnnnnnnnagggactacaataggtggaacctctaacaggggaactcatagaatgaaagcagat

SEQ ID NO: 40101 - DNA, 309 bp, Homo sapiens
ttactcacttattttcttggttgaaagaatagtctgcagctgttctttttcttattatattttaatttttatatatccaatttattagctggtagtgaaggatgatgaagtttctggaatcttggtttgtcttgtctgtctgactaatccctggggtggggtttggatattttacagcttttggatcttttcatccagtgggattggtcaacctaccttgctgactatggtcagcccaactgcaagtacctccgggtaaacccagtgactgctctgaccctgcttgagaagtgagtaccttgtccaatg

SEQ ID NO: 40102 - DNA, 307 bp, Homo sapiens
cacttatacattatattgcttagaaacaaacccaaccctgttttcttatggactgtatcctgaaaatcactgtttttaatatgtggttaaacaagtgttttattagtgcatttatataaattatttaaccaaaacacttaaccggtgaaagtgctttactgtgagagtgagaatgtgcatgttctaagaacctctaatttttaaacctcccttattctcagccttatatttgttaaaacctgtgtgttaacacagatgcacccatgttaggggttaattagagaaaccaacctctttatagattagc

SEQ ID NO: 40103 - DNA, 305 bp, Homo sapiens
tagccaagttgcttttaacctcaacacagcctagccagatttgttaaacaagtgttagtttttggaatttagaaatcatgcagatactatcactcccctaagttggcatctaacccagcacttagggtgtgacttgtctttcctagccaaggccaggaggacacttaaaactttgacaatgttttcaatctatggcatatcacattgcggttagaaatggccttaaaatgccagtggttaattttaagtttggtataatacctccctggcatggttgaaagatggttacaaagggtttggttgat

SEQ ID NO: 40104 - DNA, 305 bp, Homo sapiens
ttttttccaaataaggtcatattcaccagttctggcagttaggacatgggcctatctttttaccattcgcccctctgcaggcactgattctcaaccctcagagtacatcagatcctctggggagatttttaaacactccagatgcgtgggcctcactccagaaatttgttttcacatgatcctggatgggaaattaaataagtattttcttttcttcaattccccagtttctcaagcgcagccaggatggtggggcaggggcaaggagcaccacatctcccggacagtacttcattgaagaagat

SEQ ID NO: 40105 - DNA, 309 bp, Homo sapiens
tcgaaacattgaaagccacacgcttcttctgtatactgtatactcgcagcaccctgtcacagctcagagtagcaacatattgacccaaagggtcccaggttactccttggacataacttttatgttcattaaaaattgatatcttttgtcctttgctgacatcccatatgatggctgtgttatccacagaggcagaagccattaaattcccatcagttgcccagcaaatatcatacacatcttctaagtggccccgcagagtcttcacaaccgtccagttctccttgttcagctgggcctcgtcctcat

SEQ ID NO: 40106 - DNA, 304 bp, Homo sapiens
aacattttttatttttcaaggcaaagtgcaaattcaactcctaatgaagctttctctgatcaccccagtaagaactgactactctttcttacgggctcccccagagtcaacgttttttaaactcaggctgaaacttattagtgggtcatgaaatccgtcgggtgggtcactggcagaaaaagaaataggaaatatcagaggacatcacacatagtgatggtgacaattactttttgaaacatttacttcagttaagagtgtatgcatatgtactagatggcaatgtaacatacaaaagttgaaa

SEQ ID NO: 40107 - DNA, 303 bp, Homo sapiens
gtggggtttcctggcggctctggaggccacaggacggggttgtctttgtgtcattcatcacccgagtttgccctgtttgacattccctttacagttgttgcctttgcaccttcagaaggcagtaaacagttggagctgctttgaagttggccagagatgttgggcactgagagaattaagcatcttagccttctgatacagcgagatttttgttttgttgggtttctttatttctttttcttttgccaaccacttgaagaagtctgcgaaaacgccaaaaaatgcagttcgaaatgacagtgc

SEQ ID NO: 40108 - DNA, 307 bp, Homo sapiens
aagaaggagaaccagctgcgagggtcaaaaaggtctggtcttttagggtctctggagaaaaacgttatttccaataatgggagcacagtggatcctgactataatcaactttcaggaactatccaaattgtacacttattaaattgaatattgcttaaaattcttaaactaaggagggtcacctggcaggttttaagctacaataattctgcaatacggttttgttgtcatggaatttaacctgtctatcattcctgaaaatgttcaaggtgaatggtgcgtcttaagccataaatggttaagcagg

SEQ ID NO: 40109 - DNA, 318 bp, Homo sapiens
gtttttaaagtatttattgactagtttttatgatattggtagacctatagttctcaaagataatttttaaaaaatcaaaataatccaattacagtaaggcaaaaatttatattatctgagcattaaaaataattaccagaacattaaaaataataatcagaccacctgtagtacatagtcacataaggtaatcagtttattggtcatatttgtcactaatgccatgtcacaggtattgttctgaataatatatttctcctcaatacaatcttagtattttaattacctacaatcctcttcatagttgcattttatagc

SEQ ID NO: 40110 - DNA, 320 bp, Homo sapiens
ttttaaatgtttcttcatcatcaaaatcctaaatctgatcatttcctgagttaatctgaaggacgcctccagcgctgtgcacactcccagcaaaacacaaggattttagggcacactaagagccacagagagcaccgctcccgccccacaggtacaggaccccaaaggcacttagatctcccgtttccgccaccgacttgttgctccttcccaaatacctgtttatctccacccttatccccatcgccatttccccccttagctcctgaagcgattaaccagcaacagtgagaaacaatgagagagagagagagtagagg

SEQ ID NO: 40111 - DNA, 318 bp, Homo sapiens
ggtggctgtaatcgatcagtaaaattagacaaattttaaatgtccctgtccccttccccccaattaaagtagattgggggaaagcgagtagggacatttaaaatttgttgtccttactgtatgcgggacacttcatttagggcgtggcttcagaaaacagtcaacccctttttcttaactaggtagcgactagaacgctgcgttctgggatactaccaagatttaggggagataaagcccatgccatcgttggccaaattgtgaccttgttttctgtctgctgcctttgtaggttagatttctccgaatgctatttaa

SEQ ID NO: 40112 - DNA, 319 bp, Homo sapiens
  misc_feature (1)...(319): n = a,t,c or g
gtcaactgtttatttttccaagaactctgagccccagtcctaaaaaatcagcttaatatatgcctcaaaaattccctgacagttttaggaagaactggttttaccaacaccaacaagagtaacttgtctattcactgctctaggcatttcccaggaaccatctgtgatctcaggacaatttctagatgtgatctggtgggccagcatgattcaacctgaccggccggaccaagaggctccaacgcctcagctgcagatggcctttctattttccaaagcctctggtttacctgattcgggtccttgntgttgttgttgg

SEQ ID NO: 40113 - DNA, 312 bp, Homo sapiens
ggctgctgcagccccctatgtgtttctgtggaactgggagattgttcagggcaactgataagtcagtcctttggaccactgatggcatggaaactatttaaaggcattttggtctttctttcttggagtcttacttccaattgtctaggtgggcttttaaattatttttcgataaagcccatgcatcattttggctgcttcagctgcaagtgatggaagacccagctcatttaaatgatatggagattcattatttcatttatcaagaaccctggcacaagggggactatggggttaattcattcagtggct

SEQ ID NO: 40114 - DNA, 311 bp, Homo sapiens
attagaatacaatgggagcgcagcagggcaggctgtggtatagaccagcatcaaaggcccctaaagtttgggtttcgagaaatgcactgtgagccactaattaaagtcttcactcactccctgatattgactattcatgatgccctgatctctagtgactgggtctctcctgggtaaattaatattcagggccctaaggtttattgtggtttatttattagttggtttcattcatttattcacacacatactatacatatatatgtagagtgtcattctatctatcaatcatccatctatctgtcaacaaa

SEQ ID NO: 40115 - DNA, 311 bp, Homo sapiens
aggagaggtctcatagtttgatgttgctcaagaagggaaaacaagcaggatgggaagaggtctaatcagccggctggagtggggtgctgggtttagttcattccttcttaaactcagccagttctcattattcatggtggttttgatctataaagttgccacaaaccccaagttagccaatactgagccatcactcctagggcagtacagcgctcggttcctgcgagcctctggtcacaacattttcagcaacagatccatacataactttttcttatatatgtttctttttaaagatacgttatttaaaa

SEQ ID NO: 40116 - DNA, 177 bp, Homo sapiens
caactctgtattgtcattactatttccagaaaatatgagtcctaatataataaaaacaaaatagtcccacttttgaataatgactatatatgcaacttcagcatttcacctgtatgaagtcccagacttaatatgttcttacagtcacatgaaaaagcatgactttttttttttttt

SEQ ID NO: 40117 - DNA, 309 bp, Homo sapiens
  misc_feature (1)...(309): n = a,t,c or g
nnnnnnnnnnnnnnnnnnnnnnnnnnnnnnnnnnnnnnnnnnnnnnnnnnnnnnnnnnnnnnnnnnnnnnnnnnnnnnnnnnnnnnnnnnnnnnnnnnnnnnnnnnnnnnnnnnnnnnnnnnnnnnnnnnnnnnnnnnnnnnnnnngggcaaatgacttgcataggcacaagaccaaaaaattaatatgaatgggctgataaaaggatgtcaactctcttaatagtcaaggaaatacaaattaaaatcccaacaagagacctccattnnnnnnnnnnnnnnnnnnnnnnnnnnnnnnnnnnnnnnnnnn

SEQ ID NO: 40118 - DNA, 144 bp, Homo sapiens
cgattgcttggggcccttggactttagacttatggctgggtcacagagaagggggcaaccacactgggtggagcacgggagaagaaaaggaagaaggagagaaaggaaggaacaagagaatcctacaactaaaaaaaaaaaaaa

SEQ ID NO: 40119 - DNA, 309 bp, Homo sapiens
cttgcttgatatatggtagagttgccacaatgcgctgaccaatagcactcttcttggcaccctgtcctcctcttgccagcatgctaacccatatagtactggtgggtcgggaagaattctcaagacatgatctacactctcctgtgtaggcatatttagaatcctttttggcaaacacataaactgtgtttgttgccattttctcttgggcaatcagaaccttttctgatccattaataatgaaatagccaccaggatccaaagggcattcatttaactcacaaagatcacgatctgtcaagccattca

SEQ ID NO: 40120 - DNA, 311 bp, Homo sapiens
  misc_feature (1)...(311): n = a,t,c or g
nnnnnnnnnnnnnnnnnnnnnnnnnnnnnnnnnnnnnnnnnnnnnnnnnnnnnnnnnnnnnnnnnnnnnnnnttatcatgatgaattttaaaagatatgctttaaaactgaaaattacaaaactttccttctgaaattaaggctgtattctttgcccttttaaactatggaggtgcctgttcctcctactatccatggtaaagatgcagacacaactttcctttaaaactgcttattgcactaaaagatagcaaaaacaagttgtcagttcttaaaataaacatgattatatttctataaaaggtcgacgc

SEQ ID NO: 40121 - DNA, 311 bp, Homo sapiens
  misc_feature (1)...(311): n = a,t,c or g
gaggaagacaatgggggaggaccctgaggcggcctctgtgagccgacaggaacacgtggtcgatcagagagagactcgaggttcgtgaacggatggggaggaccctgaaaagcactgtggaatacaggtttctagtaacttcaaaatcacatcatttggactgggtaagaattgctgaaactttaatgaaaagactgactggcttataaaactgctaacccaaatagaataaaaattaattgaataccgaaggtcgacgcggccgcgaattccnnnnnnnnnnnnnnnnnnnnnnnnnnnnnnnnnnnnnn

SEQ ID NO: 40122 - DNA, 315 bp, Homo sapiens
agaaacttcattacctcttgcgctagaacacccctcttgagcctgtggaaggtcaggttgccaggggatacgaataaaccagctgccttctttgtgtctctgctaaacagtagcctccctccttgggtcattgacctctcagggcctggcaggccagtgtctgggtttttcttgtggtgtaaagctggccctgcctcctgggaagatgaggttctgagaccagtgtatcaggtcagggacttggacaggagtcagtgtctggctttttcctctgagcccagctgcctggagagggtctcgctgtcactggctggc

SEQ ID NO: 40123 - DNA, 442 bp, Homo sapiens
  misc_feature (1)...(442): n = a,t,c or g
gtcgcctcgngagcccttttganaacccnnnnnnnnnnnnnnnnnnnnnnnnnnnnnnnnnnnnnnnnnnnnnntctcgaggatccgaattcggcggccgcgtccgacgggttgtttgctcttggctgggcaaacctgtgtacttaaagaggaatcacttgcattgcttttcggacatggtgttttgttggtgccgtctcctccctggctggtaagcacagcttgcgggcctggctctgttggaccacccactttgcaactcttgggcagtcaacactgatactgtactagaaagcngtgggggagttatagaatagcatttatagagaaggattggtgttatttactttcatgtgaccttaaaaataganaataatatttgngctnttaatttgcatntgctggaacctgatacactatttttaaaaaatatccctatttt

SEQ ID NO: 40124 - DNA, 320 bp, Homo sapiens
  misc_feature (1)...(320): n = a,t,c or g
ctgggatgcacttggggagggaatgagacaggggacattcagaatggctgtttgggctcacagttgagtgggaaaaagatgggagctgcatcccaaggagtcatgaggtctcccccggcacctgtttcaggaaaggggagaagtgttgcttttctcccctgctgacagattagtctgtcatgagagtggatttttgcaggttgtgggggaggggtaccaagaccgtggggagtgggagatgcctggctggcttcccgggtcacctcatgtgcagagttgacggnttgggccaaagccttggattcctgagaagcttacca

SEQ ID NO: 40125 - DNA, 260 bp, Homo sapiens
caaatgtctatcattagtctttccttgtaggaaatcaaacaaaaaacagcaacaacaaaaagcttctgcaaaagataactactcttgactaacaggcaaaacttaaatcataactacacattttgagactactataaattgctgatgatactatggcaggtatcttggtatcagaaccccgtgataatctcccaaagcaaaccatatgaattgcataggaggaatttaacaaagagtagctagtggaaaaaaaaaaaaaa

SEQ ID NO: 40126 - DNA, 332 bp, Homo sapiens
  misc_feature (1)...(332): n = a,t,c or g
ctttactctggcctcagaatgtttcttccaaaccttaatggctctccccttctttttccttaatttcttcattccacccctggaataacgttctagtccagactacaaatacaacgtaattaaagactcaatcaatgccaacagtaggaggaggattaccacccagctgttgcctgtcatgccccattaacacaaccaaccgtcaagtnngcctttaaaaaacccagctngacatttgcttcatcatattcagaccccccagctagctcatataatgnatgtacttganaacatattaatngtttaccaatctttctcctaaaaataaagct

SEQ ID NO: 40127 - DNA, 323 bp, Homo sapiens
  misc_feature (1)...(323): n = a,t,c or g
nnnnnnnnnnnnnnnnnnnnnnnnnnnnnnnnnnnnnnnnnnnnnnnnnnnnnnnnnnnnnnnnnnnnnnnnnnnnnnnnnnnnnnnnnnnnnnntgtattttcattttgcaattttatacatgtggaagtggagctcagtctccataactaacttgcttgaggtcacaggttatgaaattatccagatggatttgaacactggtgttaaaactgtaaagcctgttgtttattaattttctgtttgaaaagggcagactttattttttcatgtttcacggtttttcagtttgtaatgtaattacaaaatggctagtttttttg

SEQ ID NO: 40128 - DNA, 330 bp, Homo sapiens
tgacacatcatttgatcttcactgcctctaataggtccaatctcttttattacatttgtcttctcttctacatttaaataggtttagtctttcccatcttgaacacttagaatacattaaaacctattgcaatttctttttagctaccttttgtctgctctctgtccgttcatggcagtttgttggtcctgtgactttagttcttattctgtcactgacaagggctctctcacagtgatgccttcaactatttctcagttgcagaatctagtaaataccttttttttcttttttttttaaagacagtctcgctctgttgctaggctgggg

SEQ ID NO: 40129 - DNA, 342 bp, Homo sapiens
  misc_feature (1)...(342): n = a,t,c or g
agcgttctaaggtacttctgtaccctacccaactccagggccccagtgctatttcacggagagttggtgattgccataataccctatttcaatattctttactgtagaccagggatctgcaaacccacagaccaactctggctctcagcctgtttctgtgtagtccctgaagagaatggtttgtatgctgttaaaggtgttgttttggataaataaatngatanncaaaggacacagatacggtatgaggcccacaaaagcctanaataccactttctggccctttacagaaaaaatttgctgcccctagcccaagaggggggatccctagctgtgggccca

SEQ ID NO: 40130 - DNA, 340 bp, Homo sapiens
  misc_feature (1)...(340): n = a,t,c or g
agaaaaaacttttttaatttataattttgcgtgtttaacactatggatgttaaaaatatttaaattttccttatttttgtaccagatgttcacctgggctaacaaaaaaatttattacttgacacaatttaaaaaaaaaaatcaataaggatacaagagtagtgacaatacaaaagcattagtaagagaaactacaatactgtatcagataaaagtnnnnnnnnnnnnnnnnnnnnnnnnnnnnnnnnnnnnnnnnnnnnnnnnnnnnnnnnnnnnnnnnnnnnnnnnnnnnnnnnnnnnnnnnnnnnnnnnnnnnnnnnnnnnnnnnnnnnnnnnnntt

SEQ ID NO: 40131 - DNA, 323 bp, Homo sapiens
gtcaaactgcccatgatgttgctgatcagccaaggcctggatcagaggggagcttctgtgcatcttcaaactctccaatgcactcccaaggccagcagttctctggtgtctcccaacttcctggacctgtgccaacttcaggagtaactgatacacagaatactgtaaatatggcccaagcagatacagagaaattgagacaggtaaacacattgtatgttctcagttttaaatgtattatttgaggaagctgttcatttcatcaaactgagtaatttctacacaggagttaatgttttattttttttattctgtagagtttg

SEQ ID NO: 40132 - DNA, 318 bp, Homo sapiens
gactttcccaacatatcactaataaagcttttaaattgaaatggtccatgctataaatattgaacacactaatctttaaaagtgatttatttgatacagcctttagaatgtaaaaattacaacttttgctcatattaccaaaatctgtaaactgctagagtaagagttttttgtttatgtaaaactctcttattgaaaagctttcatgaccaaacattctaggtagaatcttaatttgtaaaacttacgttatttgagaggcggtaggtactaagtgatttcacaagaacttcaataacatgatatatgctatgaagg

SEQ ID NO: 40133 - DNA, 316 bp, Homo sapiens
  misc_feature (1)...(316): n = a,t,c or g
gttaaacattggcaaaaaattgcaaactatgtagagagaaaatcagttttcatcaatgtaaaattatctgtggattaaggcttgaatttttataactttgtcagattaacaaatattaatctcatgttagggttttactgaggtcactctaaggaatcaatcacctcttcttttttactatggaataatttgggatatttgctattaacaatggagttgattttcctgaagaatttgtaattcatgataaatgaatcagatcagctatgatgtaattgaaaattttaaacatttaggaaatatttntctggtagaa

SEQ ID NO: 40134 - DNA, 330 bp, Homo sapiens
  misc_feature (1)...(330): n = a,t,c or g
gcannnnnnnnnnnnnnnnnnnnnnnnnnnnnnnnnnnnnnnnnnnnnnnnnnnnnnnnnnnnnnnnnnnnnnnnnnnnnnnnnnnnnnnnnnnnnnnnnnnnnnnnnnnnnnnnnnnnnnnnnnnnnnnnnnnnnnnnnnnnnnnnnnnnnnnnnnnnnnnnnnnnnnnnnnnnnnnnnnnnnnnnnnnnnnnnnnnnnnnnnnnnnnnnnnnnnnnnnnnnnnnnnnnnnnnnnnnnnnncagtanntatcagttttactctttgacactttattgtacttgattatatctacttgttttcgngtgngtctgccctaccanctctttt

SEQ ID NO: 40135 - DNA, 332 bp, Homo sapiens
caggaagctactaatttaatttatatcggtcttaaagtaatctacagagataactagtaaagataaagaatatgattctatataggaagtcatcattccaggatttgaggaatccttccaagtaattttggcagaagcagtaagcatcatgctttcaaagctaataaagaatgcaaggaaacaggacacattttgcaataagtagcaggaaaaataatgaaaaaagtcacaaaaattgcagatctggtattattacagacacattgaaaaacatgtactgtattatgttctaagaagtaaatttgaaaatatctgccaaatgaaaacaatac

SEQ ID NO: 40136 - DNA, 316 bp, Homo sapiens
ctgaaattcacagtacagaatccaagtcatgggtcagttagaaacgtctagaaacacatcaatctcaggaggataaatcaagagaataggatggatcagacaaaatctacaagcacaatggcagaaagtgtgcctctggtataagaatggcgtaagctttgtaaacaatagtgttatacaggggtgcctctgtagtacctctacgtttggaaggacactattcattcatatacatgataagcacccttaactggatactccataggtaacagacaaaataaaacaagaacttccgtcttaaaattgtagtggtgga

SEQ ID NO: 40137 - DNA, 316 bp, Homo sapiens
  misc_feature (1)...(316): n = a,t,c or g
gcgggtgcgtggaatatcagccctaagaaggagtgtagcgggtgtgtggaatatcagccctaagaaggagtgtagcaggtgcgtggaatatcagccataagaaggagtgtagcaggtgcgcggaatatcagccctaagaaggagtgtagcaggtgcatgctacactgtgggaggnnnnnnnnnnnnnnnnnnnnnnnnnnnnnnnnnnnnnnnnnnnnnnnnnnnnnnnnnnnnnnnnnnnnnnnnnnnnnnnnnnnnnnnnnnnnnnnnnnnnnnnnnnnnnnnnnnnnnnnnnnnnnaggagccaggggaagct

SEQ ID NO: 40138 - DNA, 332 bp, Homo sapiens
tagtcagtcaggttttaaatgaatgcaagacagtacttggaggctggaagatgaccaaaaaaagggggaattaatgttaaatatggataacttccaaggagttagggtttttgaagcaggagaagcagattcaaagtagcaacggtaacaaaagcaacatcaggacacctggatttaaatcccagcttcagcaatcactagctgtgtgatcttgacaagtcacctagtcactcagtctcaggtacctcaagtataagatagggttacttttaaccactttatagattgttttgaaggttaaaagaaacaatgtaggtgaacgtgagttatgt

SEQ ID NO: 40139 - DNA, 305 bp, Homo sapiens
  misc_feature (1)...(305): n = a,t,c or g
ctccaagtacagttattttcacgttagtgaaggtcaagactttcatttatcaattatttatttactgtgcaatattggctgtaagctaggtgctggaaatcaaatggtgaacaaggtagatatgtctctgcttttagagatctcacagtctaaagtaaacaggcaagtacaatatcatacaagcgctattgacagaaaaagaanagacagcattcaacgaatgcacatagaaaaaatgcttccctctcctagggaaagttangancgatttnttggannanatgacntntannntgnnnttcttt

SEQ ID NO: 40140 - DNA, 315 bp, Homo sapiens
ccgggctcttataagcaaaacacattactgttggcaaaaccctaaaccctaaaaaattaatatacttaggtatttaattgccaacaaacagaattcaaacccattaaacatgagactttccattaaattacaaaaatatcttatctacacatcctgaataaaatattaatgccttgagtcactaaagatatgcacacagagagagtagcttaaaatagtacccactgaggccaccttagtgaaatacatcacatattaaatccaatgcctagaactgtatacagtaaatacagttttatccttccttaaaaaagg

SEQ ID NO: 40141 - DNA, 321 bp, Homo sapiens
ttcagaagtagaaaaagaccaagatgttaggtcaagattaagaaatgaacgtaaaggaatgtttaaagttccagaaagaaaagtagttaaatggcacagaggaaaaagatgaagcacaaggaaaaatgacagagcttacatgctgcagagtcatacgtaagttacagcccgtgtctatacaactatggatgcatcctcatcctcaaaagctgtcctgcagaaattcagttaaccagttagataattaaaccaactgtagttactagagctacagcacatagaagtaaagagattttgagtctgacaaaagtggactcaaat

SEQ ID NO: 40142 - DNA, 314 bp, Homo sapiens
  misc_feature (1)...(314): n = a,t,c or g
ggaatatctactatgtgcaaggaatttttcttaaactctaaggttatgaatcactgggcaaatccatataattagagaattttaagtgctttanagcggngnnatagaactgngctcnggcgcgatnntcnngnncgaaactgngnantattctnatatatccangnngttttnnnacnccnntanggtngctnncttcntgggtantnnccttancctggggganttcttaaggggccctaaaagcgggnngnattcctnntggccntnngntnnnncnatnnnccnttnattcccnattntcgtgggaattc

SEQ ID NO: 40143 - DNA, 314 bp, Homo sapiens
tttagattttactttctgtggactgtaataactactctcaacttgcatttctgtgagctaagaaatataagaatattaagtaaatcaaatttagtattaaagagcaataaattgtcattatgatgattaattgattaaaacaaggccaattttaagattcaggaaatttaaatattaagcaggaaagcaggtgcaacaaaaacagctgtaacagattatccatggtataaaggttgaatatgctagtctcaacgtatatagagaatttaaatactttttaaactccttcttaatattgttttaaaaagtgaaag

SEQ ID NO: 40144 - DNA, 306 bp, Homo sapiens
  misc_feature (1)...(306): n = a,t,c or g
nnnnnnnnnnnnnnnnnnnnnnnnnnnnnnnnnnnnnnnnnnnnnnnnnnnnnnnnnnnnnnnnnnnnnnnnnnnnnnnnnnnnnnnnnnnnnnnnnnnnnnnnnnnnnnnnnnnnnnnnnnnnnnnnnnnnnnnnnnnnnntggcannnnnnnnnnnnnnnnnnnnnnnnnnnnnnnnnnaaaagccaccgtgtgtttatttttcccattcccttcctttatctgcaatgcttttttctttaaggcagcctaatttacaagcttggccttgaattaaaagagaacccagaacccgctcttggagg

SEQ ID NO: 40145 - DNA, 293 bp, Homo sapiens
  misc_feature (1)...(293): n = a,t,c or g
ccaattctaacaatgttttacctattggactgaagattaagattgataatattgtgttgagaatataggtaaacagacattccataaacagctggtgggggtgtaatgtaaaacttttgagggtgcatttggtaatatctgctaaatttttaaacatgcatatcatcttgatctaataattctatttgtaggaacttctacagaattactcaaaagatgcaaggatgtatataaagttcagtacagcactgattgcaaaagtaaaaattaaaaatctaaatgnccatcaagag

SEQ ID NO: 40146 - DNA, 284 bp, Homo sapiens
  misc_feature (1)...(284): n = a,t,c or g
tgtcagggttagcatgcattctaccatttggtagccagaatgaaagtgacctaaataatccagggactgaaggaaaactttgtcattcctgcttgttttcagatacaacaaatgattttactataatagagatggaaaatgaaaatagataatgtgcttctcccattagaagtcatcaaaaattaaataagaatggnnnnnnnnnnnnnnnnnnnnnnnnnnnnnnnnnnnnnnnnnnnnnnnnnnnnnnnnnnnnnnnnnnnnnnnnnnnnnnnnnnnnnnnn

SEQ ID NO: 40147 - DNA, 286 bp, Homo sapiens
tttgtacgtgcttctctggaaaagtacagaatactggatttaacagagtaaaacctaagggggtggtatatgtaggaaaaaatatgaaatatgtctaaacccgtaactagatgggaagcatcccaggataactttcaaaaagcgtaacctacggaaatgttccaaaatgtttagtgtgctcctggctgcagataaggttgtgaactaccattaaacatgaagtgtgatatatcattggcgtacagaaaaggctgatacacactgacagattttgtaacaagggacg

SEQ ID NO: 40148 - DNA, 291 bp, Homo sapiens
  misc_feature (1)...(291): n = a,t,c or g
tgagaatcccccttttctgtgcttcaactgagctccagaaaagggggattctcaatgacctctactctcttctcaatggtaactggctggcccaggccatggcaagctgagacggattacctaacacaggaggaagggatcacgtggcaggatctgtgttctagttgtccatcaacatggcatcagtaaacgaagacaccctaaaaacaggcccaaatggctttggtcgacgcggtcgccaattccnnnnnnnnnnnnnnnnnnnnnnnnnnnnnnnnnnnnnnnnnnnnn

SEQ ID NO: 40149 - DNA, 285 bp, Homo sapiens
cgcggccgcgtcgacttcaaataaaatgaaggttgagattctttatgcagcagcaggagaagtaggattctgaatctctctttggagtcaagttggtctttgaaagaaaaccaatttgcttttaagagattctagtctagcaggataccagatgatggcaagtgtgcttaaaccaagggtgctgtatagactaagggactggtacactggaaaactaccttctgttccagcagagggcaattagggtgtcagcaatgctgttattactactaaggtcaccaagga

SEQ ID NO: 40150 - DNA, 293 bp, Homo sapiens
  misc_feature (1)...(293): n = a,t,c or g
nnnnnnnnnnnnnnnnnnnnnnnnnnnnnnnnnnnnnnnnnnnnnnnnnnnnnnnnnnnnnnnnnnnnnnnnnnnnnnnnnnnnnnnnnnnnnnnnnnnnnnnnnnnnnnnnnnnnnnnnnnnnnnnnnnnnnnnnnnnnnnnnnnnnnnnnnnnnnnnnnncaacaacaacaacaacaaaagtgaagtttcaagaatttgtactatcggtannnnnnnnnnnnnnnnnnnnnnnnnnnnnnnnnnnnnnnnnnnnnnnnnnnnnnnnnnnnnnnnnnnnnnntggatttcag

SEQ ID NO: 40151 - DNA, 291 bp, Homo sapiens
ggaggttgcactattttttaaggatagggtatagctggctcttacgatcagaaacccaaactttagactaacaatttcaaagctgtttgtatttactaaatatattaaagcattttgtttttcttggtaattagccaagttgctctttcatatgtcaggctgaatgaggtgtgctatgcataaacaggctatgcatttgggccacaggtagactggggttttagaaggaacctgtaacagtaacagcaacaggaatcaaagtaaacaacaacttttggaaatgtgagggct

SEQ ID NO: 40152 - DNA, 286 bp, Homo sapiens
gtttaaaatacataagacaggtattaagattaaaatttaaaagcatgtaatgaaaatcttaacatggaaagtgaaaggctaatagaagagtgctgacttattccagaaatcataatctactcatgaaattctttgtggtggcataattttaaaattgcattagacaatgacagtcttatcaggcagggtgttttcaactgcaaataacagaatagccaactaaaatttgcttaagcaatttggacatttgatttatctctcttaacaaaatctctagaggtagggg

SEQ ID NO: 40153 - DNA, 279 bp, Homo sapiens
cttgtttttagatttatttctctcagcaacatcttatagctttgtttataaattgatcccttaatttcatatttctgtgctattctttgatttctgacagtttattgcttttatatgtacctttaattgatttttatgtgttgatcttgtattatgttacttacataaactcattttatagtcccagaagattcttttgtacatttggtgtgattttctgtatagctggtcatgtcttttgcaaataataacaggagtgtttctttcttttcaatggag

SEQ ID NO: 40154 - DNA, 290 bp, Homo sapiens
aagacattcatttatccataagaggcactcactgaccagatatttttgaccaggatatgtaatctagagccagagaaattcaaaatttgttttctcttgaccctgaggagcaagtcaagtcatcttttagctaataatgactccaaatctgtgccctccacattgattgagagctcttcccttgtccccaagattcgtgttcatggaacttgatttttaattgtgacttgattctgcaatgcttccttcagtttgcttcaacagattggactcattatgttttttttcat

SEQ ID NO: 40155 - DNA, 289 bp, Homo sapiens
atttagtgcataaaagcagaattctttcatgtatttgggtctatttctggacttttattctgtctcattctgtgggtgtctccatatgctacagccacaatgttttaattactttaactctaaagaccagtccaggtttcactgtttaaaacattgttctgatcatcttattttccttctaagtgaacttagaagcaatatgtttagttcttttttaatcttatcgatattttatgattattgcattaatttgtagctaaatacatgtaaaattttttattttagccct

SEQ ID NO: 40156 - DNA, 290 bp, Homo sapiens
  misc_feature (1)...(290): n = a,t,c or g
catttttgtaattttggtaaagatggggttnnnnnnnnnnnnnnnnnnnnnnnnnnnnnnnnnnnnnnnnnnnnnnnnnnnnnnnnnctaaaaactatttctatatatggatgctttaaaagcaaattcactaatatggttactttcatcagtgaagtagtatacagtatatgattaaatatttactgaatataatatgtggaacttattctttagttacttatgctgttttcaaacagaacaattgctcttaaacttttgggaagtatggaccttttgggactcttcca

SEQ ID NO: 40157 - DNA, 319 bp, Homo sapiens
  misc_feature (1)...(319): n = a,t,c or g
ctggttgcaaggattatgcaaatatcggtgaagatacttatgatatagtgatccctgtcaaagatgaccctgatgaaggggaggccagacttgagaatgaaataccaaaaacgtctggcagcgagatggcaaacaaacgtatgaaagtaaaacatgatgatcactatgagttaatagtagatggaagggtctattatatctgtattgtatgcaaaaggtcatatgactgtatgacaagcttgcggagacattttaacattcattcttgggagaagaagcatccgtgccgatactgcgagaaggganttccncttgacaa

SEQ ID NO: 40158 - DNA, 328 bp, Homo sapiens
  misc_feature (1)...(328): n = a,t,c or g
nnnnnnnnnnnnnnnnnnnnnnnnnnnnnnnnnnnnnnnnnnnnnnnnnnnnnnnnnnnnnnnnnnnnnnnnnnnnnnnnnnnnnnnnnnnnnnnnnnnnnnnnnnnnnnnnnnnnnnnnnnnnnnnnnnnnnnnnnnnnnnnnnnnnnnnnnnnnnnnnnnnnnnnnnnnnnnnnnnnnnnnnnnnnnnnnnnnnnnnnnnnnnnnnnnnnnnnnncatcgcgtcagcctttctatgtacttattttgtagaattccttctcatctgcttaaataaccataagtgatgagaaatctaccaagtataatatgacttttcatttgcaag

SEQ ID NO: 40159 - DNA, 315 bp, Homo sapiens
  misc_feature (1)...(315): n = a,t,c or g
gctggaggagatagccgagaccccagcaacaatctgagccatgagaacgaggggatctgggcaccccaggaaccgccattgcccataagacccccaggaagctagggactttctttccatggaaacatttagacacaaacctccccagctncggccaagccatcatttgctacctggagctggatgtanaagtcagcagacagctccctatccctggacccctgccctccttttttctgctcacaaggacttttgattttagttataaggagggcccaaaatgtgtgtgtgnacatgngtgtgcacacctggcac

SEQ ID NO: 40160 - DNA, 328 bp, Homo sapiens
  misc_feature (1)...(328): n = a,t,c or g
cgctccctgnnnnnnnnnnnnnnnnnnnnnnnnnnnnnnnnnnnnnnnnnnnnnnnnnnnnnnnnnnnnnnnnnnnnnnnnnnnnnnnnnnnnnnnnnnnnnnnnnnnnnnnnnnnnnnnnnnnnnnnnnnnnnnnnnnnnnnnnnnnnnnnnnnnnnnnnnnnnnnnnnnnnnnnnnnnnnnnnnnnnnnnnnnnnnnnnnnnnnnnnnnnnnnnnnnnnnnnnnnnnnnnnnnnnnnnnnnnnnnnnnnnnnnnnnnnnnnnnnnnnnnnnngattttcaatctatggcctttatgttcagtgactgtgaaatccaaatgtcttgg

SEQ ID NO: 40161 - DNA, 322 bp, Homo sapiens
cttagattacagcaactggtctaccactgttccaatggtgatgagctggactgtactgctgaagcaccagcacttaaatacataagtatattcagtaaatttatcataatcactattttagagaaaacgcagctaaatcagaatgctaataaagagcacatgtgcaaatcaccttgtgcaaatcaccttatgcaaatcaggtatgtggaaaatggatagtcaaaagaaaaaaaggagaatcggtacttttcaaaagaattcataatagcataactcattttatacttttcaacaaaatgtctacactcaatatgcctaactt

SEQ ID NO: 40162 - DNA, 331 bp, Homo sapiens
  misc_feature (1)...(331): n = a,t,c or g
ctcatctatcaataataaacttgaatgtaaaccaattaaattctccacttaaagcatacacactgcctgtatggatttaaaaaaaaaagtggcccaactatatgctgcctacaagaaattcactttgccagtaaaaacacatataaactgaaagtaaaggaattaaaaaaaaaatttcaagcaaatgaaaaagaaaaacatgcagataaaacaggctttaagtccaaaactgtaaagagaaaaaaatggccattatataatgataaagagatcagttcaaaaagagaatatatatatatatatgtttttaattgcagatccnnatatatgc

SEQ ID NO: 40163 - DNA, 332 bp, Homo sapiens
  misc_feature (1)...(332): n = a,t,c or g
tgaagccctggccctacaaattgtcaatcacttcctctagtactccaacttcctttgatgacttctcttacacaaccttttcttctacctgccctcgtaaatagggaaatatcttaaggttgtactcctgctcattctttcttattttatgtttttatcactgttgaacatgctcacagtttacagaatttaattgtcttctaagtcttgttattaaaaaaaagaagcagggttaaaataaacccgattctgaattatagttttgccaagtataaataaaaatgctgntatgattttacttaaataattttaatctaaagttaaacttgaaa

SEQ ID NO: 40164 - DNA, 314 bp, Homo sapiens
cgcttatagcttgctttggaaaatgaaggctctcgtgtttgtttattggttagataaactgaaataaacacaggctctgccacttcctgcatgtttgaaaaaatattttccttggcccagacacagtggcatcactgtatggctcacttagaaattcagagactcaggcttcaccctaggtcctctgaatcacaacctgcattttaagaggatctctagtttattgtgtacgcattaaaatttcaggggtaccttctgttgaatcatgacctctacatatgagaaatatttacagtttatcctgtgtgaggtaa

SEQ ID NO: 40165 - DNA, 312 bp, Homo sapiens
atttatttttatatttaaaattcatagaaaagtgccttacatttaataaaagtttgtttctcaaagtgatcagaggaattagatatagtcttgaacaccaatattaatttgaggaaaatacaccaaaatacattaagtaaattatttaagatcatagagcttgtaagtgaaaagataaaatttgacctcagaaactctgagcattaaaaatccactattagcaaataaattactatggacttcttgctttaattttgtgatgaatatggggtgtcactggtaaaccaacacattctgaaggatacattactt

SEQ ID NO: 40166 - DNA, 320 bp, Homo sapiens
  misc_feature (1)...(320): n = a,t,c or g
cttcatttagtcagggcaggctttaacatgtggctcatggagaaaagtgaaaccatagacaccaacgggactcggaataaaaaacacatttggaaataaaataaaggttaagctctcgcaccaacagaccttgcttgatcagcaaaaatgtaggtgttaacaggaaatcgctatattgtgtaatccccatttcaccctccacaaaattgcactataattcaaaataagtgaagcaacaattggacggatgaccagnttttgttgtttacatagnttaatgccaaatgtgcagtttccatgattttcanaatgacntgatt

SEQ ID NO: 40167 - DNA, 307 bp, Homo sapiens
  misc_feature (1)...(307): n = a,t,c or g
ctttggtcaatgggacatgagcaaatacaatgccagcagaagcttggaaaatgcttgaggggatcgaatagttcatgggtgttcatgcttgccctctcttgcggctgggaaccctgagaactatcatgtaagaagcctgggctagtctactggatgataagagaccacatgttgagagggcatggctatcccaggtgaggccccaaacacttgagtgaggccatcctagatcactcagtcccagaggaaccactanctgaccacngagatcagccaagctggcacagaccanaacaactgctcagct

SEQ ID NO: 40168 - DNA, 315 bp, Homo sapiens
  misc_feature (1)...(315): n = a,t,c or g
nnnnnnnnnnnnnnnnnnnnnnnnnnnnnnnnnnnnnnnnnnnnnnnnnnnnnnnnnnnnnnnnnnnnnnnnnnnnnnnnnnnnnnnnnnnnnnnnnnnnnnnnnnnnnnnnnnnnnnnnnnnnnnnnnnnnnnnnnnnnngatttcttgtaaaattgaaaacaaaattcagactttggctacttgaatcttgtttaatgtaataggaaagctgataatttaaaggtaacaagttgtggaatgtcttctttaagattagcatgcagtctcattgtacctgntacctgttcttttttttttnanatngaaggggcc

SEQ ID NO: 40169 - DNA, 306 bp, Homo sapiens
gaacacgtcaccaacaccacacctagctccgtcctgcccacccctttggtgtggagtgggtagcattgcttccctgaacggtagcctgagctgagttactcttcattgtagattggtgtttctcacagggaaccagggaagaaggtgtcaatttggccccctctgccagctaagaactgctgttgtggttggagggatcataagctctgcttgtagagctgcccgcccagatggaggaccctcaggcagctctatcatgaggtcaccacgttccattccaagggatgaccctcagcttaggagggg

SEQ ID NO: 40170 - DNA, 305 bp, Homo sapiens
  misc_feature (1)...(305): n = a,t,c or g
gtaaatgatccttataatgtactattgactatggtttgctagtattttgttgagaatttttacatcaatgatcatcaggaatactggcctatagttttgnnnnnnnnnnnnnnnnnnnnnnnnnnnnnnnnnnnnnnnnnnnnnnnnnnnnnnnnnnnnnnnnnnnnnnnnnnnnnnnnnnnnnnnnnnnnnnnnnnnnnnnnnnnnnnnnnnnnnnnnnnnnnnnnnnnnnnnnnnnnnnnnagccataaagtcatgtggntctgggctttccactgatgacagacttctacttactgagtcaa

SEQ ID NO: 40171 - DNA, 315 bp, Homo sapiens
  misc_feature (1)...(315): n = a,t,c or g
ccaggcatgttggatgaggggtatagacctatatcaagatttggactagtgaaggaaggggataagatgttctcccaactcccttattttgccatcttttctacaaggattttttttttaccttaaatattgttgtgagataaaactaaatttatagtatgcagctatacttttttttagtcctccactgttagaaaaaggatggtaatattttaaccttaattaacatccttttgtgactacaatgngcgtcgacgcggccgcgaattccnnnnnnnnnnnnnnnnnnnnnnnnnnnnnnnnnnnnnnnnnnnn

SEQ ID NO: 40172 - DNA, 310 bp, Homo sapiens
  misc_feature (1)...(310): n = a,t,c or g
cgcctatgagtacgtggagtgtcccattaggggcactgcggctgagaataaggagaacctagatccttcaaatctgatgccaccaccaaatcaaacaccagctccagatcagccatttgcattgtctactgtcagagaagagtcatccattccgagagcagattcagagaaaaagtgggtttacccttctgagcagatgttctggaatgcaatgttaaagaaagggtggaagtggaaggatgaggatatcagtcanaaggatatgtataatatcattagaattcacaatcagaataaccgagcaggcttg

SEQ ID NO: 40173 - DNA, 316 bp, Homo sapiens
  misc_feature (1)...(316): n = a,t,c or g
cggcattcaaatatagggtttttcactctaaaacacagtgcttgtttctttacttctcgttacctccttctactgaagcttatcatcaccaatacaggtaccgtgtagtttgtttttttacctgtcataaaatgtcgacgcggccgcgaattccnnnnnnnnnnnnnnnnnnnnnnnnnnnnnnnnnnnnnnnnnnnnnnnnnnnnnnnnnnnnnnnnnnnnnnnnnnnnnnnnnnnnnnnnnnnnnnnnnnnnnnnnnnnnnnnnnnnnnnnnnnnnnnnnnnnnnnnnnnnnnnnnnnnnnnnnnnnnnnnnnc

SEQ ID NO: 40174 - DNA, 309 bp, Homo sapiens
  misc_feature (1)...(309): n = a,t,c or g
cacacatttgttgaatataaatgcaacttttctcaattactacattactgatttattacattctttctgtggatctcttggtttattgagctattcctgcgcccaccctgttttgattattntanctttatggnatgntcggtaactggnagggaaagaacccgtnattgttactttttctcanaatagtcatgnctattatctgncattcttanagttggactgcanaattggttctctaattctcanaaatcattcttgtgntatgtggnaatatcacagaatatggnattaatttgagaactgcta

SEQ ID NO: 40175 - DNA, 341 bp, Homo sapiens
atttctttcattgccggtgagttagaccagaagtctaagcatttgacttttcctgtttacccatggacagagatgaagtgtttcggagataatgcatgctagggtttatgaatctggaaggtaaggtggtaacaaaacttttcgtgctgttggattttgatggtctgatgtctcagttagcaaacattgtattcagtgcatgttacagtgtgtctgagcctgtgctagactttgtgcgtgattacaaagaggccaatgagaaagcatctagcccagtgcctggacatacactagatatttaatcagcatttattccactgggggtataaggtgtccttgtt

SEQ ID NO: 40176 - DNA, 345 bp, Homo sapiens
cctttcttgctcctattgagttgcccagttcctgatgcctggcagattgagtgagtttggtattagtcactgagtcaaatttgacactcatttctcatcttttcctttagaactggaagaaaaacaagaaattttatctttttaaaagaaagcctataaatatgaaaacctgattccagtaaatcatatagctatgcttttgctttgaaagaatctgtcattttgacttgtgaagaattataggttgaattcatttctagaaagtgtgaatgattgaaggtggtcaaaatcttctctaaagtgtttgggggaagtcaacctggctgttcccagcaacagccactt

SEQ ID NO: 40177 - DNA, 346 bp, Homo sapiens
  misc_feature (1)...(346): n = a,t,c or g
ctaacattgacattaacaggccagctcctgactgtcaggactgctttttctttctcctcccnnnnnnnnnnnnnnnnnnnnnnnnnnnnnnnnnnnnnnnnnnnnnnnnnnnnnnnnnnnnnnnnnnnnnnnnnnnnnnnnnnnnnnnnnnnnnnnnnnnnnnnnnnnnnnnnnnnnnnnnnnnnnnnnnnnnnnnnnnnnnnnnnnnnnnnnnnnnnnnnnnnnnnnnnnnnnnnnnnnnnnnnnnnnnnnnnnnnnnattgagtcgacgcggccgcgaattccnnnnnnnnnnnnnnnnnnnnnnnnnnnnnnnnnnnnnnnnnnnnnnnnnnnnnnnnnnnng

SEQ ID NO: 40178 - DNA, 341 bp, Homo sapiens
gaaaaagattcagaaaaagagaaagatttaaaagaagagtttactgaagcattacgagatcttaaaattcagtggatgacaaagctggattctagtgacatttataacgaattgaaagaaacatatcctaattatcttcctctgtacgttgcacgacttcatcaattggatgctgaaaaggaacgaatgaaaagacttaatgaaattgttgatgcggcaaatgctgttatttctcatatagatcaaacagccctagcagtttatattgcaatgaagactgatcccaggcctgatgcagctactataaaaaatgacatggacaaacaaaaatccaccctcgg

SEQ ID NO: 40179 - DNA, 333 bp, Homo sapiens
  misc_feature (1)...(333): n = a,t,c or g
ctaaagtttatataaacaaggaaagaaaagaaggaaaagaaagccgaagagctttgatttttgaaaggaaagttttgagtacctgactgaacacccaacttgaactccgttcaacttgcctgaacaatccaacagctgactgctggaacaaggaaaggtaggcacagcaacaggcaggctaatgggatttctgaaacagatacagtaccctgccatgttctttcacctgcaagggggaggggtgtgtgtgtgcgtgtntgtctatcaacnctatcgacntccnactncnanngncctnntncannnnnnanctnnctcctntncncnanactt

SEQ ID NO: 40180 - DNA, 340 bp, Homo sapiens
gagtgaacaagacagacatggcctctgcatgcatcagatgtacatcaagttagaaaacaagcaaataaaatgatacatagataatacgtaagaaattatggaaagtactgtgaaagcagaagcttgcaatagagaatatggacaggggggtttgaatgggaagacctaatttaaatcatatgatcagagaaggtctctctaaggaggtaacatttataatgaatcctgaagaataaaaaggaatctgcaattctaagagaggggtgggggactatttcttccatgtagagtgtctcagcagcagcactactgaccttttggcccaaatgattctttgctg

SEQ ID NO: 40181 - DNA, 430 bp, Homo sapiens
  misc_feature (1)...(430): n = a,t,c or g
ctttgaaggtcncnnnnnnnnnnnnnnnnnnnnnnnnnnnnnnnnnnnnnnnnnnnnnnnnnnnnnnnnnntctcgaggatccgaattccnnnnnnnnnnnnnnnnnnnnnnnnnnnnnnnnnnnnnnnnnnnnnnnnnnnnnnnnnnnnnnnnnnnnnnnnnnnnnnnnnnnnnnnnnnnnnnnnnnnnnnnnnnnnnnnnnnnnnnnnnnnnnnnnnnnnnnnnnnnnnnnnnnnnnnnnnnnnnnnnnnnnnnnnnnnnnnnnnnnnnnnnnnnnnnnnnnnnnnnnnnnnnnnnnnnnnnnnnnnnnnnnnnnnnnnnnnnnnnnnnnnnnnnnnnnnnnnnnnnnnnnnnnnnnnnnncnangntnctggnatcgcacnatacaangaatttngaaagncacacnnggntacctccnctgcagca

SEQ ID NO: 40182 - DNA, 343 bp, Homo sapiens
  misc_feature (1)...(343): n = a,t,c or g
ccatggcatttctgaacttgagataaatagatttaatacttcccttctgcatcttaatcacgagtttagcttttagggaaagtggtcaagcagtattttttatgttgttctcggtacgttttcataatgaaatcttcaacttcccatggcatttctgaacttgagagtctgcttgactgagatattttttgggctttttacaaagctgttaatattatctttaaagtagttcaagcgttttaatgggtttcataatttgagggacgactaagtgtccagggatgttaattctgtggttcttttaaggntaacatattaccattgngatccctttttttaatgg

SEQ ID NO: 40183 - DNA, 345 bp, Homo sapiens
  misc_feature (1)...(345): n = a,t,c or g
atggtacccaaactgcaggtcacggcctgcagtttaaaatctatctcagcagccactatttccaaaaacagaccagccactgcacagcaaggacccaggaaggtccagatgatgtggactggttatgtggccactatttctcctgctaagagttcatggaggaagggtcgacgcggccgcgaattccnnnnnnnnnnnnnnnnnnnnnnnnnnnnnnnnnnnnnnnnnnnnnnnnnnnnnnnnnnnnnnnnnnnnnnnnnnnnnnnnnnnnnnnnnnnnnnnnnnnnnnnnnnnnnnnnnnnnnnnnnnnnnnnnnnnnnnnnnnnnnnnnnnnnnnnnnnnnnn

SEQ ID NO: 40184 - DNA, 335 bp, Homo sapiens
ctagcttcgtcgctggcatgcccctcctggttcctccttccttgatgtgggttcctgcccatggccctaaatctctcttccctctgccagtaagcagcaggatggttgttggccctaggatgccttccagggtggctggctcctcctcggagagcattggctggtgggttattggcctgatttctagctcttggtggtaactctccatccacagggcctctgtggttggtatgggaattcctgggcctggcatccagatgaggtcttctctcctccatgtctgagtcacctgaattccttcacgttactttctgttatctggaaagtcgacgcgg

SEQ ID NO: 40185 - DNA, 328 bp, Homo sapiens
ccagaacttaatgtataataaaaaaaataaactctttagtacactgagattccacatcggacttgatatgaaatagggttccttgattttcaaagagtcaaaaccaccatgctggattccctcaaagtcctcttcacgttctaatattcagaggaagcaaattctaagtacacctggattacctgctcatccttgttcaaccgcactccacgcagactacaactcccataagaagggagggccattcccatcgaaagtaaggtttcatctaccatgggcaggtggtagctgtccacgccgggtgtcactcatccaagtccccacctcc

SEQ ID NO: 40186 - DNA, 336 bp, Homo sapiens
  misc_feature (1)...(336): n = a,t,c or g
gtgtaaaggcatctcacagccttttaaaaatcagattacatttcttctgacaattctattttatttttacttttgtttctgcttgaagttgctgtgcattattttgactttacaaattcaatagggtgactattataataccaaagaatccaatatttcacatatataatattatatgtatatagatttctttcataattggcaaggtatagttggtatgataaaaatatttaggtgttaaaaattttatatctctaataactattgcnagannancctgatcntgatattcttatattacaagtaatctangattanaacttctttttttataac

SEQ ID NO: 40187 - DNA, 331 bp, Homo sapiens
  misc_feature (1)...(331): n = a,t,c or g
cagagcctaagagtgtgtatttcttacaagctgccaggagattctcttgttgctgattcgtgggccacacttaaagtagtgaggatccagtacatgaggtcagagttcagccagagtttaaactcaaatctcccactcctaggcatgtaaaccacgtgctctcacctcagaagtatttcctatatgtgagagttataccagaataaaacttggggagattttgctcaaaacatgacttttattattttggtatggngattnttctgaaatatcnncnagactgnttgngaannacnnnggntttcnnncactaaangtgnnatgcnggaaa

SEQ ID NO: 40188 - DNA, 225 bp, Homo sapiens
cggaattccagcactgccccccagacatgcccattcactgaccccctgagctagttccctttcttcctcttgggttgcttccctaataggatgcacttcatggcttttgcatctcccctcccagccacaagatctttgaatctctgagggttttcttcaaggcattttattcctacttaccacaggaaaaattaacagccattaacaaaattatagaatgggtaa

SEQ ID NO: 40189 - DNA, 336 bp, Homo sapiens
gccttggtgtgtgaatccccatccaaggacacatgattttctatccaagactataaagctgaatatcagagtcttttggaaacttcatataaatacttttctatataaagaaatgcatatatgaataactaaataattggtagatattaaaaaaaatgactgtccctttccttgcagtttctttgtagtgtttctttttgttatcagagtggtaagactttgaagatgaggattaaagtactttaggccttaggacataggttcaaaatgactcttcagggttcacatatggtcaaccccatcttgttacaagagaacatacctgtggcttgccta

SEQ ID NO: 40190 - DNA, 326 bp, Homo sapiens
taactatggggcaccaggcagaagctcttatagaattgctcaggtgggttatacattcaacctaggccatacaagatttcctcagataaagccccgttgaagctgaactcacattttggtatcacagaatacatgaggaagacactttctgagtgagaagcagtagactaggaaaccctaggattagttctctaagaatcacacataacagaattattaaatagaaactttacatagtatgattagaggttttaaagcaaaagaacaaaaacatggtcgaagaataaggctattaaaaaagactaggtgggaacttcctcttctag

SEQ ID NO: 40191 - DNA, 327 bp, Homo sapiens
  misc_feature (1)...(327): n = a,t,c or g
nnnnnnnnnnnnnnnnnnnnnnnnnnnnnnnnnnnnnnnnnnnnnnnnnnnnnnnnnnnnnnnnnnnnnnnnnnnnnnnnnnnnnnnnnnnnnnnnnnnnnnnnnnnnncctgtaattgaattttcaagtgaaaaacctgactatatcgcctgcctaatctaaggtgtgtcatattgtgaaattttaacaagctctctttcagtgtttaataaaattaaaaccctggacgtcatcacatattaaatattaaggagctggtctggcaaaacagaaatgtgtaaggcagatacctaatcttgagaagcttacagtcaagtgagggatga

SEQ ID NO: 40192 - DNA, 84 bp, Homo sapiens
gttataagtagttcactaagaatgacctcatcacaggttttagctgaaacaatataaaactaaagaggtcaaaaaaaaaaaaaa

SEQ ID NO: 40193 - DNA, 298 bp, Homo sapiens
tgcactttgtattttcaaatgaaagagttgttcctcccccctcctctgattatcaaaatgttttaaattactacgtaagccttcttaatataagaaagtgtaaacctagagctttccgttggcattctggtaaactctgcattcctaccactagatggcagactgtacagaggaacaacaggaccctggcaagaacacagatgcattcaggctcatctgtaaaccacattcttaaatctgagattgtttaggattccattctagtactctaaagtggtgattttcaaacctagatacc

SEQ ID NO: 40194 - DNA, 297 bp, Homo sapiens
cttatcttaatcatatctttaactcttctcttcattgggaaattctattttcatctagttgctgaatacagactacatatacacaggattaacactgccataaaaagctatagtacgttggtaccaactttatcaaaagaggccctccttcctgtcccccccaccccccaaaaaaaaacctttttaagtgatggtacacagcaataacaggatcattatctttttcgttacaaatagaaaaatatgaaggaaaagattttcctgagataagttggcgactgtcaaaaaagacagaaa

SEQ ID NO: 40195 - DNA, 289 bp, Homo sapiens
  misc_feature (1)...(289): n = a,t,c or g
aaaaaaaagtctaggtcaatgaaatattaataaaagaatatcccaacccaggtcaaaccctatattaaaaaactgtaattaagactctaggcctataattttaagcatatgtacatttaagagtcagcattcaaaaaactaggtaattttaagatttttagtgtttaaattattaatttaatttaaattgattaatctggggggaggggggagggntagcnctangccntttcccnaatgttacnngacacgttctggntgcannanncccncangctnntgtnttcat

SEQ ID NO: 40196 - DNA, 296 bp, Homo sapiens
cagatacataagcattgatcagaagtccagcctaaggccttcatgatacagcgtgcacagctgtcagtgacagagcccactgtggtggccaaaacttggcatttttaggcacggtgtcttcatatagtgagaagcagaacattttctatattcatgaaaatagcggatttttttctgacaggcctcacaagcttggacacagaaggggatatatgttgtctccccgtaaaccctgcttcaggagccacaacagggcagctggtgactgggatgtctgcttgaggctcactgttacc

SEQ ID NO: 40197 - DNA, 298 bp, Homo sapiens
ctcaaggaccttctttacctttgaaaacttgtggacattcaatatactccataggttcacagaaaaaatgaataaataaaactcatggacaaagtacaagtgtgccaaaaatgagtactggcattagaactaaaatcgtaaatgacagagtgatgagtgactatctgccaaataatgggaggagacaaatgttggattcagagcaaggacagggaaccattgctaaatccggcaatgcttcatagaaaaatgacgaagtgagcactgaaggactcagacgggaagaatgaggatgggc

SEQ ID NO: 40198 - DNA, 293 bp, Homo sapiens
cttcattttctgtttgtatgtcctgtgtcctcaagaatcttctattctatcacctaaaacacttaatacacttctgaacctttacctttaaacatattgaattgaattggtactgtattatgctacagtattcttaaccttagatcagatgttatgaattaattcaattattggacaaaaattcatttagtgatttttcaaaacctgctggttatttctaagtttgtcgaatcatgccattgctgtaatatcctacagatgtgacacagctatattaataatattaagaaaac

SEQ ID NO: 40199 - DNA, 297 bp, Homo sapiens
cgccgccgccgccgccacctctgagcagccggctgggagcgagagccgacagctagtctgcaagccaccgctgtcgccatggggagccgcgtctcgcgggaagacttcgagtgggtctacaccgaccagtcgcacgccgaccggcgccgggagatcctggcaaagtatccagagataaagtccttgatgaaacctgatcccaatttgatatggattataattatgatggttctcacccagttgggtgcattttacatagtataagacttggactggaaatgggtcatatttggggcc

SEQ ID NO: 40200 - DNA, 294 bp, Homo sapiens
cccgctagggtttcagcgcctggctgcgttgaaggtatcaccttttctacgaacacctgttctgaacagtgaaaatagctattcctaacagaggagttgcaagctccagggatctgtgtgtgcgttggggagagtggagtacatcatttctggaaaacggggcctcaaaacgtagcgccgtttacagatgagaaaagatgcatttagaggcttgaactggaatgggctgtacacaggactgccttgccagacagcggctcagaagtcttcaaaaacgtttgaagatgccccgtt

SEQ ID NO: 40201 - DNA, 295 bp, Homo sapiens
  misc_feature (1)...(295): n = a,t,c or g
tgacactaaaaggagaattcacaaagacaaaaattactaggtcttaaagaaaaaagctgtgagccttatactatcagattttacaacttaaaattaacccctacgagccttctagtttccaatgcagcaagaaagttgcttggaagtcatcactgtgtcttaacaagtaaaaagctgaacaaattgaaaaatcaannnnnnnnnnnnnnnnnnnnnnnnnnnnnnnnnnnnnnnnnnnnnntgctgtccccataattggagggaaaaacaggcaggcacagagaatcacaactta

SEQ ID NO: 40202 - DNA, 294 bp, Homo sapiens
aggcactcaaaatgataattttttttttctgccaaatccttttaaatttcaagttcaaatgattgcttaaggaattagcactgcttcaataaataaatgagataatgtatgtgaatgctttgttcagcgtaaatcactgtagaaatgcaagatagagttatagtagattctctgaaccttaaaagtattatttttaaaaatacggttctgtttgtcttgccttagtcagatgcaattaggtttttcttagaagtggagtaggatggaaacttgaactgcagatttacatgcaaa

SEQ ID NO: 40203 - DNA, 291 bp, Homo sapiens
  misc_feature (1)...(291): n = a,t,c or g
gggtggttccccacacaagatcccaaaatctccaggagcccctgaggttgtaataaaagacaatgggatatttttattatttcaaaatgtctaacagagatagttcgttaactgctttaaggctaattaaaacaccaagtattttggcttcacattagtactctgcatggtgacactggatggcatgngattatgtttgtcatatcataggaaatttgganacnagagtgttanacctgatactgttntnanagctgtaccttaaaanatnacaatatctttactatccat

SEQ ID NO: 40204 - DNA, 343 bp, Homo sapiens
gaacaggagctggcagctgcccaggcagcaccacaccacaaacagctgtcaccctaggggagaggtcagacgaaacaagatgtccctgtaagtactgcagctccttctgcttacgccaaagggagacttctggattggccaaaaccaaggccttctccaagtcctgcaactgggcctcttctaataacctcaacctgaaatggatcaattcatcactattaaatatcttcttaagaaatgataacttgtgctcttcattcatacaggtaaccaaagcaagacaattggctgtataccagcgaaccaaggtgtcatggcttctgaggagagggacacacacact

SEQ ID NO: 40205 - DNA, 344 bp, Homo sapiens
gttgaggaggaagtgaagcagccaaaacacacactgctggctcttgactcagtaaccacaagattaacaattaccatgagccaattcagtgactcaaaacactggaagtgtttggtaagcattaagcaactgataatgaccaatcaagcattctgagaacacatgaggattactgccaaatacaaattttggcccttaatgaaccggatccaatctgactcagcaatataaaaaagaaactttcagtcatttatccagtttatccagtttattttgtgaagtacaaaataatcaggtattcatttcctcctagaattctgatgacataatgtgactaaaatttt

SEQ ID NO: 40206 - DNA, 344 bp, Homo sapiens
gaggcattcaggtttattctttattcacaaagcataattaccatcagccagaaccttcaggaaagttcccttcatgttcctttctagtgaggagtctttacttttaagaaattctaaatggatttatacttcttagttacacttttcctccatttccaagatggtggttactgtgatgggttctaaaaaagtttcatacaaactcttgataatcttaaatattcttacttaatcttcagcagactcagtgattccattttctttaataattcttcatatgttctagtttacacctctcattcctctggaaattccctccttccctttgacattggttaaaagtc

SEQ ID NO: 40207 - DNA, 306 bp, Homo sapiens
  misc_feature (1)...(306): n = a,t,c or g
cgctgcaatgctgccgcccaatgtcatagacactgatttcatcgacgaggaagttcttatgtccttggtgatagaaatgggtttggaccgcatcaaggagctgcccgaactctggctggggcaaaacgagtttgattttatgacggacttcgtgtgcaaacagcagcccagcagagtgagctgttgactcgatcgaaaccccggcgaaagaaatcaaacccccaacttcttcgccagaggttgtgcctncctnnntaggnangntnnnattanntatttntannnnnnannntcantattttttct

SEQ ID NO: 40208 - DNA, 341 bp, Homo sapiens
atcagatcagggcctgtggctctaatatgaaggtatagagagcttctctgaccactgtcgggatcccagttctttaccccatgacttcttcagcagcagacactcaggtccccctacatgttaaaaatatgagcttcctttccaaaaattatttgctgctttgtgagtctcactcctagacaaatccaggcccaggcatttataaaaacaggtcaggcctgaaggtaccatatcagatgctcagaagagttccagaaaagtagggaaaaggtcagaatccccagttggcctctcttctgaaatcattagagaataaaatcctccaaggtttcaagccatag

SEQ ID NO: 40209 - DNA, 328 bp, Homo sapiens
ccttactacaccttaactttctaagctttagaagtctcaactgttactagacagttaatttcaaagaaatacttctacgctgacagttttctccaaaccggtcccttatctcagccctaggaccacactatttctgcatctccacggacacaccacctcctgcttgcttttccttcagagggacgccagtggtccactcgcaagactttaatctctacgctgcttcctttcctaagcaaggaaacaaactatccttgagaatgagcacggggaaggccgagaccattaacaaaagaatgtgaactttttacatcgagagccctttaaa

SEQ ID NO: 40210 - DNA, 309 bp, Homo sapiens
gaaaaatctaaataaacactgtctgcttaaataatattaaaacctagtctgtgagattaagtaacgactaaaatattgggcaactatatcatggaagtcaggagatcataggaaagggtttctaaggagaagggctaaattaccattaatttttgtctttgttaaaagcatgcatggtaaaatcaaggctaacaactactgaaagaatagaaacaaagtgtgccatttccaaaccactagaggaaaagaacaaacaaaatccttgaaaacaattgtgtttaaacaattggaaaggaaaggaggagaggt

SEQ ID NO: 40211 - DNA, 304 bp, Homo sapiens
ctgagactagcgacatctatgctgtaactggttatggggtagcaatgacacacagcacaacggttgatcactatgagctgaggtcatcatgcctcaaggaggatgagagaactgtgatgtcccatctgactggctgcttcgagagctggacatccaggtgccgagagagtcctggagaggtttagtccatggagaaaagataaaacatttaagcttccaaataagcttttcaagttttcgttagcaaaaacggagagattaaaaagaaaaaatctagcactggcaataaggtgaggctcaaggg

SEQ ID NO: 40212 - DNA, 308 bp, Homo sapiens
tgtcttttaagagagcaaatatgaaatgtaaaacagaaaagacttgccatgtcagctcattgctacgttggttgattatctttatagtaaatattctagtattgcctttttactagtttattttaatgtaaataatatcaaaatgaaacagtgttatcaaaggcctttttaatccaggtgactgaagtagcattaaggcatagcatttgacaaaattaaaatatttttttaaagtgctgttctgaagtaaatcaagaaaatagtattaacatatatgatatggattcttaggttatttgcaaagaatg

SEQ ID NO: 40213 - DNA, 303 bp, Homo sapiens
  misc_feature (1)...(303): n = a,t,c or g
gggtggtcataacagaataccannnnnnnnnnnnnnnnnnnnnnnnnnnnnnnnnnnnnnnnnnnnnnnnnnnnnnnnnnnnnnnnnnnnnnnnnnnnnnnnnnnnnnnnnnnnnnnnnnntgtcatgaggagaggatttgtccctagcttgtagaagggcttcttcttcctgtgtcttcacatcatctttcttctgtgatatctgtgtccaagtttcttcttcttgtaaggacattagtcattcaattagggannnnnnnnnnnnnnnnnnnnnnnnnnnnnnnnnnnnnnnnnnnnnngtc

SEQ ID NO: 40214 - DNA, 308 bp, Homo sapiens
  misc_feature (1)...(308): n = a,t,c or g
ctttactgtcttcattctgggaataactattcgaccactggtggagtttcttgatgtcaagaggtccaataagaaacaacaagctgtcagtgaagaaatctattgtcggttgtttgatcatgtgaagactggaattgaagatgtttgtggacattggggtcacaacttttggagagacaagtttaagaagtttgatgataaatatctgcggaagcttttgattcgggaaaaccaaccaaagtcaagtattggatctttatataaaaagcttgaaataaaacatgccattganatggcaganactggga

SEQ ID NO: 40215 - DNA, 304 bp, Homo sapiens
  misc_feature (1)...(304): n = a,t,c or g
ttttggtttgcaattataggtaaatagtgtgtcttcttgttttgttttgtttttttcaatattacttcaaagttggtaaaaattaaatttttgtcagggactatgccagtaaaaattgaaggattgccactgtttgtccaacttgtcgacgcggccgcgaattccnnnnnnnnnnnnnnnnnnnnnnnnnnnnnnnnnnnnnnnnnnnnnnnnnnnnnnnnnnnnnnnnnnnnnnnnnnnnnnnnnnnnnnnnnnnnnnnnnnnnnnnnnnnnnnnnnnnnnnnnnnnnnnnnnnnnnnnnnnn

SEQ ID NO: 40216 - DNA, 309 bp, Homo sapiens
  misc_feature (1)...(309): n = a,t,c or g
gactaatgccacatcgtttgctgtcatgcatctgtatgattattggatattttatgagtttaattctacaataatttgtatctattctttttctaatctnnnnnnnnnnnnnnnnnnnnnnnnnnnnnnnnnnnnnnnnnnnnnnnnnnnnnnnnnnnnnnnnnnnnnnnnnnnnnnnnnnnnnnnnnnnnnccagaggagnnnnnnnnnnnnnnnnnnnnnnnnnnnnnnnnnnnnnnnnnnnnnnnnnnnnnnnnnnnnnnnnnnnnnnnnnnnnnnnnnnnnnnnnnnnnnnnnnnnnnnngagcc

SEQ ID NO: 40217 - DNA, 329 bp, Homo sapiens
gcctagggtactcagtatatccttacaggatttaattatatatggtttttgaaactaaagagaaatgtttttccaaacagttaactttctaagtgggtgtctctgcacctatatactaagtcaaaatttcaggggaccatagatatttagaaacacaaaattgctaattgactatttcagttgatgttatatttatcaactgtacttcctgggtatgtttcctaaagtacattcttacatgcaaaattttttaaatcagtgaaacaaacattatgtcaattcttgcaaacctagacatagtaaaataagaaacaagttccaaatttttg

SEQ ID NO: 40218 - DNA, 314 bp, Homo sapiens
tttcctttttgcttcatgtcacaagtttcaagaacactattttcttcccaagtagctttcaatttggcaacaactgaattctctctccagctgtttttttaaaagtagtcaactcagctgctcattcattcaaaacatgttcactgggcttctactccattccagacactctgctgggcattgtgtatttcttcagactcttgcatacagtatttttataagttagtgtaacgagcacaaagtatgctatggattacagtaccccaatatagctaacttatcaaaacgagagatctgctcctgtatgaacaaga

SEQ ID NO: 40219 - DNA, 189 bp, Homo sapiens
  misc_feature (1)...(189): n = a,t,c or g
gcaatcttgatcaaaatccccataaactttttttgggggaaggaaggggtaattgacaagttgattcttatttcatatggaaatgcacagggannnnnnnnnnnnnnnnnnnnnnnnnnnnnnnnnnnnnnnnnnnnnnnnnnnnnnnnnnnnnnnnnnnnnnnnnnnnnnnnnnnnnnnnnnnnnnnn

SEQ ID NO: 40220 - DNA, 334 bp, Homo sapiens
aaccactatctttttaaccttctcatatgtctgagctttctatagtaagtatttagtatttgtatggttttaaaaaatctttaaaaagcaattacaatctgtttatttttgtaaaggtttaacttatttttcaaacctttgctcaaattcagcctgagtggtctcctctaaaaacacacacaaatgatttcactatcgtttgaacttactgtctcttaccatgcagcattatcataactacattatagggctattttttcacgtgaaatttttacctatcaaactacattataaactcttctatgtcaaagatagcaaacagttaaaatattga

SEQ ID NO: 40221 - DNA, 327 bp, Homo sapiens
  misc_feature (1)...(327): n = a,t,c or g
ttcctgggagagtccatagtttttaccacattgtgtaaagcaatgctgtgcagtagaaatattacgccctacacaatacatatgtacagttttagttgccaaagaaactgaaagaagatcttgatgaacacggatggcatagatgtgaggaaagcaccattattaaagaatatttatgcatttatgtaatgcattacaaggtaacaaaatggataagcaggtaacacaatatgcaaagaccgagagtgaactgcagtcatccactggggaactgaggagtcagggtttctcattacaaaactncctgatggaagactattacttatc

SEQ ID NO: 40222 - DNA, 336 bp, Homo sapiens
ctgagatctcttttcaataacattttctaattgattactgctactatatagcaaagttctctaaaactaatttctaagccggatgaagtcataagaagcatacttggtaaaggatgaaatattctaactcacaacagtcatactaataataaagggaataccaataataaaggaaaatataaaagtcctaagactcatcaaaggacacagacagcttccgggatgggagcacatagggccgttcatcacctctcccctcctgtaagtgtccctgcttctaggcaagacacacaagcatccacgaaaagcaggcgccagtttctgactgttgcattg

SEQ ID NO: 40223 - DNA, 327 bp, Homo sapiens
agaaaatgaaggaatgccatcattgatagcagagtcaaaccaatgcatccaacaactgactagtgaaagatttgatagtccagctgaagaaactgtaaatattccactaaaagaagatgaggatgcaatgcctctgatcgggcctgaaaccttggtttgccatgaagtagatttggatgatttggatgaaaaggataagaccagcattgaggatgtagcagttgaaagctctgagtctaactctcttgtttctattccacctgccctacctcctgtagtccaacataacttttcagtagcttcaccacttactcttagtcaagatga

SEQ ID NO: 40224 - DNA, 333 bp, Homo sapiens
  misc_feature (1)...(333): n = a,t,c or g
nnnnnnnnnnnnnnnnnnnnnnnnnnnnnnnnnnnnnnnnnnnnnnnnnnnnnnnnnnnnnnaaatgtttatagtttacacttgggttcactcttgtgttgtacatattcactatgttaaagaaaattaaatgtccattcctgacaagtttaatttcatcctctctcaggcagttaaatttttccagacccccaccaccatctttttaatctgttgtttggaattacccctctcgttccaaagaaacattcacaatggcagtgagcatgtaaactttcatagtgctttgaatttttaaagtaccacattctgcattagattgctcacttcaag

SEQ ID NO: 40225 - DNA, 329 bp, Homo sapiens
agaacagctgcataatgaaatgcagttaaaagatgaaatggagcagaagtgcagaacctcaaacataaaactagacaagataatgaaagaattggatgaagagggaaatcaaagaagaaatctagaatctacagtgtctcagattgagaaggagaaaatgttgctacagcatagaattaatgagtaccaaagaaaagctgaacaggaaaatgagaagagaagaaatgtagaaaatgaagtttctacattaaaggatcagttggaagacttaaagaaagtcagtcagaattcacagcttgctaatgagaagctgtcccagttacaaaagc

SEQ ID NO: 40226 - DNA, 335 bp, Homo sapiens
  misc_feature (1)...(335): n = a,t,c or g
ccttcacatatctcagcaccctcatctttcaattttcttctatttatctctgaagagtacttactgaaaaagtcccggcttcttagagaaccagtattaatgttgtaggaatttagttttcaggaattgtctctcatgttcagaaataagccaagttctgctccagcctccttattggagtctactccctgaacgcctcttgaggnattgctttatgactgccattgctgctggtaactttggcaagaatgccattctgcccagnactgtctttttctgatgtaattctctgctggtacctgctcttcttctgttccccngcgacgcggncgccg

SEQ ID NO: 40227 - DNA, 330 bp, Homo sapiens
  misc_feature (1)...(330): n = a,t,c or g
aagtaagactttgccagtaacaaatagaacagggagagaacaggagtgtgcttttcatctttgagctgagtctcctcactgaggctctggacttgcctcttcactgcttcactgggtgttggcaggcaccaagacagaagctgctggatttgtagagaagccagcagtgagggaagtatctgaatctgcagtggcttgacaaccatcaagacaaaattcaatttgccctcgaatattcacactcagggaaaacatgcacgcgcacatacacacatcanatgaaagtttgccaaagattcggggcggcaagccagacgtaaactgtgatca

SEQ ID NO: 40228 - DNA, 326 bp, Homo sapiens
  misc_feature (1)...(326): n = a,t,c or g
ggannnnnnnnnnnnnnnnnnnnnnnnnnnnnnnnnnnnnnnnnnnnnnnnnnnnnnnnnnnnnnnnnnnnnnnnnnnnnnnnnnnnnnnnnnnnnnnnnntagaaaataagactaatatttttattaacgtatttttcttttatatttgtgcatgttagagacattagtttttgttataaataaccatgctgtggagtggcatttagtnaattnnnnacttnantttnntagggcttattcnnaagcttnggacttntncgccngagntttgctttatgnctaantnnnnnctacnngnnccctgctttnncttnnttttcttgt

SEQ ID NO: 40229 - DNA, 340 bp, Homo sapiens
  misc_feature (1)...(340): n = a,t,c or g
agaatatcttctatttttgcttaacaaagaatgaaaatagcttatgttgtctttgaagtgttctaatttgttttataagtatattatctcaaccatttctacatacagatatcaaaaatatttctgatacaatttataatccaaaatagatactcagagttacagaaaatcttagccaagaaagcacaatatcctaaacattttgaaagatgttacttcatgctgtgtttttaacagggctggcatagaattttggcaaattgcaatatgaaattaaatatccaggatttatttctacagtgtgctcataatatncatttagataaaaatcttaacctcc

SEQ ID NO: 40230 - DNA, 341 bp, Homo sapiens
gacatcctctcttgtctcaaggatgataccagggaaataattagagaatgatttaagaacaatgaaaagaattttaaaaagccttcatgtggactttctttgattttctattatggaaggtctggaatctccagttcctttattcttctttactcttttccctttcttctttccttccttttctctcttttcatccctaattatcttttctccagagggtccagactatacactctaagaatagttagttctcctcatgttaccctcaggattaatcatgagaaattatgtctgattccctgaaaattccagctgtactaaatgtgagtgaatacaatttc

SEQ ID NO: 40231 - DNA, 335 bp, Homo sapiens
  misc_feature (1)...(335): n = a,t,c or g
nnnnnnnnnnnnnnnnnnnnnnnnnnnnnnnnnnnnnnnnnnnnnnnnnnnnnnnnnnnnnnnnnnnnnnnnnnnnnnnnnnnnnnnnnnnttctctgaaggtaaagcctgagattagattttagcctgtttttctaccaacaaagaatcagatcacaccccatggtggttctgttggaaaagagcaggactgcctgaggtccaactcccactctgtcaagtactagctgtggttttgggtaaaatacttcatctcttttagcctcagtttcctcatctgtaaaaatgacagtgtatcatagcaatgctgctggtgattaatatgtgagaagtgc

SEQ ID NO: 40232 - DNA, 313 bp, Homo sapiens
  misc_feature (1)...(313): n = a,t,c or g
cnnnnnnnnnnnnnnnnnnnnnnnnnnnnnnnnnnnnnnnnnnnnnnnnnnnnnnnnnnnnnnnnnnnnnnnnnnnnnnnnnnnnnnnnnnnnnnnnnnnnnagggnnnnnnnnnnnnnnnnnnnnnnnnnnnnnnnnnnnnnnnnnnnnnnnnnacctgtgcctgtggttccagctatgctggaggttgagacaagaagatcgcctgagcccaggacgttgaggcagtagtgagctgtaattgtggtcgacgcggccgcgaattccnnnnnnnnnnnnnnnnnnnnnnnnnnnnnnnnnnnnnnnnnnnnnn

SEQ ID NO: 40233 - DNA, 326 bp, Homo sapiens
tttgtcactctccattgacttccattactcaaagttacaggcacagaatttcaattgtcttgtacttccaggttgtatgggcacggagccatctctctcacctcagcaggaacagagaaacctgagattagaagatgcgaagagtacagtgccatcatgaggttgtatgattttaggctgtgcctatatacatcatttgttataagtttttaagtaaagtgaaaggcaaagagtcctagaaatagctgtggccaagagaccatgagaagagtaataagaagcatctaatataagtggatataaacttaaagaggaatggaaatcct

SEQ ID NO: 40234 - DNA, 313 bp, Homo sapiens
tttcagtgcactttaatcgaaattccatcatcagaagagttctcgtagcatacaatgtcaggatgggcatgtcgacttggtcctacaaatggaatatccacagatttgcacttcaaacatgtatgaaaaataaaatatataatatttagctttataaatttccccacttagtcactttatctttaaaataaattactactcccgtccaatacagtgagtagcttggagtcactcagacaatctctagccaaatgatctctgttttcttgaggagttctgtagggaaatacttgatgaagacagtccagtgctt

SEQ ID NO: 40235 - DNA, 320 bp, Homo sapiens
gcccgcgaaccaacggttagcggtggcaggggctgactgagtagctggaaccacagatccaagtttctcacctatatcatgttccttttctctggagaacttctaacatttcttataagaagtatagtggccaaagcgaaggagatttatggaaggcaatgattaacccagagaactaacctaggcagtcaagcaaccgatcacctcatcgttttcaagaatcaactacagataataagatggcaacaggagagaaatataagaagctctcggcatgtggccaactgccttggaagggaagaagaaacaaaaacttttgg

SEQ ID NO: 40236 - DNA, 315 bp, Homo sapiens
  misc_feature (1)...(315): n = a,t,c or g
ctttaacattcttaaacttactgggaaatccttacaaaaccctaggggaaacatctcttttttctcatctcacaaaattgcaaatcctgagagtgggaaatatggacaccttcactaagattcaaagaaaagattttgctggacttaccttccttgaggaacttgagattgatgcttcagatctacagagctatgagccaaaaagtttgaagtcaattcagaacgtaagtcatctgatccttcatatgaagcagcatattttactgctggagatttttgtagatgttacaagttccgtggaangtttggaactgc

SEQ ID NO: 40237 - DNA, 318 bp, Homo sapiens
  misc_feature (1)...(318): n = a,t,c or g
atcttacttccagtatgtctctatcagtattttaaattgttccattgtttacctttgtgactttatgattttttttttagagacagggtcttgcaccattgcccannnnnnnnnnnnnnnnnnnnnnnnnnnnnnnnnnnnnnnnnnnnnnnnnnnnnnnnnnnnnnnnnnnnnnnnnnnnnnnnnnnnnnnnnnnnnnnnnnnnnnnnngtattaaatacatttttttttggtagagatgggatctttgcccagcctggtctcaaacgtacttgnnnnnnnnnnnnnnnnnnnnnnnnnnnnnnnnnnnnnngttga

SEQ ID NO: 40238 - DNA, 345 bp, Homo sapiens
cgcggccgcgtcgacctttcttttgattcatcagaatgtctccttttaaaatgaggcccttgatatgatcagggtagtatctgagtaactcctccaaaattggcaaagcctttaattcctttgcagtctgggaatacaggagagccagattaaacaaagcacttcggaagtcggcttgtaactttatggctttcttcatccaaatctctgcttcattgtcctttttgtcatccatggcaagcattcccaaattgaaatacccattagcatctagtggctcttcatttatataacttagaagtcgttttctagcttcaggtctgagtttaacctcacctgattctt

SEQ ID NO: 40239 - DNA, 347 bp, Homo sapiens
tcaaaaagggataagggccgatgacccataaaaacaatcttactggtcaaagagttcgacatagtcaaggggacgtagaaaacaagcatatggaaaatcagcttatattaaggtttcagtccggtctgggtgaattgcagaaatttcaaactgcagagaaaatttatggatgtaatcaaattgagaggacagttaataattgttttttagcttcaccacttcaaagaatttttcctggtgtccaaaccaacatttctaggaaatatgggaatgattttttgcaactttcgttacctacacaagacgagaaaacacatattagggaaaaaccttacataggtaatgag

SEQ ID NO: 40240 - DNA, 342 bp, Homo sapiens
  misc_feature (1)...(342): n = a,t,c or g
attttttattatttcattttannnnnnnnnnnnnnnnnnnnnnnnnnnnnnnnnnnnnnnnnnnnnnnnnnnnnnnnnnnnnnnnnnnnnnnnnnnnnnaataaggctaattaacaaatccaccacttcacatacttattttttgtggtgaaaacatttaaaatttacactcttcattcaaaaatctggaacatagttaaaatgtcatatgtgtcaggatgcagtaatagatttagaaaacattgaatgattccttgcaaatcatgaataatgatcaatcgaggaaaacctatgaaaatgagaaaattttggagcctgaactaaaaatatcttgatcacttt

SEQ ID NO: 40241 - DNA, 325 bp, Homo sapiens
  misc_feature (1)...(325): n = a,t,c or g
tgaatgttgagtggaagaaaccaggaacatgagaatatatcctgcatgtttccatttatgtgaagtacagaatagtggttatctctgagaagttgagccttgactggagaggaaccccagagagcctcttttgggtgctagaaatatccatagcttgagctaggtggctatatgggtataggcagatatccagttcattgacctgtatgtttcagatttggtcacttcattacaagtaggtaattcttcaactaaaaataataaaagatgcttcnnnnnnnnnnnnnnnnnnnnnnnnnnnnnnnnnnnnnnnnnnnnnnctact

SEQ ID NO: 40242 - DNA, 250 bp, Homo sapiens
  misc_feature (1)...(250): n = a,t,c or g
ctggactgtaccttggataaaggtatcatgtctatgtacttgtaaataagtctgggaatgggctgagcactgactgcatctcccacttgaagaatcattgtgcactttaatggttaaaggcccttagaaatcctgcagtagagaagctcttttaaagttattgaatccagcgttttcggttttgttttttttttttnagncncttttnattcnttaanctttttttacaaagnaggtttttttttttttt

SEQ ID NO: 40243 - DNA, 323 bp, Homo sapiens
gctaagtgtagctaatcctagttagttttgagcccccttctctctgccccaaccccctgccccaaaatgcctgtttaaaatgactacagtagattagcatcttattttagtgcagtagttaaaagagctgtctgtggaatcagacagacctaggtgtaattcccaattcagcagtagaactaacttgttaggaacacggggaaagttgcttaatgtctctgagctttaaagcttcattctctatattgttgctaaaaatttgtatcagaaagttcagcttctctacaagttttctcacatttatggaaaaactgagcatcctc

SEQ ID NO: 40244 - DNA, 324 bp, Homo sapiens
cttgatttaaatctttcattgtattgtgatttccttttaggtatattgcgctaagtgaaacttgtcaaataaatcctttttttactggtgaaactcaactttattaaacttaaacagagaagctacttctgcacatgttaaacacacatggaaccaaacagctcgatggagacaccctgcactgcttatggtgatgctgcaggaatggcggcagcgatgcccgctacactccatggcctgctgcacatgtgacaggacagttatttcatctatgcttacacctgcaggtcccttaccctagaaacactctatatcttcttaggg

SEQ ID NO: 40245 - DNA, 321 bp, Homo sapiens
aacacacatctttcttcccataattaagaaggcctaccggttttatgaactattaggaatactttcccagcatccagctgagcaattttgacaggaggaatcctgttttcatgggaactactgaacccactagagggggtgcagcaaagaggaatgcagtaaacaccagagcggtacaacaccaggagggcactacaatggagaagggggtactgcagggcacagccaggcctggcacagccccaaagaccaacctaaactaactcagaaacctgcacccagaaacataaagaaaactcctcctcctcacccactggtggc

SEQ ID NO: 40246 - DNA, 335 bp, Homo sapiens
cacagtccctcctcagcatgaaggacagttaggagaagcttgatctgctcacaactgggtctcagggtctggcaagaaggccccgaggaagcttgatatgcttcgctagtgacaagacactttatttttttgagaatttgagatttatagtttgtatttcattactgtaaacttcaagagctgctataaatcgtctcgttgtagattttgcagcagtgaatactgtcagaaataggaagaattgtggttagggcttagggtgtgtgtgtgtgtgtgtaaagagaattttatactatggtggtatcaattatgttggaattggatctgtagcttct

SEQ ID NO: 40247 - DNA, 328 bp, Homo sapiens
aaactttattcctaatatgaaacaaaatttctagagaaactaaaaactctgcgtctgagggagataaggaaacaaagagggcatggcagcccaccggagtctcaggaggctggggaggacactggaaggactctcagaggatgctggtggcagcaggcagcacttcctggctcatgaaaacgttcaagtccaggttaggatcttccaaatccagtttcataaacttatccactaatgtctggcaattttccatttggttcttctttagcaaatccttgacaggcttgatgggttttccactgcggatcaagtctgagacctccttgcc

SEQ ID NO: 40248 - DNA, 336 bp, Homo sapiens
  misc_feature (1)...(336): n = a,t,c or g
ctttatttttcttcatagcacccagaataacatattttngtttttctatttgttgncttttccttctctacaatgcaaacactgtattgttttgtttgctcactgtccccaggatctaaatcagtgcttacaacatagtaggcccccaatatttgttagctgactcaatgaatgacactacctgtcccaactcccctgaacattatggcagagaggattccttctgctccttagtgaaatgcccctactcatttaactgccattttccctatttttcaccatttggaaccaattctatgaactagaataatctctccagttatcactttatctgtg

SEQ ID NO: 40249 - DNA, 330 bp, Homo sapiens
agcacttacaagcagagagaaggagattccccattagaagaagcttaacaagggtagcagtacttccattaggagtgttttgtttgaagtaacgaattaacactaatgactaaatgtaagcccccataaagttaattcttgttctctggcataatcttattaaaaaggcaaatgaacatggaaatgcagactttatttttagaaggcatattacattttgaaggacaggccaatatattgagggcttggggtcaatttagaaactgcattatttttcagattaccttagtttcaatattaaaaccaatttccagagaaactttaaaaatt

SEQ ID NO: 40250 - DNA, 336 bp, Homo sapiens
  misc_feature (1)...(336): n = a,t,c or g
ctcatttctataatttggcatcattattttgtttcagttacccagttctaaaccaggtctaacagaaatttccatgttctgtatctgtgctgttcattatggtgagattgnnnnnnnnnnnnnnnnnnnnnnnnnnnnnnnnnnnnnnnnnnnnnnnnnnnnnnnnnnnnnnnnnnnnnnnnnnnnnnnnnnnnacatgtggttagtagctactatattggacagcccagttctaaacctttccttctttactccaaatcttcccaacttcaatgtcaggctttaaaagccttcaaaggcttttaaaaatatttttctgattatcttagtttcatt

SEQ ID NO: 40251 - DNA, 337 bp, Homo sapiens
  misc_feature (1)...(337): n = a,t,c or g
atttaattttcccttatgttcgaagtacttagctttatgaataagcgaactctgaatattagaagatactccttatggagccgtagtcattttagtatgctaggttttgaatttcatgaagtttcagattgagatcctttataagtaatgacttgtaccagttagatatccaagtttaattggacctattgtctgcattctgtattaacagtgattgcagtaagtgcagatcaaggtgtccaactgattgagctcatgcaaagttttatgtttagtatttttgggagcnaggaaagactaataaactctaaatgaaatatatacagtatacaaacac

SEQ ID NO: 40252 - DNA, 297 bp, Homo sapiens
ctggcagttaaaatttttggaggctgacaacttccaaggcagaataaaaaatggcaagattgcactgccctatacgttctgtgaatacaaagttacttggggaagcaaatggtacccactgttggcagatcagggccatctgttacttttgttgttctggaactagagtatttccacatgctccacagggcttatacaggccaacaactcaagaagtacaatgtgtagaggtattccctaaaaatttacatttgaaattgcctcgtgcttctcttactagacggtggaatcattgtg

SEQ ID NO: 40253 - DNA, 297 bp, Homo sapiens
ctcagtgtctgtcttggaaagtagtctgtgagttttatttgtgcaatattcggggagtgtaacttgcatagtttctctggtatgtgtcttcagttgagttccatgcagcaggtggtccgagagaaagatgcccgctttgaaacacaagttcgtcttcatgaagatgagcttcttcagttagtaacccaggcagatgtggaaacagagatgcaacaggtgtgttgctaaaactcggtagaatgactgtcattttggttaatatttaatccatcacagccaatttcctacccttacccg

SEQ ID NO: 40254 - DNA, 304 bp, Homo sapiens
attccaaatatgaacagacgtaaagaaaaaataaggacactaacaaaacagtattggctttattcataaatttgttaggatgtccaccaacacacacaatcacaaatagattactaatctttggtaatcttaattttctcaagaattgaagggtgtttagatacagaggacaatgaggggaggtggatttaagataatattaagaatcaaaaactgctatgctagtgttttatatttaaatctaagtcatcttagtaactgaattcatatatctatccagatagtggggaaaacaccattaaaa

SEQ ID NO: 40255 - DNA, 298 bp, Homo sapiens
tggggagggaggtcaacaacaaaaaagaagtaaaattatatacttgtataaagtattctactgaaaattcctgtgcacaaactaatactgaggctggtagtacaggattcactcaactgtgatcctaaatttctgtgattactttgattttctaaataagatgggaaaactgtcagtttagagaacagaactgacttcaacggcaattaagcccagctttttacaaagcaagctttagaagcaatgacttactgcaattagcctggtggccttaagaatttcctgccaaacacaatca

SEQ ID NO: 40256 - DNA, 209 bp, Homo sapiens
gtgaaaattatgttaagttgagtattactgataaaatggagtttaccagtagaaatggaacacatcttagaaaccactcatgtctcatttcacagacagtgttcttctattaccatatttcccatacttgtacttcttaatttgacaaaaatttattcagtaccaacaatgtaccagatatgtgcaggaactagcaaaaaaaaaaaaaa

SEQ ID NO: 40257 - DNA, 337 bp, Homo sapiens
ggaaataataatagtttgtgctttattgggttcttttgagaagtcaatatgatgatgcatattattgctttccaaagtgctagctgcaatcaccactactgccatcatcatcactaccatcaccactactgtcaccatcaccatcatcatcaccatcaccatcactatccccatggctataatcttaatttaagctactgtcatctctcatttgattcaatgtaatagccacataacatttccccacatccattcctgccttcctccaatgcattttccattatgtaacccaagtgatctttaaaaagcacaatctcatgtcactcataggtttaaa

SEQ ID NO: 40258 - DNA, 326 bp, Homo sapiens
  misc_feature (1)...(326): n = a,t,c or g
gttttatgctgggcacagcgttattaatagtacatcactttgctggggattggctacctaaatatttcaagggtgcttctcttaagtggtatgaattgaaaaggtacttacagagtccattatctaccaggactgtcacctttgacattactggttctatttttgatgatgagtatctccatcctagcattactgaaaggaattactcaggctgatttgttctgttgaacagtctgctaccgatggatgcttcctcaggtgtctggaacactgtggcctgtggttcccccacacaagaaaatcttagctttgtnccttttnttttt

SEQ ID NO: 40259 - DNA, 337 bp, Homo sapiens
ttgacttttcctctctatagtataatactatccacactatattaaacatctgactaaatgtgtgccttcttccatgacaacttaagctctacaatatgcatatgttttatattaatggttcataaatagcagtggcagttcataccaaagttttcctcagaatagtgaaaagaggaagattctacagttcatttttcataaagctaaattcattccgtataaaagacttttattctcatattctttcctacatttttggcattaaaaatccttcatatatcagtttttaaaaatgcccatacctggcaaccttatgttggtccccaggatttgaaaa

SEQ ID NO: 40260 - DNA, 330 bp, Homo sapiens
cctttaatacatatatatgagtatgtatatgctcatatatgtgtgtatatatgtgagtatatatatatgtgtgtgtatatatataaattccatttcctttaatacatatatgattatatatatgctcatatatgtgtatgtatatatgtgtgtatatatatgtgtgtgtgtgtatatatatacaaattccatttcctttaatacacacatcacaccaataaaacactcagatgtgcatactgtttccactaccagatgcaaccttgggggacggggcttctgccacacctggccacttcctcacctggcaggatggtgagactgctctag

SEQ ID NO: 40261 - DNA, 330 bp, Homo sapiens
gtggcatcctcactctccaaatgtcaggtaagtgctggtgcttccagagctgcaccttcgaaagctttcctttctctagaaaagttcagattctgcttagttaggagtagaaagtctgcatcagaaataacccttaagggatgcattgtcatggccgagatgaataaattttcaaagcaaaggtagccagtgatgtgtgtggatgtatcaaaggtatgctttgtgaaataaaaaatgaattgattttttaaaatcattctgatctcatatattcttggtttttagttttgtgttcaagatgttactgaaaatttctaagtaacatttttc

SEQ ID NO: 40262 - DNA, 171 bp, Homo sapiens
tttatatttatttcccagatttctctacctttgttggacagtttcttagctcccattctgtatgcccacacctacagcattgtttccctctcactggccatacccctcctgatcagatcttctagttttctttgctgtttcagcataatattgtgcctttttttttttttt

SEQ ID NO: 40263 - DNA, 322 bp, Homo sapiens
ctacattaatctatgtcatgtacaaaatcccacaatagataaaatggacatgaaaacagtttttaaaagttaaagccactagccaagtcttaagagtccttgttgttaagttgccatatcaatatttgttgttatttgttctaaacaaccctctccataccttattatatgggagacaactgtggagtccagagtcctcttctttttatttcccatatggctttgaccaaggtaatatatgtccatgaatcccagtttctcaatctgtaaaacctggatttaaatatcatacagttttgaagatcaaaagtaaatgaaggaa

SEQ ID NO: 40264 - DNA, 327 bp, Homo sapiens
catatttggtggttttaaagatatttctataacttatttgttgtgcttctcctcaagagatagaactgaattctcctctctcaggaccaatggatctatctagtgactagcttctagcaaagagaataaagcagaagcgataatatcccttttaagattagattacaaaaaacgatgacttccttcttgaatgcacttgtgtgcatgctctccccgtcccccaattaattgctctagagaaagccagctatttttcataacactcaggtagcttatgcaaagacccacatgatcaggaagtaagaaggcctgcaacaatcacataag

SEQ ID NO: 40265 - DNA, 321 bp, Homo sapiens
ctgcccttttaagcaagaaagtaatttctaacagtactatatccagctaaaatcgaacagaagacaaattactaattacagtaccaaatacaggaaatttccatttctcaaatcaagtaacaactaaaataagtaaatatcctctaggttccttgacagtattaccatcagagaaattaggccagacccaaactaagggattaaagtctcacagtaaaaaggtacaagagttaacagtcacagtgctgctagttacataatttatgtaccaccattttcctttcttaccagcatttccatcttcctttggatgcctttaaa

SEQ ID NO: 40266 - DNA, 325 bp, Homo sapiens
  misc_feature (1)...(325): n = a,t,c or g
ctcaggtcttgcttataatttgtatcttattgccataaagagtctgttttgacagtcttatgatctttactttaacctaaactccataagggaggaggtaacaaggcacgtccagcctcccttccaatcatgatggagaattcagttcttctggttcccctgaggccagtttttcttggccaagagggggtctgttctgtcagttggggggctcaggattttatttttggtttatgctctgtatgcattaaatatacttcccattcctcctccccccactnnnnnnnnnnnnnnnnnnnnnnnnnnnnnnnnnnnnnnnnnnnnn

SEQ ID NO: 40267 - DNA, 319 bp, Homo sapiens
  misc_feature (1)...(319): n = a,t,c or g
caggttataaacaaaccctcttggttaattttgggttttttttttcctatacataattntntggttcatctgaaattnattttntgtaaaaagngaggtatgaatccagttttatatttccntgctcatttccaaaaaggcagtccactggtcctaaaaccactcacgtaataattnactttccctgctgaaatgaagtncaaaactgngtcctttgagngtaaattatgtgcagggntactgtcaaactgtactggataacatntgaaggatgaataagtgatgtgctgngttctgcncanataggaaataaaaaaaa

SEQ ID NO: 40268 - DNA, 325 bp, Homo sapiens
gcatatctgtgtcgtcacatacctacttcttgaaaatgtaaaagcctactggatcatgcagttagacacccatccacataaatgctaggatatctccctcaaagatggttaacaagaagcctaaataggcgtactgaacaacgctcttaaaaatcaaatttgtaatcaatgccttgcaacaaagttttctcagagctcagttttgtacctattttattatcttaatctagaatttaaaaataataatattacacaattaaaaggaaacatccttctgtcacattggtattcatgcacgtaaaaccttcttgcagatatgggagaa

SEQ ID NO: 40269 - DNA, 325 bp, Homo sapiens
caagaaaataactttccatgattctaaagtgggtgccatactcagccattcctttcataggcctcttggatagtgagcagatggctacctgaaaaatcaatattgccagattataatgtgcagagtatatgtattttattaaagatgtatttcaagtggccattagactataaagtgtagttgtttaaaaatagattttttttattttggagttacattcaacctcaggtgccactttccacattttacaataaaaataatggttgatttacttaacaaatgagaataaataaaacatttttttctttgaaaatttcagccagat

SEQ ID NO: 40270 - DNA, 325 bp, Homo sapiens
cattttgcagggtgctggaaggcatgccaaggaatttggtctttggccaagaacaaggcgtgtgccacagtcacgtagtgacacaggtcacatttgctttctgccagcagaagagactggactccagtgcaggggagtgtgcaaggacaggttctggggggtggaggcatctgtggacatcccagggcaggggtgagggccagaacatccctaggtcctgagactacagtttctccacatttagatcagacattctcttccaaggaaggaaaccaagagaggctggtgaaccgtctggtaatgacaagccctcacttttgcagcc

SEQ ID NO: 40271 - DNA, 325 bp, Homo sapiens
  misc_feature (1)...(325): n = a,t,c or g
atttagagatgtatgtgtattaaaaatatgaaaaatacatggggatgataaaacaggatagtggttgccactgggtgtggggagagggaagagatgcatttgtaagtgtgagtcagagtccttcatatttatgctattggttttctaaagttcataaaaataaaggtctgnnnnnnnnnnnnnnnnnnnnnnnnnnnnnnnnnnnnnnnnnnnnnnnnnnnnnnnnnnnnnnnnnnnnnnnnnnnnnnnnnnnnnnnnnnnnnnnnnnnnnnnnnnnnnnnnnnnnnnnnnnnnnnnnnnnnnnnnnnnnnnnnnnnnnnnnnnn

SEQ ID NO: 40272 - DNA, 325 bp, Homo sapiens
ctggttttacaactttcaaggtgacacaattaggaagtagaaaagcagggctcttggtcttacgtctcctagacttgtgtttgtctgtcgttaccatcaggacatcctggtgctatttgtgaaaaactcaagttgtctacctaagaatgattatgtcttaaaaatgatttaatatgaatggaaaaacatttttcttgtttcactagtaaaattaaaataccaatacttgtttctgaggctggtataaaatttattgcatctattgttgattttgctgaaacatactacatatagaatattacattttattagagaaggttttgag

SEQ ID NO: 40273 - DNA, 325 bp, Homo sapiens
ttcactatgtatatcaaatcatcgtgtggtacaatttaaataaacacagtttttaaaaagttctttttgattcagggttataagaatattctcctataccctacacataagctactcattcacctcagtgccattcaagatgattttgaaataaatccaaaacatcacattatgaaatccacaaatatcttagtatatatttccaaaatcgatgactcctgaaaaataaattcacaatactgttattaagccttaaaaagcaattcattaatatcatcaaagcagcttatctttaaacaggaaagattaggaagtttagacatag

SEQ ID NO: 40274 - DNA, 317 bp, Homo sapiens
cttcctctgactcttgctggtttacttcctgctataatcctctaaatatggacttgacccagagctcagcacacaattaactgctcttgctttacattatatgcctttgctttacattatatgccttagacagcttgttctgttccattccaaatgccactctcaacactcctgcagagcgggaggcatacagtactcaatgcacgtgagtctctttctttcttcacccataaactatgacaatggttttttagtgtctcccaccttccctttacatgtcaaactgagcttcctaaaatactcctttaaatgcatca

SEQ ID NO: 40275 - DNA, 316 bp, Homo sapiens
tttgttcttatcgagtccctgcctttttagcttccttttgtgttaaggttaccagggttaggctcgtctttttatcccccttggaaacagaataggctttctttgttcaatgaaagacactcctagtaaatgttttgggtttgactttcaacaagccacactgtagtacctattttaacctggaattgaagtcacttttctgatgattataaagtagtggtcattctgagcacaaatgtggatggaccaacactatacaagaaggtaagatgaaactgtgttacagagggagttgaaaaggatattgtagctagta

SEQ ID NO: 40276 - DNA, 309 bp, Homo sapiens
  misc_feature (1)...(309): n = a,t,c or g
atcgataccatttttgaaggaacatttgataaaactgagctgtgtgttccctttgacagaagttccatttctagtgcattctacaaaaaatattgacttgtacagagatgttcactgtagcactgattatttcctataaataaggatttggtgaaatagagtactttggcttataagatactttttataaagtattataaaatactttttgtaattgttaaaaaatatggcaggaagagattcccaaacattattaaaaaaaaaaagtcaaagagcagtatgaaagcntacgcataaacatgtacttat

SEQ ID NO: 40277 - DNA, 307 bp, Homo sapiens
tttttgttatcttgagaaaaaaagattagtaaaccaatttttactttgcacaaatatcacccaaatgaaaaggaatgctggcagcccacaggggcactgtgttgtccctgcttctacttaagagcttggaccaagccctgaattccctgctgaagacggctttccaccaggcagaccgggctgagcttccaaaagcacttgttccttagggctaatacttttctcctccaaactgccctttgctcctcctcttgacctgtctcaaagcatctcatgccacaggtgcagtctgatggcttctcccagg

SEQ ID NO: 40278 - DNA, 314 bp, Homo sapiens
cagtttaccagtccctgggctgggcagaggtgacaagcataaaaagagaatctcactcacaaggagcttacattaattatgtgctaagtaacacaaaggtacacttagttgctacagaaacagagaagcataatctcagaagttaatgcaaagcagtctggaggactcctaaaatatctttttaaggatggtttaaggagctaagtaaatattttaaaaatttttttaaaggaggtggacattcaatttcagtcaaagaatctaccaacagcaatggctacaacgtttgcaacaccaaggtaggagagggaggc

SEQ ID NO: 40279 - DNA, 307 bp, Homo sapiens
  misc_feature (1)...(307): n = a,t,c or g
caaattattcgatctgtctggatctctgggtccctaactcttgaagtgacagcacaaaacagttcattagatatagggtcaatgttgttagtattaagcattgttatcctcatttttttttttggcaaaacgaaaacttggaaaatcctggttacnttcaaanatggnggcaaaaanagtcagcantataattcatctanaagtatttttaatactcaaagtcttgattttgagccttttaacattaattctcccagcaatttttntaaaatttctggangtaattaanatattcagaaaaaaaatg

SEQ ID NO: 40280 - DNA, 310 bp, Homo sapiens
  misc_feature (1)...(310): n = a,t,c or g
ggatgacccacatcctggattcatctgttgttttttcacagtgtcatttctgtgttcttctgtctcctctttcttataacctagaaattaggtctggaaacttgattttatttatgttaaaatgtttggccattatattaaannnnnnnnnnnnnnnnnnnnnnnnnnnnnnnnnnnnnnnnnnnnnnnnnnnnnnnnnnnnnnnnnnnnnnnnnnnnnnnnnnnnnnnnnnnnnnnnnnnnnnnnnnnnnnnnnnnnnnnnnnnnnnnnnnnnnactggacttgggaggctgaggtgggaggatcagtt

SEQ ID NO: 40281 - DNA, 310 bp, Homo sapiens
gattggtccatttcatcaaagttgttgaatttatgtgcatagagttatgcataatattccccgtagtgatgtcttctccttcattcttcatattagtgtctgaaaacaataacaatgatttatttctcattctgatggttcttctcctggtctctcttgggcttactctggctgtattggtagattggctacagctggaggatctaaaaatggcctcacccatatgtttggggccttgatggggatgactggagtagctgagacttgtctctccctggattcattgggaaccaaaatgatctgccatgtg

SEQ ID NO: 40282 - DNA, 302 bp, Homo sapiens
  misc_feature (1)...(302): n = a,t,c or g
tttttttttaacatctaaattttacttctataaattacacaaatacattgtacattcttaaataatgaatgcttacaatattgatntgtaagcctttccatntanaangacttaacacangaangnnaatgaannnnnantnctgntatanaatggnancactcttgatnttctcttttgtggctgatggtttatctnccnggttnccanagactaccgtnccagtcctttngctttggctatgaaatctgtttganctgaatgaggcaacactggttattaaggcttatttctatgatgga

SEQ ID NO: 40283 - DNA, 311 bp, Homo sapiens
  misc_feature (1)...(311): n = a,t,c or g
tttttattttgcaaaagaattaaaagtttactggaaaccacatacctttcttcctttacgacaacctgtcattcatcacagctaaaacatccacccattaaatgatatttttacaagattaaagaatggttttaaaaagaaagaaatctccttagttaaaaatgaaccaaacaaaggtacctaatcactgatcagcatcaaagttttgttccacacatgaaaataattcatcnnnnnnnnnnnnnnnnnnnnnnnnnnnnnnnnnnnnnnnnnnnnnnnnnnnnnnnnnnnnnnnnnnnnnnnnnnnnnnn

SEQ ID NO: 40284 - DNA, 311 bp, Homo sapiens
ctaaatgtcaaatgcatatctataagttagctttttaaacttctaatggattttattaaaaatcccaaaatttctggcaataaaaaattctttttcatccatcatctcccaactgaattaaaaaacacagtatatctgaaattagtattatactaaaagtactataaaagctaaaactcaagtatttttggaggggaaaaaagaatgtggaaaattccaatgtggggaataggaatcctttgttcaatatttactgagaatctactatgtaccagatgaagaagacaaagctcttgccctcaggttttccc

SEQ ID NO: 40285 - DNA, 311 bp, Homo sapiens
taaatacctgttatggcggctgggaggttaaaggtacaccgtttaaaattagataatagctccttaccagagcaattacttaagaagggattgaaagttaaaaataaatcagtgaaagcagcctatagtactgactgaacatatgctgcctttacagctctcaaccaccctgaacaacgaaggggaataagccaaagatctatctagaggtgctaggaaaggtgtgggaaaaacaagtatgtgaccacaggtggcacctggcaccaaaaatgaaactgttttaatgcctggttcaagaacactaattttct

SEQ ID NO: 40286 - DNA, 306 bp, Homo sapiens
gagtgatgaaataggttttcattatcatatcgccttagaaacatttcagttttactatgtagagacggttttttccccctcttataaaactgaggtttaacatgtgattcaaatttccccatctggggtacagaagaaagctgggtccaccgaattcttaaaatgctgcaatcttgcttgcttctcgaacgccactcaaatatgcccctgtaacagtttgtgggaaatgcctgtttgttgcctcaccagcgaaaaagacggttccttgaatgtcttcagcaatgatatcgtaggcctccccacttc

SEQ ID NO: 40287 - DNA, 314 bp, Homo sapiens
  misc_feature (1)...(314): n = a,t,c or g
gaggaatcaagggaagggaaactagaaggaatattcagagaaaaaaaatccctgaaagcttgatattcttctggaagccaaatgaagaaaggatttcaaaaaaagaagagatcaactgtcaaatgctgctaataggtcagttaagaaagaactataatatactttgtatgtaagaagtagtttttggcannnnnnnnnnnnnnnnnnnnnnnnnnnnnnnnnnnnnnnnnnnnnnnnnnnnnnnnnnnnnnnnnnnnnnnnnnnnnnnnnnnnnnnnnnnnnnnnnnnnnnttgtctccacaaaaaaataagaa

SEQ ID NO: 40288 - DNA, 323 bp, Homo sapiens
ttccgggggtaaaggttgaagactttggctgcattggtgctggtcacagccacaaactggttctcatccatcttcccagtgaccacagccttgtcccagatgacggacatccgctcctcagtgccattggtgccctccggaatcagggtgaagttgtcctttcctacagccttctgggcagtgttaaacgtgcaatgggcactgcccgtgacctggaggtctccacaggacagcaaggagttgagaaagtctggagtggttggatcagggctcaagggtggggaggtgacaaaggcagcagccttggcccagttcttgctcca

SEQ ID NO: 40289 - DNA, 328 bp, Homo sapiens
ggctttctcatcagatggcagaaattataatttattaacctaaacaaccttacagtgttttcgctttgaattgtatgaattcttagaactgagaagctaaacaacagtgataacaattttacattatcttttctttctccttttgtttctctaaaggtctcccaggccttcccagtcaaaattttcgttatttttagtcatgtcaccatgatgtgagatttctgagctctgttagatacatttagaaatgtccctatttatcaaatggtgttttgtaccccataagttatcccttatgccctgtgacttctgtgaaatctttgttttt

SEQ ID NO: 40290 - DNA, 328 bp, Homo sapiens
gcggatggtgaaaaacaagcagctactcatgtaagtcttgatcaagaatatgattctgaatcctctcagcagtggcgagaacttgaggaacaagttgtttctgtggttaacaaaggagtaattccatccaattttcatcccacacaatactgtttgaacagttactcagataattcaagatttccacttgcagttgtagaagaaccaattacagtggaagtggcttttagaaaccctttgaaagttctacttttgttgactgatttgtcattgctttggaagtttcatcctaaagatttcagtggaaaggataatgaagaagttaaac

SEQ ID NO: 40291 - DNA, 321 bp, Homo sapiens
ctggaactggggagagggaaggagagggaaggagaggaagctaacattcctacctcagaatgctgaatgtaccccatttttcacataagggagctgtggctttcggagcccatatcccgctgagcactgtggctgtgctaatgagaaactcagcgcccttgggccaggtttcccctgctgtgcgagttctgtcccacacctggagggatgggagaataaccagtcagtgtggatcaagggcatttagcgcaatttgtgggtctgttactgttgctacaaagcactgaggctgctttttcctgtcacgcagctaccacttat

SEQ ID NO: 40292 - DNA, 320 bp, Homo sapiens
catgtcactacagtgaacagtacaaattgtaagaagacaccacctgaagattgtgagggtccttttagacctgcagaaatcctgaaagaaggaagtgttctagatattctgaaaagccctggtaagataattaaaagataagccttttgattacaaactcatgatctcaatttaatgtcattttgtattatactttaggcttttaaaaatttctgactagtttggtaggagatttacttttgaatagagatgtagttaggtgtaattcttttgctggaaatatcttacaagccaaaggactctatactaaaatgaaattt

SEQ ID NO: 40293 - DNA, 319 bp, Homo sapiens
cccctttcttcacaaacatcgacaatattcttttagtatgtgaaatgtgatcacccgtctccgaaaacgaccagtggcaggtctagggtcttgggagctgtatgaatagctctgaactccggttgagaaatcaaattgactcatttcctcactcagggtactgtctgccaaatatgacagggaagacatataggaaggaccatctgaatccccatttgctgcttctctggcttctttcctaatttcaatgtactttttctttctttccataggaacctcaacttctacaggaaaattatagcggcgcttcaggtcgatc

SEQ ID NO: 40294 - DNA, 318 bp, Homo sapiens
gtgcgcctttgttggaatctgatctcactgggtttgtggagctgcttttcaaaggtgagagtgtgcaacattccttgcccctcttcttccccatagcagtgtgacttggaggtccctccagggcgcacgcctcccccttaaccacaggtgacctgcgtttcggcttctaggtcatctcctgcgttatttattgttgtgtttttgcagtgaaggctgcaccagacgcatctgtacctgccctgtgcggtctgtctgtggcacgggttctgaggattccgagtctgaaggtggtggtgttgaagctgcatgggatggttg

SEQ ID NO: 40295 - DNA, 324 bp, Homo sapiens
ccaaaacctaacagttttggtacataaactgaaatgaagacagaagaactgactatgctgtcccctaggggacatagcaccccctctgcccagtgttccctgcaaggagagctcaaagttctcacagtttaatgtcagagaggggtggaatgtgaaggaagaggggttcccttcccttcaggcacctgtacagctgagcttagattccatggtcccaaaatctgctcaggttaagcctactgtgggcagcagattcctttagagaccatgaacctgtttacttacactccttgagagtggctcagaaggaaagatgctgggtat

SEQ ID NO: 40296 - DNA, 323 bp, Homo sapiens
  misc_feature (1)...(323): n = a,t,c or g
gtttcacttggtcttggggtgctctgtgtggtttgtatcttgtaataagagaagattaatatcttaactaacagctacgtcaaccactctgttgctctttgatataaagcatgagtgactggctgtcttatgttttcacttcttagaccgaagttagattaaatctatcacatagatgattcaagctgatgcttgcagatctggtaagaacgacccatgggaaaggctaggacggaaacagacaagttgcggaagaaagccaattgaccaaatnacatatagcanaatgntcaacctcatattantcagggaagtatactatg

SEQ ID NO: 40297 - DNA, 319 bp, Homo sapiens
  misc_feature (1)...(319): n = a,t,c or g
aaagatcctgtgacaaaagaacttgaataaagatccatgtaaccaatcaggagaacagaggagaaaagaagattaaaaataaaacaaacaggacctcagtaacctataggataatatcaaatagtctaacactcatgtacttggggtccgagaaggaaagaccaatagaatggggtagaagatgcatttaaaaatatggttnnnnnnnnnnnnnnnnnnnnnnnnnnnnnnnnnnnnnnnnnnnnnnnnnnnnnnnnnnnnnnnnnnnnnnnnnnnnnnnnnnnnnnnnnnnnnnnnnnnnnnnnnnnnnnnnnnnnnn

SEQ ID NO: 40298 - DNA, 324 bp, Homo sapiens
  misc_feature (1)...(324): n = a,t,c or g
attattttattttaacaatgaaattaaacattatatagaagcattaaatcttctaatatattttaatgatttagagaataagaaaatatctcatgattaacactggaaaaataatgataactggctaattatcatccaaaaatttgttttcattattactttggttattctgcagagcttaagcaaactgtattaacttaaaaaanaaanangaaaatatttgnaaaatntatgatctanctgnncncctntcaaattttactancnggaaacnttttaaaatataactcagtaaaangatatgctanctactttaatncaacc

SEQ ID NO: 40299 - DNA, 322 bp, Homo sapiens
ctcagagctataaagtggagtgacatggaagacagacacggaggctgccacggccactatgtacatggtatttgtatctatggaaacggagacttaaagtggctggttaattcaccaagcctgtttgctaacaagtttgagcttaatacctacccccttactgtggaatgcctagaactgaggcatcgcgaaagaaccctcaatcagagtgaaactgcgatacaacccagctggtatttttgagctattcatgagctactcatgactgaagggaaactgcagctgggaagaggagcctgtttttgtgagagacttttgcctt

SEQ ID NO: 40300 - DNA, 316 bp, Homo sapiens
cctcgactatttttctaagactgtaatagtaaaaagatatttttttagtttctcagttactcattatttaatgttctggttttactctccagcccctcttcctattttctcttgtatttccttgctatggactttcttttgatattacgcagcaatgtaacctgactacccatgctaaattacttcaattactctccaaggtttttattagatataggaaaagtcagcttttcactttctgcatatttatggggctacactgatttttcagaaccagcaagagagaaaggggaaaaagggaagagttgaatagaat

SEQ ID NO: 40301 - DNA, 323 bp, Homo sapiens
aaaacatttcctaatcacatattttctttgtctaaagagagttatagatgcagtaagtagcctgtgttcctagtccttcccacattttcagaagcccatgtcatttaatgtgaagcttgctttgcttctttgagctaccaccacttacactttattttggagcctgtatttaaatcctagattaaccagcatgtagaagaaaactgtggtaactcctctaaccttgctctctaaacatatgatgtcctgaccaggggatcactaaggatccttctaagcagcccctgggacccagagccagacctcaaggagcagctaaggct

SEQ ID NO: 40302 - DNA, 319 bp, Homo sapiens
  misc_feature (1)...(319): n = a,t,c or g
nnnnnnnnnnnnnnnnnnnnnnnnnnnnnnnnnnnnnnnnnnnnnnnnnnnnnnnnnnnnnnnnnnnnnnnnnnnnnnnnnnnncatttgagcttttctctgtaattgtggaatgagactttgtccctggtagatggtgaggtttttaagttcagagacaagttcttagtcatcacgtatccttggaaccctgcctggggcccagcctgctgtcagtattaatgtttatgggacagaattcagtagaatccaacatcagtgttaggtagaagagagttgtgggatttcttttattggctagcctcctacccaataaaag

SEQ ID NO: 40303 - DNA, 266 bp, Homo sapiens
tttattaagacactttatgttttaattcacacaaataccctgcaaggtaggtattctcattctttaggtaagataattaaagttgagagagtttaaactatttgctttagatcattcagcaaataaattgcaaactggatgtttaacattcagggtctttctgactccaaaacacagactctgaaaagggacaatttgaatatttccagattttttgagagtctgatcttacttatttgttattcaatttaatttttttttttttt

SEQ ID NO: 40304 - DNA, 327 bp, Homo sapiens
cacacctgcatgagttggtcacctggcactctattctcaggaagttcccaaatcaccactgacagcattgcccagggtcacgaaggcagaggggctctcccacaatttggtagtcagcagtttgttacaggggtgaggtgagaagggatgcacccctatccaccctttctgtaagactccaggctccccaggggccagtctctgccagattcttgctgttttccttttctctgccccagcttcttcctgtgggctccctggcagaccttggctctctttcctcctctctttctccattttaatttctaatatataaaaggtgataaa

SEQ ID NO: 40305 - DNA, 333 bp, Homo sapiens
  misc_feature (1)...(333): n = a,t,c or g
gcggcagtcgcctgagacttaagggtattgcttggccgcggcctggtattccggcgattcgtttcttgctcggcttcctggagctgtggtccgtgtgggcttccacctcagacagttgcgctggctcaacggggccggaacatggctgcgtccggtctggatcatctcaaaaatggctacagaagaagattttgtcgacctttcagggcacgtgacattaacacagagcaaggccagaatgttctggaaatcttacaagactgttttgaagaaaaaagtcttgccaatgattttagtacnaattctncaaaatcagtgcctaattnaacacgc

SEQ ID NO: 40306 - DNA, 324 bp, Homo sapiens
gccactgcacctggcctccattgggctgtttacagcatggcagctggcttccctccgagagggccaatgagagctccagaggcagggagcaagacagaagttgcagtgttttttgtaacctaatcttggaagtgacaccccaccaccttgaccactttctagaagcaagtcattagtcccagcccccaggcaaggcgagtgtgaaaaccaggaggagggatcaatggaagcatccagcaggctccctaccgtattgtggagtgactcttccctgtagggcctcatataaaatgattctgggcatcagaaggcctgggaacattg

SEQ ID NO: 40307 - DNA, 330 bp, Homo sapiens
gtagtttttgtggggcatgataggcttgaatcatcatagataacaaggaagttggatttccgatggtggttagtggacacaggaatataaggcagattggatttagtccatttcattgtaagtggattgggagcttgaggctgacagtaaagtccttatgatgtaatgcagtgaattggtgatggaaagggtctaggcaaggagaaccagttggtgcagtgtgtctctgatactgtgactacagttagtggcccctttagtggatgagctactcaggagagagtggttcccagctggcacatagggatttctgccatggcttaattcagt

SEQ ID NO: 40308 - DNA, 321 bp, Homo sapiens
cattgttctatattaagaattttatataatatatatgtcagttaagtagttttacacaataatttgtttttaatgatgttacatttttatagtcttttgtgcccgagatataaattaaatataatacaataatgtatttagtttggggtagttagcatctcctcataaattttttgggaacaagcattagcatttgcaaaagttgaggaaataaattgttacagtccacttaacactcttcatagaattcatttgatacggactaatagttcggtctttgaatcattttaaggcactttaaaaatgctggccacttaactt

SEQ ID NO: 40309 - DNA, 329 bp, Homo sapiens
  misc_feature (1)...(329): n = a,t,c or g
nnnnnnnnnnnnnnnnnnnnnnnnnnnnnnnnnnnnnnnnnnnnnnnnnnnnnnnnnnnnnnnnnnnnnnnnnnnnnnnnnnnnnnnnnnnnnnnnnnnnnnnnnnnnnnnnnnnnnnnnnnnnnnnnnnnnnnnnnnnnnnnnnnnnnnnnnnnnnnnnnnnnnnnnnnnnnnnnnnnnnnnnnnnnnnnnnnnnnnnnnnnnnnnnnngtctttgaaaaagcctggttccctttcttcctcaaagatttatgtctgagtcttggagccctaaaggaagttctttcccaggtctaacttcagtgtggcatgctctttgnataattagc

SEQ ID NO: 40310 - DNA, 329 bp, Homo sapiens
gagaagtaaggcccatgtcatctcctcaccaaaactggctttacaaaaatgtcagggtgtctatataactgagaagagcagagcaaaggcagaagagggggctgtaggacaaaaagcacttccaagtgcgccagcaccacgctggggatctggtgagggggaagggcgtgcaggcacaggcagaggccgtgctgcaggacacccccagcaccagctggccaggcatgaggcgcccacttatattttatatatttcatacatgttaacacaacagaagcaaggtacccagctgtcatgaaaggtagctagtaactgtagacggccaaaac

SEQ ID NO: 40311 - DNA, 319 bp, Homo sapiens
attgaattaatatctttcccaaattgctatgattgactgttcctacttcccctcccccagaccgtagctatcgttttatttaaaatgtttcattttgagaaaggttgaagtattaaccagcaaagaataacaattccgtaggcaaatcagtttgtttcatgtctaggacgatggttctgcagcgtggttctagaaccagcagcatcagtatcaactgggagtttgttagattattaccccaccccccacccctagacctgctgaatcttttgaaattctggggatgggacccaaccatctgtagtgtaacaggccttcc

SEQ ID NO: 40312 - DNA, 327 bp, Homo sapiens
  misc_feature (1)...(327): n = a,t,c or g
atttcctccacgcagaggagaatcagtatgcagctgttaattttggctgctgactccaggacannnnnnnnnnnnnnnnnnnnnnnnnnnnnnnnnnnnnnnnnnnnnnnnnnnnnnnnnngcaggagaggctgagcgtgggagggagacagacggcatcgattcattaatatattcaaaactatattcaaaaactattcatttaaaaattctggaatatattgactacatactttaaaagacttttttataatggaaactttgaacataggcaaaaatagaataatagaaaagcccagcgtgcgacatcagtgtcaacagaggtcc

SEQ ID NO: 40313 - DNA, 318 bp, Homo sapiens
ctttgctttagtctccaagcagggagagtgagttgttgaacgttttgtagctttcaaatgcaggtctggtcttggtagaggtgtccctcctcccctacctccgttagattgggcagctggttcagatcctaaagtttctaagactgtttttaacaaatagagtaaaggcacttaagcaattttcagttgcaaatatttgctctaatttgtgtttttaaattaactagtttttaattgaaatatatattcctgggggttaaggagtcaactcaaatatttctcctccctaaaccatcctgctgaggcaagctcattacc

SEQ ID NO: 40314 - DNA, 173 bp, Homo sapiens
aatgtgcagtaagcaaaaatataaaatactgcaaagaggaggagaagtacatcattcaatttaaaatacaacattaaaaaataaaaataaaaaataaaatacaacatagcttggttttttctttgttgctattcaaatgttagtttcatgatccataactttttttttttttt

SEQ ID NO: 40315 - DNA, 318 bp, Homo sapiens
gcaacctggttggatttaaggtggaggtcttcctctctccaggtggctgccctcatctctacccccaccccaatcccatgcattctcctgccctcctgctttgggcaagacccgggcgatgtggagttggcatgtccagttgcaggtatcagcaccactgcaccatctcctctgccttcacttcccaccagcacacagaatttatatgcccttcccaagtccaaaaagggcccctgccatgctaaacaaaggtattcatatgcaaggcatgagctctgtctcatggaagggagaggccaagttctctttccaccatca

SEQ ID NO: 40316 - DNA, 318 bp, Homo sapiens
gttctctggaacttttggtcttttccctgtatgggtcatggtgtaagggagattccttgttagaagagaagcagaagctcatcaggccagagcacaggaggatgaacctagcagccccatgtggcaggcactgtgtgccattcctattatgggaccattgggaaggaataaagggctccagagtgggtcttgtgtggtcgggtcaagttggaaagaagggactcatcagtggaagagggatggataattatgtctaaatgcaaagatgttcctctgcctctccattctgttcaaaatccatataaaatgtctttgtaa

SEQ ID NO: 40317 - DNA, 325 bp, Homo sapiens
  misc_feature (1)...(325): n = a,t,c or g
gatcgggtgacttttattcttctttgtgatgttctgtatttttcaaattataaaaaagtggannnnnnnnnnnnnnnnnnnnnnnnnnnnnnnnnnnnnnnnnnnnnnnnnnnggcnnnnnnnnnnnnnnnnnnnnnnnnnnnnnnnnnnnnnnnnnnnnnnnnnnnnnnnnnnnnnnnnnnnnnnnnnnnnnnnnnnnnnnnnnnnnnnnnnnnnnnnnnnnnnnnnnnnnnnnnnnnnnnnnnnnnnnnnnnnnnnnnnnnnnnnnnnnnnnnnnnnnnnnnnnnnnnnnnnnnnnnnnnnnnnnnnnnnnnnnnnnnnnnnn

SEQ ID NO: 40318 - DNA, 317 bp, Homo sapiens
  misc_feature (1)...(317): n = a,t,c or g
nnnnnnnnnnnnnnnnnnnnnnnnnnnnnnnnnnnnnnnnnnnnnnnnnnnnnnnnnnnnnnnnnnnnnnnnnnnnnnnnnnnnncaggctctgttagactggaacattgcataagcattgtgccattctaaggtatcacatttgcaagcatacagtgttcatctgcccttcattggtgatgttaattttgatcagcagtcaagatgtggtccagtttttccaggggataattacaatttgttttctcccttgctactaataagaagtctgtgggaagacactttaaaaccatgtaaatagtctactcattcaagtc

SEQ ID NO: 40319 - DNA, 325 bp, Homo sapiens
  misc_feature (1)...(325): n = a,t,c or g
ttttcattattttgttttctcttcccaagatagcaagcaagtctttctattagcaagttgacaatgtcatgtgactcacagatgaggaagacagaaattattaaattaaaaacaacatcttnnnnnnnnnnnnnnnnnnnnnnnnnnnnnnnnnnnnnnnnnnnnnnnnnnnnnnnnnnnnnnnnnnnnnnnnnnnnnnnnnnnnnnnnnnnnnnnnnnnnnnnnnnnnnnnnnnnnnnnnnnnnnnnnnnnnnnnnnnnnnnnnnnnnnnnnnnnnnnnnnnnnnnnnnnnnnnnnnnnnnnnnnnnnnnnnnnnnnnnnnnnn

SEQ ID NO: 40320 - DNA, 319 bp, Homo sapiens
  misc_feature (1)...(319): n = a,t,c or g
gccnnnnnnnnnnnnnnnnnnnnnnnnnnnnnnnnnnnnnnnnnnnnnnnnnnnnnnnnnnnnnnnnnnnnnnnnnnntaattccaaacaatacaagttttccatgttattaaaacatgagaaagattaaagaaaaccaatgtagaacagaattttcatgtgaacagatttgtgggaaataataaaatgattattattttaagtcactaagttattgggtggtttgttacacagtattagataactgaaagcggcaagaaactccaggtggccttggtggcagtgaacacagactcctgaggtcacagaaagccagggg

SEQ ID NO: 40321 - DNA, 327 bp, Homo sapiens
ctgatatcttacaggtttttaatataagtattttaaattgggctctgctaatagaataaagtggcaaaaataaataacaacagataaataatttgtgaaattatttgctcaaggttaaaagtgcttccattttaaagtcagagaaactttaattcagatattagttaagtagctgtgtgaccatggacaagttatttaatttctctgagccttaaattctcacctgttaataaggcatatctgttctacctcagagggttgttgggaggattagaaataatatgtgtaccatagttggcatatagcagatgcccagtgacgctagct

SEQ ID NO: 40322 - DNA, 320 bp, Homo sapiens
  misc_feature (1)...(320): n = a,t,c or g
nnnnnnnnnnnnnnnnnnnnnnnnnnnnnnnnnnnnnnnnnnnnnnnnnnnnnnnnnnnnnnnnnnnnnnnnnnnnnnnnnnnnnnnnaaccacactcagtgggaatctaggctctttagaataaactattattattattaataataatgataatgatgaagttaatgtttatcaaggtctgtctttgtgccaagttctagtctaagcactttgcaagcaataggtcatttgcttctcaaaacaagcctgtgagatgggtgtaattgttagccccatttaacagatgaggacacaggcttggagaaatagaatgacctgc

SEQ ID NO: 40323 - DNA, 339 bp, Homo sapiens
  misc_feature (1)...(339): n = a,t,c or g
gggagagggagacgggnnnnnnnnnnnnnnnnnnnnnnnnnnnnnnnnnnnnnnnnnnnnagggagaggggtcaaattcttatctatcaatgttatgcccactgtgctctccagctgtggtctgtgaattactgtggtataacgtgactgttcaaatttcacttttcaggggctttgaccacgacctttgaagagcttcattttgagatcaagccccacgatgactgcacagtagagcaaatctatgagattttgaaaatctaccaactcatggaccacagtaacatggactgcttcatctgctgtatcctctcccatggagacaagggcatcatctat

SEQ ID NO: 40324 - DNA, 334 bp, Homo sapiens
tttaaaacaaaaaatgaacaggcgaaaaatctaaatacctccaagtccttcagtttattgaccagaacttcagtcattagcagaaaaacaaaagaaagccctcaagatttcttctaagtctaccattcacttacacaataattcagcaaagaggatgatgagtctctctgagtaagtcttctcatttaaatatccaagtgtgctatccaaaaccaatggccatgtgctagggtcccttaattgcaaaattaagggtacactgttgctttgtatagctttattaaaaaacatgcattcttatgtataagatggtattacgtcacatatttgtaaa

SEQ ID NO: 40325 - DNA, 338 bp, Homo sapiens
  misc_feature (1)...(338): n = a,t,c or g
atttaacataatattgttgagattcatctacgttgttgtatgcattaatagtttgctcctttttattgtggggcaatatctcacagtatgaaaaatctcaatttatctctttagtctattgatagacattggcattgtttccaaagtttggcttttagaaataaagccnnnnnnnnnnnnnnnnnnnnnnnnnnnnnnnnnnnnnnnnnnnnnnnnnnnnnnnnnnnnnnnnnnnnnnnnnnnnnnnnnnnnnnnnnnnnnnnnnnnnnnnnnnnnnnnnnnnnnnnnnnnnnnnnnnnnnnnnnnnnnnnnnnnnnnnnncgtgcctgtagtcccac

SEQ ID NO: 40326 - DNA, 336 bp, Homo sapiens
  misc_feature (1)...(336): n = a,t,c or g
atcccacccccaagattagaactgcctacacctatctttgggctctttctcaactgatacaccaacttctatccatgacctctacaaatttgagcatgtctctctcttccaatagactgtaagctccttaagagtacagacagtcttattcttttcttcatcaacttctgataaatagtaggcatttagctatttattaaagaattacatnnnnnnnnnnnnnnnnnnnnnnnnnnnnnnnnnnnnnnnnnnnnnnnnnnnnnnnnnnnnnnnnnnnnnnnnnnnnnnnnnnnnnnnnnnnnnnnnnnnnnnnnnnnnnnnnnnnnnnnnnnnnnn

SEQ ID NO: 40327 - DNA, 336 bp, Homo sapiens
gtctcttttgacaagacttcagctacctggcttgctctgtccagaattgcaggtctttgtaacagggcagtgtttcaggctaaccaggaaaacctacctattcttaagcgggcagttgcaggagatgcctctgagtcagcactcttaaagtgcatagagctgtgctgtggttccgtgaaggagatgagagaaagatacgccaaaatcgtcgagatacccttcaactccaccaacaagtaccagttgtctattcataagaaccccaacacatcggagccccaacacctgttggtgatgaagggcgccccagaaaggatcctagaccgttgcagctct

SEQ ID NO: 40328 - DNA, 329 bp, Homo sapiens
ggcagaggtggtgaagggctctgccaacagcagatggccctgctggagctccttaaaatgcaggtgcctcgctgggctccggagccacagatctgaatctctgcagggtgagggttgacatccaaattttagaaagttcagcaggtgagcgccctgcagagccagagactgctgcccgctggattcagggctaccaacaggccagagctggagccttgggcagcacaggcaggggggccccagggcaaatgtgagtgttgactgcccaaacctcccctgaggtttacttcctccaaacaaggccccgtcagtcccatggccgcaatatg

SEQ ID NO: 40329 - DNA, 327 bp, Homo sapiens
  misc_feature (1)...(327): n = a,t,c or g
cctattaccagtcattcccattacctcttcctgcctccacagctccagacaactaatctnnnnnnnnnnnnnnnnnnnnnnnnnnnnnnnnnnnnnnnnnnnnnnnnnnnnnnnnnnnnnnnnnnnnnnnatcttctgtgaattttctttaccatttcttctcaagcatgtctgctgctgacagagtctgtttccttttatgaaaatatccttatatttgtttattatacaattcctgaccaattgttcttctatttcagcacattaaagctatgttggtccactctctctggactcaatggtttctgtgaagaaattcattgttat

SEQ ID NO: 40330 - DNA, 328 bp, Homo sapiens
  misc_feature (1)...(328): n = a,t,c or g
nnnnnnnnnnnnnnnnnnnnnnnnnnnnnnnnnnnnnnnnnnnnnnnnnnnnnnnnnnnnnnnnnnnnactttcccattcttaacgcctcccgtttcagacctgtccccttttccccgcatttctgactgtcacggcacatcacaaccagcagacagggcttcccctatttcacaggagaaatagaagccatcagatgggacctccttcaaagtcctgccaccaaacctcagcatgtacctggacccacatgtatcctcttttcctttgggattgaattagagaggtgccgctcgaaacccgctcctggatgggagtcttggctctat

SEQ ID NO: 40331 - DNA, 325 bp, Homo sapiens
cttgactgcattttgataggaaacttcaggccatgttgattaatacattatccataaaattaaaccagcctagaaaaggttaatttttaaataactgtaatgttaatgtaatacttatttttgatgaggacaggctgaagagagcttaataaaatatactagacaaattcagataatatactacttcaaaactgttccatgaataactttccatttttaaattcttctatggaatagtagagtatgaccattagtatgtttttaatttaaaatgcattttggaacatattaacagtaaaattgaaagaacagggatttgaagatt

SEQ ID NO: 40332 - DNA, 333 bp, Homo sapiens
ggaacaggagtcagtccaggggttctttcctctccttcctgactggggtctcagtcagagtcaggaaggaggaattttgtggaggaagaaagggaaaccaagcaaagcacaggcacctgtgggaccctcaggcaaattctgaatggtcatgcttggaccagacaccccctcaaataaaacactgttagttttccatgcatttcctcaacatttactgtctctcagctgcacctccagctcagcctccacaaagcacttccagctttgcacggcagcaggactgtagtcagtggggtgtgtctgacagtgactactgctcatcggagctttctc

SEQ ID NO: 40333 - DNA, 325 bp, Homo sapiens
  misc_feature (1)...(325): n = a,t,c or g
nnnnnnnnnnnnnnnnnnnnnnnnnnnnnnnnnnnnnnnnnnnnnnnnnnnnnnnnnnnnnnnnnnggcttgtttctaatcttagggggttgctgtcagtctttcatcattacgtgtatggtttgttgtaggnnnnnnnnnnnnnnnnnnnnnnnnnnnnnnnnnnnnnnnnnnnnnnnnnnnnnnnnnnnnnnnnnnnnnnnnnnnnnnnnnnnnnnnnnnnnnnnnnnnnnnnnnnnnnnnnnnnnnnnnnnnnnnnnnnnnnnnnnnnnnnnnnnnnnnnnnnnnnnnnnnnnnnnnnnnnnnnnnnnnnnnnnnnnnnnca

SEQ ID NO: 40334 - DNA, 333 bp, Homo sapiens
ctcagaaaatgtcaaggcttattatactttcatttatctgttctatccttgtctcaattaccaatttgagttactccctacccgcaagctgtccacttgattatattaaatttttttgttttcagatgtttgattttgcctgaaatcttccatagaaatatattctcacatctgtgaataagtaggtaataactagaaatagtaaatttgacttgtgaaaggtataggtttatctctatttattacacttacctctgcaaatgaacttctcatggagaaagtgattttagtgtctataagctatgttactttcactgtaaattttgttttgat

SEQ ID NO: 40335 - DNA, 430 bp, Homo sapiens
  misc_feature (1)...(430): n = a,t,c or g
tgaggccctnnnnnnnnnnnnnnnnnnnnnnnnnnnnnnnnnnnnnnnnnnnnnnnnngagatctctcgaggatccgaattgcggccgcgtcgacgagattctaagggctgaactcaaaggaaaacagcaattttttttctcatttctttgaagagtggtgctttattataaaaattcatatggctttagtattctatctgcatttgttttaatataaaaataattttcttcttatcaaaatttaattgtaaaattgtcaccccaggaagacttggtggatagtatttatctggtagcttttcatgtagctcccaccccattgctgctacattaccacatattcctaatttgggatgcatatccttgtgagttgaaaggtaaatcaatatttgaatgtttttttaacattttaaacatgtatttacttac

SEQ ID NO: 40336 - DNA, 311 bp, Homo sapiens
gggtaagtggatatagggaggcatgtgtgcgattggaaatttgtgtgtccccttgagagaaaaaaccctttagggagttagagcgggtccttggtaaaactcctttcaacagagaaacagcctgaaaaatcaggctgcaggcacagagaaggaaaactagcaaagggggttgtcctaaagacattcctcagctgcactgataagggaccgaggcccaacatagaaatgcctttgtcctttgtgtgaccagcgggcttccaggaaatagtcgcttttttgtgggcatgtatatggtgggctctgttagattt

SEQ ID NO: 40337 - DNA, 309 bp, Homo sapiens
caaaaacctgctttagagaaatgatcaattaggaaaaacaatttgaggaaatgagatacagccactcttctagatcaggggttggcagactttttctataaagtgccagcagtaactgttttattcggctttgtgagctggcagtacagtctctgttgttatttaactctgccatttgaacagtacttcaattatgccttcgaattttatctaagtttactgcaaggaaactttttctttttttgaaaaatgtgtctagtatagtatccatgtaaactattccttaaaattatcttggtatcttttctc

SEQ ID NO: 40338 - DNA, 319 bp, Homo sapiens
ttcagatttacagttttcattgctttgcagctttgtgttaatgattgctatcattataatttttcagctgccttaagaggacagtagtagaaagaggagtgggcagagaaacccagattcctgtattgtttcattgtaacaattggacaaggcacttctggatctgttttctcttctgtaaggtgtggggttaggttgattatacatagggatccttacatttcagagattctataatttaacttttagagctgttttatagaataatatagaagtttgaattatactcttaacaaaaaccttttttggtagagatgga

SEQ ID NO: 40339 - DNA, 309 bp, Homo sapiens
gcccccaggagctgttcaccacctcccgggctaatggcgcttgctgcctggcacacagcaggtgactacactgcatggcttataaatgtggcctctgccaggaaatcctgggaaagagccagggaggtgacgttttatccacgagcctgctatggcttagcctagccctcccctaactgtgaccaagctctggatgagacacagacaactactgaggacctgcatagtaaggagactgcagggcggaggcggaacttggaggagtgacctgccgtggagtttctggtttcctccttgtggctttgtctg

SEQ ID NO: 40340 - DNA, 308 bp, Homo sapiens
  misc_feature (1)...(308): n = a,t,c or g
ctttgaaacaattcctccagaataggattgttcaaacaaaggccttattttttttttttaattaaangattaaancnttnaaaanggcgtataacagtttttngggctntnattttnttgnngctttaaatctnagttntataaattttaaatanattttnatttgattngattccnctgaanctaggatnccaaaatnccatngtngctggaagnnttattncaaaatcaaacctgcntggngagctgntttgataatncattttctgncatacttaacatttttattaaagtatgtcnctaatatt

SEQ ID NO: 40341 - DNA, 320 bp, Homo sapiens
  misc_feature (1)...(320): n = a,t,c or g
nnnnnnnnnnnnnnnnnnnnnnnnnnnnnnnnnnnnnnnnnnnnnnnnnnnnnnnnnnnnnnnnnnnnnnnnnnnnnnnnnnnnnnnnnnnnnnnnntagttacaaatatacacaaacatctagcttgcaagataattcttaacatttgttgagaaataattacatgccaggcactattctaagtacattatatatttcgatttataaaacaaaactgtttttttaactcaaattaaagattagaaaatgactgagagggtgagtaacttgcctaagtttactccgctagaaagcagcagagccaggatttaaacctgtg

SEQ ID NO: 40342 - DNA, 320 bp, Homo sapiens
ataggacaaaaaacaaaacaatttttctgagtgtccctttgatatctctgacagtcaagtgataaaagaaaaactaataagagattttgatagtttacaaataatattcttgaattaagataaatttctctaaaagctgaactcccaaggaactttccacatttctttggttatatttaaaattcttcaaaatgaagcacaacttgaaataggcaggttattttggcctaacatcatagttacaaataagtaagtcgaaacagcttaatattaatagtgtttagcctatagtgctttcttcctcctcacattacattctc

SEQ ID NO: 40343 - DNA, 296 bp, Homo sapiens
  misc_feature (1)...(296): n = a,t,c or g
gtttttctgattttttttctgtccttttctagaaaataaaaggttcctaattctccatttctaagaaatactaacttttttcttttctctttctttttttttttttaantggnngggggggtnaanggnaaatcnnaanngnanggatnnncccccggnnaaattnatattncctnnggannaccctncaaattgnantnttaacccggaaattccccccannnannaanatnnanctaattnngtnggnanggggntanaanatnatnntnacggaatcntgggtttnncnggcc

SEQ ID NO: 40344 - DNA, 320 bp, Homo sapiens
  misc_feature (1)...(320): n = a,t,c or g
nnnnnnnnnnnnnnnnnnnnnnnnnnnnnnnnnnnnnnnnnnnnnnnnnnnnnnnnnnnnnnnnnnnnnnnnnnnnnngtgttagttttaaaatcatgttttgttggtgacatttttcttcaataaattttattcaaaagatagcagcagaaaacttaacgtcactgactttaatacctaataaggcattccaactaaataagaaaaccccaaattctttacagtcctcagagttctgaaaatatgcagcatttacatatttctgttttaatgggtgttacaggtaaacgagggaaatttatggatatcttagatgtgac

SEQ ID NO: 40345 - DNA, 313 bp, Homo sapiens
  misc_feature (1)...(313): n = a,t,c or g
nnnnnnnnnnnnnnnnnnnnnnnnnnnnnnnnnnnnnnnnnnnnnnnnnnnnnnnnnnnnnnnnnnnnnnnnnnnnnnnnnnnnnnnnnnnnnnnnnnnnnnnnnnnnnnnnnnnnnnnnnnnnnnnnnnnnnnnnnnnnnnnnnnnnnnccgggagattcaaattaccaagggagtatagccaaaagatggagaccagagacatttttccattcatgtaaacatagagaagatagagacaacacaggaaattgagaaggaacagctagtaaggtaggaaaacctgggacataaaatgtcttgaaagctaagg

SEQ ID NO: 40346 - DNA, 311 bp, Homo sapiens
  misc_feature (1)...(311): n = a,t,c or g
caaacctgtacagcatgtnnnnnnnnnnnnnnnnnnnnnnnnnnnnnnnnnngtctaaacacatttcaacacagacaaagtacaataaaaatacagtgtataaccttatgggacctcatgtggactcatcactgactgaaacattgttatgcggtgtgggactgtatttggctaaactagtaaggtatgctaatcatcccttatatttcctctttgttgcaactagcactattacttctgtttatccttttgtactttgtaggctgtgttttagtcagtcacctttaatcctctctggaaaatgaggagca

SEQ ID NO: 40347 - DNA, 322 bp, Homo sapiens
  misc_feature (1)...(322): n = a,t,c or g
nnnnnnnnnnnnnnnnnnnnnnnnnnnnnnnnnnnnnnnnnnnnnnnnnnnnnnnnnnnnnnnnnnnnnnnnnnnnnnnnnnnnnnnnnnnnnnnnnnnnnnnnnnnnnnnnnnnnnnnnnnnnnnccaggtagatacttaggtaatatagtgttacaataatttaatataattgctaaatgtgacaaatatcacattgtaaagctgatttttttttctcatcagcttacacagcaagcattcaaaaactaattcaagtcagtagaacagttacgcatagaaagaacaaaaagacaagacagtatgtgtatatacttgatgc

SEQ ID NO: 40348 - DNA, 309 bp, Homo sapiens
tttccatcttccttgccaagttttcctaccccttctaccctctccttaaacatcagaaaacaccctctatgaaatcaaatgtactgtacctgggttacttgcaaaaattactaatgcttcagtttttctgttgtatttcatttccagttttcaggcagttatttttattattgtactttaagcttttaagatgaattgttatacaagaggtgcttatgcttagcttgatgaccaggatgttatttttaacaaaatgattgctgaagtgtttcatcctggctggtccttcacttgtgttggatttagaag

SEQ ID NO: 40349 - DNA, 321 bp, Homo sapiens
aggatctcctactaatagagaaatgtataacgatttagctaccagatctgaatactgaagggttggtaggggaccagagaatagaggaagcattgtaggttctagagtggagaagggaccatccaaaatggagtttgaaagagaattctggcctttgtgtttagagtctggaattgtcaagagtctgaaagcacagaataagactgcagctagagcaatttaggcgccatagtttgtcaaaacaggtaaggggaataaaggggatgacaccaagagatgtgcaaagaatctgaagaattcacctgaaaaggatacaacctc

SEQ ID NO: 40350 - DNA, 310 bp, Homo sapiens
  misc_feature (1)...(310): n = a,t,c or g
tttttatttaaattgagagatttaagactcttctttcacctgagcacttaggggccattgtaaggnnnnnnnnnnnnnnnnnnnnnnnnnnnnnnnnnnnnnnnnnnnnnnnnnnnnnnnnnnnnnnnaagttagggaggggagaggctggtcagtggagcagtcagaacacactgattnnnnnnnnnnnnnnnnnnnnnnnnnnnnnnnnnnnnnnnnnnnnnnnnnnnnnnnnnnnnnnnnnnnnnnnnnnnnnnnnnnnnnnnnnnnnnnctttgaaatattgtgggaattatcaaaatgtgacgca

SEQ ID NO: 40351 - DNA, 319 bp, Homo sapiens
gtttctctttgcagttcacagagaatttggggctctcttcatgccttgaaattttggggtccatagtgaatattttgttatttatttgtttggctcattctttatatagtaatggaaacataagtctaggagttagaaatgaattttttagaccttagtaaaaccatttaaccataaaatggacaactgagaattctcccagctgcctgaaagcgtcgccaactgtggttatcctgcaagctgctacctgcaacttggacgttgtttccacgtgctctgctggctacgattcttgcattctgggtttggcttttttctg

SEQ ID NO: 40352 - DNA, 312 bp, Homo sapiens
  misc_feature (1)...(312): n = a,t,c or g
cagaaatgttattttgagaaaagaaaaacagatgataagtttgcttaagtggctttgtttaaaaaggggatgaaaacagttctgtatacttgattttaaaaacagaaaaccattttaacagaaacccacaacaaaactggctataaagatagattccaatataattatggaaattcatttgaagagattgtttctaaaagcagcccatactgtcctcatttgtagcaaacagaagaacaccaatttcaaaagacaagtagaattaatgaaagganaccagatangaaaaattgactgattcttatatttctg

SEQ ID NO: 40353 - DNA, 311 bp, Homo sapiens
cttcctgaaaggtcatcttaattctcataattctctgcagtatatttttcttggccaaactgggagatattgttaacttcagaccttcagatgtttcatcactgagagcaagatccctatttgggccaggaggatcatggacttagagaggtttatagagcatataaacttctgactacctctccaaacagaaactggaatgattctttgaaagctgcacaataaatctttggtttatatggtgattgctttagtgtatcttaggcgtattttcagaatccaggcaattttacttctaaactcccatcgtg

SEQ ID NO: 40354 - DNA, 310 bp, Homo sapiens
tgagagtcataaatggtattaccatatgacctcagggagaaatgacagagtactaggggaagtggaaagaggcagaaaaattagaaacaagcaagaaaaaggtcaacaatgaaggagattaaaaatttttttttatttggaaatgacacacttaaaggtaaattgcaagaagagaatatagtgtgtctgattgacctgttactaacgttttgcacaatttgcatgtcctctttctctctacacgctcaacacacacacagtatttttctgaataatttgaaagtaacttacatatatagtgttcctttac

SEQ ID NO: 40355 - DNA, 306 bp, Homo sapiens
  misc_feature (1)...(306): n = a,t,c or g
ttttgatctgttttggtttttctttcagttcaaaacttcttgcaaaggaannnnnnnnnnnnnnnnnnnnnnnnnnnnnnnnnnnnnnnnnnnnnnnnnnnnnnnnnnnnnnnnnnnnnnnnnnnnnnnnnnnnnnnnnnnnnnnnnnnnnnnnnnnnnnnnnnnnnnnnnnnnnnnnnnnnnnnnnnnnnnnnnnnnnnnnnnnnnnnnnnnnnnnnnnnnnnnnnnnnnnnnnnnnnnnnnnnnnnnnnnnnnnnnnnnnnnnnnnnnnnnnnnnnnnnnnnnnnnnnnnnnnnnnnnnnnnnn

SEQ ID NO: 40356 - DNA, 298 bp, Homo sapiens
atgagaacaacgtgtcaagctacttaagcaaaaatattctggctttccgtgaccagaacattctcttgggtacaacttacaggatcatagcgaatgctctcagcagtgagccagcctgccttgctgaaatcgaggaggacaaggctagaagaatcttagagctttctggatccagttcagaggattcagagaaggtgatcgcgggtctgtaccagagagcattccagcacctctctgaggctgtgcaggcggctgaggaggaggcccagcctccctcctggagctgtgggcctgcagc

SEQ ID NO: 40357 - DNA, 306 bp, Homo sapiens
cgcaatcctttgctttttttgggggggtaagaaacaagtgaaatacaagtgaaatatattaaacgaaataagttgaaaatattgttttacaaaaggagaaaatacatgatttttgcttattataaaaacaacacatgctcattttaaaggaaattgagtaagagaagagaacataaaacaaaatcaaagacctctcaaaatatcctctcttcacacacctgtaacagtttggtggtttttcctgcttagacagaatatatatgtattctctctctctgtctttggctctctctctctacatatata

SEQ ID NO: 40358 - DNA, 304 bp, Homo sapiens
taattcttctttcctagtggacagagtcatatccagggaaaatactctttgaagatgactctgtccactaggaaagaagaattattttgattgtgctgaactgctctgcgtaacaaagtgagaggaacctagacttgtctctttgggaaagggacaagatgaggggcagggaaatggataagatttgaagttttttgagaatgaaaggtggcgtctcctccagaaatgtagtaaaagtgtggctagcacgtgtcactgaaggccctggtgcttctctgatgctcccacgacacatggagcccag

SEQ ID NO: 40359 - DNA, 304 bp, Homo sapiens
tgcgtactctcatctgccctggtacttcgctggggaaaggaacacagcataaaatgccactgaatacgaggcatctcaagcggtaaaggcggcacaggaagcacattctcagtgtgaagtggccacccaaggactgcaggaactcaggcaccaagggctgcaactggccaggtttctgcaggtgaagggacttagggcggctttgaagaaactagagctttgataaggggacttgggtggggaggacacaacacttgggaggtggtgttggcaaaggaggcatccgcattgacgaacagctatg

SEQ ID NO: 40360 - DNA, 304 bp, Homo sapiens
cagaatttcactaggaaacagtgaccccaaaggccagcgaagacagcccaacttggctgtggtcttctttcctaaaacacatcaaaggccaaaatcctggccatgtgagaacacgtgctccatccacatgaaaaagaatgggcggaacaaatcagacagccctcttccaagtgtcgtatcatgtctcaggctaagaggaccccgatgtgggcatctaggggagaattttccaacctgtgtccagtgggaattggaggagggggtagacgtgtagggaaaagcctatttatctatccttcaggta

SEQ ID NO: 40361 - DNA, 303 bp, Homo sapiens
  misc_feature (1)...(303): n = a,t,c or g
gaaaaataactgcaaatgtggcaaaacagtaacaactggtaaatctaggtgaagaatatatactgattgtgctactccttccaattttccaagtaaaaagtcttcggagaaaaatgcaaattcacaatgttgcagtttgcacttctagtttgaaaactatccagaagtgagttccataaccatgggatacacgtaaaatgacgcttagggttgtacaaacttaagcacatgtattgtcaagaaaaacannnnnnnnnnnnnnnnnnnnnnnnnnnnnnnnnnnnnnnnnnnnnnnnnnnnnnn

SEQ ID NO: 40362 - DNA, 295 bp, Homo sapiens
  misc_feature (1)...(295): n = a,t,c or g
nnnnnnnnnnnnnnnnnnnnnnnnnnnnnnnnnnnnnnnnnnnnnnnnnnnnnnnnnnnnnnnnnnnnnnnnnnnnnnnnnnnnnnnnnnnnnnnnnnnnnnnnnnnnnnnnnnnnnnnnnnnnnnnnnnnnnnnnnnnnnnnnnnnnnnnnatgtttatacttctaattaaatcagtcttttcttttaggcagttaatagtatcatatctatcgtttttggtactcgaagaattgcctgggctcaccttgatcgtaagttgacagtgctggactggcagcaaagtgaccgttgg

SEQ ID NO: 40363 - DNA, 294 bp, Homo sapiens
ggaaaatgacctcctatttatttcttctacaggacaccatggtgttcacctttctacaactttacacttgctgaggacatattgtggaaaattaagagaaatatatatggatggccaaggctgtagatggatgtccaagcctttttactggggaatgttttcagaacaaaatgagttacaggttcaagagtgaaacccaacaaatcttggctctttttttctctactaaattccaaatcaaaagtatttatggagtgcttttaatgtgccacgcactgggctagagattcataa

SEQ ID NO: 40364 - DNA, 300 bp, Homo sapiens
cactgactcaatttatcctggaaaggaaatctcctcaaacatgttggcaggtgtacgtgagcaatagtgcaaaatacagtgaacttggtcatccttttggttacttgaaagccagtacagcactgaactgtgtcaacttatttgtgatgccttacaattatccagtccttcttcccctcttagatgacttgtttaaagtgcataaagcaaaaccaacattgaagtggagacagtcatttgaaagttatttgaagacaatgcctccctactatcttgggcccttgaagaaagctgttagga

SEQ ID NO: 40365 - DNA, 294 bp, Homo sapiens
gtcaaaagaaaaagaaaggagtttgtaccgtagcgtggcattctccctcctcccctcatcctgttgtgactgcacctgctgaatgtgaccggcgggcactggaagcagccgcagccacagccttggtgaggagcaaccgcagccctgccagctccctcccagttctcattgagaaaaggggagacggagcaggaggagggggaggagatgctccctgcaaagctgcctccccccacagatccaaagagcctcttggaatgggcactcgactgttctgacgttgtgattctctcg

SEQ ID NO: 40366 - DNA, 293 bp, Homo sapiens
tatttgtctttctttttcacgttaacttcccatcagacttgacaaaatgccaaattagctgttcacttttggtggatgaaggccaggtacagatgtgttatggccagctaggtttgtggtttgtggttcacctctctgctgaaggcctggattgtagccatgttcatctgcaccagccccggggcccaagaagaataacatggttttgttgggtcaaaaagatacccatggagaaaaatccaaaggtagcaatggcagctgccatcccaggtagccccagactcatgctcagg

SEQ ID NO: 40367 - DNA, 295 bp, Homo sapiens
  misc_feature (1)...(295): n = a,t,c or g
agaaaacactggggaattttccacatataagagagcaagtggtaaggctaatttcaaaaactctaaagatgaaaacctaattagaaaataatactgcaatatagaaacatgtnnnnnnnnnnnnnnnnnnnnnnnnnnnnnnnnnnnnnnnnnnnnnnnnnnnnnnnnnnnnnnnnnnnnnnnnnnnnnnnnnnnnnnnnnnnnnnnnnnnnnnnnnnnnnnnnnnnnnnnnnnnnnnnnnnnnnnnnnnnnnnnnnnnnnnnnnnnnnnnnnnnnnnnnnnnnnnnnnnnnnnn

SEQ ID NO: 40368 - DNA, 74 bp, Homo sapiens
gccaccacacccggcctagaaacaagatttctatgtatacttttaaaaataagttgttggtttttttttttttt

SEQ ID NO: 40369 - DNA, 295 bp, Homo sapiens
cttattttaccatgaggaaattgatgcttagagagcataaagccttggccaggggcacatagttgggaagccggggctaattcatgcctgggctctttctgatagttttccttttttaattgtcccctcctcattgttaccttggggatttcaagagattcatgtagcttctaaatcaacgaagtgattcctggagagcagcttctgtatgagaaaaatctagctaattatttatttcagtgtctctggaatgcaagctctgtcctgagccacttagaaaacaatttgggatgac

SEQ ID NO: 40370 - DNA, 329 bp, Homo sapiens
cagacatccatgtttgtaaaactacacatccctaatgtgtgccatagagtttaacacaagtcctgtgaatttcttcactgttgaaaattattttaaacaaaatagaagctgtagtagccctttctgtgtgcaccttaccaactttctgtaaactcaaaacttaacatatttactaagccacaagaaatttgatttctattcaaggtggccaaattatttgtgtaatagaaaactgaaaatctaatattaaaaatatggaacttctaatatatttttatatttagttatagtttcagatatatatcatattggtattcactaatctggga

SEQ ID NO: 40371 - DNA, 329 bp, Homo sapiens
  misc_feature (1)...(329): n = a,t,c or g
attacaaaaaggaaaaagaaaatagagaggaggaaataagaaaatagtttagaaaatttccccaaactcaaaacatgagtttgcaggttgaaaaggtcccctgagtgcttagcatgctggctgaaaatagacctgcaccaaggcctagcatcatgaaatactgagactctgagagaaaatcaaagagtttacaggtttctgcaataataataataataatannnnnnnnnnnnnnnnnnnnnnnnnnnnnnnnnnnnnnnnnnnnnnnnnnnnnncaggcaggcagacaggcagacaggcaggcaaagaaagcaagccatttacagaag

SEQ ID NO: 40372 - DNA, 326 bp, Homo sapiens
  misc_feature (1)...(326): n = a,t,c or g
aaaagtattcctatttctccctgtcctttccagcatctgaggccatcatgcgcctttttaatggttgccattttaactgggatgagatggcctctnnnnnnnnnnnnnnnnnnnnnnnnnnnnnnnnnnnnnnnnnnnnnnnnnnnnnnnnnnnnnnnnnnnnnnnnnnnnnnnnnnnnnnnnnnnnnnnnnnnnnnnnnnnnnnnnnnnnnnnnnnnnnnnnnnnnnnnnnnnnnnnnnnnnnnnnnnnnnnnnnnnnnnnnnnnnnnnnnnnnnnnnnnnnnnnnnnnnnnnnnnnnnactgcagcattgttcacaacagcaaa

SEQ ID NO: 40373 - DNA, 340 bp, Homo sapiens
  misc_feature (1)...(340): n = a,t,c or g
nnnnnnnnnnnnnnnnnnnnnnnnnnnnnnnnnnnnnnnnnnnnnnnnnnnnnnnnnnnnnnnnnnnnnnnnnnnnnnnnnnnnnnnnnnnnnnnnnnnnnnnnnnnnnnnnnnnnnnnnnnnnnnnnnnnnnnnnnnnnnnnnnnnnnnnnnnnnnnnnnnnnnnnnnnnnnnnnnnnnnnnnnnnnnnnnnnnnnnnnnnnnnnnnnnncacaccactacatgccagcttatctcaaaacaaaaaacaaacaaacaaaaaaaaacaggcttcttcacaatattgttttatagcaggttttacttggcataaccatgtcaagtccataggcctgtaggg

SEQ ID NO: 40374 - DNA, 337 bp, Homo sapiens
ctttttaattttttattacatcatttagcagcatttgtacacagtgtgcagatatacagggtaacatcaatagccttcattgcacatacctagtaatcattttgcagatatcaatggttcagaatatcagagataattaacaacttttcttgtgggtccaatttttccaccatgagacctataatacttgttttagatgtagttttgccatgctgtatatttatgttctgattcttttctttttcttaaaagaagtttccttttgtgataattttagattcatatgtagttataagaaataatagtacttctggctgggcatggtggctcacgcctg

SEQ ID NO: 40375 - DNA, 339 bp, Homo sapiens
  misc_feature (1)...(339): n = a,t,c or g
catgaatataaagtggatgaatacaggtgcaataataattctatgtagaattgacatggcagatgggaaacaaggctgctttgccctctgggcttttgaaaaattggaaagtaggccctgtgctctaaagaatgataaaatctggctctggctcataagaagtacttcctaaaaccaggttactcaggaggatgatggaattacctctagccatttgtaaagccacttaccactttttttttttngnacnggtntttngtnagggngnccccnccagngtnccaggcnntgtttaaggnctnggnanncntcagggancaaaccngtaaaccaantaac

SEQ ID NO: 40376 - DNA, 337 bp, Homo sapiens
  misc_feature (1)...(337): n = a,t,c or g
ctaaaggacaaactagagtctggaaagaaaattgtcaaagcatagatctgagaaagaacttttatcaagaatacatacaaaactctcataacaaccaacccagtttttaaaaatcggcaggagatttgaagagacacttcaccagacatatacaaatggtaagtaagcatatgaagatactcagnnnnnnnnnnnnnnnnnnnnnnnnnnnnnnnnnnnnnnnnnnnnnnnnnnnnnnnnnnnnnnnnnnnnnnnnnnnnnnnnnnnnnnnnnnnnnnnnnnnnnnnnnnnnnnnnnnnnnnnnnnnnnnnnnnnnnnnnnnnnnnnnnnnnnaaag

SEQ ID NO: 40377 - DNA, 325 bp, Homo sapiens
cagatatcttagtttagaggaaaaagtattctattttctaggtactttaatagtttggtcttgtgaaaattacataggtgtgtgtttatgtatgtgtatacacacatgtattgggggcttacaataccaaattaataagactgcccctcactccttaaatcgactatctgccctgccagtaatcccccacctgtactggtatatacagagttttctctggtacaaatgattaatcaagaaaaagggtgtgaaatatttgtgttcgtttctttttaaatgaataatgggatacacataaactagtaacaccacattgatttcctaa

SEQ ID NO: 40378 - DNA, 336 bp, Homo sapiens
  misc_feature (1)...(336): n = a,t,c or g
nnnnnnnnnnnnnnnnnnnnnnnnnnnnnnnnnnnnnnnnnnnnnnnnnnnnnnnnnnnnnnnnnnnnnnnnnnnnnnnnnnncttccaattatacttttactttttaaatgcaaaataaatcactgttgattgtagttgccctgttgtgatttatagcctatttttaaatcctatacttaactcaagttcaaatgacaaattactaagttaacaaatattgctaagaatatttattcaaagattattaaataatctgtttttgtattttgagattcagtattaatagaaaatttctaaactatccaatggtcaggtttatcattctggcttcatc

SEQ ID NO: 40379 - DNA, 325 bp, Homo sapiens
actggggtctggggattagacgagagtgctgtgtccatgttaatttcatcgtttggaaggctgtgttgtggttatgtaggagaaagtccttaactggagaacacacactcgagttcagaatgatgggccaggaggttggcaccctcatgtcaaatggcttaggacaaaatactctttgtaccatacttggcaacttttgtctagatcttaaatatttccaaataaaaggttttgaaaatctgcttctttttaggaatagccacaggaatctccttaggcagagacaaataaagccccctgcccatccatgctgactccggccctc

SEQ ID NO: 40380 - DNA, 327 bp, Homo sapiens
tagaaaacaaatttagcaagaattaatcgatactcaaaataataaaaatacttagaattaacttaatcagaggcaaaagacttggataacaaaaaaattcaaaactgctgaaagaaattaaagaagacataaataaatggaaacacatcccacattcatgaactggaagacttaatattgttgacatgtcaacattatccaaagcaacctacagactcaatgcaatccctatcaaaatcccaacaagggatagtaatcttgaaacaagggacaatagacaaaataatcttgaaaaagaataaagctgaagcactcccatttcctgat

SEQ ID NO: 40381 - DNA, 336 bp, Homo sapiens
  misc_feature (1)...(336): n = a,t,c or g
caactttttgtgtaactttcacttgtgtacccttccattattttgaatagtttagaatagaatgtatttcttttctattttagaactacttggaaattattaaactcatagttcaataaaatagtgttttgggctttttttctcttgactgtgtaaagtaaaatgaagaaaaagattgtccttagaagaatccctctctgttatttttgataattatatttctcccagggatagcatatttgaaaattcataactgttggnnnnnnnnnnnnnnnnnnnnnnnnnnnnnnnnnnnnnnnnnnnnnnnnnnnnnnnnnnnnnnnnnnnnnnnnnnnn

SEQ ID NO: 40382 - DNA, 325 bp, Homo sapiens
  misc_feature (1)...(325): n = a,t,c or g
cnnnnnnnnnnnnnnnnnnnnnnnnnnnnnnnnnnnnnnnnnnnnnnnnnnnnnnnnnnnnnnnnnnnnnnnnnnnnnnnnnnnnnnnnnnnnnnnnnnnnnnnnnnnnnnnnnnnnnnnnnnnnnnnnnnnnnnnnnnnnnnnnnnnnnnnnnnnnnnnnnnnnnnnnnnnnnnnnnnnnnnnnnnatagataccaagggatgactgtagcttgtgtttgcaatggaattgaataacctcagcttgcttcctaccactaaaatgttggggctacaaagacctatttttcttttgtattggctctgttacattcagcccaagcag

SEQ ID NO: 40383 - DNA, 313 bp, Homo sapiens
  misc_feature (1)...(313): n = a,t,c or g
nnnnnnnnnnnnnnnnnnnnnnnnnnnnnnnnnnnnnnnnnnnnnnnnnnnnnnnnnnnnnnnnnnnnnnnnnnnnnnnnnnnnnnnnnnnnnnnnnnnnnnnnnnnnnnnnnnnnnnnnnnnnnnnnnnnnnnnnnnnnnnnnnnnnnnnnnnnnnnnnnnnnnnnnnnnnnnnnnnnnnnnnnnnnnnnnnnnnnnnnnnnnnnnnnnnnnnnnnnnnnnnnnnnnnnnnnnnnnnnnnnnnnnnnnnnnnnnnngngggatactntgtctnaaaagtnataatngtcaatttnaaanctaccataatgaa

SEQ ID NO: 40384 - DNA, 326 bp, Homo sapiens
cccaccacagatgccctcggtttactgaggatttttaaatgattttttaatgaggactttgtgtctttgtatgtatgacaatcttcaaaaagtaacatgaaaatctggggccatctggatggcttccttatatcaagtatcacctaagattttcatttcatttgtattccaatcaggttgtccatctgtggcactatattaattgttgccaaataacgagaaactatcacaagcagagttaatacatatatgatgagtttgtacaaatcaaatgcaaaaaaaaatcctacaggaagtgtataaagggtaggttcacagtagtttga

SEQ ID NO: 40385 - DNA, 315 bp, Homo sapiens
ctggcttcctggagagggtgagatttgggaaacaaatggaattaacaaattgtggctgctgatgactgcttccaaaagtttgggaagagttgtgagctttactccagaggaataagacaagaagtcagaggcacatcccaaccccccgctatgaagcaagtgcccagagactggtagcacatttctggccaagtcctctaacatgcccctcaaaacatgtaagtccaaggcggcttcagaggacaggcaacaaaacagacagtgtgtcctgacagctctgctgacaaaggtggcataaaagagcaaatgaatgga

SEQ ID NO: 40386 - DNA, 327 bp, Homo sapiens
ctgtcaggtcatgattggaccgtccttaagcatgcccacatctctcttccagaggacctggaagccttcgtttggtgttaggccacagaataatgaaatctaatttttgagctacaaattatagctcttcattttataaatgagaaagctaagggtcagagaattttttaaatgcacaagttcatccaggtagttattgacagagccagtgcaaaagcccacttctgagattctgagtctctagtctttatgttgatattagagtgtgggccaatagctgttcttccactcactagctgtcttcctcagaggcaaaactgttcttta

SEQ ID NO: 40387 - DNA, 328 bp, Homo sapiens
tgtgcttacaccttaagagaaaggaagagaagactgccaatcattaaatgtcttttgaatgctatgccttgtgatatatatgtatgtttatgaaatctcatttaatctaaccagtcacccattttgtagataaacaaagctgacagagagatttggaaattttcaacacacattcatcaacagtcatggctactgagtatgatggagattaagcctgtgagagcctcatagaagatttcttcttgggactctaatatcccttctggaaacctggcactactaggccctggagctctcagtctggggaaatgcctagaaactgcaagac

SEQ ID NO: 40388 - DNA, 329 bp, Homo sapiens
ctggaatttgcgccaacataatgcagtgtgtgtgctgggggtcgagtggatgaaagtatagatggggcaggatcgaccactggttaatggctgttctaactatttgtatgtatgtttgaaaattttcataactttaaaaaaaatgtacaaatctccaaggacaaaatttcagaggctggaaaatgaacagatggacggtaaatgagtgagccccatctacacaaagtgtggtccaagcatcacctaggagactgctattcacatagaccctcaggctccagctcagatctatgaaaccaatctgcagttttaataaatcctcaggtgaa

SEQ ID NO: 40389 - DNA, 315 bp, Homo sapiens
aaaatatttgaggaaatattaggagatcacataattaaacagaaaactttaatggctaaaatcatgtctcttatatactaaaatattccttaagaagaaaaatccttgccatatgctattcttatagagttatgaaattctgtggaaaacatgggcttctaccaaaatttagcagttctgggggtgtggccaggaaatttgactcctacactgggtgtgttccccctgattaatcactgtcttttttcagcctcagtttccattcttttataaaatgcagaggtaggcttggtcgatgactagagtaccatgctg

SEQ ID NO: 40390 - DNA, 316 bp, Homo sapiens
tagaaaactgcattgggtcttaagatttgcttttttaaatcaggaaataaatgcaactacatctctgattaagaataaacattctctctaaagcccccaaaatccctttattatatgttaaaatcttggaagggtctgaacttcattaagaaaaaaatgtaagaagcaactattagaataaatattattctttatctttctcatctctatactgattgctatcaacatgcagtacttaattttaacattctgatatacagcattataaatgtgcaacccaattacagaaacactgataggaatgaatattacatat

SEQ ID NO: 40391 - DNA, 315 bp, Homo sapiens
ttcatctgttatggtatttgtaagcttctgtaacttgtaaatgtgatatataacttgtaggtacgtcatctgttggataacttgccctctccccttgagattctaagctctctgacagcagggaccatttctgttttttcttgccactgtgtccccagtgcttgatacagagttgggttttaaaaaatagtagttgaatgaatagaacgccttcctagatgactcccaaattcattcttaattgaagtgaaacagtagttgctctgaaaaagtttaagtgcacatttggtgaattatcccaaagtgacatacccg

SEQ ID NO: 40392 - DNA, 311 bp, Homo sapiens
  misc_feature (1)...(311): n = a,t,c or g
gatgcaatgagccaagnnnnnnnnnnnnnnnnnnnnnnnnnnnnnnnnnnnnnnnnnnnnnnnnnnnnnnnnnnnnnnnnnnnnnnnnnnnnnnnnnccccacacattaaagaaatatgtcaatgatgttaaaataatgcatggggggaaaaaagacatgaagggaaatatttaaatgtccactatgtctaaataccctttcctactacaacaaaccaggggttccatgggagactgactgactccagaactaacagggaaagtaccagatgaatctggaaacatcttgttgtgtgagaaagtaaagtatc

SEQ ID NO: 40393 - DNA, 311 bp, Homo sapiens
gaggagtataaagactggagcagcggttctgctcagggagtaattgctgcagcacagcacaggcaggaggggccacggaagagtccaaggcagcagcagtttcttgacagagtacggagccctctgaaaaatgacaaagatggtatgatgtatggcccaccagtggggacttaccatgaccccagtgcccaggaggctgggcgctgcctaatgtctagtgatggtctgcctaacaagggcatggaattaaagcatggctcccagaagttacaagaatcctgttgggatctttctcggcaaacttctccagc

SEQ ID NO: 40394 - DNA, 313 bp, Homo sapiens
  misc_feature (1)...(313): n = a,t,c or g
cnnnnnnnnnnnnnnnnnnnnnnnnnnnnnnnnnnnnnnnnnnnnnnnnnnnnnnnnnnnnnnnnnnnnnnnnnnnnnnnnnnnnnnnnnnnnnnnnnnnnnnnnnnnnnnnnnnnnnnnnnnnnnnnnnnngtgtggatcagcttttatgtcttaggaaactcaaaaaatattttacccataaaaagagtctttcacattattcacatacttgaatcactaaactaaaatacataaaacagagctgtaagattagaaaagaggaaaatattaaggactcaagtaatccaagaattagtctaaaacccattta

SEQ ID NO: 40395 - DNA, 320 bp, Homo sapiens
atgaactaatgcttcttagtttatttgtttctggtgtcctgaatgaccaaagggagctcacgaagtacagctggctagagaagaagggaaagcagcatcagtcgtggagcggtgctgatgatccatgtggtcaaaccatggctttggactctttggttcttgagttaccgagaatccaaggctgtttgaagaatggcaaggaggaaaatctggccatagctgtgttgactcctagaatggttagattccaatggaaaacaacagaaggttaagaccctggttccacaggtatcctgtacaatggctcttcctcttcacag

SEQ ID NO: 40396 - DNA, 330 bp, Homo sapiens
aaaatacaaataaaactattttcattttagaaaaaaatgagtaacaaagacaagttgtttaattaaaatttacctgggctacattttttgtttctatccacataacggcagcttttcaatgaaacataaaacatcacgtactgtcactaaagttaaaaacaactagaatcagagaaagctgttatcccataggaaaaacgagagtcttacttataaagatcttgggttcaatttgtaatagcaaaaacagaaaatatttcagctgacttcccaatttagtgctatgattagaacatcttcatagctatacaaaagaaaaggtgtcttaat

SEQ ID NO: 40397 - DNA, 328 bp, Homo sapiens
tgaagctcagtttgagaaactgatttcgtatctagcttattgattatactcagtttcaattctccctgtgcaaataatacataaagtcattaatgatgatttgatgaactgaaatcatcttcgcttaggatcgtttgacatcataacccaaatataaaaaagttattcaagattcacagagataaaacagtgcctcggaaacataattcacccatgtatatataataattttagaacatactttttaaacataaaatcacagtcaaagacagtgatagcattgcatactcagtgcattatttcatgtagtgccttcctatggctcatt

SEQ ID NO: 40398 - DNA, 322 bp, Homo sapiens
caggcaccgaagatcttacactggaggacagaggaatggaacaggcaccgaagatcttacactggaggacagaggaatggaacaggcaccgaaaatcttacactggaggacagaggaatggaacaggcactgaagatcttacactggaggacagaggaatggaacaggcaatgaagatcttacactggaggacagaggaatggaacaggcactgaagatcttacactggaggacagaggaatggaacaggcactgaagatcttacactggaggacagaggaatggaacaggcactgaagatcttacactggaggacagagga

SEQ ID NO: 40399 - DNA, 331 bp, Homo sapiens
gtctcagcccagcttccttccgtgggggcaccaaatgttccatcccagaccctggaaacctctcccaatgttaagcacccctaaaaatccattcacacgtattcaactcacttttccaaggctctatgtgcccaggatagcattgggcactttacatccatagaggagataagcccagactttagatcaggggcctgcattcaaattccagttctggatacttgttaattgtatgaccaccaattatttaaccttcgtgtgcctcagcttctgcatctgtaaaacggggttaataataaggcttgggctgagaattaagtggtaggcacac

SEQ ID NO: 40400 - DNA, 323 bp, Homo sapiens
  misc_feature (1)...(323): n = a,t,c or g
cccagctactggtaatcatcattctactatctatgtccgtgagttcatttgttttttaagctctcacatatgagtgagaatatgtcacaaatatctttctgtgactggcttatttttcttaacgtaatatccttttgttgaatccatgttgttgtaaacaacaagattttattcctttttatcgctgaataatatttattgtgtatatgtgccatgtaccacattttannnnnnnnnnnnnnnnnnnnnnnnnnnnnnnnnnnnnngtatnnnnnnnnnnnnnnnnnnnnnnnnnnnnnnnnnnnnnnnnnnacatctcaata

SEQ ID NO: 40401 - DNA, 325 bp, Homo sapiens
  misc_feature (1)...(325): n = a,t,c or g
nnnnnnnnnnnnnnnnnnnnnnnnnnnnnnnnnnnnnnnnnnnnnnnnngtgtatgtgttattttataaccaagtgtcagactgttttccataatgattgcactatcttatttttaccaacaatacatagagatctagtttctctgcgttcttatgagcgcttggaattgtcggtatttttaattttagccattctagtaggtgtgtcagggttatataatttgtttagaataatttgcatattttgagcagtgtttcccaactcatcccctcatctcttaacttgcccagtccatcttcagttgcacaacctgaggcagctctt

SEQ ID NO: 40402 - DNA, 336 bp, Homo sapiens
  misc_feature (1)...(336): n = a,t,c or g
gnnnnnnnnnnnnnnnnnnnnnnnnnnnnnnnnnnnnnnnnnnnnnnnnnnnnnnnnnnnnnnnnnnnnnnnnnnnnnnnnnnnnnnnnnnnnnnnnnnnnnnnnnnnnnnnnnnnnnnnnnnnnnnnnnnnnnnnnnnnnnnnnnnnnnnnnnnnnnnnnnnnnnnnnnnnnnnnnnnnnnnnnnnnnnnnnnnnnnnnnnnnnnnnnnnnnnnnnnnnnnnnnnnnnnnnnnnngcatagcttttcaaaccttggaacagagtacactgccgtcctcatttcctgttccacattgattttcaagtgacacttgcttttatcacagcaaccagca

SEQ ID NO: 40403 - DNA, 260 bp, Homo sapiens
ctctcactagcaatgagatgcagtgtgtgtgtgagttacaggaagagctctacagtcagaatgccacggctctgatcccatcgcccaatttaccagctaactgaccatctgggtaaatcatttaacctctcagcctgagtttccttatgtgtaaaggcagtagcagttgtgaggattagaggaatacaggaacagcaattagtacctggtacatggtataaatggtctatagatgtaaggtgctgctttttttttttttt

SEQ ID NO: 40404 - DNA, 313 bp, Homo sapiens
  misc_feature (1)...(313): n = a,t,c or g
gcatcacagaggagactgtaaaaagagaagatggagcaggggcctagcaataataccacagataaagtaaccccccagaaggagaaggacctaccctcatcaaagacatactgagaacaggtctgagatgtggtagattagaactctgtttacttggaggatcaaaaataagagacttcagatatataggagtataggtagtaaccttgggaaagcattgcttctcgggtagatggtcatggcctaaaaggaggaggtaccctttagaggactggtggtgaacgaaaganagacacgagaaatgggaatgaga

SEQ ID NO: 40405 - DNA, 325 bp, Homo sapiens
  misc_feature (1)...(325): n = a,t,c or g
nnnnnnnnnnnnnnnnnnnnnnnnnnnnnnnnnnnnnnnnnnnnnnnnnnnnnnnnnnnnnnnnnnnnnnnnnnnnnnnnnnnnnnnnnnnnnnnnnnnnnnnnnnnnnnnnnnnnnnnnnnnnnnnnnnnnnnnnnnnnnnnnnnnnnnnnnnnnnnnnnnnnnnnnnnnnnnnnnnnnnnnnnnnnnnnnnnnnnnnnnnnnnnnnnnnnnnnnnnnnnnnnnnnnnnnnnnnnnnnnnnnnnnnnnnnnnnnnngcataatttctttaaaaaaaatcaaatacataattattacagtttaataacagtatatctcatattca

SEQ ID NO: 40406 - DNA, 325 bp, Homo sapiens
ctcctgcagaggctctagagacagtgtgatgggcatgagtgcagtcaggcaggctctaccactaaactttgggaagtcctgggcaggttacttacctgtctgagccttggcttctcatccttaaagggatgaagttaagagttacatctatttcatagggtttgagtggagattatatgaaataccaagtgtgaagtctgtttagcccagtgtcagccatgtaatgggttctcaaacaacctagtttcacctactctgcaattaagcagtgtttccataccaccttcacaattttcccatttcctctatcatctttactattact

SEQ ID NO: 40407 - DNA, 336 bp, Homo sapiens
ctagagtgtggtgtccactctgaacactaacatttggaatttatgtacaagatttttggggaggaaaaagtggagcaaaaacagaaagaaacttgctgattatttttacccagggaaatgctagttactaattacaaattaacttttcccaggatataaatactttagcaatatttctgagtggaatatggaactttttgatgaaagtcttagatgtttaataaaagggtaacagtccaaccatctccaaaactggttataggtctctaggagggtttaggaaaaaaaaaaagtaagatacagaattttgtccacctcaatgaagcaaaagtcatt

SEQ ID NO: 40408 - DNA, 335 bp, Homo sapiens
  misc_feature (1)...(335): n = a,t,c or g
gggttgtatgggattgccatgtgtggtgatgtaacaagatacttttaaaggtttgtcagaaaagagccactttcagactgcactgacaccctgagcctgaattacttgggccagaagtattcctgttgctgtcttcagtctcacagagaagctcctgctacttccccagctctcagtagtttagtacaataatctctatttgagaagttctcagaataactacctcctcacttggctgtctgaccagagaatgcacctcttgttactccctgttatttttctgccctgggttcttccacagcacaaacacacctgtgccacccanngnttttcat

SEQ ID NO: 40409 - DNA, 328 bp, Homo sapiens
  misc_feature (1)...(328): n = a,t,c or g
tgctaagtgaaagaagcaggacacaagaccacatattatgattccatttatatgaaatagtctagacagatctatagacaacatagatatagtgattacttagggcttggggaagtgtttgactgctaatgaatgttgaaaatgttctaaaattgattgttaatgattgcataattctgtgggtacactaaaaaccattgattttacacttttgnnnnnnnnnnnnnnnnnnnnnnnnnnnnnnnnnnnnnnnnnnnnnnnnnnnnnnnnnnnnnnnnnnnnnnnnnnnnnnnnnnnnnnnnnnnnnnnnnnnnnnnnnnnnnnnnna

SEQ ID NO: 40410 - DNA, 338 bp, Homo sapiens
  misc_feature (1)...(338): n = a,t,c or g
cagccataatatatataaaccataacacaagggacacagattccaaaacacctttagggaaatcctaaactgcacattctgagaacgaaagtttgaacatgaaagctgatgcaccaaagatcaatgttacgtattttaaggattcccatatcaattcttgatgttcctgaaactgtttagctattgaagaagaaaagaataaagagagtctatcagtggtacttcatttagatttattttgggagtacaaaggctggattatgtcaaactgtaacttctcacagaacaggaatcgtgtcttancaatccgtatatcccccagcatgcattaacagtgc

SEQ ID NO: 40411 - DNA, 338 bp, Homo sapiens
gggaaatctccagacaataagaaaacaagcaaattaataattaactacaaattgttttgtactgaaaaggcaacaaacagaatgcaaggatagagaaaaacagaaaaaaggagatctatttttgataaggtggtaaggatagccttttccaaggaggtgacatttaagctgaaacccgaaggataagaagggaccgactttatgaagaaaaaagggaagactacccagacaagaggaaacaacatatgcaaaagacctgaggtaggaaagagcctggcagggctcaggatgtataaatgacaatgtttactaaaactcagcagcatacccttaggcca

SEQ ID NO: 40412 - DNA, 326 bp, Homo sapiens
cggccggtgagggggaagcaagtctggtctctgtgattgaagaagtcggctctgggctccagtgcgggaatcacacacatacctcagaatgccgggtctaagttgtagattttatcaacacaaatttcctgaggtggaagatgtagtgatggtgaatgtcagatccattgctgaaatgggggcttatgtcagcttgctggaatacaacaacattgaaggcatgattcttcttagtgaattatccagaaggcgtatccgttctatcaacaaactcatccgaattggcaggaatgagtgtgtggttgtcattagggtggacaaagaaa

SEQ ID NO: 40413 - DNA, 328 bp, Homo sapiens
atctacttgaggatatttttgattaataatttaaatgtgttcctttcctatatccaagaagacctgcagcagggtacaaggtaaagcagtcacacagaactcatgttcttgggtcatgttgctgctgtccacatagtacggagcaaatgtgctctgaactggcaccactggatttgcttcccagaaaagtctttgaaagaacaataatgaatacataccatctgggtgagacttggaggtattggggcattttagaatgtccacctggcttacttttttgactttagctaaataaaatgtaataaagggggcaggtgggagttggggg

SEQ ID NO: 40414 - DNA, 336 bp, Homo sapiens
cagaggtcaggtcattaagggtctttcatgtcatactgtgataataaataagcatttggtctctatccttggttcctggcacacagttcctaaagcccttgggatttcttgaccggtaagtatcttttatgataatgagatgactggggtctgagggcccctggatagcttcaggctggggtctgttaaccagaaagaccaaggaataattagagaattggaactttcaagtctgctctctaacctccagggaggggcaaggggctgaaaattgagctaatcacaagtggccagagatgcatttactaaacgcagacgaaaatggaaagattaatt

SEQ ID NO: 40415 - DNA, 328 bp, Homo sapiens
tggagatggatctgaaaggcaataaagtactggagaatggccatgaaagttgcatctgcagccaacacagtaatagtcatgattactgtcactgctccaaacccctgccctcccaccagttgctaacaaccagcccctcactagcccaggatatggcactgttgtttatcggttcccttagaccctgcctatccttaataaacagccctttatggaaggctctttaaatcccccacttgaggtggctatttgagtcctgccaggaatctgaggcatacacggagtcaatgaatgtggaactgggattgaaatccgcagctcgacctca

SEQ ID NO: 40416 - DNA, 328 bp, Homo sapiens
aatactttgttaataaaatcactacatctctgagcttcctcgccaagggcaccatttagttatgaagcaaatgatgcagaagagaaaacagtactgtgtgttactgtgtgtctccctgtcactgtcagcagctctctactcaaaatctaggcccccaaaggccagtggctgactgatgcccaagcatctcccagtgcaatgacctgaagtctgttcagaattcagaaagagaatctcagtcttcaacctccactagcagaagctggggtttcagggtgaggtgactccctcttcccatacaggcttggagctgagccctgctaagcgc

SEQ ID NO: 40417 - DNA, 336 bp, Homo sapiens
  misc_feature (1)...(336): n = a,t,c or g
nnnnnnnnnnnnnnnnnnnnnnnnnnnnnnnnnnnnnnnnnnnnnnnnnnnnnnnnnnnnnnnnnnnnnnnnnnnnnnnnnnnnnnnnnnnnnnnnnnnnnnnnnnnnnnnnnnnnnnnnnnnnnnnnnnnnnnnnnnnnnnnnnnnnnnnnnnnnggaaaggaaaatgtntggcaaaatatcccagtntgaanaatcatngtttttccatcgttttnttgaagtaaaaatgatgttttttgnaaaaaagnggntagttaacnttgncattcaaacagttgcangnattttntcccaanatanccntcatatttnaangnncancaaaaangattt

SEQ ID NO: 40418 - DNA, 328 bp, Homo sapiens
attcattcaaacacttattattcagtattagacacttccagtagaatgtgatatctagcacttgttcatagtactaggtatatagtgctagttagcacattctaatggaagaaaagagagtatcaagaagcctgactaactaggataaaggtattgccataaacaagagtggaagttggataaagaaattagaatttgcaggacagaaatgatctgttcatgtttcaacatgctaaccgtaagcatttcagaaaacatgcaagtgactatatccaggtgctgtaacactgtattccaatgatctggaattaatcagctcagcagtatt

SEQ ID NO: 40419 - DNA, 333 bp, Homo sapiens
  misc_feature (1)...(333): n = a,t,c or g
nnnnnnnnnnnnnnnnnnnnnnnnnnnnnnnnnnnnnnnnnnnnnnnnnnnnnnnnnnnnnnnnnnnnnnnnnnnnnnnnnnnnnnnnnnnnnnnnnnnnnnnnnnnctttttatctctcttaacaagttggcttaactgttacctcctttaggaatcctcaataattttcttactcttctttggccaggacactcttctgtgtctccgtagtatcttgttcataattctatcccagcacctttccctccatattgtcatttctctgtatcatattttgctgttagactgtggctcattgatatgggtaattagctgttttgttcctgtattg

SEQ ID NO: 40420 - DNA, 334 bp, Homo sapiens
agaattccttggtcacagaatagtacgacatgctcagaaacattacaaagatggaatttatagttgccccatatgtgcaaagaactttaattctaaagaaacttttgtccctcatgtcacactgcatgttaaacaatctagtaaagagagactagcagctatgaaaccattaagaagattgggaaggcctccaaagatcacaactaccaatgaaaatcagaagactaatactgtggctaaacaggagcagcgacctataaaaaagaatagtctctattcaacagattttatagtgtttaatgacaatgatggttcagatgatgagaatgatgac

SEQ ID NO: 40421 - DNA, 326 bp, Homo sapiens
ttttaagtttccaaatgaatgggaatttaagatttatcttttgttattgatttctaactcaattgcattgtgttcaggaaacctggtctatgagattctaatctgcgtgatcttttaacttctgaagtcctctgggggtctaagtctgctatttgtgtttcagctgactctcactcatggtggtgtacatgctttgtgatctttgtggattcatatttctctatgtttaatctgtggggatcctgtccacattgtggatgctttcctctggagaggcttcatgtcagtttctgctgtgagccagtggcactactaacctgggatcc

SEQ ID NO: 40422 - DNA, 334 bp, Homo sapiens
cacaaacgagcaagtcagtttacagccgaaggctacctgtatgtccaggaaaaaaggcctgctccgtttggttccagttgggtcaaacactattgcatgtatcgaaaagcagcaaagaagttcaacatgatcccatttgagcacagatctggagggaaacttggggacggagaggtgttctttttgaaagaatgtaccaagaggcatactgactccattgacagaaggttttgttttgacatagaagctgctgatcggcctggcgtttccttgaccatgcaggcattttccgaagaggaaaggaagcagtggttggaagctctgggtggaaagg

SEQ ID NO: 40423 - DNA, 327 bp, Homo sapiens
cgcttattctgccatcatcattactcatatttatctgttattatccttcatttgcacttcactgtctgatatcttataagcatctcttgtggagtcatttaacttttccttaggcccaaactctggcttccccagtagagtgtaagttatttggggtagaactatatgtttcacttctcagagattctcataatgccttgcacaagaccattcccagagtaggcactcaatatgaattgaatgaataataaataggagaaagagagcgagaaagagaggaagagaggttttgataagtcaagggttgtatgaagaatagacctagga

SEQ ID NO: 40424 - DNA, 327 bp, Homo sapiens
gtccttgttgaccttggtcttgtcatagcacttctcatagcacaggatcctcagggactgggagccctccagctcgatctcaaactcctcatcccacttgggctccgctgtgtcccggaacaccctggttttggctttgctgacaaaatagccgaaggaatccacctccagggtacagtacaggttggctgattgcttaaatcccttggcagagtggacgatgacatgaaggaagccatagagtcctggagactcatcgtcgtctttattgctggtgacaggaatgttgtgtacagtcctaagcttgaaacaggatcctgtgagcac

SEQ ID NO: 40425 - DNA, 305 bp, Homo sapiens
  misc_feature (1)...(305): n = a,t,c or g
cttgtatgacccaataaatttcataggagatccaataaattccatatttaaagcattcttaatctgctaggcaggcaactggagaaagcacaggcaaatgctccacgaaagaaaatgannnnnnnnnnnnnnnnnnnnnnnnnnnnnnnnnnnnnnnnnnnnnnnnnnnnnnnnnnnnnnnnnnnnnnnnnnnnnnnnnnnnnnnnnnnnnnnnnnnnnnnnnnnnnnnnnnnnnnnnnnnnnnnnnnnnnnnnnnnnnnnnnnnnnnnnnnnnnnnnnnnnnnnnnnnnnnnnnnnnnnnnnnn

SEQ ID NO: 40426 - DNA, 303 bp, Homo sapiens
gaagagtacctcatcattcatagccactgagtctctataatttttaaatgcctttggaaagctagatcttatgctcaaaagcatgcttttgtgttagaaatctttcagtgagctacttactcaggtcataatgcttttaaagccctgcttttctttcctcagaataaactgaattgtatgttaccaataacaatgccacatcatttcaaagaaaacggaattaagtaatccaagtccgggttgctgaaaactagatgacacagggtaggcactgttgtggttaccatgcaaaggatctctatt

SEQ ID NO: 40427 - DNA, 302 bp, Homo sapiens
tttatttcttggctatctattctgttccactggtctgtgtgtctgtttttatgccactgttgtgctatttttattactatagctttgtagtatattttgaagtaagatagtgtgctatctgcagctttgttatttttgctcaaaattgctttggctatttggggtagacatttttaaaaagaccctcttggctgtaaacttagggtcaaaaatatttttccagatgtttctgtcttgctgataaaagctaataaaaccaaggaggctcttctgttttggattttttctgcttcatgtttcaa

SEQ ID NO: 40428 - DNA, 305 bp, Homo sapiens
ttataatccatttctggattctcgtaagagaacgtcttgtgttggggtgaactcatcagcttttcgggttgagaggagttttagtgtctgtggccgaggcactttcctctcatggtgtgtgcagatgcacacgccaggcctgtgagtggtgggttgggctgagggcgcgggcctggagcttctgagccccagagccactgacgtagacagctttggcagcagcatcctgagaaatggcagggggccagagaacacagagacagggccaagaatagctgaaaaataccaaatgctgaagttggaga

SEQ ID NO: 40429 - DNA, 301 bp, Homo sapiens
ccgaaagggagtgtgtgtacgtgttttctatgttcgctcgtttaaccgaacctaggaggaaaaaagagaggaggagctgggaactatttttgtgcccctaggtagtataaaattggctttctttaatggagagtcttaaaactggtgaggccaagagcaaaactactgtgaatatcatggagtaaaagagattactcctgatggaccttaggcatcagaaattttagtgaaagaaatgtttctcttaaaattcaacacctattttaaatagtgatgtaaagcatttctttacatgtacctt

SEQ ID NO: 40430 - DNA, 306 bp, Homo sapiens
  misc_feature (1)...(306): n = a,t,c or g
agatacgtaaatatttaggctctgttgtaactactttgctgttacagcacagaagaaaccacagacaatacacaaatgagtggatatggctgtgtttgagtaaaacttgatggtaacaaaacaggtgataggttggatttcttttcagacctgtgctctatcctggatcgggctcaaagtcatgtctgtaattctgtagttttcttctacctctgagcatcttttaataagtctgcttatagggtgctccatactagggttgnatagtaatcattttaaataaatctattttcctgaatgttttat

SEQ ID NO: 40431 - DNA, 305 bp, Homo sapiens
cttcctcctcaactgtggttaaaatgggagaaaaactgcagtgtgatacatgtcatatattctgtggtatttttgtaatctttctctgtgttgactcaattcaataagcttcaatttttcttattaatatattaatgatgtgagaaaaatattagagaaattattaccacttatcccaaacgttagttttatgtcatgttattatcacatataaaaaacatacaaaaattagatgaaattttaaagtcagaagggaccttggtgagcatctggtctctacttcaagggtggagaaatacaggaag

SEQ ID NO: 40432 - DNA, 298 bp, Homo sapiens
gtcaaaggtacattatcacatttttctaagttaacacattttatatccttttttagcttgattttcttttcagctcagtcttacatgtcagttctaatggtctgtggccatactttttttaaataatattttctaaataatttttaaatatttttaatatttaatttaatttaaaatttaatttaaatttaaaaatttttaataatttttaaatattttttaaataatagactccaaggaatttaaaccatcttaaaacaaaaacattattttctcggcagctttcagtactatgcac

SEQ ID NO: 40433 - DNA, 298 bp, Homo sapiens
  misc_feature (1)...(298): n = a,t,c or g
cagggacagatttatttcttcctttacaatttgcatgccttatattacctttcttgccttataatattgactgggagttannnnnnnnnnnnnnnnnnnnnnnnnnnnnnnnnnnnnnnnnnnnnnnntcctgatattagagagaaagcatttagtctgtcaacataaagtatgacattagctgtagattttttgtaaatattctttatctggttaaggaagctcccttctattccaaattgtcgacgcggccgcgaattccnnnnnnnnnnnnnnnnnnnnnnnnnnnnnnnnnnng

SEQ ID NO: 40434 - DNA, 300 bp, Homo sapiens
  misc_feature (1)...(300): n = a,t,c or g
tttatacatcagcaggagatggtgtaccccgagaagctgctctgttccacacaattgccttagcgtctgtcctctttatgaaactaaaaaaaaaaaaccacagtaactgtagttgttatgagcaccaacattttaagtctaattaaaaatttgacttgcnnnnnnnnnnnnnnnnnnnnnnnnnnnnnnnnnnnnnnnnnnnnnnnnnnnnnnnnnnnnnnnnnnnnnnnnnnnnnnnnnnnnnnnnnnnnnnnnnnnnnnnnnnnnnnnnnnnnnnnnnnnnnnnnnnnnnnnnnnnnc

SEQ ID NO: 40435 - DNA, 304 bp, Homo sapiens
  misc_feature (1)...(304): n = a,t,c or g
nnnnnnnnnnnnnnnnnnnnnnnnnnnnnnnnnnnnnnnnnnnnnnnnnnnnnnnnnnnnnnnnnnnnnnnnnnnnnnnnnnnnnnnnnnnnnnnnnnnnnnnnnnnnnnnnnnnattttagtgagccannnnnnnnnnnnnnnnnnnnnnnnnnnnnnnnnnnnnntgaattctaataacttttgaatgaagatctttctccttcattctcatgtttgtactatgtagctgaagtaacaaggttggagagtttcatgtggattacctaaggccttgcatagagaagtattaattgaggcagga

SEQ ID NO: 40436 - DNA, 298 bp, Homo sapiens
caagaatctgaaccagtatatccagatggggaacagtgataacaaaggtaagtggtgatgctgagtctccaccactctgtgtttgaagctctgagaagcaacagtattatgtaactctctcaatggctccaacaactcaacgaaatcatgctggccatggactccctgtgtgatgctgacacaccactgaaacattcctgggtctctatagtctcatctttaacataaagaggttgaagtgttttcaactcaatgtctccgagataagagcaggacccggacagtaggaatccacagg

SEQ ID NO: 40437 - DNA, 304 bp, Homo sapiens
tgagccaccacacctggcctttttcttctgtttctaactgttcccttttatttccctatggagcatctactgagccccagccgagagtagaaacaaacctgctggctgctctcaaggcacttatagtccagtaggggagacggtcactcaccactcagtcacacaaatgaccgtcgaattgtgacccaccctaaggcaattggctttcctgaggagctaaggagggaacaggagctaaggaggagcacattaatagcaaattaaaaacatcatggagatctctttagagagaccaagccccatt

SEQ ID NO: 40438 - DNA, 311 bp, Homo sapiens
tagctttggaggtggtctgtaatctgggtaagtcagtcccttagatatacactgttgtgtccaatcaacctgttgctctgaaaaagactggttaagtccctgatttccttggtaagctacaggaagtcgtgtagaattagaagggatcatctgcatttgcatagaataggtatctgatgttatcagttgactctgtagtgccggcatattgggtacgttagctccaaaatcagtttgatgagatacagttgcccctatatgagaatgcacaggattcctcattggtgagttcaaccatacattttgggtaa

SEQ ID NO: 40439 - DNA, 309 bp, Homo sapiens
aaaataatttgttagaaactttaagttaccctatgagctcctagtaacactgttttcaagctcataggttaattgttaagcccttttgctccgagttgaactgatcaaatggctctgtgtaaaaggtaacagtgtagaatcctctttgagaaatagcatgtaaacttgggagaaatggcctaagcccacggttctcaagtcactgagacagttgaaaaagccccctcaggtggtgagaatgggataatattttattatatctctaagatgcctcaaatccaaagagataattaaatttggaattttatt

SEQ ID NO: 40440 - DNA, 310 bp, Homo sapiens
  misc_feature (1)...(310): n = a,t,c or g
gtagcctaaaacaatagccaaagaagtcagtgacagagatgtttgctttccccacacaaactaaggagaacatcttaaaatgtgtccctgagctgtctttcagaaattcagacacccactgaggttccacaccggacacatagaccttagataaaaggatnnnnnnnnnnnnnnnnnnnnnnnnnnnnnnnnnnnnnnnnnnnnnnnnnnnnnnnnnnnnnnnnnnnnnnnnnnnnnnnnnnnnnnnnnnnnnnnnnnnnnnnnnnnnnnnnnnnnnnnnnnnnnnnnnnnnnnnnnnnnnnnnnnnnnn

SEQ ID NO: 40441 - DNA, 316 bp, Homo sapiens
  misc_feature (1)...(316): n = a,t,c or g
gtgattaaggccctagaagatgctacaggtagccttgagcttaatatgacaatactgacatggtaaacactgggactaacagagactaatatatttcttactgaaaaaaaagaatactgatcttttcgtagttcataagtgtgattgggttttcacacgcatgtgtgagatgtgctttcttcaaactttgttacgatgttggcacattatacatctgacatgaaaaaagaaaggcccagcacgannnnnnnnnnnnnnnnnnnnnnnnnnnnnnnnnnnnnnnnnnnnnnnnncaggcatgagccactgcacccgg

SEQ ID NO: 40442 - DNA, 309 bp, Homo sapiens
agatgactgccagactttgtaagggaaattgtcccatcttctgggggaagctttcctttctggcatccttggttctctttccttggggatggagcgagtttcccttcctgtgataaagatcagacataacctccaagccagaggtgtggtcaatcccagggcagggcaggaggatccagctgtgggaaatgaggacagggcgagaggatagtcagactgactgccacctgtgtctcttctcagggccctctgcatccaggccaaggcctggaggcccttccaaagtctctgtgtccactggttgctaag

SEQ ID NO: 40443 - DNA, 309 bp, Homo sapiens
tcatgatcttcaaccttcgccagtggcatttcatgaaataaatacagagttttctgaggaaagtataatatactcagacctcaaagttcattgttcttcaaatatccagaacggaaaaataactaaaactttgaaaacaaaagtgtctccatggtgcattgttgctgtgatatttgccttcctttatttaatcgctctggtaatagttgcagctatggtagctaagattcattgtcttaaagagatcctgaataaggcaaccattgagactgcacattgcaacataatatcacaaaacaaaggttgaca

SEQ ID NO: 40444 - DNA, 310 bp, Homo sapiens
gacagggtctcgttacgttgcccagggcaacgcctggggctcaagccatcctcctgagtggctaggactacaggagcacaccactgtgcctggcatgtcaacatacttattggtaaaagactgaatactttcccatacagatcaggaacaagacaaggatgtatgctcttaccattcctattcaatactatactaaaagatctagtcactgcactaaaaaatcaggatataaaaggcaaacaaatcaaaaagaaataaaactgtccctttttacagaaatgattacccgtgtagataaaaatcaatcata

SEQ ID NO: 40445 - DNA, 317 bp, Homo sapiens
tttctccagtgatgtatctgttactgacttcagaaggaggaccctcttcttttttctctctctctctcaaattgttttcacggattaagaatgtagaagatggaaacgtttttcctgcaaccttgtgtatttgctctttctacttctctatctttgcttagcaattaaaacacctctcttagggctccatcaaacagaacttttagactgagtaacgctaaacatctcctaatcccttttttccttgttgagataaaagagctaggcacttagtcgtattaccgaattctcagtttgccagatatgtactaatatag

SEQ ID NO: 40446 - DNA, 308 bp, Homo sapiens
ctgcagtggcggcgcttcgttttcttcgacaaggagctggtgaaggagccgctgagcaatgatggggccgctcccggggccacacctgcttctggatccgctgcttccaagttcctttgcctccctcctggcatcactgtctgcgactcaggccgagggagcctggtctttggagatatggaaggccagatctggttcttgccacgttccctacagcttacaggcttcaagcctacaaactacgggtgacacacctgtaccaactgaagcagcacaatattctggcatctgttggagaagatgaagag

SEQ ID NO: 40447 - DNA, 206 bp, Homo sapiens
cagcccctaacctgaggctgtccagaagcctccagtcaccagtcatctccttagcatacaaaaggcacttatcagttgggaggttccaagtgttttaggagccatatgtcaggaaagagaggtagttgaaaaccaaatatatgtattgcttattataagtcacattatcccagtgtgtttgtgtttggcttctttttttttttttt

SEQ ID NO: 40448 - DNA, 311 bp, Homo sapiens
gtcgacgccggccgcgagaaaatctcctggtcagcccatgaggacccatacactgacatcccgcaatttacctttgatttatgtcaacacaagtgtaatcagaatttttattccaaaaacagaagaaatgcagccaactgttgaagctaatcaggcagcaaaagaagacactgtggttttgaagattggctctgttgccatggctccccaggctgacaatccccttggcagatctgtccttaggaaagatatttaccagagagccttgaacttaggaattcttcgagatcctggatcagaaatcgaagaca

SEQ ID NO: 40449 - DNA, 311 bp, Homo sapiens
  misc_feature (1)...(311): n = a,t,c or g
ctcagcagccccatgtggctagtgtacaccatactggactctacaacaatgcctggcaaagacagagtgggtacttataaatattcactgaatgaaagaatgttttcccaggaagaggaagctatggtagagtacagcgttttctaaacttcatttactcacattctacattcacaactttttctgtgtgatctttttccttaaaatgttacactttttattcctgaaaaattatgtaaaaataaaactttcagttgggcatnnnnnnnnnnnnnnnnnnnnnnnnnnnnnnnnnnnnnnnnnnnnnnagg

SEQ ID NO: 40450 - DNA, 311 bp, Homo sapiens
cctgggccaagtgattacagcacttgtcgacgtgggtaatggaaaacagagacatgtttgctacagagactccaaacttaccttcttactacgggtaaagtagatccttgggttcctgggctccttttggttatgctaaagttgatagtgggacagtctctcagccttggtggcaagagtatacattttctttgcttaaaaaggtcttgtgatttctcaccgaaaatatgttcattcctatcattaaacaggattcccttggaggtaatgccaaaacagccataattgcaaatgttcatcctggatccagg

SEQ ID NO: 40451 - DNA, 161 bp, Homo sapiens
ggaatataagctccgtccagcaaggatttgctccatcgaagataaacacagccagcgtggggtagatatgaggtgctcctgtcttccagcaactccagacaactgatacatgttagaagacagcacattaattatgaaacaatgcagaaaaaaaaaaaaaa

SEQ ID NO: 40452 - DNA, 310 bp, Homo sapiens
agaaccgaaacttgaatttttacataaagaattatctcccaaagtgctggaattacaggccactgtgtccaacttccatctatatgtcttctctcacttccttattttaaatttattgtgaagtattttactatttttgaagctatagtaaatagaattgttttcttaatttcattttcttttttccccttttttacatgctgccttgagatgtgatttaattttattttcagattgttcattgcaaatgggtaaaataggttgattttgtatactgatcttgtattctttgactttgatgaactcgttt

SEQ ID NO: 40453 - DNA, 302 bp, Homo sapiens
ctggcaagctagctcgaatggaagaaaatacttgtcagcttcaatgaagtttgcctttggtggtgcagcagtgccaagcctaggagaaaagcaagagagggtcgggagaagaaatgaattttctacaccttactctaacttcccattccatctgcaaccatttaatttaaagtgcctgcaaactatatcctggggctaggcattaaaagttgaatacatgcattagcaaaaacaccactgaagtgccacatgcagagagcaagttctctgattggcatgctgaattaacaacatcctggact

SEQ ID NO: 40454 - DNA, 306 bp, Homo sapiens
gaacttaacatctccctcccttgcctataaatacttaaacatctccactaagagataaacaagaaatgggcaacatggaaaaatgtctagaaatcagaaaattaatgttgagtgtccattataaattaagccctgttcaaaaactgcattcattgccgaggacctaactgcttcccaattctctgtattggtaactggctccaccactgcccctcctctgtccctccccagcatcagaggaagggcaatgcaaccgtgaaaaagcacagtaagtggaccattttcctcaagctccagggagaatcc

SEQ ID NO: 40455 - DNA, 298 bp, Homo sapiens
  misc_feature (1)...(298): n = a,t,c or g
nnnnnnnnnnnnnnnnnnnnnnnnnnnnnnnnnnnnnnnnnnnnnnnnnnnnnnnnnnnnnnnnnnnnnnnnnnnnnnnnnnnnnnnnnnnnnnnnnnnnnnnnnnnnnnnnnnnnnnnnnnnnnnnnnnnnnnnnnnnnnnnnnnnnnnnnnnnnactgcacttggcccatttcagagttttaagcaggggagtggcaggcagtaatttcctcttaagacctttctggctgctgtgtgtcgccgggctgaactgggggcagcagggctggaggggaggcaagagcagggctatagtt

SEQ ID NO: 40456 - DNA, 299 bp, Homo sapiens
gcaaggcttagaacagagaagacagtcatttccttagaaaggtgtgtgctcccaaggtaacgacacagactctttaacagcaaaagcacagggctggctgatgttcttggtgacttcagttccatgctgtttgccttctgctctttcttacacacttttgcattatagtctaatctaatctgagagctttgttggctccaggtagtcctccccagaccagcttgagactggagaggtcctaatccctgaaaagatcatagtgccctctctctcccctcttcctatccccaatatgtact

SEQ ID NO: 40457 - DNA, 304 bp, Homo sapiens
  misc_feature (1)...(304): n = a,t,c or g
caagtttttattcaacacatttttcttcaatacccactgtacatttctaggtactataaaagcaaattatttaagtcactttnnnnnnnnnnnnnnnnnnnnnnnnnnnnnnnnnnnnnnnnnnnnnnnnnnnnnnnnnnnnnnnnnnnnnnnnnnnnnnnnnnnnnnnnnnnnnnnnnnnnnnnnnnnnnnnnnnnnnnnnnnnnnnnnnnnnnnnnnnatatactgaatctggttttataagatagaccaaggaattagattatgttatgttccatttattgtataagatgtttactatccg

SEQ ID NO: 40458 - DNA, 302 bp, Homo sapiens
  misc_feature (1)...(302): n = a,t,c or g
nnnnnnnnnnnnnnnnnnnnnnnnnnnnnnnnnnnnnnnnnnnnnnnnnnnnnnnnnnnnnnnnnnnnnnnnnnnnnnnnnnaaatgtatatttttaagaatctttcctgaagaaaaaagttgggtaaatgcagggctgtaggtacaaagttgtttgctgtggggtggtttgtcgtgccgaaaaattggaccaacttagaaggagattggctaactaaatacgttaaggtataatctgaataggattctacatagtcattaaagagtaaagttgacctgtattcattttcatgaagaggttt

SEQ ID NO: 40459 - DNA, 296 bp, Homo sapiens
cttctgcacatgtacaaataaagttctaaataattggagtggaaataaaaactggtaaaagagaaaactgactacatttttatgccacttgaggatatttgtacctgacttttcaaatggtcttctacttgctgagttacaatttaataggtaacacattttgggagctccttaaaatatgccaagaagcttcattgtttctagagtgcttaaaatccacatgaagctgacatcagctacccatcactaatgcttagatgtggtgctgtggtgctgtgcatttatctaaaatattt

SEQ ID NO: 40460 - DNA, 294 bp, Homo sapiens
cagtgttgtacatagcataaaactctgcagagaagtattcccaataaggaaatagcattgaaatgttaaatacaatttctgaaagttatgttttttttctatcatctggtataccattgctttatttttataaattattttctcattgccattggaatagatatctcagattgtgtagatatgctatttaaataatttatcaggaaatactgcctgtagagttagtatttctatttttatataatgtttgcacactgaattgaaggtcgacgcggccgcgaattccagatctat

SEQ ID NO: 40461 - DNA, 330 bp, Homo sapiens
  misc_feature (1)...(330): n = a,t,c or g
cttnnnnnnnnnnnnnnnnnnnnnnnnnnnnnnnnnnnnnnnnnnnnnnnnnnnnnnnnnnnnnnnnnnnnnnnnnnnnnnnnnnnnnnnnnnnnnnnnnnnnnnnnnnnnnnnnnnnnnnnnnnnnnnnnnnnnnnnnnnnnnnnnntctataatctattaaaagatatacaggaagcacccagcggagaaagaaaaatggaagttgcttgaatagagatggtagcagatttgatggggcaaggccaccagattcctcccatgggcacaggtagactatattcattggaagttccttgtagtatctcancagagtaagaagtcgtcatg

SEQ ID NO: 40462 - DNA, 335 bp, Homo sapiens
cacagatgcctccctgatcctggcaggttatatgattcagcatcagtatattgaatcaaaatactgactagcccagcactaccatctttcagaaatgattccaccccttgagcatctctctctagacaggtcaccttttctagcctttctgcttttaattatcagttatgaaactccccagagaaaattccatttacatttttacatttaccttagaggatgttttttcttctgtaaattctgcagcactgtgttcaagagaaaactcccacaaattgtttctatattcagactttagagaacttaagttcaggtacttttatgataactcatcc

SEQ ID NO: 40463 - DNA, 326 bp, Homo sapiens
  misc_feature (1)...(326): n = a,t,c or g
atccaagaaagcaacgtctgccattgtagtcggagacattaagggaagattaacaggtaaagattactttcaatcagatatctttgttattgtcatcatcatcttcatgtagcctttaccaaatacctttctgtacatttcattaatagccaactgctgctttgggtattaattaacaaatcagaatattccacactgacagagagataaagaacgtgtagagaattgaaaaacatcaaatatatgggtcaaaaaggtaaagtgcacattcttattttatgaataggaaagtattgcaaaacggagagccatgagaattgntattt

SEQ ID NO: 40464 - DNA, 331 bp, Homo sapiens
gcacaatgatagagacaaaatctggaattggccaacttgatagggctgatttcgtgggcatgggacctgtgcagttactcaggacttcacagttaaaagagccctgtgcttgatctaatgctctgctgttgctatcttaaaattgtttttaaaaattttaaacaagagaatctaaattacatagctggtcctccattcatctcaatcacctttcccagagtccatgatgaattcctgttaattgtgtgaacatctttatgcctgttcttatagcagaggacctccataagggcttcctgggatttgaagtaatggttctattcttgcctgg

SEQ ID NO: 40465 - DNA, 323 bp, Homo sapiens
tcttctcctcttctgacatagccccttcccgaatggttttgatagccaccttgtccttgttgagccagtagcccagatgcaccaacccaaattgcccactgccaatctcttgcacaaaagtgagctctgaggggtcgatcacccatttcccgtatctcagccctgctgtaactggggctttctgcctcccaaaacaaactggataccggagtcgagtcaccaggcctcctccattatgttggtgatagttgatgagaagagggatggaatcgaacacatacttttcagccacatagtatcgcttaggattgtcagtcgacgcg

SEQ ID NO: 40466 - DNA, 332 bp, Homo sapiens
  misc_feature (1)...(332): n = a,t,c or g
nnnnnnnnnnnnnnnnnnnnnnnnnnnnnnnnnnnnnnnnnnnnnnnnncatgactgctctagtgtattcatattcaaaacaaagaacaaaattaatgggcaaactgatcgttcatctggttgtattgccaggatactctgtagtggaaacttgacttgaaacatcagtttcaccaaggagggctcattcagataaaaagttgtactcctcagaaaagaaaaagaagaaatggataggacatactctgcaaatatctgtcctaaaagctcagtaagagctttagaagaaataaaagggcatcccatgaaatgtaatattttaaggccttaaa

SEQ ID NO: 40467 - DNA, 330 bp, Homo sapiens
  misc_feature (1)...(330): n = a,t,c or g
nnnnnnnnnnnnnnnnnnnnnnnnnnnnnnnnnnnnnnnnnnnnnnnnnnnnnnnnnnnnnnnnnnnnnnnnnnnnnnnnnnnnnnnnnnnnnnnnnnnnnnnnnnagtgagccaccgtgccctgcctcttttgtttatttttgagcctttctgtcctactttccactctttcacactcctacccacccacacattcaaaatcacgtcacattcttgaatctttgggtcttagggcaaactgcaatgcttaactttaatacagagtacattaatggagaaaaagatacagtgagggaagtgggagggatggagggcagtgtgatacatgt

SEQ ID NO: 40468 - DNA, 323 bp, Homo sapiens
attggaacgtattaagagaagatgaatgaaagaatgatgtcagctcctcctgttctccaactcagagtcctttgaatgaaggggaaggcagattgccttgagggagaaccttgtaatgttctagcaagtatatggcagtgattctccgagccttttcccccaaaagatcgaagactagttacctgagaaatttgtacacctagggaaggggaataactaggtctttcaaggctgttggagacagcatctgagctaactttgataccaagaaatgcatactgtcaacgtggtcccccattagagtgaggacacatagaagctcc

SEQ ID NO: 40469 - DNA, 331 bp, Homo sapiens
cctatatagccatttagctgaagcccagcttaccaggttcaagggtacaaacttctcaaatcttcaaaacattttagtcaaagtgtaatatacttaaactgcacctaaaatatctttggcactgcttgttagaaattcctgattcctgttactaatcactaaagaaaccggatgctgccaccgtaggatttaagcagtagtgcttccatgctcttaagactcctgctgcctggaccttcgtcagctttgacacctcttttctgatttaaagacaccaaggaaaactacaactgtctttagctttgaagcagttttcatgtaatcattgcca

SEQ ID NO: 40470 - DNA, 273 bp, Homo sapiens
gagaattctctaaagggaaagaagcagaggccccagagataagtgatttaggcagatgagaaaatccatcctggacagcataccaggtaagaaaaaagtaacaaatcaaggtaggcactggtcatgttttcctctgttccagggattagagggagacaggataagcagtgtaggagtggagaatagggggtgatatggtgaagcagctcccagaacacctacgaaggtgacaggtttagaaataaatggaacacatgagaaaaaaaaaaaaaa

SEQ ID NO: 40471 - DNA, 323 bp, Homo sapiens
ttcagttcttgtaagcattcctcacaatgcaacttacagcttagtattaatactagcctggccgcctctcctctggctacaattcagtcagatggtgccccaaactgagccccatccccagagaactgcctatcaccttctttctcactctggaatactatgagaggtatttcaattaaacacaatgagaccatcctacattttgctggccacaactgggaatggcttctaaaaatgataatactgcctgcctgtcaggcactattctaagagctccacacatcttctcatttaattcttatgagataggtactattattatt

SEQ ID NO: 40472 - DNA, 332 bp, Homo sapiens
gttgagaccaattagtgggttttattggttgccagacagagaagatggggcttattttttatagtcggtaggaagacactgaaaattttagaggaggatagtgacagtattacaggcaaaagccaccatgcccagcccacataaagaacttctaatcaacaattaatgtaaaaataatgggaaaatgtgcaagagtcatgaacaagaattttgcagaaaaaacatatatggccagtcatcacataaaaaacatgtatgttgaagaagctgtagagctacaatatctctgatacattgctgctggcaaaagttgtaaattggtacaacactcg

SEQ ID NO: 40473 - DNA, 322 bp, Homo sapiens
gggattcataatggctgctttccttttctttaacttgataagagtgctaccaaatacatctccagtgtcatgaattcatggatgtgtgaccagtagctcttggccagccatttctggtcttaacacccagatcatcatagaatatgaggataggaatccactgatgacagaatcctgaatgactatcttatgtgcctgaaagcctgcctcaaagaaggctgatgtcttcttgaattaaagagttgcttgcatatagaatatactggagtcatttttcagaagatccttacatggcttggcagagggtggcatccagtttatc

SEQ ID NO: 40474 - DNA, 331 bp, Homo sapiens
tttaagacttttctttccttaaaaaataaagtacgtgtttacttggtgaggaggaggcagaaccagctctttggtgccagctgtttcatcaccagactttggctcccgctttggggagcgcctcgcttcacggacaggaagcacagcaggtttatccagatgaactgagaaggtcagattagggtggggagaagagcatccggcatgagggctgagatgcgcaaagagtgtgctcgggagtggcccctggcacctgggtgctctggctggagaggaaaagccagttccctacgaggagtgttcccaatgctttgtccatgatgtccttgtt

SEQ ID NO: 40475 - DNA, 316 bp, Homo sapiens
  misc_feature (1)...(316): n = a,t,c or g
nnnnnnnnnnnnnnnnnnnnnnnnnnnnnnnnnnnnnnnnnnnnnnnnnnnnnnnnnnnnattctttcaggccgtatatcttattcttaatgtcttttagctcattttgaagtaataggttacagacaagtaatgacatgtctgataaatgctttcattttgtgtaagatgttattctgttccttttttttttatcactttgtatagaattttacctcaaaatttttatattgctcatttttacgtgaaagtgatttttctgaacttttagcagggtggctgtattaagagagatcttctaattccttaaagctct

SEQ ID NO: 40476 - DNA, 332 bp, Homo sapiens
  misc_feature (1)...(332): n = a,t,c or g
nnnnnnnnnnnnnnnnnnnnnnnnnnnnnnnnnnnnnnnnnnnnnnnnnnnnnnnnnnnnnnnnnnnnnnnnnnnnnnnnnnnnnnnnnnnnnnnnnnnnnnnnnnnnnnnnnnagaaataaaaaaggtaaaaatcatttcctcagttcaagtacttgatagccacaagtggccagtagcttcttgactggacagcacagatacacaaaactgtaatcatctcagaaagttctactggacagtgctactctacaaagtaaatccaatgcagaggtgaagagagtgaatagaactacagactagcagttctattcagttcggtacagcgccca

SEQ ID NO: 40477 - DNA, 318 bp, Homo sapiens
  misc_feature (1)...(318): n = a,t,c or g
cttgaatctaagatatgcagtatttgggtccttcctttatccatatagcttcagttacctgtttctctttatctacaaagattctaagtctgatgctcacagctaaggttagggctgagtacgctgttcattgagacttttatacctctgactctggaaataagaaaggcttttcaaaaatccannnnnnnnnnnnnnnnnnnnnnnnnnnnnnnnnnnnnnnnnnnnnnnnnnnnnnnnnnnnnnnnnnnnnnnnnnnnnnnnnnnnnnnnnnnnnnnnnnnnnnnnnnnnnnnnnnnnnnnnnnnnnnnnnnnnnn

SEQ ID NO: 40478 - DNA, 293 bp, Homo sapiens
ttaatccccaaatctgggccaagagtatgtaaaagttggagtctaagaggttctctccacctctctttggagggcacaaaagccacatgggattccaaaatacctgggacttggcatatacaggaagctttaggttaatgctaaaagtagcagatacatataatagctgaaccacaaaaagaaaaaaaaaacacatttagttctattagaaaatggcttaaaacatgtggacaaaggcaacaaataaaaatacattaataaataaaacagaaaatggcaaactagggctgggc

SEQ ID NO: 40479 - DNA, 292 bp, Homo sapiens
gcagagtgaaggggagggcattgcagtgcgcgcggtaagggtttctcatctcacctgagtgtggcgttcgattcactggcagcaggaaagacggggatcagagaagagttaccactggcgcccagcttccctggcctgatccccagccccctcccacacctgtccatgctgaagaccggggagagcagaagcctgcgtttctgaggggagggtgcctggggataagaacaaggtgggtctgggggtaagggggtcaggacttattttcttcttcgatttttcataggacaac

SEQ ID NO: 40480 - DNA, 291 bp, Homo sapiens
  misc_feature (1)...(291): n = a,t,c or g
ttattgcacagttgccggtaccaggcattgtactcaacttcacctctcattgtatcattaaccccctacagcaactttgtcaggtaggtggtacccctcacccatgctgggtccctccaaaacccatgccaacagcccctgtaatgatagtagcaaacgcttctgaatggtttactgtgtgccaagcatccttccagacgtgttacatgtattgacccatgnnnnnnnnnnnnnnnnnnnnnnnnnnnnnnnnnnnnnnnnnnnnnnnnnnnnnnnnnnnataaatgaggc

SEQ ID NO: 40481 - DNA, 293 bp, Homo sapiens
  misc_feature (1)...(293): n = a,t,c or g
nnnnnnnnnnnnnnnnnnnnnnnnnnnnnnnnnnnnnnnnnnnnnnnnnnnncacgttctgttttcttggtgaaaaatgttcttcctttttataactttattcttaagggtttcacgttctcagcgtgattaaagttgatgccaaagttttattagtttaagaggaaaaagaaaatatttcctaaatcctttcatatttctcgtgtgtcacgattttaaactttcctttttttcttactatcagggtgtctcaacactggaataactaggctgttgggaatgttagaactctt

SEQ ID NO: 40482 - DNA, 289 bp, Homo sapiens
  misc_feature (1)...(289): n = a,t,c or g
gtttttttttaaggtgtcgatttttaatacaaaaaaatttacattctttatatacaggtaatacatctatacagttcaatggagagaatgaaatgtgaacataatcttcaaaaaaaatagtgtggtctttatttatgtttaaaaaaaattttttttgagacgtaatctcactcaggctggaatgcagtgtggcgtgannnnnnnnnnnnnnnnnnnnnnnnnnnnnnnnnnnnnnnnnnnnnnnnnnnnnnnnnnnnnnnnnnnnnnnnnnnnnnnnnnnnnnnnnnnn

SEQ ID NO: 40483 - DNA, 289 bp, Homo sapiens
  misc_feature (1)...(289): n = a,t,c or g
nnnnnnnnnnnnnnnnnnnnnnnnnnnnnnnnnnnnnnnnnnnngatactataatgcctgnnnnnnnnnnnnnnnnnnnnnnnnnnnnnnnnnnnnnnnnnnnnatgcaggatcacagcgagtatgtagtgaagctacttttgaaacccaaagtatctcagttatgctgtactacctctcttgaggataatgatgctcaaaaaagtgctttgcaaattgtagaacacctaccaatnntgactanaatacnnnaggatattcngacagtncactnataacgnnntnaggg

SEQ ID NO: 40484 - DNA, 286 bp, Homo sapiens
  misc_feature (1)...(286): n = a,t,c or g
nnnnnnnnnnnnnnnnnnnnnnnnnnnnnnnnnnnnnnnnnnnnnnnnnnnnnnnnnnnnnnnnnnnnnnnnnnnnnnnnnnnnnnnnnnnnnnnnnnnnnnnnnnnnnnnnnnnnnnnnnnnnnnnnnnnnnnnnnnnnnnnnnnnnnnnnnnnnnnnnnnnnnnnnnnnnnnnnnnnnnnnnnnnnnnnnnnnnnnnnnnnnnnnnnnnnnnnnnnnnnnnngctgtgatctttctaaaatgaaaaagcacttgacacttcagctagggatttggcaactatga

SEQ ID NO: 40485 - DNA, 292 bp, Homo sapiens
  misc_feature (1)...(292): n = a,t,c or g
tggtgagcccataaaggcaggagtcactggtcttatgagtggtgaagctctgttcttgcctttacaccagtagtcaactttttacttctttccaaacgagttaagaaaatgcgagcttctacacaaccaagaaaggaaaagacttgcctttaaaactgaggcagtatctagtgtgatcacagactaggtcgacgcggccgcgaattccnnnnnnnnnnnnnnnnnnnnnnnnnnnnnnnnnnnnnnnnnnnnnnnnnnnnnnnnnnnnnnnnnnnnnnnnnnnnnnnnnnnn

SEQ ID NO: 40486 - DNA, 287 bp, Homo sapiens
catctacaagttctctggatgtcgcttttctcgacctgcttatccgtatttcaatccttggaactgcctagtccccatgactgtgtgcccaccgagctcctgagtgttctcattcctttacccacttctgcatagtagcccttgtgctgagactcagattctgcacctgagttcatctctactgagaccatctcttcctttctttccccttcttttacttagaatgtctttgtattcatttgctagggcttccatagcaaagcatcatagattgctgatttaaactg

SEQ ID NO: 40487 - DNA, 413 bp, Homo sapiens
  misc_feature (1)...(413): n = a,t,c or g
gcgcnccccctttgacgccgatgtttntaacgcnntatgtcnatgacgaagataccccancagacccacccnaagagatctctcgaggatccgaattcgcggtcncgactacctttgggcaaggacctgagacccttgtgctaagtcaagaggctcaatgggctgcagaagaactagagaaggaccaagcagagccatgatatttccatggaaatgtcagagcacccagagggacttatggaacatcttcaagttgtgggggtggacaatgctctgttgtgatttcctggcacatcatggaaccgactgctggacttaccattattctgaaaaacccatgaactggcaaagggctagaagattctgccgagacaattacacagatttagttgccatacaaaacaaggcggaaa

SEQ ID NO: 40488 - DNA, 154 bp, Homo sapiens
cgggataataaaatctgtgtggctaataaatcactgatttccaaaagcactactctacacctagtatacagtaatttgagaaactattacatttaaacatttaaacctacaggtatctctgactttgataattattctttaaaaaaaaaaaaaa

SEQ ID NO: 40489 - DNA, 288 bp, Homo sapiens
tttttttgtaaagtgaaagaactggaccagaccagttttttttcaagcttttcttttaaactgcagaacattttcttcatataatttgtaaatgctgtcactgaaaacagataaaagcagagctctgctggatgagaagttgggggctccctgcaatgaaaagctttctcctttgagaaactagcttgctgcctctgtttttcagcaagatctataacccagatgtctttttttgctctggatgtcaggaggctcaaaactaaatatgatgcttagttctagaaactg

SEQ ID NO: 40490 - DNA, 290 bp, Homo sapiens
ggagattactagctagtaaatattttatgaatccattgattaagatgggactttaagaaagaatgaattaaaaaaaaacacacacaccctggctttgaaaaatgccaatgaattacttctaagagaaagaaaattatggaaactctgctgtggagaagtttaaaagtatgctttacactatcatttacaggcagtgtatgttggtctcaccagctgccagggctggtagaaaactgctgagctagcagttatgaccaaaccaagcatctctctgtaattagagttagctg

SEQ ID NO: 40491 - DNA, 290 bp, Homo sapiens
ctttagtctgtgttctcatcctccagccctccagcaacaactacaaggtaagcagcatctccttctgtccctttcatctgtgttgcatgtgtgtcaaaccaggtcacaaggtccttgagggtaaaaggctgatctccttttctgacccccctccctcaccctcagtactcaatatggttctagtgcacactaggaattcaaaaaacaatttggtgaattaagatatttgagttgaaaaaaacacttgctctttcttgtgcttccatatatatcaatttataaattgtgct

SEQ ID NO: 40492 - DNA, 286 bp, Homo sapiens
aaagatagggatgcgtatagcagttttggatctcgtagtgattcaagagggaagtctagcttcttcagtgatcgtggaagtggatcaaggggaaggtttgatgatcgaggacggagtgattacgatggcattggcagccgtggtgacagaagtggctttggcaaatttgaacgtggtggaaacagtcgctggtgtgacaaatcagatgaagatgattggtcaaaaccactcccaccaagtgaacgcttggaacaggaactcttttctggaggcaacactgggatta

SEQ ID NO: 40493 - DNA, 278 bp, Homo sapiens
gtttaaagaggaaaagtcaatgactcataatttcactatcctaaaatagcctctcttagcgtcttggggcatctctttgtatttgttttatcgtttggtgagatcctactgcagcttacatttttcactcaacatactgtgtttggtcatgtcattaaagttcctttttattttcctcccccaacccaacccgctttctcctccactcccattaagttctttatgcattgttttaaatagtggagtaatctgccattttctttttttttttttgaaaa

SEQ ID NO: 40494 - DNA, 286 bp, Homo sapiens
gtttcccagcagtgttcttttttgaaacattttattttcaccagaagagaaagtataattgaactttttttctttctataggaaattcatgaaaagcttaatctgatttctagaatacagacatgcgctgctcagtaatgtatgattgttttggatccagttttctaatctatttgtgagaaggcagtattcattctcttgtgtaggtataaaatggatgttaagttagtgatgagaaaagttgtaattttggggagaaagttgttcataataatttacctaattg

SEQ ID NO: 40495 - DNA, 267 bp, Homo sapiens
  misc_feature (1)...(267): n = a,t,c or g
ctatgatcctttatatgtgtgttttgggggagctatgataagttttatggcaaacggttggtattgttaactttttattgtcatcaaaagttcataaaagtcctattaatccccatattcttctactgcccttaactctggtatacaccaaaaagaaatctttactttccttggtttatcattataaaaataaagtattttgctagtatggaaaatataaataaaaaanaannaanagaaaaaanaaaattanaaaaagaaaaaact

SEQ ID NO: 40496 - DNA, 289 bp, Homo sapiens
ccgcgcccggcccgttgtatctattttttttagacgcatcaattcagtgtctctgaagcctttgatcgttaggaaggtcagtacataacctcttgggtgaagctgagttgatctttggagcccaagagagttaattttcaggagaaaaagaattagggcaagctcccctgtgggatgttaagagaaagtccatatgcgcttcttccatctctgcctcttgtttttaaataagtgcttgtgaagttcagtttatagaggttgagtctcagtgcttcctcagccagggtgg

SEQ ID NO: 40497 - DNA, 171 bp, Homo sapiens
tttcacctttttaacttcagcacctaacaactaagcctgccaaatgtattgagtttctactatgttttcagcattggcagtacacaaaacaagatagacaaagtccctgctgttatggagcttacattccaatgagggcaaacagacaacaaacagatttttttttttttt

SEQ ID NO: 40498 - DNA, 305 bp, Homo sapiens
cagaattctgtcattgtacagtgaataattcattgtggatctttaacatacaaggacatttttatgaaaccaaatcaattgtcttattatgtccaacaaaagaaacactaatttttgaatatgtaatgacacagtacatgctcaggtttccttgacttctgacttacctttttacagttacattattcttcttaatggttgtaatcatttagtttactttctagtccttttatgtcacaagcagtcttagagtacaaatgttatatcacatacagaggattgtattgtgtaggaaaaacatggac

SEQ ID NO: 40499 - DNA, 305 bp, Homo sapiens
cacattttgaatgaaagtgatgatgtatgctgccattcacactccagtagatttctgacatggaattaagctcttttttagggagactaatgggcccttaatttaaattgagccatacttgcatttggttctaatctactgagctagccacattagccaaggagttgacctagccctgtcactgacaccagtaaccaggagaacaaagtgtagtgaattgtgtggccaaaagtactggcaccataaatcagagcaagctgtatgtggagaatgaacattgagggtgtgtcttgctggcaacctta

SEQ ID NO: 40500 - DNA, 329 bp, Homo sapiens
ttttatgtttgtttttcctatgaatacggttatctcaaaacacctatacgctttatctgctattcttagaagttaaactaacagtcttaaatatttctggtactgaaaacagcttaaattctgagtgagaagctgaaatctaggattcagcattcttaaagatacttagtattttctgatttttcactgggaactataacagtttggtaactggtgattttgtgagagtgcagagtaaatgaagttgaaccatgcaagaaaaattacatgacaatagaatagaatgttctcatgttctttctgataataaggccggactatttttcacc

SEQ ID NO: 40501 - DNA, 320 bp, Homo sapiens
  misc_feature (1)...(320): n = a,t,c or g
agttaatgtttaaatgcataaattgaagaggtaatttctaaacatatattagatgctgtagtacaaagtctggcaaaaagcgtatgttttcattttgcagtggagattgagnnnnnnnnnnnnnnnnnnnnnnnnnnnnnnnnnnnnnnnnnnnnnnnnnnnnnnnnnnnnnnnnnnnnnnnnnnnnnnnnnnnnnnnnnnnnnnnnnnnnnnnnnnnnnnnnnnnnnnnnnnnnnnnnnnnnnnnnnnnnnnnnnnnnnnnnnnnnnnnnnnnnnnnnnnnnnnnnnnnnnnnnnnnnnnnnnnnnnnnnnnnnnnnnc

SEQ ID NO: 40502 - DNA, 320 bp, Homo sapiens
gaataaactagaatcatttaattcagaaatgatgcctcctaaattacttatataggacagaaaacaatgttgtcattttaaactgattgttttttaagtttaaaaaataacaatgaccatttcctaaagcatgaggtacaatcaatctaaggcattaggtttggaatcttaatgtataaatcttacccacctctcttcctccaaccttactcccacttcccacatgagccctattttcaaaaataaacaagttttttaaatagtcacctggaaaaaagtaaactttgagagtattatggtataattaaacttctttaaaa

SEQ ID NO: 40503 - DNA, 326 bp, Homo sapiens
  misc_feature (1)...(326): n = a,t,c or g
ccctaagtcttacctacgggagaataccgcaaaataatttagggtgtctatatttgttttatttttccataggacttcattattttataagctgtaataaacctaaatatgatacaaaaagttttaaaactaaatacaaatataaccccaagaaagcagaaaagggcagaggtggagagggaggaggaagagcaggggtagagagggaggaggaagggatgttataaaacgacaacgggcagtnnnnnnnnnnnnnnnnnnnnnnnnnnnnnnnnnnnnnnnnnnnnnnnnnnnnnnnnnnnnnnnnnnnnnnnnnnnnnnnnnnn

SEQ ID NO: 40504 - DNA, 325 bp, Homo sapiens
  misc_feature (1)...(325): n = a,t,c or g
cgcccnnnnnnnnnnnnnnnnnnnnnnnnnnnnnnnnnnnnnnnnnnnnnnnnnnnnnnnnnnnnaaataaaaaattataaaaatattttggtcacatcaacacttaaaaatctttttagaaatacttaatattttactaaaagtgagacagcatattagggatacgataatgtgtaatttctcttgaggttcctgttcctccttcaaagccttctctgatcatatccagatctctgggtcccatccacacttcttgtcagttctggagccacatttccagctgcctactggacggtccaacttgatggggttcatttaaaactc

SEQ ID NO: 40505 - DNA, 318 bp, Homo sapiens
tacaattccatgtattatttttgcctttgattgctctcccagcaccctctttcccattacaatcccaagaggcaagcagtgagaagaggcatccagtgagataaaacaggggaacatgatggctcagcaatgcactcatacagaaccatttccctgctgctctgcgcttacagaattttatttgcgtagaagaactgcaggatctctggatgatagtggctcagctgctggtagagcttagtgttcctttgatcttcttcactctggaagctgtattcctcctttagtttcagatatggagaacaggcttgaaatgtt

SEQ ID NO: 40506 - DNA, 325 bp, Homo sapiens
taataaagcccagaatgccatcgccggggaaggaatgggaatcagtcatgagctaatcaccctggagatcagctcccgagatgtcccggatctgactctaatagaccttcctggcataaccagagtggctgtgggcaatcagcctgctgacattgggtataagatcaagacactcatcaagaagtacatccagaggcaggagacaatcagcctggtggtggtccccagtaatgtggacatcgccaccacagaggctctcagcatggcccaggaggtggaccccgagggagacaggaccatcggaatcttgacgaagcctgatctg

SEQ ID NO: 40507 - DNA, 326 bp, Homo sapiens
agcagtttgtttggtccttttcaatttgcttcttatctgagtgccgtttgaggcagccttttgtgtcttcctttctcctgacacttccttgattccatgttttttcaccctttggaaaaagctagcgcagagttctttaaagtcctcatcagactcatccatcatctgaccagttttaaggctttcaggctggtcttcagaggagcgagggtcaatcccaggacaggcagacagatgagaaagtgaacccaagtagaagcctagctgagcctcattcacactcagtttcattagggttcttctctacttctccattagatacttgg

SEQ ID NO: 40508 - DNA, 312 bp, Homo sapiens
  misc_feature (1)...(312): n = a,t,c or g
gagagagtaaagtaaatgctgagcacctctgtggaaacttaggtgggtatgtagatagaatgttttaggaatgtgtgaggtgctatgatctcttgcttgcaggaattctcagcaaggcatcaaaaatttaatctttatattgataggacatattttgaataccttctgactttttcctttgcttttatttgaatttctagtgtggngctagtctgctgttttagggattctttanaaacnnnctaaagangggctanttttagatagattcgnaccggtttcanatgctnaccnagaaatntgccatcttat

SEQ ID NO: 40509 - DNA, 298 bp, Homo sapiens
  misc_feature (1)...(298): n = a,t,c or g
gcnnnnnnnnnnnnnnnnnnnnnnnnnnnnnnnnnnnnnnnnnnnnnnnnnnnnnnnnnnnnnnnnnnnnnnnnnnnnnnngaaagtacatgaaacacagttttcattacactgggcacagacagtaaagaacaatgaagttgcctcaacttccttcctcaagactttccaggctgcagggtaaggaagagaaaggcaagtgaaacctggtagactctctgagttaaggaggcagagctaagagtacaggtagaccaaagtgttagaggacagcgtaatgtggagagctgtactgaaa

SEQ ID NO: 40510 - DNA, 302 bp, Homo sapiens
ttttttcaagagtgaaagacacctatttaatggcaaaatagtgatggaaagcagcagaagtaaaaccctcatttttcctataacagacaaatcgcttgaaaatccagtttaataaaatcccatgatccctctgaacaccagcttcctgatcctcatctctaccgatggcttcattcatattccttttccatctcatttcctggttttttcgtttctcctatttctccaaattgtgtttttcccagttcttctggctctcttctgcccacttctgaaagtttctttagttcttctggttcctg

SEQ ID NO: 40511 - DNA, 302 bp, Homo sapiens
atttttagcagccaaaggcacagtggaagtttagttccaccagcaggcattgggagcacacaagagtcacaagtgccaatgccaaatgtgatcatctaccagcagctaattttgaagatctgtctaatttccttgcaattgtaggcctcttaaagaggctcagatgcatttgctcttgaatcctattgtgacttgtgaggtaggaggcgacctataatacagtttgcctctcacaagtgtgaggactaagaagtgatgacagaagacaggagtcccaggtctcacgctgagatggggaggaa

SEQ ID NO: 40512 - DNA, 300 bp, Homo sapiens
ctttcttcttttaggactatttcagacccagcactaattcatggaagatcagctttcctctcagtttagagagatggacattttcacacactggagggcttcaatgatcttctgtatcatgaatatgtcagagatctgtgaagtaccagtgatgatcttctttcttaaactaattcctttttttgtatgtcattacacaggtacatttttaaaatgtccattacttgagtttaactagaatctagcctgagtaaagttttctggtcttttcccaggaataagggacgcagtctcaaaggc

SEQ ID NO: 40513 - DNA, 297 bp, Homo sapiens
gattttcttctgattttgccttctctgtttcaggcagtattccagcttcctgacctggacttggggaaagctgctgcttttctaaggggtcttgctgttcctgttgctgactttttgctttttctgaccccaagatctcatcctgaatgttatgggtagctggagcaggaaaaagccaagctgacccagcactgctgccattggcagctgtgttattatttataaaagcagcagggctgggggtggcattttggtgatggtgtggaggctgcagatgtggatggaatctgactggaa

SEQ ID NO: 40514 - DNA, 292 bp, Homo sapiens
ccaggaggctgggatcctatctggctgtgagagtcagagcaggcttcctagggtggggcttcatgaaattctacttcagtatgtctggggtagggcccaagactgcatttcttacaagctcccaagtgatgcccaggtagccagtcgggggactccacatgaagagcacgccaaagttctgttgtggctatgcaaatgtgtgaccacagggaaggatcatgcaggtttggggtctaactgtatcctggtcagtgtgtgaaaggcacaagtaggagagcaaggaaagaaagcc

SEQ ID NO: 40515 - DNA, 293 bp, Homo sapiens
tatgcagcaaaagttggagtgaatatcctgacatgtgacaatgaaattgaattgaagaaaattgcacgtaatcacccaaatgccaaggtcttactacatattgcaacagaagataatattggaggtgaagagggtaacatgaagtttggcactaccctgaagaactgtaggcatctcttggaatgtgctaaggaacttgatgtccaaataattggggttaaatttcatgtttcgagtgcttgcaaagaatctcaagtatatgtacatgctctatctgatgctcgatgtgtgtt

SEQ ID NO: 40516 - DNA, 293 bp, Homo sapiens
  misc_feature (1)...(293): n = a,t,c or g
nnnnnnnnnnnnnnnnnnnnnnnnnnnnnnnnnnnnnnnnnnnnnnnnnnnnnnnnnnnnnnnnnnnnnnnnnnnnnnnnnnnnnnnnnnnnnnnnnnnnnnnnnnnnnnnnnnnnnnnnnnnnnnnnnnnnnnnnnnnnnnnnnnnnnnnnnnnnnnnnnnnnnnnnnnnnnnnnnnnnnnnnnnnnnnnnnnnnnnnnagaatccctgacatcaaggaaacctcagtaaggtgtagtttctcttattattgatagctttcttttctgctccagggaagaataggtggtctt

SEQ ID NO: 40517 - DNA, 291 bp, Homo sapiens
cttaagcaaaataggaaatttattaaaagggtacaaagggcagttagacctcatcagagactggaaccgaactaaaaagccatcagaatccaaggttgctaccttcccattctctttgtttccagggttcatggtatcctgtctttgtttccagtttggggctattatgaacaatattgctatgaatattcttgtacatgtctcctggtacatggatttacaagtttcttgagaatatatagcttgaatttcaacttctggggcatttactaaatagtgccaaactgtttt

SEQ ID NO: 40518 - DNA, 297 bp, Homo sapiens
  misc_feature (1)...(297): n = a,t,c or g
nnnnnnnnnnnnnnnnnnnnnnnnnnnnnnnnnnnnnnnnnnnnnnnnnnnnnnnnnnnnnnnnnnnnnnnnnnnnnnnnnnnnnnnnnnnnnnnnnnnnnnnnnnnnnnnnnnnnnnnnnnnnnnaccagtattttaacttaggtttttcttaactcctaattgtgtgcttcagcatcacaaatatgacctctgttctttttgtcaatttataaaaggtggccttactttttccttgggtggctcttgctcttttccatctttatttgctatttatcctacttctttaacaaatag

SEQ ID NO: 40519 - DNA, 296 bp, Homo sapiens
  misc_feature (1)...(296): n = a,t,c or g
ggatgttctggacagacggacgggaagagcaaaagtgccagtgtgcccagagacagcaaggaggtcagtgtgcctggaaatggacaaggccagggagcagtgagcacaggagggcgctgtggctgcagtgggaacttcgtcttttactccaaatgagccaagctgatgcgggagggttttgagtagaggactgcagtgggaacttcgtcttttactccaaatgagccaagctgatgcgggtcgacgcggccgcgaattccnnnnnnnnnnnnnnnnnnnnnnnnnnnnnnnnnnng

SEQ ID NO: 40520 - DNA, 291 bp, Homo sapiens
ctttcttatagactctttgacctggcctcggtatcctcacatttaaaatgaggagttggcttatatgattggctggcatatttggctcatctcgaagactgtctattatagaagggcaaatggtagtgcctcattgcaggtgtggagcctttgacttgaggtatgcgtgcaagcttaactaaataaagcagttatctggcatttggagggacaaactgccattcaacctgccattccgctgactaagttaaggactgagaatgagaagctgtgccacagctcgtctgtttt

SEQ ID NO: 40521 - DNA, 292 bp, Homo sapiens
  misc_feature (1)...(292): n = a,t,c or g
cggctcaccacaacctccccctgccaggttcnnnnnnnnnnnnnnnnnnnnnnnnnnnnnnnnnnnnnnnnnnnnnnnnnnnnnnnnnnnnnnnnnnnnnnnnnnnnnnnnnnnnnnnnnnnnnnnnnnnnnnnnnnnnnnnnnnnnnnnnnnnnnnnnnnnnnnnnnnnnnnnnnnnnnnnnnnnnnnnnnnnnnnnnnnnnnnnnnnnnnnnnnnnnnnnnnnnnnnnnnnnnnnnnnnncatgagggtttcccaaagcactagcaccagcaatgaaacagatttttaat

SEQ ID NO: 40522 - DNA, 292 bp, Homo sapiens
cggggacagtctgagaaggggaaggactgactgaatcctccaaggaattagaacgtggtcattggtgaatgtgcgagggagtgggtagggaaagatgcattgaccttgttcctctggaggtttcccctgggggctggggcttctttccaggaatcttgaggtcctgggtgaggagtcaagatgccagtggttgggaggacactagagcatggggcacctgggtcccctggaaggtatggcacagggaagcttgcaggaggggctggggtgtgggagaccatgcggccgggac

SEQ ID NO: 40523 - DNA, 301 bp, Homo sapiens
ctgcaaaggtacacacctaatagatatgatacacacccatcagaaacaatggcacacttagtttagaagggaaaagtgggcatacccttgtgggtgtgtcatgatcttagagggccagaggataagtagtttgaaagtgatctccaaggtgattttgaagacacaattctcccatcccactctcgattactagccactgattttgtctcaggaggcattagccgcctgtcaaactgctgggacattatttttctcttagtcaataaaagtagtttgacatccatcacatatagcatttgct

SEQ ID NO: 40524 - DNA, 300 bp, Homo sapiens
  misc_feature (1)...(300): n = a,t,c or g
ttccctttctgctgcaagctctctggaggcagatactgttgagtccctggcctgcctatgagaacggctcatgatctctatttcttctgcttaatgaccatctcgaagtaacaagtttagcctaaaataaacttgctaagttagcaaaggaagtccttagcagccaccatttctcgattcctccatcacctcccctgcccctcaactccctcatttctcccaagatatgggcnnnnnnnnnnnnnnnnnnnnnnnnnnnnnnnnnnnnnnnnnnnnnnnnnnnnnnnnnnnnnnnnnnnn

SEQ ID NO: 40525 - DNA, 291 bp, Homo sapiens
tgataatatcagagttttatattggagctcaaacacccagcaagaagccagagaggtagtcaggctgggagatgtgtgcctgaaggtctggcacgtggcatcttggttttcaagttaaactttgtctgtccaacttgcctgcttctatggaaagccaagacatggaggggcatctaccatcacggccccctccctgagagagagatgccgacatttaccccttaaaagagtagatactcctttcgagtatctgggcaatacacccgctcctctcctcaccatgggtggttg

SEQ ID NO: 40526 - DNA, 301 bp, Homo sapiens
  misc_feature (1)...(301): n = a,t,c or g
gttgtctacaagaaagctactttaactataaagacacatacaccttaaaagtaaatggttagcgaaagatataacacatgttataggctgaattgtgttcccctaaaatttatannnnnnnnnnnnnnnnnnnnnnnnnnnnnnnnnnnnnnnnnnnnnttacaggagnnnnnnnnnnnnnnnnnnnnnnnnnnnnnnnnnnnnnnnnnnnnnnnnnnnnnnnnnnnnnnnnnnnnnnnnnnnnnnnnnnnnnnnnnnnnnncagagaccatgtgaagataaagggagaagatgaccatct

SEQ ID NO: 40527 - DNA, 173 bp, Homo sapiens
cgaacaccagcacagttggtgaagtatcagtttcactatgaccttttctggcttatagcctttttttttgtggttgcagaaaaaccagtttacttctaccttaaaaaagcagggcaactcctccggctatcacagcatctgtgtgccaagctataattctttttttttttttt

SEQ ID NO: 40528 - DNA, 301 bp, Homo sapiens
  misc_feature (1)...(301): n = a,t,c or g
gtttctgtctgggtaaccatgtgtctacctaaaacttgggagcttctattactagaagaaagacggggacaatggtggataattaacagtttcatccactcaggaatatagacttaaggatcagagaatactgtttaagcctggtatctggctggataaaatccatgaatagagaagttagcctcacagttaaagagaggcatagaaacataatgggtggtcgacgcggccgcgaattccnnnnnnnnnnnnnnnnnnnnnnnnnnnnnnnnnnnnnnnnnnnnnnnnnnnnnnnnnnnnn

SEQ ID NO: 40529 - DNA, 293 bp, Homo sapiens
  misc_feature (1)...(293): n = a,t,c or g
nnnnnnnnnnnnnnnnnnnnnnnnnnnnnnnnnnnnnnnnnnnnnnnnnnnnattctctcattttagtcagacaagttttcttttctgttagatctctccccaataattgcaaaaaccaaccaaataaataagtatgggagagaggtggttatttatattatgaaagcattcttcagtttaattcattgcagaatctaagatcctttcctccacagtgttaaaatccatagccctctcaattactcttccacgctttgaggaaaaggaagacagggaggagagatctccaatg

SEQ ID NO: 40530 - DNA, 301 bp, Homo sapiens
cttcattgtgtttataacttttctgtcttattttttatttgtttagctgtgaagacaagtaaatctacattgggtcaaacagattttccagctcatagtcggaagccggcaccctcaaatgagcccgaatatctatgtaaatggatgggactcccctattcagagtgtagctgggaagatgaagccctcattggaaagaaattccagaattgcattgacagcttccacagtaggaacaactcaaaaaccatcccaacaagagaatgcaaggccctgaagcagagaccacgatttgtagctt

SEQ ID NO: 40531 - DNA, 294 bp, Homo sapiens
tgcaaatatatttgctctgttattttaagatgaaggagggaagaaagagagagaagatgtactttaaagcagagcaatgctttctggcttgtttggttggttataaactaaatagaggctgacaggatggaaaccttgacaccaccttcacttccaacagggtagtggggagctgccagggagcacagttccaagacaaataatagctgtagtcaggcagaccttgtttttcttcaactaagatctttttccaaagaagctctaaacactatgaacctgccagggttcgagctg

SEQ ID NO: 40532 - DNA, 284 bp, Homo sapiens
gcctcaaatgagagagatgctatatcgtggtaccaaaagaagattggagcctacgatcagcagatatgggaaaagtcaatcgaacagactcagattaagaagaccgggttgaagcttgctctctggagaggctgagccagagaagttctggattctggaagaccagaaacaaatcagagtctggtgagatgctgcactaataatggggattaagtgaaagtctggtcgtcagatttataatctgcaaacagaagactggaatttcttttcgtcaaaactgagta

SEQ ID NO: 40533 - DNA, 291 bp, Homo sapiens
tttacatgtatttacacatttaataagatgtgtactgtttttgtatctttattttacagatgagcctgttacataataggtgtgtatgtccaaggcaaagtaaaatagatctgttacctccctttgttagatattacgttcctggccctactgcctgagaacacacatgctttgggagtgagggaaggcacttacatcagtcatgctaattaacaccaaattaatgcattttttagctttgagtaaactgaacttttgtctttgcatatatggtgttgcatttcttatatg

SEQ ID NO: 40534 - DNA, 290 bp, Homo sapiens
  misc_feature (1)...(290): n = a,t,c or g
ggaatctttatgaagatatggaaaattatttagaacaaatatgaagtgggatcactcaaaaaagctctgcagcttgggattcagcccatgacagtcacaccaagtattggtgtggcataatgtttattgaccaattgattaaaaggtagannnnnnnnnnnnnnnnnnnnnnnnnnnnnnnnnnnnnnnnnnnnnnnnnnnnnnnnnnnnnnnnnnnnnnnnnnnnnnnnnnnnnnnnnnnnnnnnnnnnnnnnnnnnnnnnnnnnnnnnnnnnnnnnnnnnnnnnnnnn

SEQ ID NO: 40535 - DNA, 291 bp, Homo sapiens
  misc_feature (1)...(291): n = a,t,c or g
nnnnnnnnnnnnnnnnnnnnnnnnnnnnnnnnnnnnnnnnnnnnnnnnnnnnnnnnnnnnnnntgnnnnnnnnnnnnnnnnnnnnnnnnnnnnnnnnnnnnnnnnaaatgactannnnnnnnnnnnnnnnnnnnnnnnnnnnnnnnnnnnnngtttaactgtagagtgtattctctctatttttttaaaaagttaattgtaaaacagtctnnnnnnnnnnnnnnnnnnnnnnnnnnnnnnnnnnnnnnnnnnnnnnnnctctcctgaagacctcccagtgggataagatgt

SEQ ID NO: 40536 - DNA, 300 bp, Homo sapiens
  misc_feature (1)...(300): n = a,t,c or g
aaactaggccaagtaatagccctgcagcgctctctaagtgttcaagtagaaggaagactnnnnnnnnnnnnnnnnnnnnnnnnnnnnnnnnnnnnnnnnnnnnnnnnnnnnnnnnnnnnnnnnnnnnnnnnnnnnnnnnnnnnnnnnnnnnnnnnnnnnnnnncaaagttgtgaatgcnnnnnnnnnnnnnnnnnnnnnnnnnnnnnnnnnnnnnnnnnntatgaaggcatannnnnnnnnnnnnnnnnnnnnnnnnnnnnnnnnnnnnnnnnnnnnnnnnnnnnnnnnnnnnnnnnnnn

SEQ ID NO: 40537 - DNA, 295 bp, Homo sapiens
ggaaaggccatgtacattgacactgagggtacctttaggccagaacggctgctggcagtggctgagaggtatggtctctctggcagtgatgtcctggataatgtagcatatgctcgagcgttcaacacagaccaccagacccagctcctttatcaagcatcagccatgatggtagaatctaggtatgcactgcttattgtagacagtgccaccgccctttacagaacagactactcgggtcgaggtgagctttcagccaggcagatgcacttggccaggtttctgcggatgcttc

SEQ ID NO: 40538 - DNA, 299 bp, Homo sapiens
  misc_feature (1)...(299): n = a,t,c or g
cgactacaaaagtgggttagaaactgaagtaatctaacctcatcaagcaagtaaagcttcactttactgcactttgcagatgctgttttaaaaaaaannnnnnnnnnnnnnnnnnnnnnnnnnnnnnnnnnnnnnnnnnnnnnnnnnnnnnnnnnnnnnnnnnnnnnnnnnnnnnnnnnnnnnnnnnnnnnnnnnnnnnnnnnnnnnnnnnnnnnnnnnnnnnnnnnnnnnnnnnnnnnnnnnnnnnnnnnnnnnnnnnnnncactgccattgtaatttctggaggtaccacgaaccgc

SEQ ID NO: 40539 - DNA, 300 bp, Homo sapiens
  misc_feature (1)...(300): n = a,t,c or g
ccgggactacaggcatgagccatcacacacggccaagataaattcttaaaaaagaaagaaaaaaaaaaagagagaaaaaagaaaaaagataaattnttaaatggaattgctgaacaaaagngtatcatgtacaatttgtaaggccttgaataaatgctgccaaagtagcctntanaaagattttaactgcaatgtacattccttntagttatataaggactcattttaggcnttttaacaaattcaaaaatacnnaatattctgatacctcagcaatagcccactcatttacagaacaat

SEQ ID NO: 40540 - DNA, 316 bp, Homo sapiens
ccgagatcctagtctcctgtcggctctgaggaggatggatccttctgcggatacatgggacctcttctcacctttaatatcattatggataaacaggttttacatttatttgggctttgctgttagcattagcctttggatttgtgtccagattgtcatcaagacgcagggcaagaacttacaggaaaaatctgttccaaaagcagctcaggatttgatgacaaatggttatgtctcccttcaagagaaagacatctttgtgtctggagtgaagattttttatggttctcagactggaacagcgaagggattcgca

SEQ ID NO: 40541 - DNA, 311 bp, Homo sapiens
cactgcacgtggcacggcctgtgatccaaaatgcgtgcaggcatcgtcgttaacttttcttcagtcctctgaggaagtagaataccatttcgatttgttttaaactgtgagctcgtctctcttcaggaaggaaattgatcaaagaagcaaacactcctggatattttgtctgcttgattttcagcaatttactcctaattaattattctgactaggaaaaaaatggtacctctccaggatgccagtgtttagaattgacatttcaaatagctggttggacaaattggagaaattttctgatttctgtcatt

SEQ ID NO: 40542 - DNA, 320 bp, Homo sapiens
ctgtctcatagagctgttgtgaattttaaatgagccgatagtcaagcagctaatgagcagtagagcttgaatatgacatgaggtttccctgaatcaagcctcttgctttatgtacttgtactcactttttaggagttatgttttgtgggtgctctaaacttagttatacagtccttccttacagtctgagtgagaggagctgatcccttcttgtgtgggagttgtagtagtgtctgcaagacagccacgagcctcctggcctgctttgtttttttggaaaattcactctcttccctccttgataggatgggtcacctgtg

SEQ ID NO: 40543 - DNA, 324 bp, Homo sapiens
agcacagagggcatggggagggcatcctggataagactgaagttgaaagtaattgcaggacatgttagccaggctagtaggtgtatgtggaatgggctttccaggcagtgagaactgtatgttcagggggctggaggagagagagaaattgacagaaaaagaaagagacagacagacactggtactttcagggaactccatgcagctgtttttcagctgtcatgcccccatcctcaggcctgtcacctggcaggggcagaagccaggacagctcctgagatgcccatactggtaaatgtaacccaatccctaaactgttagctc

SEQ ID NO: 40544 - DNA, 325 bp, Homo sapiens
cttactgtaaacattagtggaaaaacgagttacatacaccctctataatcaccgaatggtgtccataaaaaaggcagatttaatcattcttgagtaaagaaggaagttaaaaataaattttcaaaccttatcatatttactttaccaacaatcttgattacgtggcaactttgttgctataattttatgcagcagataaaggtagacgttcctccccaaagtttttagtatatccttctaaaaagttttcctgagaatttttagtttggcctctcaagtttccttattttaccttttcttaaattacctccctccttccttagtg

SEQ ID NO: 40545 - DNA, 305 bp, Homo sapiens
gccaatgaaaaatgtattaagtattcacgaagtggcaatatgccaacccttgcttcctacacgaccttgtctcaggagcgctgtctgataaccaagcttctacataacccactttacacggtgatccccacaacagagaaaatggctacaaagtatctgacaggatgtaaagcaagagtctgggtgaatcagcagtcaggcaggcgaggaacaagggtgctggggaggtgtttctaagcaaccttttgtgctgttgctggaactggcaccaggcttatgaactctctgtgctgggtcagccctgg

SEQ ID NO: 40546 - DNA, 292 bp, Homo sapiens
ctcactctgatgtatcttcagaacagcaacatttgaagggccagactggcaccaacggtggcaatgtgaaattgtataccacagaccaaagcacctttgacattttgcaggatttggagttttcttctgggtccccaggtaaagagacgaatgagagtccttggagatcagacctgttgatagatgaaaactgtttgctttctcctctggcgggagaagacgattcattccttttggaaggaaactcgaatgaggactgcaagcctctcattttaccggacactaaacccaa

SEQ ID NO: 40547 - DNA, 295 bp, Homo sapiens
  misc_feature (1)...(295): n = a,t,c or g
atctagtgttagaaagctcactagggcaactatannnnnnnnnnnnnnnnnnnnnnnnnnnnnnnnnnnnnnnnnnnnnnnnnnnnnnnnnnnnnnnnnnnnnnnnnnnnnnnnnnnnnnnnnnnnnnnncccgttaccctgatttgatcattatgaattgtatgcttgtatcaaaatatcccatgcaccccaaaagtgagttttaaatatgctgtatttttaaagtcgacgcggccgcgaattccnnnnnnnnnnnnnnnnnnnnnnnnnnnnnnnnnnnnnnnnnnnnnnnnn

SEQ ID NO: 40548 - DNA, 330 bp, Homo sapiens
aggatccaaacttctgttctggaagcagggactgcctgttaagaaaaacactgggagacgcccagtgaacagctgtatgtgatcccgaagcacagggaaggggtctggggctatccatgtggaaggctgcagcaaatgaatgggaatgagagccaaggcgggggatgagatcacttgttatcaggtagataaaggagacacaaaagccagccaggctatggcaagacttaaagttgtggcaaagcggagggaaggcagggaggatggagggtggggatatgggaggaaaactgtggagaaatgggatcaaaagtctagagaagaaaatgt

SEQ ID NO: 40549 - DNA, 217 bp, Homo sapiens
  misc_feature (1)...(217): n = a,t,c or g
nnnnnnnnnnnnnnnnnnnnnnnnnnnnnnnnnnnnnnnnnnnnnnnnnnnnnnnnnnnnnnnnnnnnnnnnnnnnnnacctggagaaagcagaggcaagtgagagatgtggggtgggagggaggtgccacacactttttttttttganacaaantctcgctntgcactcnagcctgggcganatanancaanatgctgnctcaaaaaaaaaaaaaa

SEQ ID NO: 40550 - DNA, 307 bp, Homo sapiens
attacttcagccctgcattttaagtatagtaggtacttctgtccctgttctgtaggggaaactgaggctcagatgttaaaatgagctggctaaggtcacttaacatctgatgtaccacttattttttaattagatttttcttcttcctggtaattttaataattttacccacttgagttgtaatatatttgattatacaccataggttgtttcttctatttactggctaaaaaaatgtaaatttataaaaaactctcactatcttgcccaggctggcctccagtgcttgggcccttgcattttggtg

SEQ ID NO: 40551 - DNA, 299 bp, Homo sapiens
  misc_feature (1)...(299): n = a,t,c or g
catgtccagcagctagttttttagaattctggttatcatcggggaaatcaaaaggctgtgcatgggagttagagatggtgcttcccgcctgccccattcgattttgttctgcactgtaattagcccagttttgctcacttgcttgcttgttgtaattgcggcaagaagaattgtttctgtcgccagtaaccagcttgtacccaggaggagacataggcgagaggggagcggttggtcgacgcggccgcgaattccnnnnnnnnnnnnnnnnnnnnnnnnnnnnnnnnnnnnnnnnnnnn

SEQ ID NO: 40552 - DNA, 307 bp, Homo sapiens
  misc_feature (1)...(307): n = a,t,c or g
ctttagcaccaggcatagatgattctagcttatctaagctaggatttgcttgtccctcttataacagcaccttggacagaatctaagaatactcccacactggtcacaggccatcctgcaagtggtcctgttaggccccatctcactgcactagaggtgtaagagaggactcagacaacattcctgactctccctaaagtcctccacaggacccactctcagctttctcagcctctccaagcttcccagtcttactttgngattntcattaanaaatgtagtggtaggccatgtgcagtggttcatg

SEQ ID NO: 40553 - DNA, 298 bp, Homo sapiens
cgcgagccccgcggctgagaccccgcagcctggaggagggctgtccggggctttgggttgcacgttttcaaaaaatacctaatggtgaaaatgagacaatgattcctgtattgacatcaaaaaaagcaagtgaattaccagtcagtgaagttgcaagcattctccaagctgatcttcagaatggtctaaacaaatgtgaagttagtcataggcgagcctttcatggctggaatgagtttgatattagtgaagatgagccactgtggaagaagtatatttctcagtttaaaaatcccct

SEQ ID NO: 40554 - DNA, 304 bp, Homo sapiens
  misc_feature (1)...(304): n = a,t,c or g
gggaggatcaccttgaacctggggtcggggnnnnnnnnnnnnnnnnnnnnnnnnnnnnnnnnnnnnnnnnnnnnnnnnnnnnnnnnnnnnnnnnnnnnnnnnnnnnnnnnnnnnnnnggcctgccgtggtggctcacgcctgtccgttttttgctgattttctaattgctctatccattattgaaaatgtggtattgaagtctccagctattattattgaatttatctattttctcccatcagtttggtcagttttcacttcatctattttgagcctctgttgtaaggtacacatatgtttgta

SEQ ID NO: 40555 - DNA, 299 bp, Homo sapiens
atgaagctgtgtgaaccaaatcctctttaggattagagaagggtacatttccttatgggaaggtgagagactgaggagccctcattctcccttactgtgactgcattgtggagcaaacctcagttcaggtacctgcttaggccctatataatttcttgatgtgcccattgctggtatacaagatcatacttgtttttgctgccatgtttttcttctcacagggaagccaagttgagatcagatcccatgagggtgaacactgtgtgggaacagtacatcttcttagtcattttctgtat

SEQ ID NO: 40556 - DNA, 295 bp, Homo sapiens
ggatagcactgaagacatggcggtcttctgtgttcttacaaagaggaggcagataggacctcaacgatgtgctttgcagaaggtggttgatataatggtcaagttcgtcttggctttcttgattacaggtgtcttccagatatcctaccaaatctgaatcactatcaggactgaaagtcccttcgctggcattgtcaaacaacttctcatcacagtctggatccagaaaagtcagatatgtgtagaacgatgtggtgagaaattccgaaaggttccctaattttactctgccaag

SEQ ID NO: 40557 - DNA, 295 bp, Homo sapiens
tgctgctggtgccctggactgtaaacgctgggtggctctgcccactggccgggacgtcccctccctgtcagttctggcctccttggaaagtcacctccatgtgactgtgctgtgacctgaggccacgtgagtcctgccggtctcgaagtgtcggcttgggggcgtgaggctgccttggctgctggcctcgagatgcccagtggctgatagaggctttttcctatgtgttcccgcccatcagtctcctgagtgccgtgtgcttgggcgctgactctctgggttctcttcactgctg

SEQ ID NO: 40558 - DNA, 166 bp, Homo sapiens
tgtgtctcacctttgctggggttgtgctcttgggcaccaggtaacaaaagccctcaaacttgaatagcaagagacctgctctctaaaattatacttattgtgagcaaggaataggaaacatcatcaaattattgacccctatactgctttcctttttttttttttt

SEQ ID NO: 40559 - DNA, 288 bp, Homo sapiens
atttctctaaatcaggggttgttaaacattttgctctgagaactcctttatagtcttaaaaattgttcaggatcccaaagagcttttgctttatgtaggttatatatatttccaaataaccaaaaagatttaagaagactaacagtaacattgttttacattcggcagtgccctttattgaatagcttaatagaagatagccggattttcctatcaaattcttcattcagtctgttgtgatatggtgcttagcttctggaaaattgcactggcaatttttattggata

SEQ ID NO: 40560 - DNA, 294 bp, Homo sapiens
tttcctcagactgtttcctcatccaccgaacagagatcatgatagtatctcccttacaggattactgtgcatgacacagcactgcctgtgttactatcagcagcagcagaaccattactgcagcacctctgagcacagcatccacaccccagtcatgccagagtcaatcccccatagagggcttttccaggagccccaccggtgacaacagcctgcaatcatttgccaacacagggtcaggtggccactcctatgtgtgcgtgaaactgagaagcaggcttgtgttagaaagga

SEQ ID NO: 40561 - DNA, 147 bp, Homo sapiens
atgaataaaaacatcccagaagtatttctggtagaaaggtgagtatgaccatacaactcttcttttacatgtaagtatcttgagagttcagatggtaactggtctctaattcttaccttatcagccattgtagtttttttttttttt

SEQ ID NO: 40562 - DNA, 221 bp, Homo sapiens
gttaaaaaggtcagtgtcgaaacttacctcatttgtttattttcagatctaataagcgttactctgagcacaggaatggaagccttctcttaatattttatgtcatacatgtgaaataggataagtttcataactttcactttgtttctgtgtattatgtagcctttatagcggttactcacttgactttttcttttttcttctttctttttttttttttt

SEQ ID NO: 40563 - DNA, 293 bp, Homo sapiens
gtgggaattagcatgagtttggtggcattggatgcacgagagtcagcaatacacggatgagcatgtccttgaagctgaagtctagttgagaagtgaagatgggttcatggcctagaggtttgcatgaggtagcaatgcaggttagttggaattggagagattgaagggtagcatacatagaaggttatggtcagaaagcagaaattgagttagtaactttgagaagagttcatgtccagggtttcgctgtggactaagggaaagactgagtggtcctcagggtcggatggctg

SEQ ID NO: 40564 - DNA, 293 bp, Homo sapiens
gcaagctgtgacaccaggattgaacctaagattaggcacaagcttgccagctagggaaaagacaggttgaaacaactacagctgcaaccaaagatgggaatcacactaacattttaaagtcagaattggtccattaaatactcactttcctaaactttaacatgatgatacaacagatcccaatccttctggctgccataaagtaaatgtggtgctgttctctaaatggctgttatatagtgttaggtttgaatgatttaatacttgggaggagacagaaaaagctctaggtt

SEQ ID NO: 40565 - DNA, 297 bp, Homo sapiens
tatccatctctgatgctctcagttaaacagtaacccaactcagtcttttccattatatttcattaaatactagttctgttgtgaacaaaaatgactcgtctctatatctcaattttctctcaattcaattaatatttttgcttctgtcattgcactaagtgctggggctataatgaagaataagctctaataaccagtctttgaggagtttctaatcttcaggaagaatcagtcacataagaacacagctgtgacaaacagcgatagaggtatgcagagagacaattccataataat

SEQ ID NO: 40566 - DNA, 313 bp, Homo sapiens
aaagcatcccaagcaaggaggtataatcatttgggcaatctgacttggaaagagggtgaacttccctccctccaccgtcagcaatatcaaatcatacacactcgtgcactcacacccatgcagacatgcacagaactgggctcaaacacacattctccaggtaaacaatagttatttgtgttgtgaaccacccctagaaagccttttgctcttacgttctccaaatactctctctgattacacacattttaatttttaaaaaattttgccacatatatctagggcacccatttatatgcatttctgaaagaat

SEQ ID NO: 40567 - DNA, 304 bp, Homo sapiens
  misc_feature (1)...(304): n = a,t,c or g
caggagtggattgtcatctagagtattttcttaaaaacacagcagccctgcctgaggtttcttcaggaataacggtaatactggcagaatcggcgacaaatggaactctatccacaagaccactgcagaaattcgggtctggtttctatcacactataaagaacagcnnnnnnnnnnnnnnnnnnnnnnnnnnnnnnnnnnnnnnnnnnnnnnnnnnnnnnnnnnnnnnnnnnnnnnnnnnnnnnnnnnnnnnnnnnnnnnnnnnnnnnnnnnnnnnnnnnnnnnnnnnnnnnnnnnnnnnnag

SEQ ID NO: 40568 - DNA, 311 bp, Homo sapiens
  misc_feature (1)...(311): n = a,t,c or g
ggaaaatgatgaggtggaaaagagtgtgacactggaaatcagacagcagaatatagtcccaaaatttctactggtgtgtgatccaagctgttacacttgtcttgaatttatacaagattaaaaggttttatagttgcagatgatgggtctgccctgtatttgtgtggaaatgttatttttaaaatccannnnnnnnnnnnnnnnnnnnnnnnnnnnnnnnnnnnnnnnnnnnnnnnnnnnnnnnnnnnnnnnnnnnnnnnnnnnnnnnnnnnnnnnnnnnnnnnnnnnnnnnnnnnnnnnnnnnnnnnnnn

SEQ ID NO: 40569 - DNA, 303 bp, Homo sapiens
catcaactcatagtttcaatgctaacctcctaattgtttgcctcactttctcccttgtcagattctatgttgttatgtttctttaccacctacaactattaaatgtcttcccctcacctttagaataaaatccaaaatcttaatcctggaataaggcatcttcctaactctccagacttatgtcctgctgcttcttcctggtgattttgggcttcttttaataccttaagtgatcactcttttgtccttttcaggtatttgctgctttcctcagcctagaacatgttttcctcatattttacc

SEQ ID NO: 40570 - DNA, 298 bp, Homo sapiens
ctgacgtagtacgtattttattgcagtgatattttcaggaagaacttcatttccaagtgtcaaatatttcagggggtatgtgatgactgtaagctgacaacagtagccaaggtgagccttttttctttcctaagaaaaaagtctcgcgcaaatattcaggaggtttgaaatcatcactttaaggaaaaaactgaaatatcttacagtgagttttaggtctacttgacagaggaatcaaaattaatttacagccagccattaatatgctactcacctgcatgttgttcaagaaaagaaa

SEQ ID NO: 40571 - DNA, 302 bp, Homo sapiens
  misc_feature (1)...(302): n = a,t,c or g
catttgaggtcaggagnnnnnnnnnnnnnnnnnnnnnnnnnnnnnnnnnnnnnnnnnnnnnnnnnnnnnnnnnncttgcttctttatccaacttgccactctctgcattttaattaggacaattagtccatttacattcaaagttagcatttacatgtgcagattttttcctgtcatcatgttgttagctggtttggttattatgcagacttgtttgtgtggtgttttatagtgtcactggtttatgtacgtaagtgtgttttcttttggctggtgatggtcttttctttccatatttagcg

SEQ ID NO: 40572 - DNA, 299 bp, Homo sapiens
  misc_feature (1)...(299): n = a,t,c or g
ctcccatgctcccactttttggggtctnnnnnnnnnnnnnnnnnnnnnnnnnnnnnnnnnnnnnnnnnnnnnnnnnnnnnnnnnnnnnnnnnnnnnnnnnnnnnnnnnnnnnnnnnncttctgagttacttcaattaggaaaattaacccattttaaatcaggttattagtttttcattttttgctattgagctgtagctcttcctgtatattttgaaagtttaccccttatggtttgcagatatttccccctattccataacttggcttttcactctgttgattgcttcctatgctgt

SEQ ID NO: 40573 - DNA, 305 bp, Homo sapiens
ggaaaggtgattctcctgtcacaaaaattaagtgcgagagcacttattgtcacaaagattaagtgcaagagcatactaaaggtgtctttggccagcacagagtcctcaatttcggtgtagtcgctttgtcctatagcattttctgcagcaactcggaacacatataaagagccctcagtcagtggggtgactgtgcacttggtgtccttgacagtgatatccactgtttgccagccttttcgcctgacgtctctcttttccacaatgtagttggtgatgggggaccctccatctttctcaggaac

SEQ ID NO: 40574 - DNA, 307 bp, Homo sapiens
atttctcagaaaaacccagctgttcccagaaccatttacagaccttctgcaataatttccattagcggcaaatggcgaccactctaattttaggtggagaatgcgagtaccaagtccttcatattagaagcaatgatataggcaagctaaaaccttcaagagttccatgaagtcccttttgagtctgtcttgataactcattttctttgcattatgatatacatttttactcactcaacattttgttcaggtatcatcatgagcctagtcagcagaatgggtcattattttccctcttttactgcag

SEQ ID NO: 40575 - DNA, 298 bp, Homo sapiens
  misc_feature (1)...(298): n = a,t,c or g
agacaaggagatcaatgaagtaacgatatgcagtatatgacttcacaatcagctaagtgtgattttagcctactctgcctatgtaggagccattcttatttcctttaatttcctaaaaaaagaaaaatatatattaaaaaagagtgattttatatttttcaatggttgccacataatcaaaagaatcatatgtcagccaagcannnnnnnnnnnnnnnnnnnnnnnnnnnnnnnnnnnnnnnnnnnnnnnnnnnnnnnnnnnnnnnnnnnnnnnnnnnnnnnnnnnnnnnnnnnnnnn

SEQ ID NO: 40576 - DNA, 308 bp, Homo sapiens
tctccttttaaggtgacggcccaggctctatcatggcaagtcccacccaaaaaggaaggcacttccctctctattcactaaaccactttgctgttcctcccacatccagggacccaatgccacacaattctcaagcacaacgagaagtcgccatcaagcaaacagggtcagaagttcaatttcacacattaccgaccgccacggttttgaagatttctggcaaatgttctttctgacatgcttcaagttgctgcacatgctcggtgccctcctcctcaccatctcctcttccccctcataaaaatcat

SEQ ID NO: 40577 - DNA, 307 bp, Homo sapiens
taaagagggccacgagctgcgaaagggcgggaaaggcagttggagaagagaaatcttcccaaggctgcagacaccgacggatttgctttgggagccagagtagctgccgccaccagagtccggagccatgagcgggtttaattttggaggcactggggcccctacaggcgggttcacgtttggcactgcaaagacggcaacaaccacacctgctacagggttttctttctccacctctggcactggagggtttaattttggggctcccttccaaccagccacaagtaccccttccaccggcctgttc

SEQ ID NO: 40578 - DNA, 298 bp, Homo sapiens
  misc_feature (1)...(298): n = a,t,c or g
cttcgataaaacttggctgcactgcgaagtacatctgttacacctggggctttctccaaggcttcttcaactaacttttctccttcaccttcctcttcaccttcttcacgcatcttatgaagcttcagagccaggaggactttaaggtactggttgtcaggattcagccgaatggcttgcctcagagggtcaatggcgttctgagatgctttagattgncnagnactttgcacattgnggctttaaattcangattctgttactcactccggnaaaanactntgtcttcnaaatgatc

SEQ ID NO: 40579 - DNA, 310 bp, Homo sapiens
gcctggagttgccacacattactgttgtgaaggaggagtaggaggaagcactgtgtgaaatttcaggcttcttctggattccaggtttgccccaaccagatgacctagaaggtcttgcttgggcgtgttggttatcttgtatcttgggctttcttaaaagtgacttacccacacatacatacatatgtgtgtggtactcatcccacacatacatagatgcataggacttaccttcacacgcacacatagatgcacggtaagatatccactcagtacaaaggaaattgaatgaaaagtacatctcccttct

SEQ ID NO: 40580 - DNA, 317 bp, Homo sapiens
caatgccagtgacattgcagatgatgagctttccaatgtagaaggtctctggtgtttctttggttaacatattgaagatctcctctgtgttgggagagcggtaggctgtccggaggtccttatatcgacagctcagctctgcccggatgtcatagagtgtgatgtgtttgtcaccatagccctgcctctccagctcttctgcaaaggcatcaaggtccaggtctttcagtcgctctgggttttccaagatttcttcaagggctcctgcaggattggcatcctcggctgattcatcgtattccagggcatccactgcc

SEQ ID NO: 40581 - DNA, 308 bp, Homo sapiens
  misc_feature (1)...(308): n = a,t,c or g
nnnnnnnnnnnnnnnnnnnnnnnnnnnnnnnnnnnnnnnnnnnnnnnnnnnnnnnnnnnnnnnnnnnnnnnnnnnnnnnnngcatatttcttttatgtcactttgtacactagactgtcacttcaaatatttactataattgggtgctttaaattttgttgatatttttcacttctaatgtttttcccactagattaggagtgccatgagtatctttatcattattacttagcatattactttgtacttgtaggtatttaacaaatattttagagtaacaatacagttaactgtggtaccccacacag

SEQ ID NO: 40582 - DNA, 307 bp, Homo sapiens
aaggagctctgtctgcagtcgcacgcctggcctgtagggcctcaagcccaccttctccctgatgttgcaggctccgtggagggagggctccagagcacagcatcgggaaagaatctctctgctattttctgcatccggggacagattccagtcccctttttgcctagttccacctagggttacatgggatgtaccaggataaatatatgtcagcccactgccatctcggataaaatgctccacccagggagcctgaacttggaggacttggccccttacagggaaaatctttgagtctcctgcaagc

SEQ ID NO: 40583 - DNA, 416 bp, Homo sapiens
  misc_feature (1)...(416): n = a,t,c or g
gtgccgngttgatgcctnnnaaccctntggattcccnnnnnnnnnnnnnnnnnnnnnnnnnnnnnnnnnnnntctcgaggatccgaattccnnnnnnnnnnnnnnnnnnnnnnnnnnnnnnnnnnnnnnnnnnnnnnnnnnnnnnnnnnnnnnnnnnnnnnnnnnnnnnnnnnnnnnnnnnnnnnnnnnnnnnnnnnnnnnnnnnnnnnnnnnnnnnnnnnnnnnnnnnnnnnnnnnnnnnnnnnnnnnnnnnnnnnnnnnnnnnnnnnnnnnnnnnnnnnnnnnnnnnnnnnnnnnnnnnnnnnnnnnnnnnnnnnnnnnnnnnnnnnnnnnnnnnnnnnnnnnnnnnnnnnnnnnnnnnnnngancccttaccnntaggctnngggactccactnngctnnaacatcgnngacc

SEQ ID NO: 40584 - DNA, 292 bp, Homo sapiens
ggccagttcacccctcccctcagacaacctggtagacccctgctcttgggatataattaatttttaattgaagcaaatcattctgggttttaactttttttgtcagtcactacagttgttttgaataaaaattcatcactgtctacccacccccaagaaaccacttgctgagttttggtataatgtcaaagaacaatatccacaatcacctgaaaaggtattaatatgctcccttccttttgtagctacatttctttatacacttcaaccaaaacaacatactgaaatagtg

SEQ ID NO: 40585 - DNA, 302 bp, Homo sapiens
cttacatgtaagatatacatgcttattttagataagacttctaaaataagcatgtatatcttacatgtaaggaattattaacttcattttttcataaaaataatcagagtaagactttcaacagatgtcaggatagctgaagttctccatgactgtcatacgtttcacttatgacaggtttgtaatttctgttagggaatgtcatctaagtgctctgcatctggtattttctcctgcaccctcatgactcgaaaaaagcctttgattatatctcttttctctctatttacatgttcaccact

SEQ ID NO: 40586 - DNA, 309 bp, Homo sapiens
gggagagccaggatgtgaacttaggccattgctactaaccgctccacagcctcgcccagtggtttgccctgctcagaggagccatggagactgctgggagactgaggcccagagaggggagctggatctattttgctcatctcaaaattcctcccacttgggaaattctcaaaccatgggcgctagggacagaggaagggagagaaaggtagggggcccttgcctctcacactggctgggaacatccctcccctgctcagggcggcctacacactgagcgtagccctgccgggctccatcctggacaat

SEQ ID NO: 40587 - DNA, 302 bp, Homo sapiens
ccagcctggtgacagagccagactctgtctcaaagaaagaaagaaattaatgtaaattttcattttagatcatctagcaaaaaggttttaaaactgaattttggagaaaataatatatggctaggtagtttatcaaacatttttatcttgaaatgtttatattcttgtatttaagatactctgtttctttattataatttttaaaaaacagaactttaatttgccctgcttttataggaaaaaatatagcagatattgaaaacagtggccataaattctggaaatacagggaagtatacaca

SEQ ID NO: 40588 - DNA, 301 bp, Homo sapiens
cacaggttctgggacatgtgtatatattttggggggccaccattcgactactacaccaactcctttacatactatgctcagagatagaaatggacagaggtagcctcacagagaaacccgaatttcagactgttatttgcttgctctgataatttcctgtcagtcttcctcacctttgtcctgtcaccagatgttctagatcacagccagatgccgtggggagatgtgtttttctgtctatgctggggcctgatggctgagacatgcttggtctgaaggattttctgagggtggggctgac

SEQ ID NO: 40589 - DNA, 321 bp, Homo sapiens
  misc_feature (1)...(321): n = a,t,c or g
nnnnnnnnnnnnnnnnnnnnnnnnnnnnnnnnnnnnnnnnnnnnnnnnnnnnnnnnnnnnnnnnnnnnnnnnnnnnnnnnctgaaggacttggttactggtcagatgttgggaccagagcaggggaggagtcagacgtatgtcttgagagacactgggtgggtggaagaagaaatgataaatgagtttagtttagaagtgcatattaggtcatcaagtggagatgtcgacgcggccgcgaattccnnnnnnnnnnnnnnnnnnnnnnnnnnnnnnnnnnnnnnnnnnnnnnnnnnnnnnnnnnnnnnnnnnnnnnnnnnnn

SEQ ID NO: 40590 - DNA, 318 bp, Homo sapiens
gggaaagcaatctagaaggaagaagcagcctcagcaagaaagagaggtgtgaaaaggcacagagaactcagaccacggccagaatttaagtgtgattatttcatggggtttacaaaaggggacaaaagttagactttctgcaagaaagaccgactgggccaacattctgaagagtcaaactaagaaatttagactttatctaggaggaagaagacaataaaactgaagaaacaggaccaggaatggatgaggaagattctgaacttgttgctaaagatgacaacttggatagtggcaattcaaacaaagataaaagcc

SEQ ID NO: 40591 - DNA, 315 bp, Homo sapiens
ctcttgctttctatctcatcttccacgaactaacctttcttccccagtactctatccaaaagatgaatctaatcatgttaatcccctgctttagaacttcagtggctccccaccgccaaaagcagaagtttccaaactgctccttggagaaaaaaattttttttttcattttaagcacaaaactcaatagatgcttatttatttataaatgatatccatctgctagtctaaattaagtgtttataagtttaatgtcttcatgtgagataaaataattttaatagttttatctgatcccaatagcttagtgtgtac

SEQ ID NO: 40592 - DNA, 311 bp, Homo sapiens
  misc_feature (1)...(311): n = a,t,c or g
ggcnnnnnnnnnnnnnnnnnnnnnnnnnnnnnnnnnnnnnnnnnnnnnnnnnnnnnnnnnnnnnnnnnnnnnnnnnnnnnnnnnnnnnnnnnnnnnnnnnnnnnnnnnnnnnnnnnnnnnnnnnnnnaagaagcaaaataaattggtaaggtattcctacaacttcacattcaaggtcctactatggattgctcttccactcaaaactgttcaactgttggtcgacgcggccgcgaattccnnnnnnnnnnnnnnnnnnnnnnnnnnnnnnnnnnnnnnnnnnnnnnnnnnnnnnnnnnnnnnnnnnnnnn

SEQ ID NO: 40593 - DNA, 315 bp, Homo sapiens
ggaaaatgcctgaatatataagaaacaatgcttttacctctgaaaatctgaataagggaggctagagagatagaaagacttttactcttcatataataatctttttaaaaaataataaacttttaaaaatactgtcaatattatcctaggaagcatagttttatttctgttttcattaattaatttggacccagcattgatgaagtaaagtttaacttttattttagtttttctctattgttgaatgaacactctttctcccagtttccaattatgttatctacattgagtcactgcttgactccatttccatat

SEQ ID NO: 40594 - DNA, 316 bp, Homo sapiens
  misc_feature (1)...(316): n = a,t,c or g
nnnnnnnnnnnnnnnnnnnnnnnnnnnnnnnnnnnnnnnnnnnnnnnnnnnnnnnnnnnnnnnnnnnnnnnnnnnnnnnnnnnnnnnnnnnnnnnnnnnnnnnnnnnnnnnnnnnnnnnnnnnnnnnnnnnnnnnnnnnnnnnnnnnnnnnnnnnnnnnnnnnnnnnnnnnnnnnnnnnnnnnncaaggtgttcaagtctctagagcaggacctaagctctacagacatcccacttccttctaccatcagcataaatgggctttgggatggtggtggtggggaaatccaagaaccctggaaattatataaaatatt

SEQ ID NO: 40595 - DNA, 309 bp, Homo sapiens
  misc_feature (1)...(309): n = a,t,c or g
ctnnnnnnnnnnnnnnnnnnnnnnnnnnnnnnnnnnnnnnnnnnnnnnnnnnnnnnnnnnnnnnnnnnnnnnnnnnnnnnnnnnnnnnnnnnnnnnnnnnnnnnnnnnnnnnnnnnnnnnnnnnnnnnnnnnnnnnnnnnnnnnnnnnnggtgattgtatttcttgaccacaactattcctgtttcctatttcataggctaagtgtgcctcttttacttaggttatctgatagctgtcctgtgtaatctgtcctcattaggacttcctccttatcctaatttcccacaatgccacaaaccctggttaag

SEQ ID NO: 40596 - DNA, 314 bp, Homo sapiens
tttctaactagtttcactaatacagtttgccatgctgacatatttccttctctgttttggtagattactttgcaggttgctgaaagtctaagtcaaggtaaagtgtgaggtaaagatcagagtgagtactattaatagcgaggggaggggggaaagctagtgagccctgtagatcagctcaacaaagtgtatatgctggaatccagtactttggagataatcttccaagtggaatgcagtccaaaaaatggacactattacttcctgtgctggcagccgctctgtttacagaaggaaagagtatgttcgattgg

SEQ ID NO: 40597 - DNA, 308 bp, Homo sapiens
cttcctgtcggagattttgtaccctttgaccatcatttaaattttttaaatgcaacaaaatatcaatttcaaaacagcatgaaaaattgagtgtgtttaaccatattcagctgataacagggcaaatgaattgaacagaataacattctattccatgtttaatgaactggcaacaagagaaagttggtggaagaaaggcagaggaacttgggcaagaattagaaccaaggggctccataatcatctgacatcagttcccatgttgtatctatggttagaaatgtacatgataggaactccaagaatct

SEQ ID NO: 40598 - DNA, 316 bp, Homo sapiens
ctcaaactatcaaggatataaaaaacaacaaaaaaattaaaatattgtaaaattcaagaggagactaaagagacatgacaataaaaatgtggtatcataggtgttcctgggacagaaaaatgatattgggtaaaaaaagaaggcatataaatacagcgtagatagttaataatgtatcaatacttgttaattaacaaatgtatcatactaacgttaagatattaataaaagagaaaatatatgctagttatgagaaaattctgtactatctttgcaagttttctggaaatttaaaactcttctaatacaaaaattg

SEQ ID NO: 40599 - DNA, 307 bp, Homo sapiens
tgctcagacaccatgtttaaagctttctgaatgtgatctaatacctccattggttggaggtaattaaacagagatctgttcttttaaacaactatttgagtgctttaaatctgaaagtcatgtcataaatgtcagacctctttctctttgctttaatcatctcagaaagacttatctgttaatggaacatctgcatataggtattttgttgaccacaggtgttccacataagtttaatctacctattagttatatgttcatgctattgaggacctttcaataataaactttactgagtgcttactct

SEQ ID NO: 40600 - DNA, 313 bp, Homo sapiens
  misc_feature (1)...(313): n = a,t,c or g
ggtattgtcactttttgaaaattttaactattcatatagataatatagtggtacctcattatggttttaattgatttctgtagctttataataggtcttaaatttaggacatgtnnnnnnnnnnnnnnnnnnnnnnnnnnnnnnnnnnnnnnnnnnnnnnnnnnnnnnnnnnnnnnnnnnnnnnnnnnnnnnnnnnnnnnnnnnnnnnnnnnnnnnnnnnnnnnnnnnnnnnnnnnnnnnnnnnnnnnnnnnnnnnnnnnnnnnnnnnnnnnnnnnnnnnnnnnnnnnnnnnnnnnnnnnnnnnnnnnnnnnn

SEQ ID NO: 40601 - DNA, 302 bp, Homo sapiens
  misc_feature (1)...(302): n = a,t,c or g
nnnnnnnnnnnnnnnnnnnnnnnnnnnnnnnnnnnnnnnnnnnnnnnnnnnnnnnnnnnnnnnnnnnnnntgtgtaaactgaattctctggtggagaaggcaccatctgaggtcacctaagaaactgggaagtatttttgctggaagcaagcttgggacaagacatgagatcacagcaggcaatccactaacctcaatatacaaaaaaagaaagagatgtaaggtgtaaaggcagaaaaatgattgtatctctcatgaggatgacaggccacaagtaaactgaggcccaaaagctttaccct

SEQ ID NO: 40602 - DNA, 301 bp, Homo sapiens
ggtgggtcatatcagtgaaatagcaaattccccttaatggtaagaaaattatgcattttgaatttatttttgtcattaggcaacatcattcaaagggtgcaggaagattctagctaggaatctggccttatccctttttctcttcaattttaaggctattaatgataagacatccggatcatcaaataatcaataacaagtttggggcagttaacctgctatggtaacttgtaccagcacttggctcttttgaaagatgaatgctacatcaaattaaggcaaggaaggaattaacagtgtt

SEQ ID NO: 40603 - DNA, 257 bp, Homo sapiens
attcttttcacatagaccattttaattgtttaagatcaaaattcatttgacctgggtgaatggaagaagaagcccaatcatagagctgggttagtgaaggtttttggagcctttcctgctatagcattctatgataaaccttcctttcacaattatcattgatattacatctgcaagactttcgtacttgtaagtagttttaagaatatttgtttttatttttttacccaccactgccctgggaaaaaaaaaaaaaa

SEQ ID NO: 40604 - DNA, 299 bp, Homo sapiens
  misc_feature (1)...(299): n = a,t,c or g
nnnnnnnnnnnnnnnnnnnnnnnnnnnnnnnnnnnnnnnnnnnnnnnnnnnnnnnnnnnnnnnnnnnnnnnnnnnnnnnnnnnnnnnnnnnnnnnnnnnnnnnnnnnnnnnnnnnnnnnnnnnnnnnnnnntttccttttcttaggggaagcagttcatgtagggaggctggagctccaaggaacaactaatggactaagaacttaaagcagatgggctctagcgcagtggctcccaaatgtcagtccttcttagactgacctttcacagcagcctatgaaagctggttctatgggtga

SEQ ID NO: 40605 - DNA, 298 bp, Homo sapiens
ccatgattagagtctgtaatgaaaatgactcttaaacgaatctgagagttaggaataggacatcgagattggaaagaaagcaattggcagcacctcttgccaccttctgcccgtggactgtgtgtgtcttctctggttcctttgtatcgaactcaaacgccctgagcatttatcataggtggccctcaaatacatttttctttttctgccagacatgttctcttccatttatgtcagatgagcttattttcttgccattttttcatcagcagcatgacaaagttgtcactcctggcag

SEQ ID NO: 40606 - DNA, 150 bp, Homo sapiens
cgcctacttattttttcttttttgttgctactgtatatgaggtattttcttccatcactgtttataataatttttagtcattctgttgggtgttttaaacatacaatcaaatcatctgtaaacaatgatattttactttttttttttttt

SEQ ID NO: 40607 - DNA, 291 bp, Homo sapiens
agcagagctacttaaaatttgtttaggaatactaattactttagaaatgggccatttattttaggtagccattatgctttatggtggtttttcagagttgagaaatgtaatagtgtagtggaaagaactatgaagaggagaccacagttatgtttctagctttgccacaaaccaccgtgtgacttaacctctctgggtctattttctcatctgtaaaatggaaaggctgactttttaggaccacttcagctcaaagacaatgattttatgatattgtgcaggtgctggaaa

SEQ ID NO: 40608 - DNA, 293 bp, Homo sapiens
ggatgtactaggttaaaggtattctttctgtaagaacggaatgcatgcagcccagaggacaggggacatgaacaggaaacagagccatacctggtactgctcttagttatgggtcataaactgcatcagttagacacaggagaaagcagtgaacagttaatggaaggaactgttggccagtgttaactggtgacacagaaaggaaaggtctagccacctggaggggcagctacagcctagcccagacctgtaacttatcttctgagcagtgccatgcaatccaaaccttgcag

SEQ ID NO: 40609 - DNA, 301 bp, Homo sapiens
atttaaattgaagtcatgcatacagggaaagttatgcatatagaaaaatgtacacttcatactgcgtgcattcaattaatttgcgccaaatgaatgcacccgtgtcccctgcacccagatggaaaatgccaccagcacccttaatagcccccacctggacccctgaattggagtgaattttgaaagaagagggaaagaaagtgacatgtcccaattagaacatatgggacaggcactttctatactgtccaccttgccccagattctttaaaacattctatagataaaactgtttgttaca

SEQ ID NO: 40610 - DNA, 300 bp, Homo sapiens
  misc_feature (1)...(300): n = a,t,c or g
ttaaagttgatgacagactttaaaaaggaaggatcatgctgtcaccatgtgaatccactgatcactaattgaaactactagacactatgtgtctcctgatgtgatacaatatgaagtactcagcacttccaaactaccttgccaaaatactaaaccttcatctataaccagagctaatttaatttgcagaaaatcgaaaatgataccacatgaaagcacagttaattccaaaatgtggaacattctatcagataacttcagcaagtcaatggcactaaaaataanaacagagaggacaga

SEQ ID NO: 40611 - DNA, 292 bp, Homo sapiens
  misc_feature (1)...(292): n = a,t,c or g
tttttttttgacctccactgtttatggatgagagacctgggtcggaggtggggaaaggagttccctagacaaggacctgagctctcccgtcttgctccaatgctgccccaaatgtccttgtatgttcctaacagcctatcacaagctacctcctgtccctcttgtccttgaacgatcacctctgatgagattggaacttgaacctgcatggcgtttgcaagcctgatgtgatgctggtcgacgcggccgcgaattccnnnnnnnnnnnnnnnnnnnnnnnnnnnnnnnnnnn

SEQ ID NO: 40612 - DNA, 295 bp, Homo sapiens
  misc_feature (1)...(295): n = a,t,c or g
tcccttgtaagttggattcctaggtacagtttcacagtcttaagaaggtcctacagataggcaaatatcgcatgtttttactcaaatgtggtagctaaaaaaaaaaagttgatctaacggagtanagaaccatntgatggtcaccanaggctgggaggcggggtntggannnnnnnnnnnnnnnnnnnnnnnnnnnnnnnnnnnnnnnnnnnnnnnnnnnnnnnnnnnnnnnnnnnnnnnnnnnnnnnnnnnnnnnntaacttattatatatctcaaagcagttgcaaganaagg

SEQ ID NO: 40613 - DNA, 302 bp, Homo sapiens
ggaagctactgcactgtgtttccacgcagacagagtacagtgggaaaggctttctccagctgatggatggctgttctctttatttggagtatcttactggttatgtaagcgacctcgagagaaattatcctgacccagatcggaggatgcagtagtgcttcagctgcaggatttcttagtcgttaacaccacagtgctgatgacaaagagcgagttgtaatcctcatcactgccagggctgagccagagcagacagaaaatcgtcatttgctcgttggagacttgttaggttacagctcctg

SEQ ID NO: 40614 - DNA, 297 bp, Homo sapiens
  misc_feature (1)...(297): n = a,t,c or g
nnnnnnnnnnnnnnnnnnnnnnnnnnnnnnnnnnnnnnnnnnnnnnnnnnnnnnnnnnnnnnnnnnnnnnnnnnnnnnnnnnnnnnnnnnnnnnnnnnnnnnnnnnnnnnnnnnnnnnnnnnnnnntgtctttttgtgaccccacatgtaatgtactagtacatcctttgacaattaaacactgtgcccggcgtcgacgcggccgcgaattccnnnnnnnnnnnnnnnnnnnnnnnnnnnnnnnnnnnnnnnnnnnnnnnnnnnnnnnnnnnnnnnnnnnnnnnnnnnnnnnnnnnn

SEQ ID NO: 40615 - DNA, 304 bp, Homo sapiens
gttgcagtacgcctgtctgcatcacttaggaagaccctaattctctcaggacagctcgcactgacacagtagagtaaccttaatccaaaactgtagcccagtgatttctacagaagtctgtagtatccacattttcttgcaatcagtccccaggaagcaagccagagagtgggttgggatcgctatcttcctccttggggcactattaattcagtcacctaatatgctgaatttcccttctggccactagatggagcctatgcataggcgagatgggcaaagtgcacactggacacctctcagg

SEQ ID NO: 40616 - DNA, 295 bp, Homo sapiens
ctttgaagtaaaactagccgttaggctaataaaaacacgtattttttgcttcattttatttgtcctcctatatactcttcttcagtctttgctgtctgctaccacttgttagaaattaatatttgaaggtgcatgtatgcatggaagtatatgttaaattgagtgttatgttccacaatgttaagatgtaccatgacttccaggtgattttattcctgatcaactttgagaaccctgctctaaaaatttttattactgttgcctagacattgctgaggtttttcttaacttcata

SEQ ID NO: 40617 - DNA, 305 bp, Homo sapiens
tcagtctctgcttctagggagcctataggtaattaccaaaggaccagcatatcctcaccaacccacaaggttagcagggatcccaaaggtcaattaagcccacgggatccaaagcaatgaaaatcggagtgcaaggtgagccagaggccacaggaagaagtattagaaccactgatcctcaccttattctttatttttgtgtatgtttcctaaagtttattaatttaatctaatctattaatcaagcaatctaatattaatctaatttatgtaagagtagcatgcataaagatatttactatagg

SEQ ID NO: 40618 - DNA, 103 bp, Homo sapiens
caattttggaacacaaaggtggtttgcttgactttattactaagagaggatgagatttgtgagaggtaagtgaactctgtaactcttgatttttttttttttt

SEQ ID NO: 40619 - DNA, 293 bp, Homo sapiens
  misc_feature (1)...(293): n = a,t,c or g
tcagcctggggggacagagcgggaccctgtctcaaaaaaataaaaaataaaaaaaagaaattattagttgttggcaatatgattcaaaatatattctgtgacttttcttgatattgttgaatattttaaagatttgaatttatgtgaatagggtaataaaaactcaacatttcttcaaatcaaaaattcaaatgtataaaacatgatatgttccaaactcttgatccgtgctcccattttactttaatataaatggtcaagtcggaaaggggagtaagagaaaggactntgct

SEQ ID NO: 40620 - DNA, 294 bp, Homo sapiens
aacaaaaaggcaattcttatgcttgacagcaggccatatgtgatctgttttcatagctgagggtccacgtgaaattccagggttaaaaggaaacccaggcagaagcctgagtggctgaaggggagctggctcctttctgtttctaaggcattaccaccaaccaaaacacaagcagctcaagttgaaggcgggcctcccctccaatccccagtgaaactcacaaagctagcaagattgtgcaaagcaaggctgcggtgtcctcttaatctgaaatattcaataactaaataggtt

SEQ ID NO: 40621 - DNA, 300 bp, Homo sapiens
  misc_feature (1)...(300): n = a,t,c or g
cttaactgtattaaccaaaatagttgagaaccctgctaaagttatataaggtttaccattttgaacttgaatgttgacattgatattttgagagtgctcaaactgtgtcccctgtccagtaggggactagacagtggttagtttaccttgtgtttgtgtatgtaggatgggatgtatagtgctctgttgatacaaggaagagcttcaccagtggcttgctgtagagttttcaaattaactgaacccgtcgacgcggccgcgaattccnnnnnnnnnnnnnnnnnnnnnnnnnnnnnnnnn

SEQ ID NO: 40622 - DNA, 301 bp, Homo sapiens
ctgaacaccatgccacctcctcgcctcctcttcttcctcctcttcctcacccccatggaagtcaggcccgaggaacctctagtggtgaaggtggaaggtatgtccaaagggcagaaagggaagggattgaggctggaaacttgagttgtggctgggtgtccttggctgagtaacttaccctctctgagcctccattttcttatttgtaaaattcaggaaagggttggaaggactctgccggctcctccactcccagcttttggagtcctctgctctataacctggtgtgaggagtcggggg

SEQ ID NO: 40623 - DNA, 294 bp, Homo sapiens
gttagtatttctttctacatgtatgcttttgaaaactaagtttgattctggtcaaacattctgtaggtcagcaaaaagctctagtggcagacgtttactggctcttggaattggcttaaaagtgacatgggcatgcaatacacactgtcttaaatgtctcttagataaggttggaaaagctttccttctcacagaacaacaaaccttctcctgttgagtttactagaataagctaatcatatctaattcagattcaccgtgggtgctattattgtatttggaaatcatgtgaat

SEQ ID NO: 40624 - DNA, 302 bp, Homo sapiens
  misc_feature (1)...(302): n = a,t,c or g
caggaatctgcccagcaatgcagtttgtgccgagaaggtggctgtggacaggtggctgtggnnnnnnnnnnnnnnnnnnnnnnnnnnnnnnnnnnnnnnnnnnnnnnnnnnntcagggtttccaaggtgctgagaaaatccctgcctaaaaggatgacttttttactacctaaaattccttatattcctaaatactttgctgaggtcagccaccacgagggagacaggcagaacagtagaaaggtgtaggtttgggagtcaggccacctgggaccaaatcacagctgagtttgtaaatttgg

SEQ ID NO: 40625 - DNA, 306 bp, Homo sapiens
attcaaggtactattcatataaaattatagctccttaagcttccagcaatagttttacagcaaactgcatctttagccactgaaactgctcctgaaatgtccatacataaagagaacactagtaagagtctagtgggaattaagacacaagaataggcaatattactagagtaagagtaaagaagataagacacatactccaccccagagtgtattgtctcacatgtttcctctagactggaatattaatatgcagacagccctaaacagaaatattgggatcccatgcatattactcacattaac

SEQ ID NO: 40626 - DNA, 297 bp, Homo sapiens
  misc_feature (1)...(297): n = a,t,c or g
gtactctcctgtgtagtttactgagtactctcctgtgtagtttactgagtactctcctgtgtagtttgctgagtactctcctgtgtagtttgctgagtactctcctgtgtagtttgctgagtactctnnnnnnnnnnnnnnnnnnnnnnnnnnnnnnnnnnnnnnnnnnnnnnnnnnnnnnnnnnnnnnnnnnnnnnnnnnnnnnnnnnnnnnnnnnnnnnnnnnnnnnnnnnnnnnnnnnnnnnngataaaaaatnnnnnnnnnnnnnnnnnnnnnnnnnnnncagtgcacgcctg

SEQ ID NO: 40627 - DNA, 305 bp, Homo sapiens
gcattatctcactttaccttctcagtacccctattcattatcaaccactaacagcagaactgcagcttcccaaactgcaaaggaggttgataatgaataggggtactgagaaggtaaagtgagataatgcttgtaaaacatatagcacaatgcttggtgccaggaaacactcaaatgattacgaccatgatttccattttacagataagaaaactaaagcctagaagagataagtaattcaagcaaatgacagagcagggactctaagtgcacaggagttcagggcttatactcacagtcacact

SEQ ID NO: 40628 - DNA, 295 bp, Homo sapiens
cattgatatgtcttgggatagactactttgaagggaactagagctattatccttggtggtatcagcagtgctataaaaatgttttttcttagttgcatggttttgtaacttgagtagtagacctgctctctgtgtcttcccaaaatgctgtaatgttttccagcctatttttacttttgccaagagatgctacaagttttgtttttatgggctaaaagtggttaagtgccaaattcttggactgagaggttctgtctccctgtcaactaaccatgagtttaggatggaaagccac

SEQ ID NO: 40629 - DNA, 303 bp, Homo sapiens
  misc_feature (1)...(303): n = a,t,c or g
taattttaaaagaaaagattggttgaaattggctaaattgatttcctagccctcaggaccatggtttgaaaactttgttagggaatacatgcagatggacttacagggtcatgggatctatgtgcagtcgacgcggccgcgaattccnnnnnnnnnnnnnnnnnnnnnnnnnnnnnnnnnnnnnnnnnnnnnnnnnnnnnnnnnnnnnnnnnnnnnnnnnnnnnnnnnnnnnnnnnnnnnnnnnnnnnnnnnnnnnnnnnnnnnnnnnnnnnnnnnnnnnnnnnnnnnnnnnnnnnnnnnnnn

SEQ ID NO: 40630 - DNA, 295 bp, Homo sapiens
gtatgtatgtatagtcaaaaattcattcatccttccatcaacccatatatttcttgagaagcaactattatgtgccattgttgctggggatacagcaataaacaaagcagataaaatttgccctcaagaagtttataatctgggaggaaagatagacatgtgatattacattaccccatctattcagtgggcaatctgacagtacatcctactagattaaccggggaaaggaaatgaacactgggcaaagacaatacggaaaaatcaaagaggtaaccaaaaacagtacaactca

SEQ ID NO: 40631 - DNA, 294 bp, Homo sapiens
  misc_feature (1)...(294): n = a,t,c or g
caaaattgagaaacaatgattagtaataagtttttacacttcaagtatttcctcattctgaacaaaggatgtcgacatgtatttacacacttgaatgtttcaacactaccgtgtgatgtgattttacttttttttttttnanatttnanntttnagtntnangnnttnnattttnaatntgtngttnggggcctaaactcanngcaanaagtttttaaggggttttntttttnaagcncaaaannccttttnactttaaaaagcgggnangggaaaaanataacccannctcaa

SEQ ID NO: 40632 - DNA, 303 bp, Homo sapiens
gttcatttgatcatttctattgtcataagcaaagactgacatggaggcaaatacagccttaaacatgttggcttgcccctccctgacctcacaccaagggtgtggttctagacaggaacagggagtaaggccaaggggtactgcctgggttcttggaggctaagccccaattcagcctttctcaaagagtgtggtctcggtgatgtaagttctaaatacaggccccagtcaaaacaaaatggtgggaacaaagccaaactacatttgtttttatcatcagaagtgctcggcttcccgtcgacc

SEQ ID NO: 40633 - DNA, 294 bp, Homo sapiens
  misc_feature (1)...(294): n = a,t,c or g
gttttttcctatcatcagcatactgtttaataagtataaagttctggcccannnnnnnnnnnnnnnnnnnnnnnnnnnnnnnnnnnnnnnnnnnnnnnnnnnnnnnnnnnnnnnnnnnnnnnnnnnnnnnnnnnnnnnnnnnnnnnnnnnnnnnnnnnnnnnnnnnnnnnnnnnnnnnnnnnnnnnnnnnnnnnnnnnnnnnnnnnnnnnnnnnnnnnnnnnnnnnnnnnnnnnnnnnnnnnnnnnnnnnnnnnnnnnnnnnnnnnnnnnnnnnnnnnnnnnnnnnnnnnnnnn

SEQ ID NO: 40634 - DNA, 301 bp, Homo sapiens
gttttctattctctgtctgaactctattcaaaagtatctttgctctcttgggccttttcttttactgttttgttttgtttttttctaatcctgctttcatactagccagtgtggggaaaaggtacaatatgtcaaagagatgagagagtgttatttcttgggcaattttctattagtgtttcttattttggccagttcttttatttatgtccttgtgacccaggtacttggggggccagctacccttctggccttttagcgtctttgaaggagaccagacatgagtgaatacctaggagag

SEQ ID NO: 40635 - DNA, 297 bp, Homo sapiens
aaaatgcccactcatctttcaagaccaaggtcaaacttcatctcttggaacagccccatttccctaggcaggctgcacattgcaccccgttgtgtgtccctttgccactcactgggagacaaagttcatctctctcctagaatgcaagctccctagaataggaaagccatgtctcacctctcttgttaccatctttactgctttgcacagggtctgacagaaagaaggcaccaaaaatatttgactagaaaataaactgagaaaacactgggataccatttcacatccatcagatag

SEQ ID NO: 40636 - DNA, 302 bp, Homo sapiens
  misc_feature (1)...(302): n = a,t,c or g
cacattctgcccccaaatacctattttgccactgaggagtcatagtaacaggagaaacatcttttttactgttattttatttatttttacttgaacagatttagctgaggcaagatgttaatagtgtatatgtaatattatatttattgtagttgatatcacactcgaaaggcttctttctttctcttttccacctttttttcttttcttttctttcctttttggggtgatnnnnnnnnnnnnnnnnnnnnnnnnnnnnnnaccacaattatggcttattgcagcctcaatctcctgggctc

SEQ ID NO: 40637 - DNA, 306 bp, Homo sapiens
gccagcaagaagcatcaggtgaaaatagaacttatagaccagaactgctacaacagatactacaagcacactgaggaccgacacaccaatgatggtcttattcatctgacaggtgatattcaaactcagcacaggcatgccctgcttatctgaaggtgttgcacattccattcgttcaacttccaccaagagctgcctctggtccttgatccattgcaggaaactctggtgttcacaagtacaagcaaagtcattctgagtaagatttaagaaagctagactacttggaaaatgctgtagttcctg

SEQ ID NO: 40638 - DNA, 305 bp, Homo sapiens
  misc_feature (1)...(305): n = a,t,c or g
ctagctctgtgatctcgataaattatttgacttctctgnnnnnnnnnnnnnnnnnnnnnnnnnnnnnnnnnnnnnnnnnnggattgatgtgaagattaagtgaggtaattcttgtaaaccaatgattacactgtctagcacacagtaagcatcaataaatgttagttgtttttattgtagttattgttggtagaaaaatcaagctgttgtgttaatgtgcatggaagtgtcttcatagattgtcagatttatcaggtgaaatcagcatgcagactatttttggaggcatgactctaaatatgtag

SEQ ID NO: 40639 - DNA, 297 bp, Homo sapiens
  misc_feature (1)...(297): n = a,t,c or g
cnnnnnnnnnnnnnnnnnnnnnnnnnnnnnnnnnnnnnnnnnnnnnnnnnnnnnnnnnnnnnnnnnnnnnnnnnnnnnnnnnnnnnnnnnnnnnnnnnnnnnnnnnnnnnnnnnnnnnnnnnnnnnnnnnnnnnnnnnnnnnnnnnnnnnnnnnnnnnnnnnnnnnnnnnnnnnnnnnnnnnnnnnnnnnnnnnnnnnnnnnnnnnnnnnnnnnnnnnnnnnnnnnnnnnnnnnnnnnnnnnnnttctatttcttaaggctcagtgatattactgtactactaaggaaaaaaagaca

SEQ ID NO: 40640 - DNA, 333 bp, Homo sapiens
  misc_feature (1)...(333): n = a,t,c or g
tggttacttaaatgatttaaatgatgatattctcacctaaaagggctcatttaccaacctaagcaatttcacctttttgcttataattagggttaaattgtgcttaaactgtttacttgacctgtgggaaaccagaagaaggctactcccttatactactgaatgtttagaattttaatacctgtgattgtggtttgatgttttagttttaaaaggcattgaaaatcttgaaatttatgtaaaattctctttttaaattttttattattaatttttttttcgtcttttcctttttctttctttttttctganacggagtctcaccctgtcacg

SEQ ID NO: 40641 - DNA, 195 bp, Homo sapiens
tttaaaattgtgtatttggcttaatattatagaatctgattgatttaatctaccttgtttcatttagtatgttgacattttcttgagaaatttgttatgccaaatgattaacataataatattttaagtttagatatgattttgaatttacattttcaaatgcaactttgtgtctgtggcctttttttttttttt

SEQ ID NO: 40642 - DNA, 319 bp, Homo sapiens
  misc_feature (1)...(319): n = a,t,c or g
cnnnnnnnnnnnnnnnnnnnnnnnnnnnnnnnnnnnnnnnnnnnnnnnnnnnnnnnnnnnnnnnnnnnnnnnnnnnnnnnnnnnnnnnnnnnnnnnnnnnnnnnnnnnnnnnnnnnnnnnnnnnnnnnnnnnnaaattcatttttatcaggcagaactttcaataaaatccatctataaaacatccagctgtcaaaatttatcagaaaaatgttgattaaaaaatatatttgggtccttgttagtttggttcagacataatccttctgttaactaacatttaggaattaccatataagactaggtcgctgtttctaagg

SEQ ID NO: 40643 - DNA, 250 bp, Homo sapiens
taaaaatgttgttaaaaataattcaagcataaaaaaaggtcctgagtgaaaataatggtagatggaatgtggacaggttagagatattattaagtgaaaagtgtgtctgtatatgcatagaattagaaaagataccagaggaattggtaatattggctacttgtcagggaaactgggtgggtggaagacaggggcaggaggcgactttttacttgtgccctgtcccaccattttaatttttttttttttt

SEQ ID NO: 40644 - DNA, 324 bp, Homo sapiens
ctttttcctaacattttgcccgttctgtatacccgaagactgaaaacagtgttatcccatttgtcagtactcccattccttcgaccctgacaacaggcacgttcacagcacagtcatccctgtttttgccctactttaagcaccacagttgggagtgcagccttagaggaatgatgcatcaggaagcgtgactccctggccttggtgcctctgagtgattggaggagacattcgtgctggggccaccgaacccccagggctggcatgttgatgtctgaatgtgaaaagccagatgctttggtgtattaaacaagtgaagaatga

SEQ ID NO: 40645 - DNA, 332 bp, Homo sapiens
gggtggggtaattgtcaacaaagggagaagaaagtggtttaagatcagggcagcagaaaaattagagaacaagaatatcataatatggctcctggttttctttataagaggcagtgggaagatctgactagatgaaatgtatcatcaaccaaactggcatctaaaatagaatgggataaatactgtatggggttattggaggcatattaagaaaggacacctaatttattttgggaagaagtatgttaagagaagactttctagagaaggagaatggggcattctaggaagagtcaatggcatgtgcaaaggcatgaataaagacagtgagg

SEQ ID NO: 40646 - DNA, 332 bp, Homo sapiens
ccagggctgacccctcacctgtggaacctctgtacttcatgggcgctgcccaagagctggctccgttcctcggccagctgctgtagggaccgccagcgctcattcagctcctgcaggacagcaaaacatcagctccactgcactccctctcctgtcatgcccccagtcagactttgggaaaatgactttgtttgaaggagatgctagggcatatataatttcctgtttccaaccttcctcgctgaataaattagtatacaatattccagtaagagccaagccaaaactagctgtgcttgacagcttcaacacccacaaacacctgacctagg

SEQ ID NO: 40647 - DNA, 327 bp, Homo sapiens
  misc_feature (1)...(327): n = a,t,c or g
nnnnnnnnnnnnnnnnnnnnnnnnnnnnnnnnnnnnnnnnnnnnnnnnnnnnnnnnnnnnnnnnnnnnnnnnnnnnnnnnnnnnnnnnnnnnnnnnnnnnnnnnnnnnnnnnnnnnnnnnnntaataataataataataataataaatatataaataaaaataaatttaaaagattatttaaaaaacaaaacaaggagtcagtgatctctaagtttttaacctcaggtgactataagaatagtaatgccaatagtataactttggaaagcagaaacagaaagctgacattcctatgggctgaagtaacagtggtacacagggtgtat

SEQ ID NO: 40648 - DNA, 325 bp, Homo sapiens
  misc_feature (1)...(325): n = a,t,c or g
gtccgggccaaagatgactggggtaagggcagataagacagagggtatgggatggggaggagagactgtcaaaaaatgaagaaaacaagaatccttggcctgagggccaaaatttgctgacccttaaagtaatgtagtannnnnnnnnnnnnnnnnnnnnnnnnnnnnnnnnnnnnnnnnnnnnnnnnnnnnnnnnnnnnnnnnnnnnnnnnnnnnnnnnnnnnnnnnnnnnnnnnnnnnnnnnnnnnnnnnnnnnnnnnnnnngtccgaaatgctccaatgagcagtttctctgagcattacgtcagcactcagaaagttctgg

SEQ ID NO: 40649 - DNA, 325 bp, Homo sapiens
  misc_feature (1)...(325): n = a,t,c or g
gttggatttgactatacgatggtaagaattttaaaaatttattgccagcatttaaaagtcaatagaactcacttgaattccagatttctggcatctctgaaaaaaaaaaataggaagatctggcaatatctgttatccactcctgcctgacactggctggagagagagatgagtattggggtaatattaagggcctcctgtaaacgggcatgtgctctctgttttactccagtcccgattacttgtactattttcatacctagctgactttactcctttacattagctgcttggagtttgtgactcctgctttanaaattataga

SEQ ID NO: 40650 - DNA, 285 bp, Homo sapiens
  misc_feature (1)...(285): n = a,t,c or g
cctccattaagtttacattctgtggaaaataatagctaccacattctagagtctgtactagtattttatatgcatcattatcttcactccacctatacagctttgccaggcaggcattattagctccactttacagagaaagaaactgaggcactaagagctccaggattgtccacctcacactgttagtctgttagtgatgaggcttggacttctgcgtagatccgtgctcctttccacagtaacaccttatgtgacaaaatgncgacgnggnancntacgcaa

SEQ ID NO: 40651 - DNA, 332 bp, Homo sapiens
  misc_feature (1)...(332): n = a,t,c or g
attgtggttttctttatatttatcatacttactgataaacatgataaaggagaccacaccttggcaagtgataataaaacaactgaaaagtaatgatgagaaaatcttaaagcagctagaagagagaaaagatcaccttcaaaggagcagctgggaagacttagttcacttccattagtaacagtggaatgaatccaggagatggtgtataaagaatctttaaggtgcccttcaaaaataagacattttcagataaggaatagtggagagagttcattactagaagacgttcactaaaggaaatgctgaaggttgnttttcangcnnaagaa

SEQ ID NO: 40652 - DNA, 295 bp, Homo sapiens
cttattcatgactcacataacatccagattttactggctactaatgagcctgggcttagaattttccgaggttgaactgttcatggctaggaaatagatgattagggtgtaatttctcacatcctacatggttcacagctgctagtaaaggaagttagaaccctctcaaggaatgaaattacagtttcaaattttccagtgttatctctatgtttagaaacacacctttattaactatttaaaaatggaacaattttttctaagtgggaaagctttcagggtttaccactgagtg

SEQ ID NO: 40653 - DNA, 305 bp, Homo sapiens
gaaatgatgggacagaatggatgaactgcgaggtgagaccagcccctactaggagcgtataagcaagatgaggagggagtggagtggataagaaacgcagaggaagacaatagttaagactgcattctccacacacacatagtgttggtgctccgctgctcccccacccttatctgcttaatttataagttctgcttggcttcatcatgctgacacgtgccaggtgcctgtcagtgctgagttatgttgggcagctcactgtttcactgttttagctattccctggtgccctaggcatcattttc

SEQ ID NO: 40654 - DNA, 308 bp, Homo sapiens
  misc_feature (1)...(308): n = a,t,c or g
nnnnnnnnnnnnnnnnnnnnnnnnnnnnnnnnnnnnnnnnnnnnnnnnnnnnnnnnnnnnnnnnnnnnnnnnnnnnnnnnnnnnnnnnnnnnnnntaaaaaaattttatttaacacctgtaaagcttctggagtataatcattttaaaccttgtttgaatattttctaaaacattaataaaaatggtaatatttcaatatattttcttgccttaataaagtatatgctgaatatcattacattttataaataaagacataccttattatcaagtcttatgtaatacagtagtgtctcccattttccat

SEQ ID NO: 40655 - DNA, 328 bp, Homo sapiens
  misc_feature (1)...(328): n = a,t,c or g
gtcattttcatttataattaagtgttcctaaagactatttgtgagaaatttgtgtatacgctgttcaaaaacagcacaagaatcacaccaaagaggaactgaaatgtcctttcatttctgcatccatcaaatggatctgctagccgaatgcagggatggacatggagaggcctgtgctttaggctctgttctaccatgtaccagctttgtgaccttggataagcctctcactctttctgagactcagtattctcatctgtgaaatggagatagtaatagttgctctgcctgcttcactacagaggggngtaggatacatgcanagggc

SEQ ID NO: 40656 - DNA, 335 bp, Homo sapiens
  misc_feature (1)...(335): n = a,t,c or g
tttttaaaaaagaattactggagctggatgnnnnnnnnnnnnnnnnnnnnnnnnnnnnnnnnnnnnnnnnnnnnnnnnnnnnnnnnnnnnnnnnnnnnnnnnnnnnnnnnnnnnnnnnnnaaacggnnnnnnnnnnnnnnnnnnnnnnnnnnnnnnnnnnnnnnnnnnnnnnnnnnnnnnnnnnnnnnnnnnnnnnnnnnnnnnnnnnnnnnnnnnnnnnnnnnnnnnnnnnnnnnnnnnnnnnnnnnnnnnnnnnnnnnnnnnnnnnnnnnnnnnnnnnnnnttagagcaagaccttgtctctgaaagaaaaaaanaattgagggaaaaaatgc

SEQ ID NO: 40657 - DNA, 330 bp, Homo sapiens
gttaaaataaaagttttttaaaaaggggagagagagaagttaggcatgcaactgggaagctgaaataaaccaaaaaaattaaacaaaaataacttccttttatttgtgctgttgatgctcgctctatgagataaacctttcctttttttattccttgagtcttgaaatgttgaagagattgttgttagaattaaaaaaatgacgctgagtcaatttctgattgaactccataaaacatttttcttaacagtattacacctctacagatcaaggaatactagagagtttagaagcaggatgaggagggcaggtgagaccgggttgctctgt

SEQ ID NO: 40658 - DNA, 332 bp, Homo sapiens
  misc_feature (1)...(332): n = a,t,c or g
cttccacagagtaaaatcaggaaattcattctggtacctggtctttagagttcaatgtttatgcctatgtgcatttttgtggagagaggatccaaagcatctgtagcatactcaaggagacctccagcctcctcttaaggagtgatgatctagagagaagcagggtcagtcccattcttagccaccagactcaattattttgtgtctcctaaaggaataatatttccaacagtgagaactgtaggaaaacgattattacagtagaacttaacacttgnttttgattatggaaatctgaggaggcttttcgtaatgcttgaggaatgccaagc

SEQ ID NO: 40659 - DNA, 295 bp, Homo sapiens
  misc_feature (1)...(295): n = a,t,c or g
gagcctggtgcggtggcacacccgnnnnnnnnnnnnnnnnnnnnnnnnnnnnnnnnnnnnnnnnnnnnnnnnnnnnnnnnnnnnnnnnnnnnnnnnnnnnnnnnnnnnnnnnnnnnnnnnnnnnnnnnnnnnnnnnnnnnnnnnnnnnnnnnnnnnnnnnnnnnncaaactgtccaggtgtggtggcacangccctgtagtcggagctaataaagaagctgaggtgggaggatcgnttgagccccaggatatggaggctgcncgtgagctatgatctcaccacttgcactccagc

SEQ ID NO: 40660 - DNA, 294 bp, Homo sapiens
gcaaaacagaatttaatcaacttctagagaatctaatgtgaccactgaattcaagcaatatttaaaataatgaatctctaactttgtagtcatttaaaaaatatttgatatataagataacttttctggttttacaaaatattttaacataattataggcactgttgtcaagtactcagcagttagctcagtgcttaatgccttatatttattttctctacttcttaaaacagctaagcagtgtagatagagttgaagtccttaagaccaaatagtgcataagaccttgatccg

SEQ ID NO: 40661 - DNA, 286 bp, Homo sapiens
ctcggacttcagagttactcgtaacaaccccatgaggtacatacagtgcctgcaactttacagatgaggacacagggtcagagaggttgctcaagtgctcaaagctgctgggccaattgctgggattccaacactgctctgtgtcacccacaagccctgcttctacccagaggccttgaggatctggtgaaggcctggcttccataccgctggccactccctccacccctacctgtgcacgcagttgatgctctccaggtaggccatggctttgcatatctgcagc

SEQ ID NO: 40662 - DNA, 297 bp, Homo sapiens
tgttgttggtgtgtgtgtgtgtgtgcacgtatgacagagagagaaagaagagggaatatgaatggcatgggaaataagagaaaggcaggccaggtcagagggtttttaggatggcctgtgaggtgtaggagggtctggaggtcggccgtggagtggagaagagattgaggactcaggcactaatctaaggggaagggggacactgtattctaagggggccagtcctgctgctccctgtaagcactttatgtatttgacatgaaatatactgagatggcccccattctttagggtgca

SEQ ID NO: 40663 - DNA, 300 bp, Homo sapiens
  misc_feature (1)...(300): n = a,t,c or g
nnnnnnnnnnnnnnnnnnnnnnnnnnnnnnnnnnnnnnnnnnnnnnnnnnnnnnnnnnnnnnnnnnnnnnnnnnnnnnnnnnnnnnnnnnnnnnnnnnnnnnnnnnnnnnnnnnnnnnnnnnnnnnnnnnnnnnnnnnnnnnnnnnnnnnnnnnnnnnnnnnnnnnnnnnnnnnnnnnnnnnnnnnnnnnnnnnnnnnnnnnnnnnnnnnnnnnnnnnnnnnnnnnnnnnnnnnnnnnnnnnnntcatgttcatttcttcttgctgctgcaacatagtttgcagtttcctacatttagtg

SEQ ID NO: 40664 - DNA, 288 bp, Homo sapiens
cgtcatcatgaacctgtcctatctgtgtagttctttaatatgtcagcactcactgaataaatatacagtcacagaaaaagggcaatgaatggttatccggtccctcctttattaccgggtgatggagttgtgacatggtaatgttaaccggcactctgtgccagacttcccatgactttttatgccagacttttgttacttcccatggatttcttccaacactgcctgttacctgtggcacaaaatcaagaagcaaatagttcctgacctctaaggagtaagaggaac

SEQ ID NO: 40665 - DNA, 287 bp, Homo sapiens
gtcaccatcgcatatgctgtctgctgctctgcttaaaagcatcaggtgctttttcatgtcaccccctgctgctacaggcttcacgtgtatgtaattttcctggacgaagaggggtgctattgaataatcatgaaaaaagagatctgacttgtccacaagtgacatgtgagcagtctcctctccagctgcaaacactttccgggcaacatcaaacgggcccattttgatatcctttttggctctgtgagaatcagctttggcctggtcataggttaatgctttacttc

SEQ ID NO: 40666 - DNA, 331 bp, Homo sapiens
  misc_feature (1)...(331): n = a,t,c or g
tactaataaaaattgataactactatttattgagtgcttattaagtgttctaagcatcttgcatgacttaattctcattacatctctgtgaggaagaggttccatttttacccattttatagatgaggaaattgaggcttggagaatgnnaggaactnatacaaggncncacaacgaactgaagcctgtgcctggattngaacccanccgtntggctactanggnggnctctggntctcttttnctaatngactatgctctttaaaattnncatnntcnactgacccatnttaagaanggctataanataatgacatnctgactnctggcc

SEQ ID NO: 40667 - DNA, 329 bp, Homo sapiens
  misc_feature (1)...(329): n = a,t,c or g
nnnnnnnnnnnnnnnnnnnnnnnnnnnnnnnnnnnnnnnnnnnnnnnnnnnnnnnnnnnnnnnnnnnnnnnnnnnnnnnnnnnnnnnnnnnnnnnnnnnnnnnnnnnnnnnnnnnnnnnnagaagagagaggtaagagctgaaactttgaaaattggtgaaagataatatgcctaaagtggaattgttgaaaatacccattctttgttaagggaagtctaaaggaaagaaatccaatcagatctgtggtgggaaaagcagaatagtgctgtgcaagatgggaagactttcaagattgacagtattgaaaatttagggatatctaaatgc

SEQ ID NO: 40668 - DNA, 327 bp, Homo sapiens
  misc_feature (1)...(327): n = a,t,c or g
accgcttacacacagcaaacctgggcgattcaggcttcctggttgtcaggggtggtgaagtcgtgcaccgatcagatgagcagcagcattacttcaacactccattccagctctcaatcgctccccctgaagccgagggagtcgtcttgagcgacaggtaatctcccctctcagccattaagtgtgagcaggacgtggctcattcatagtcccctcctgtcccccttgagtgcagtgaggtaggcatttccatgaaaagaatacactgagaatgttctcatcangaggaccttttagtttaactttgaaagatacttttctggaact

SEQ ID NO: 40669 - DNA, 327 bp, Homo sapiens
accgaactcaagtgttctacacgcatcaatgttatttcatcttcatcacagccccatgaggtacatactcattaatatcttcattttaagaaaactgaggccaaaagagatgaaacaacttgccccaaaccacagctagatcaagattcaagctgtggctgtatgaagctttatgcaacacaacctgaaaaaaaaaatgcgaattttaaaaagggatatgttcagtacattttttactgtgtgccatgaaatcccaaagttgaaatgaatgttcagaaatcattctcttccctttacttctgtggatcctttcacatcaaaaatcag

SEQ ID NO: 40670 - DNA, 320 bp, Homo sapiens
  misc_feature (1)...(320): n = a,t,c or g
nnnnnnnnnnnnnnnnnnnnnnnnnnnnnnnnnnnnnnnnnnnnnnnnnnnnnnnnnnnnnnnnnnnnnnnnnnnnnnnnnnnnnnnnnnnnnnnnnnnnnnnnnnnnnnnnnnnnnnnnnnnnnnnnnnnnnnnnnnnnnnnnnnnnnngtaccttatagcacaagtacctaagtacctgtttacctctttagatgctggtagaccacttgttttgctagtctttgaaattggaaggagtgtcaaatacacagaagccagagtcatcttggccagatggtgtttgatacagatggatggttagttgtcatgcagatctc

SEQ ID NO: 40671 - DNA, 324 bp, Homo sapiens
aaacaattgagcccattgcctttgccctgggtcttgtgtttcctgtggaagccatctaaactcagtgtgctcagctttgcttctcctcccagtacaaagccctcccagcaagccggactggtatgctccctgattcgcgtgtccaccagctccactccagcgtgtactttctaccttcctgttaatgcaaagtgccgatcctgtcctttgaacaatccaacttgggaggtaccttggattaactagagcccaactctccctttctagatgatgggaagacatacagagtaaagaacctgctctgaattccattacacaatgaga

SEQ ID NO: 40672 - DNA, 320 bp, Homo sapiens
tttgaacatttgtttaaaaaaaaataagttttccaacaaaccagttggaatcaataacacattcataaagaaattcaaaaactgtacttgaacgttcctaggactattaagcattttgttgatagtaaaaataaagttttttaaccgcattacagtaagggaatttttttgttccaaaatgaaaaatacaaattaagttttctagctcttttgaaaatttaagttaataatagccacaccaatagattcaactggtagttcccgtagcaattttaggccgtattaaacacatacacacacaaactgcatacctatgagga

SEQ ID NO: 40673 - DNA, 338 bp, Homo sapiens
ggagcctgaaggttgcccctggttgcatcccagaagcatctgactgtcaccactgccagtggctgtggaacagtcctgggccctgggccttggctgctgtcaacagatgggctgggctgggctgtggtggggtgggggacaacgttggtaactctgagaattcagctttggagtcccgggtgaggggttttagataaacccatcaatatcacccacattctgtgactctttgcatcactcgtgttatttatttatttatttatattctgccttgttccagaaaagtgtttaaggcaacaacgcttgttttttggtgttttcttttgacatttgaaaag

SEQ ID NO: 40674 - DNA, 336 bp, Homo sapiens
aatacccccatatacaaatctgctaaatgaatgcctttgaaagtttctcaaggttcagtcaagttgttatttttgtatgtgtgaagcattttctttaggaacatggtgggtatctctgagttctaattttccacagccaccttaagaatgttttgaaacagtgggattaattgtaatacatagataataacagttctgaccgtttggaggttttaaggtaatgtgccttgaatagagttcagctttcccatgtagttctctttggaacagaacccatggttgccattaggaaaaggaacaatgtgctgtcagcaggcattatcctcttttctagcg

SEQ ID NO: 40675 - DNA, 336 bp, Homo sapiens
tttattaaaagacctgtaaatgtgggtgacttcagcttcttaattttccatttatctggtaagcacaagataataggataatttgttcatcagtgaatggtgcttggtccttttcttaacataggtccacagtggaggaagtgaatatgaaagattcctagaaattgcttttgttgatcaactgctaacaagcaatcaggtcactgataatcttcttagaaactgaactagaaactaattctggggactggtatgcccttggcataagtgtgcccaacatagagactgcttctactttcccttttattcacctctgtctctcatttatcatatcag

SEQ ID NO: 40676 - DNA, 333 bp, Homo sapiens
atttcctacagaaagtctgctttgcctttcttttaaaaactttatgatgagaatgcctgttattcaatttgaaatacaaggaaagctctaaaataaacactctttgtacacagtctctctcctaatttttagaatgtagataacatgatcatgaaaaattacttccagcaatttttctaaaagtgatctaccccttaataaattaactacacctcttaacatgataaaatgatccattataatgatgtctcaatttataatctgaaggatttttgatcactgtgttctttgaaacagaatatgtgaatgactaatagtcggccacatttgtga

SEQ ID NO: 40677 - DNA, 343 bp, Homo sapiens
  misc_feature (1)...(343): n = a,t,c or g
caaaaacagacgtaaaggccgggtgtggtactcaggaggctgagtggggaggattccttgaacacaagaagttaaggctnnnnnnnnnnnnnnnnnnnnnnnnnnnnnnnnnnnnnnnnnnnnnnnnnnnnnnnnnnnnnnnnnnnnnnnnnnnnnnnnnnnngngaatgttttaaactgaatgataatgtaaatattatacatcgaacttatgacatgggaagtcnacgcggccgcnaattccannnnnnnnnnnnnnnnnnnnnnnnnnnnnnnnnnnnnnnnnnnnnnnnnnnnnnnnnnnnnnnnnnnnnnnnnnnnnnnnnnnnnnnnnnnnnnnnnn

SEQ ID NO: 40678 - DNA, 342 bp, Homo sapiens
  misc_feature (1)...(342): n = a,t,c or g
ttcatatcctgtgatatttgtacaccannatgtatttgatacagttagtaagtagacaattgctaaaggcaggtgtatctataaaggtaactagaaggaaatagattacataaaacaaaatattcactggattactcattctaattggtggctataaatttaaaatttaaaattatttgtaattattgagtgaaaaaaagatcattttctctttaacaaaatagtgagccataagttttcaagaatatagcatttggcaatgtaagtataagaaaaagaatcnnnnnnnnnnnnnnnnnnnnnnnnnnnnnnnnnnnnnnnnnnnnnnnnnnnnnnnnnnnn

SEQ ID NO: 40679 - DNA, 332 bp, Homo sapiens
tttcaagcgccaaagaatacaggtgtgtacttgaagaccttttagtagtgaaactcagcagctgtaggcagtgaagaaaggagcatatgtgataaacaaaattagctgtggtcaacaattatgctatagctaacttatgtagtcagtactttccagtgaagttgaaaataaagcaaagttccatgtattaaccctgttttccactaacccttctttacatgtaggacatatgccagggtaccaaaaactgcaggaatattccctagcattgcagcctcagttctaataccaaaatctccctgcagactaaatgtctagagcagcactgtatc

SEQ ID NO: 40680 - DNA, 331 bp, Homo sapiens
ttgacatccttatcattaactgtaatttaattagagtgatttttttgctccttaattattcaacattgtgtaaagaattttccatccaaagtaatgtgaggcagagctacctgaatttcagtggtgataagacaaaaatactttggcccacagctttttcaggaccactctaaagaaaagttaatgctgtgaagtttaatttctatcttccttggcccacattttttctaaggtagtgatttttggtgacctgaaacccaagctgcgcctgcccttttcaatgactgtcctaaacggttacaagccaaacaagattgaacactgactgacg

SEQ ID NO: 40681 - DNA, 337 bp, Homo sapiens
ctgcagtcaatgtcccaaggtcccaagattattgttagagctaggaagtcttaagttaggtctaatttgtcttgttttgcaaatggcacccctgaaattcagacagttccagggctactaagtagcagaacctagtctgaaaggtatgtatcctaacttttaattcagtacattaagaggaaatgatgtagctatcaatttcttcacatagatctttaagaacatgggatactactttccccaaattactatctaagaatagagacagacttgtataatgtcttcaaactaaatcaagtctgtcccttgcctactctcttcctttcacatgaattct

SEQ ID NO: 40682 - DNA, 337 bp, Homo sapiens
cagaattcaaattaggataaattgcatattatatgtgaatttaatgttataaaatttaaagccagaatgattaaagagaataatttccttcatacgttttggggggaaactagaggctgaatggtatctatcctcacaaataattgtaggcctattgtgtatggagcaccacgcaggcaccacagaggataaactatgagcaggagagaactctggtaacttataacgtaatgggctcaaaagaggctattttccaaatttgctatggtgaatgtagaacatctttataatggaaggaagactactaaaactgccttaaaaagtattttatggcatt

SEQ ID NO: 40683 - DNA, 330 bp, Homo sapiens
  misc_feature (1)...(330): n = a,t,c or g
ctcagactgaggcttatctggggagtacaaagcatgtcaagaaaatgtgccttcatttccttagatgagtgtccccatcctccactctcctnnnnnnnnnnnnnnnnnnnnnnnnnnnnnnnnnnnnnnnntttttctttaaattccacnngantganatcatgnggcntgttngcctttctgtttcnggctnatttanctgancaanaangtttttgacatgaanntaancttnngctngtaaactcantncaaactatttacactgtcttctaaaaanngttaactnattttaataannntactgantgaccgtntctaatttngttt

SEQ ID NO: 40684 - DNA, 336 bp, Homo sapiens
atctgtgtcttcctcactggccggggacactgggctgcccagtgatcgaactgctcgttcaggaaacaagactccttggttgtgactgtggcaccaccacccccaaaacactcccctttcttccgccacttctgcttccatgcctgcttgcggaggagcctgctacggagtgcccggccccgcacgtagtgtttctgcttcatgttgagccgtacgtaattgcccctgtcatggcgggccagccgagggaagatgtgcaggggggctgtgccctcagccttcccagccctagcttgactggaggggctgagtccgtggtacctggggttcgatggg

SEQ ID NO: 40685 - DNA, 293 bp, Homo sapiens
cttttttcccctttttagttctggcctgagccttgaagattctaagaaattgacagcttctcccagtgatcccaaagtaaagaaaaccccagctgaacaaccaaaatccatgcctgtgtcagaggcctctcttatcagaatagttccagtagtctcccagtcagagtgtaaagaagaagcattgcaaatgtcatcaccaggcagaaaagaagagtgtgaaagccaaggtgaagtgcagccgaacttctccacatcttcagagcccctgctttcctcagctctcaatacacatg

SEQ ID NO: 40686 - DNA, 297 bp, Homo sapiens
aaaaaataaaatgcttctattttaccttttttcatttcagaagcattattctgtttattaacagtgtcccatctactgaatagaaaactttgagaataatatatatatatattttaaatgttttcactgactcattgaaaatgttaattacacacacatgcatgcatgcacacacgagcatacttgtacctttgtctctgggcaaacaggtgggactgttagtgacccatttgggaaaatagagcatctcagagaaggaggtgagttcttcctgcctgtgatttctcttggcgctcc

SEQ ID NO: 40687 - DNA, 292 bp, Homo sapiens
  misc_feature (1)...(292): n = a,t,c or g
ggggaagcaagctccttcttcacatggtggagagggagaaagagagtgaagggggaggtgctacagaaacaaccaaatcttgtgagaactcactgtcatgagtttgnnnnnnnnnnnnnnnnnnnnnnnnnnnnnnnnnnnnnnnnctattatttccatgagccactactaggaaatctattggataatgagattcaaacagccaacatgacttgagacatctatgtaaggactagtgataagcataataaatacatctacatttaaaactaactgatgaagccagtcacag

SEQ ID NO: 40688 - DNA, 288 bp, Homo sapiens
  misc_feature (1)...(288): n = a,t,c or g
ctccaatagcagctccttcgttttattttcttcatagcacaagtataatctttctaaaacattccttttccgtgtgtcacctataataggataacatctgcattcttttttttccctnnnnnnnnnnnnnnnnnnnnnnnnnnnnnnnnnnnnnnnnnnnnnnnnnnnnnnnnnnnnnnnnnnnnnnnnnnnnnnnnnnntctgaattcttaacatggtttataaggagctttgttcttcacagtctgagtttccacttcatagcaatgtctcctgccacactccttt

SEQ ID NO: 40689 - DNA, 257 bp, Homo sapiens
  misc_feature (1)...(257): n = a,t,c or g
tagcattttaaggactatataagcaatggataaggcgaaaactctgcctttaaggagatcagtcattggggggaaacagaagcaaacaaacaaaaaggcaacataatagatattaatattaatacaagaattttaaaagcacagagttctataataataggaaaatagaagcgaccgcggncgcnannntgnntannnngntntnnannncnnggannnnnnnntttttnnnnntnnncnnnnannnnntnnnataa

SEQ ID NO: 40690 - DNA, 287 bp, Homo sapiens
ctcagagtcaggggacagacagaccagaatggacaggttagaacaaacaagtataatgcatacatgacagaagtagaacggtgctttggtggctgggggagatccctggctcatctctctgtttgctatctctccaaccctcctggatttcattgtcatcatgttttactcctggtctaagcagaacacgaattcctctctgcctggctttatgaccctccaagaatctggcaccaagccgtgtcatcttagaacacctacttaacctctctgagcttcagactcct

SEQ ID NO: 40691 - DNA, 262 bp, Homo sapiens
atcattcctgtttgcttgaaaagtgtagtgtccaaaacagaatgtagttatttgattctgacctagagcaagaaaatcacctcctcatcaggataccatatttctgttattgcaacttgaagtcacctcattttagtggcagcagtctcactttaaatactgggtgtgatcagctaatgacttaatggggaatgtaagggatcattttagataaaaggccaagatgaaaaatggacatgtgaaaatagtttttttttttttt

SEQ ID NO: 40692 - DNA, 294 bp, Homo sapiens
ctgaaatgttttcccttctagtattctggtttttgaaagaaatttattgattgcccatttccaacgttttttttactctcgaaacctgaatatcattgaaatagagcgaagtcccagaaatggaacacacaaccatggaataaagtatttttgttagaacataactttattggtgcagagccgtattttcgttttgcattgcaggaggcttcaggtttgccatttggtaatcatgaatgtgttgagtaaattcttctgctgtctgtctattctgcaggtggactgaaatgtcag

SEQ ID NO: 40693 - DNA, 289 bp, Homo sapiens
cgcggccgcgtcgacatgaaattaaaaccttctcaattcactagccttgtcaattttatctagaggctttgctcaaacaacattctttctagttgtactaaacccaggctggatatatggcaaaaagcaggataaagaaggttttaatttcatatcccagatcccaggtgccagtttttagcctcagaatcacagaaaaaaattcctcatgctcatttgtaatttccaaatatagaacataaaaacctataattctaatgttaaaattcttatccttacataagttaac

SEQ ID NO: 40694 - DNA, 295 bp, Homo sapiens
  misc_feature (1)...(295): n = a,t,c or g
caggcatggctggcaggcatagccgtgctctcttcttggagcagacaggactgactttggtaaactattaaactgtccccacaggaattccaaacccagggctctctgtcccaaactcctttcctatctcagttggcaaatagccagcctcccggcaacaagcccaattaatagtttagggtttttttttttnatacccactaaattcactgnggcaaaattttttttcacagccnccngnccntgtctagnanccctgggtttacccaaatgcntggccacaaaanaagnggag

SEQ ID NO: 40695 - DNA, 296 bp, Homo sapiens
gatgtcccagatcttcacgtatttgtcagctgaagcagtcacgagacagcccttgatttgactgctaagatcaagaccagagatttcatcattgtgtgcattaagtgtaaaaattggcttatctgaacgtgcatccaaattatatacaaagccgtcatctgtactggccaagaaatgacaaggtgaaaagtgattccaagtcactctctctatctgcccactgaatcgccacattcgatggctttcatctggacttcggcagtcatacaaagccactgacttatcatatgagccag

SEQ ID NO: 40696 - DNA, 307 bp, Homo sapiens
gacgagcccagagttgaggagctcagatttgggaactcttctgagctcaggacataaagaagaagacagattatttggagaaaaaagtttgaaaggtttttgtgaactggatttataatgtaaaggacagaactttgttgagttgttttccaaggttcagcaaacgaattgcatttcagcataaatttgtcaaatggtagatgagaaatgtattgttcaccctattgaggtagtaatgttggaaagagatcttgctgtacgatacaggagaaggaaggtttattaaactgcacagaatgtctgccag

SEQ ID NO: 40697 - DNA, 310 bp, Homo sapiens
gccatatcaactctcagttcaggccattaaatacagacaaattttcaaattcacttctttacttctccaagatcttcgatgctgtcatcatctacctctggccatttttcctgaatgacatcaattatgtcatctgtaaaatctccctgaatgataatttcatcctcccctgttactgaggcaccacaggagaatttttgagcaaaaaatctttgtgcttctttaagatcaatttcaaaagttgcaaggccacatactcttgtcacatatttcttctttgctctgggaattttggctatagtaacctttt

SEQ ID NO: 40698 - DNA, 316 bp, Homo sapiens
  misc_feature (1)...(316): n = a,t,c or g
ttctaccttgagctaattcagagcaaaggtaccgtagggcaatgattgaataattctggactgattcattctttcaacaaatgctatgtgctgagccctattctaggtgattagaatactttagcaaactaaacagacaaaagtcctgctttcttttttaagttttattatttttannnnnnnnnnnnnnnnnnnnnnnnnnnnnnnnnnnnnnnnnnnnnnnnnnnggnatanncgagnantantatgaangtcantatcagnnnnnagtgttngncantnatgcnttcaagaggncaatgncagactganaata

SEQ ID NO: 40699 - DNA, 280 bp, Homo sapiens
  misc_feature (1)...(280): n = a,t,c or g
gctaagtatgttgctcccttaggttcttgcagtccatgctgctggcctgactactatggaggtaaagggaaatataatcaaatatgtcacccactttgcataaggccaaggccacctataccttgtctgacttgagacaaaacttgctgatctctgccgtgtggttctggggcttctacctccttttcctaagaccgaggggtgggaatgatgcctgccaactgaaatgccattaattccaggtgatcttcctggacttgaatgtaatttancactgtta

SEQ ID NO: 40700 - DNA, 289 bp, Homo sapiens
  misc_feature (1)...(289): n = a,t,c or g
atcaaatccatatgctaagaatatcttgccaaataaatgaattgcttttagcgatgacccattttagaaggaaaaaaaaaactaactaaaatttttgcaagggaaattaaattactctaatggactacttacctcaaaacctacttatgctttatctacattaaaaccattctaagaaacagtgtaaatggttgttccattaataattttgctttttcaaaaataagcaaaaaaaaaaaaannnccccaanttttnggggccngaaannttangggnnccnnnntttta

SEQ ID NO: 40701 - DNA, 290 bp, Homo sapiens
cgaaatttggaatgtcagacaattcctcatatttgtgtattattttacaaactgctgtcatcttatttcagcatcagtactatacaggaaacaagctcaggacttcgtagttttttggatcaggttccatataaacaaaatctaaactcacatctaattcagggtatagtttcagtcaatctgaccacttctacatccactttagtattctgtaactcactacaagaccttggacaaataaccccaaggctagaagaagtgagtagatgctctaagataatggtgaccaa

SEQ ID NO: 40702 - DNA, 282 bp, Homo sapiens
ctcatgtatacatatatacgtaaggtaagttctataaaaataaaaataataaatatttgccatacgctgttatatgtatttatattttttaatgtatcttcacaacaaccctctgaaatagctactcttactcctctccattttacagatgagaaattcgagtcacagaaaggcaaagtagcttgcccaagtcattagtaacacagagctaaggttaaaacacgggcagcatggtcccagggtccatcttaactctaccatgctgcattcagagtaaaggct

SEQ ID NO: 40703 - DNA, 290 bp, Homo sapiens
ctatggtcaccatgctgtgcactagatcacaaaaacttatttctactgtttaactgaaactttgtacattttgactaacatctccctttttcccatcatcccatcccattcttactatcgttgaagatggagtatgccaagtagtcctgagccatgtcctcacctcggggtgagcacctgttgttcctgtgcctggaatgctctcctagacatttgcgtggctagctccctcttttcattcagatctcagctcattgtcatctcagagaggccctccttgccctccttct

SEQ ID NO: 40704 - DNA, 281 bp, Homo sapiens
gggaaatgcatacaaatcactcaaatccagagaacaaactaagtccaccaagaaacagtatagaaccagtttcctgaccctgctcagttccaaacatcaaccttgagaacattccatgtaaaacatttgatggaacctgctggaatctgggttgccaatgaaaatgtgacattctgtctctagactgaagctatagaaggggacttcccaccacctgtcctgccctctggatttcctgcttcaatttgaacagataagtcctggcttcatttcccaagtct

SEQ ID NO: 40705 - DNA, 355 bp, Homo sapiens
  misc_feature (1)...(355): n = a,t,c or g
atttttttcnnnnnnnnnnnnnnnnnnnnnnnnnnnnnnnnnnnnnnnnnnnnnnnnnnnnnnnnnnnnnnnnnnnnnnnnnnnnnnnnnnnnnnnnnnnnnnnnnnnnnnnnntttccaccttggcctctgagtaactggatcacaggcacatgtctccactcctggccctggattttatttttaggagtagttttaggttcacagcaaaattgagcaggagtacagagagttttcacatacacccattaccctacacagtcataactgtacccacacatgcatagcttcccccactatcaacatcctgaataaacaagtttgttatttttgagttcaccaattttcttacttt

SEQ ID NO: 40706 - DNA, 339 bp, Homo sapiens
gtttgtgtgtgtaagaacagttgtcaaaatgtgggtgttctaccacatggcctcgcctggccgggacctggattggccccttgggtcaggaagtgtgagctgcagagagcacctgagcattggtgcggacgataggattgtgtcaacaaggaacctgcctgagcgtgccaaatgtggacagctcaaggcattgaagagaaatatttttttgcttatctagatggagaaactggaggggtgaggctttccctgacctcataatggttgataaacgtggggactgggggaaaaaaaagaaatgctgccgggaagtgtctcctttgaaccccaagtaactta

SEQ ID NO: 40707 - DNA, 355 bp, Homo sapiens
gaaaggttttgatattttgaatagacattttcatgatacacagacacagataaaagatgtaagtagacagcttgaggtttcagagtccctcctgcagtgtgtttagcagcgggtacaagataaatatccaaaccaaatcagattaagggattaacagaagtgactttgctatgagttggtgagtggggtcaatgggtggcttgaaagggattttagagctctgtttttatttttcctactttacatcagtgcattttgggcaaaataaaatgagtaatgtttacttttaggcctcagtaatataaaaaaaggcagattctaaggattgtggaaggtcatgtttttgaaagtgaaa

SEQ ID NO: 40708 - DNA, 337 bp, Homo sapiens
tgtaactgactcagaactggtgtttttgtgcctcgcgcctagcgtggctgctctgaactggccgtgtttcccattagtatcctcaacaattttagacttaagagcacatgtttagaactcaaagtattgttctctattttttaagtcagttttggcatgtgaaatcacctagagaaggcattgttcttgcaaatgtgtagcagtgtcagaaataccggcctgtgaaatatgtatttgtcgcagcaatttttaaaaagtaaagtttcctttctggttgcaaagggagattgggagaaaagaggaatgaagcgcttgtacaaacaaaagaagaaagctt

SEQ ID NO: 40709 - DNA, 315 bp, Homo sapiens
cagacttcaagtctaacatttagtaaacagatttcttccctttctttaaatgtaatgatgcaacaatgtggaaccaagtgaaactggctttgtgagtcaccttcagaagcggcgaaaggtggcttctcatttccaaagttcacagttcaacatggcctgcataagtaatacaaactgactgccactaatctcaccagaaatcacctctgtcaagaactgtgtgaggagagaggggacagagaaggaaagaaatacgtaccgacttgctctagtcgagtgcatttctaatagagcatgacataaaaaaaaaaaaaa

SEQ ID NO: 40710 - DNA, 352 bp, Homo sapiens
gttttctactatattacttggtatagctttttaagtgattgttccaggaattacaataattatcttttcagagcttacttagaatcaacatttttacaatgcaaaatatattacatggaagaaaccctaccaccatataggttactttaccatcccccctttaagttacagtaatcttaaatatgctttgaaccataaaatatatactggagaactcaagagtgtattatattcccagataaatctgctatttctgttcctcttcttcattcttgatgtgccactattccttctgatatcgtttcccttctgtctgaaaaacttcattttgctattatttaagtacagccct

SEQ ID NO: 40711 - DNA, 451 bp, Homo sapiens
  misc_feature (1)...(451): n = a,t,c or g
tttgaaggcnnnnnnnnnnnnnnnnnnnnnnnnnnnnnnnnnnnnnnnnnnnnnnnnnnnnngagatctctcgaggatccgaattcgcggccgggttgacaagagactgaaggaaggggtaaaaacatagcagagaaaaagtaaatgtggttagttccaaagtggcaaaactcttaataagatctgctttgtgctctgtattatattgtctttccaggaatgatcttcctttaaatgtattttctggtttactttgtgaccctaaatttctattttcattaccccttcccaacaaataattaattagtctgtgactccatttaaaacccatggcagagtttttattaagctccttgagatacaacttcagccttatggttattataatatgttcaggtttacctgataaatagtaagcagccctgtatctggttatgttttcgctacttaa

SEQ ID NO: 40712 - DNA, 326 bp, Homo sapiens
  misc_feature (1)...(326): n = a,t,c or g
ccactttctgcctttacctaagcttctctttctctatcctctctccattatagtctgtttgtacctcctttattctatctccagcaccagctgtattaataataaagtgatgcnnnnnnnnnnnnnnnnnnnnnnnnnnnnnnnnnnnnnnnnnnnnnnnnnnnnnnnnnnnnnnnnnnnnnnnnnnnnnnnnnnnnnnnnnnnnnnnnnnnnnnnnnnnnnnnnnnnnnnnnnnnnnnnnnnnnnnnnnnnnnnnnnnnnnnnnnnnnnnnnnnnnnnnnnnnnnnnnnnnnnnnnnnnnnnnnnnnnnnnnnnnnnnnnnnnnn

SEQ ID NO: 40713 - DNA, 349 bp, Homo sapiens
atcatctgactaagggtttatgtaaaatacaggagaggagaatgcccaaaacactttgaatttggctctggaatgcatgccgaacttgatggatgtgcctaactttcagaccaaagcaggactttacagtgtgaaggcatgactggggagaggctgaaaggcagctcagctttttcatctccctcccctactggcgatgacatcactactctgactaatatacacaatagcctatctgtagctgtatctattaaaatcctgtctatctggcctcaattttaaaagatggagggaggctgaaaaaatgtcactgtttttcacaggtctttttgataggagaggaaagtat

SEQ ID NO: 40714 - DNA, 348 bp, Homo sapiens
ctgatataagggttcaatcagtttcttagggaaggaaaaggttctaagggaacagagtgttaagacaaggaaagttatgcattaatgcctgaggagcaggttcaaaggccacctggtaagcaagacagccacctggctgtgtgggagctggctagacaaactctactccacaaagctcccagagtacctggacggctggtgaaccagaagtgggtctgccagagccatggcatcaccattgcacctgaaaacatggctgctgcgacacagctacagtatcagcagcgggaagagtaatcctatcacagaggagaggcagacatagcttccgtttgtggctgccatgta

SEQ ID NO: 40715 - DNA, 327 bp, Homo sapiens
  misc_feature (1)...(327): n = a,t,c or g
nnnnnnnnnnnnnnnnnnnnnnnnnnnnnnnnnnnnnnnnnnnnnnnnnnnnnnnnnnnnnnnnnnnnnnnnnggctgatatagtttttaaaacattaactaaacacacacccatgtccctctccctggggctggggcagcatcactaatgccctgcccagacttgagtgtcccctccccatccatggtcatgactcaccggcttgtcttcatggctttagcacataaggacctgcccctgaacagttattttgttgtgtattaattattctataacctgagtcacactgtatgactcttctgtgatttgttttgtaaaaaaatctg

SEQ ID NO: 40716 - DNA, 327 bp, Homo sapiens
gaaatatctggggtagttcaagagggacctaaacaagatagcagtggctttctgggtaggcagcccagggtagatttggaggctcctcaaagctctggaggacccaggttcctttcagcattctattctgccaatcccttggtatgacctttgccttcacaatccaagatggagaaaagacaaggaaacactgcccatccccaccctaccttaacgctccttcccccataccacccacagcacctctgtgtacagccaactgaccagggaaatgtcatcttttagctgggcagcaatgtgcccagtcaaaaatctgagttcttatta

SEQ ID NO: 40717 - DNA, 326 bp, Homo sapiens
gccctgtatttctgcacttcacaagttcaggaattgtcaatgtacctggataatttagttcaaaagagaagggcaaatatgactccaatgattccagtcacactaaacagtatcttaaagttaataatgcataacaaaagagggctcttttgactttgaacatgatacgttactgcagaacataattctgtgtttgacttagactcttttattataactagtttgccttgaagtgtgaaaaggacaggggctttggagtagaaaagctgaattcataaattttagtgagctggaacaagtcacttaacccttctgagattcaaata

SEQ ID NO: 40718 - DNA, 341 bp, Homo sapiens
ggacagtgtcagcagtgtgtcagatatatctcaataccgtgttgaacacttgactacctttgtcctggatcggaaagatgctatgatcactgttgatgatggaataaggaaattgaaattgcttgatgccaagggcaaagtgtggactcaagatatgattcttcaagtggatgacagagctgtgagcctgattgatttagaatcaaagaatgaactggagaattttcctttaaacacaatccagcactgccaagctgtgatgcattcatgcagctatgattcagttcttgcactggtgtgcaaagagccaacccagaacaagccagatcttcatctcttcc

SEQ ID NO: 40719 - DNA, 341 bp, Homo sapiens
  misc_feature (1)...(341): n = a,t,c or g
nnnnnnnnnnnnnnnnnnnnnnnnnnnnnnnnnnnnnnnnnnnnnnnnnnnnnnnnnnnnnnnnnnnnnnnnnnnnnnnnnnnnnnnnnnnnnnnnnnnnnnnnnnnnnnnnnnnnnnnnnnnnnnnnnnnnnnnnnnnnnnnnnnnnnnnnnnnnnnnnnnnnnnnnnnnnnnnnnnnnnnnnnnnnnnnnnnnnnnnnnnnnnnnntgattttctaagtaaatttccagcttctcagggtcagcaatcacatcaactactttcctgtgcgtccatcataggatggtgcctgtcacatggtgtttaaaataccagtcccaggctggggttggtgtggact

SEQ ID NO: 40720 - DNA, 325 bp, Homo sapiens
tttaaatatttatcaacactgttcgtgtgttcgttggttgggttgcaattttcttgtaattaaagatttacaagacactgctccagacttaggaaggattggtagagagcaaagagggaggggaggagagctctggtcttggaatctgttgtttggaatccaaagctagaattcactctcctgggagaggtggaagctcattcactggttcccataagccctctcctttccttctctttcacacggccccatgttcaaagtggacctcacggtaagatacagaccagggtgtggttcttccttcctctggagtccctgctatgtg

SEQ ID NO: 40721 - DNA, 340 bp, Homo sapiens
agggtggccagtgaaagactaggctgaaagggttagctgggaactcaaggaaaggcctgcagaggagtctgacatctaggaggctttgccttttgccctccacttccttcctctcttctgtctggaatgcagaagtgatggcaggagctccagcagccttcttgaagcataagataacttggaggaaggaagccagtgctaaggatggctgagtaggcagacggatgaactggctgcctgttgacccttgtcccagaaaacctgcttcctgtttgaggacggaacagaaagagcaatagaatcctttttctgtgcaagagaaattaagcctgactctttt

SEQ ID NO: 40722 - DNA, 298 bp, Homo sapiens
accagaccctgttacacagggagagacagcagaaaaagctctgtgatccttgccctccaagaccaagagaaggttctgggggcaacagtacatagtgtgcacagcattttgaggcatgctttacttatttctgttttataaatacctcggacgctgtgagtagaaacaggatctcctgccagtttagagcagaaggcctgaaggtcacatggattcctctgtgaccaagtcttaggagacaaatgctaccagctaaatccagattaatatgaaggattcatctgtgcctgaaatgaaa

SEQ ID NO: 40723 - DNA, 298 bp, Homo sapiens
ttggccatcccttaaacacaggggatcccatatgtgttgtacagtcaagagaggaaagaatcagagaagacagttgtgaagggacacatgggcaggaaattctaggatcaaatattcaaagactgatctagaaagagaccaggtagactagtctagtcaccttggccccccacaaagtcttcactctatgggtagggttgtagctgctggaggaaggccatatgaggacctttaaagcacaggtcttttgttgccagttggtgaagtcttaggacagtgctgctctctggtcaaccct

SEQ ID NO: 40724 - DNA, 291 bp, Homo sapiens
ctgttatcgagatgtctctaagatggtcaacagtggaattccgtatgacactacttgataaagtccagtcagtattaggctagagagcctatgtttatgattaagtaataatgactgaagctggagctgcacagggcatttcctgcggattaatgaccagccagaagagttgatgacccaaagcaatgccacaggccagcaacctcagctaggcattaagccccaggaaatgcactgaacctcaactcttacagtgattttaatatacaaagaaggaaaaagtttgctctc

SEQ ID NO: 40725 - DNA, 288 bp, Homo sapiens
  misc_feature (1)...(288): n = a,t,c or g
tttagtttaatttcttaaaattttatttagaatttttgtgtctgtgttaatgagggatatggacctgtagttttccttcctcttcttctgttttctttgcctggttttggtatcaggtaatgctgggcttatagaatcagtgaaaaatcctacctactctttattctttgagcctcacaaagcaggtgttcaataactattccatgggtgatttggtatagagaaaagtaaattaatgtggaataancanacagantttatggngggaaaatgtataatataaaaacc

SEQ ID NO: 40726 - DNA, 289 bp, Homo sapiens
caccatggtgctgtctcctgccgacaagaccaacgtcaaggccgcctggggtaaggtcggcgcgcacgctggcgagtatggtgcggaggccctggagaggatgttcctgtccttccccaccaccaagacctacttcccgcacttcgacctgagccacggctctgcccaggttaagggccacggcaagaaggtggccgacgcgctgaccaacgccgtggcgcacgtggacgacatgcccaacgcgctgtccgccctgagcgacctgcacgcgcacaagcttcgggtggac

SEQ ID NO: 40727 - DNA, 296 bp, Homo sapiens
  misc_feature (1)...(296): n = a,t,c or g
nnnnnnnnnnnnnnnnnnnnnnnnnnnnnnnnnnnnnnnnnnnnnnnnnnnnnnnnnnnnnnnnnnnnnnnnnnnnnnnnnnnnnnnnntgactttcttttataacatagaagagctattgtgaaaggaaagatggaagagacaaggaatcgtgcttggatacgtcaattttagaagagcacaaaaggcagttggtgatctgaaaattgatttccttaaaattgtctagacctgtgtaccccctggaaagtatcaaaccttatactgggttgaggactcttgagttaagggaacag

SEQ ID NO: 40728 - DNA, 295 bp, Homo sapiens
aaaaactgcttgcagtagtgagtatttaagttaccttactgtaattctcacaacagtcttgtcaagtgtagagactgttgccctcaatttatactttggaaaacactttaagtaacttggccaagaatatacaatttgcaagtggtagactagggagattggagaagtgataaactgtggcccaggaaagttcagggttaagtttgtgaggaaagtcagtaatcccatgtgattgaactatgaagggaaggatatagggggacacagtgattgaaaccagggaaggtacttctgt

SEQ ID NO: 40729 - DNA, 289 bp, Homo sapiens
ctgacgcactgcagggcctagaagacttccagaccctcctgcagataggctctgggtgtgatttaggttgcaccaatgagaagttcttgcagaaaggttggaaagcagaaggaaggcagaagccatttgtcctgtggtggtggtgactggcaggggctccagcagacaccatgcctcatcgcctgcacacccacttcatatacataaagcggttgcaagggcacagtagtttcttggcatgtgaactggagctgcaagcctgtgagcctgtaaccaaagacctcaggga

SEQ ID NO: 40730 - DNA, 295 bp, Homo sapiens
attccaagtggatgaaatatgtggcgggagacagaggatcctgtgtccagcacaggagtacgtatctggcttagcgaatatggggaggggggaggccgtagggagcaaagagaaagaaacctgttgacttcactggaggcctcagagtggagtgtggggaatgtttctggacctgagcgtctccaggagaaatctcgacggttcccagaagcagttatttgtgtacccagggagtgggggccctcggggagcagcacggaactcttcatcagccaggagctgtgactctgggaat

SEQ ID NO: 40731 - DNA, 288 bp, Homo sapiens
cttaaaggtcacccagtgtccttgcctatctgggcctgtctctgttcaagtggcaaggcggaccatcccctttatcactgacttgcagcttgcctgggttttttaaaaagcttgtcattgccagttagaaaataaagacagaaacctcccctttggcattggtatcgtgatgacttgctcttgttctgactctattttgctggcttgttatgagtcagtcatttttttttaatgaaatgaatacctttgtcttaatatgaagctaggcatatatgataaaggttagat

SEQ ID NO: 40732 - DNA, 296 bp, Homo sapiens
taagaactactatgtaaacatataatgaaggcgggctgttttccttcttttttaaaaaacaaatgacaaattaactccttctgattaaggataactgttgcatgaaaaggtttttaaatgttcttgtgaacagacatgtctagttaattttaaatctaaaagaactcaagtttcccattaattacataagaagcaaagaagcctcaccaaggaaaacagttgaaaaacaggtggcctagaggcctctgatgtcaagcagtcacgaagctgagaacaaatcattggaaagcatatat

SEQ ID NO: 40733 - DNA, 289 bp, Homo sapiens
tttgaattttgtaccagatgaatgtatgttttttaaacattaaagtgcagatttttaaaaattagggtgcggatttttaaaacagattgaaggtaagtagagaggaatagggctcttacctccagccactggaaggaagaaaggcatctggggcgtgtaggaaaggatcccagggtagaagataggagtccctagattctaatactggatcctctgtgactagtgtggaattttgagccagtgaattctccccacaggtctcaattaaatcatctgtcaaatgagggtg

SEQ ID NO: 40734 - DNA, 289 bp, Homo sapiens
ctgggttccagttaaactttatctacaaaaactggtggcagtagtttgcagacccctactacagagcaagccattactgtgccttcagtacttatatatactataccttaataatacctttctgaggtcaacaggccaaaacatttgcaatgctaggcttggtctatatgcctatgggagatctcactgacaagtaaactactgaccaaaagtttgtggactatacatgtaaggagtgagaaaggatcacatattttttcaaatgatgaaataaggaataacaagtacg

SEQ ID NO: 40735 - DNA, 296 bp, Homo sapiens
gagaattctcagtggaaggagctggaggagaagcacaggaaacagcaggctgagaagtgttgcaatctgagatatcacagcctgcaaaacattcctccaaccaaaattactttggtattaagggaagccccaagaaggaggctgaaatttatgtttaaatataaatgctgccttcttaaatattttaaagttttaaggaaagaatataatgtgctaacgtggcctcttgtctttgtcagtcaaaataaaggtacccaaaatggatcaagaactatactactatatccctcagtcaa

SEQ ID NO: 40736 - DNA, 288 bp, Homo sapiens
  misc_feature (1)...(288): n = a,t,c or g
gtttcttggcaccatttccttttcttatgcttgacaggctttctttttctttatgtgnacngcnancttgggtntntaannatnggaanngttccnantacatttntcannctnttattatcnnngatcctntacgntnatntncattngacctctgatctnattnnntgncttnntgtaatgancatgttttantggnanntatagntntaganantgtgcatnangantgctnnctattaactctcnttattncttcatagntttgnatantnnnacctgatatgg

SEQ ID NO: 40737 - DNA, 287 bp, Homo sapiens
cagattagtaaatacagaactatcttacctcatatgggaaatttgcatttatagtgatctccagactgatgccaccttattaattggtgaagtttctgaccagcttttggcccctttggccattttccagagccagtcctttttccagcaagtgttaagcactctattgtgtgtcttgagctatgctaggcaagagataccttggtctggcttctgccctgagaaagctcacggtctagaaggggagatggatcaataaactgacaaaacagtgttcgagaagtgct

SEQ ID NO: 40738 - DNA, 289 bp, Homo sapiens
  misc_feature (1)...(289): n = a,t,c or g
nnnnnnnnnnnnnnnnnnnnnnnnnnnnnnnnnnnnnnnnnnnnnnnnnnnnnnnnnnnnnnnnnnnnacaagctattgtgccgagctaaaagcatatatattttttaaggccaaaataagttttagagtagacatttactacttttttcttactccattattcaaaagtaaatgcccattaataattttatttcattaaatattcttgatatctcatttatcaaatcttatgaaatttaacaaagcaagataaaaatgttaacatttccctttaagtatctaaaatta

SEQ ID NO: 40739 - DNA, 295 bp, Homo sapiens
ggcaattgacctggtttctgggagccagggataagggtgtcaagaatgcttatctggatgggtgttaacagttaagcctaattttgaaggatgaacttgaaggagttaactagacatggtgggtgggaaagtggataacccatttggacattgcttcactggttattcattttatcttataatttcaacctctccctttactagtactttagccacattctataagcttataagaaataaacaacaaactgtcttctttgtttcttccagttccttcttccttttacagctcata

SEQ ID NO: 40740 - DNA, 295 bp, Homo sapiens
taaagagtaggaaaatctcttcagagttgtgactttcctactctttattaaaatagtaccttgaaagatagcaaaggaatgaacaactcacccttggctcttttttcttgggaaggctggaagaagttcctagtccttctccctgccttttgtatcacaccatctcaaagtacttctttctctaacattgtgcccactacctaccaatattgcacaccaggcagttgtcaggccgtgcattcaaacgcagtgggaggaaatacctggaaatgatgtgtagtgaggcccagtgtct

SEQ ID NO: 40741 - DNA, 343 bp, Homo sapiens
  misc_feature (1)...(343): n = a,t,c or g
ctaagtagtcctctgcaggggaccaaggggtctttcaatgacctctttaagatacggggtgggcacgagcagggtcttccaccaaggctaacccactttggccatctttgtgcagtgaggtccatataagaccccatctttatctcaagacatactgaataccaagatctagaaaaccaacagnnnnnnnnnnnnnnnnnnnnnnnnnnnnnnnnnnnnnnnnnnnnnnnnnnnnnnnnnnnnnnnnnnnnnnnnnnnnnnnnnnnnnnnnnnnnnnnnnnnnnnnnnnnnnnnnnnnnnnnnnnnnnnnnnnnnnnnnnnnnnnnnnnnnnnnnnnnntctt

SEQ ID NO: 40742 - DNA, 344 bp, Homo sapiens
cagctcttatttttattttcccacagaagaggctagattctttaaggagatataaagaagggagagagaaagatataaagattctttaaggagatacaaagacatcctctcatcagctggaaatgccagctaggtgagacctgactatgcatatgcattgtttgcccttagtaattccatagcaatctgcaaattcaatcagcttcatcagcagaaaactttgatagaaaccatgtgtaaaagggctgtgttcttaaagtggaacatttaaatcgaagtttttcaagcacacatttcaagtggttttatgataccaagcacaccccagtgacatctttacattg

SEQ ID NO: 40743 - DNA, 330 bp, Homo sapiens
caaaactctttcctttggttgtgctaagaggtgatgcccaaggtgcaccacctttcaagaactggatcatgaacaactttatcctcctggaagaacagctcatcaagaaatcccaacaaaagagaagaacttctccctcgaactttaaagtccgcttctttgtgttaaccaaagccagcctggcatactttgaagatcgtcatgggaagaagcgcacgctgaaggggtccattgagctctcccgaatcaaatgtgttgagattgtgaaaagtgacatcagcatcccatgccactataaatacccgtttcaggtggtgcatgacaactacc

SEQ ID NO: 40744 - DNA, 327 bp, Homo sapiens
gaacattagcccatggtgtttcttggccatactgacctgtgccatttcagctgcattcatctcagttggtgttgtctgctggctgctctttctgatttcccacaggagcagtaagaacctgaggaagagtagggtcagaggagtctgggagaatgaggaaatatgagagccccaggaactgaaaaggcctgtgagagactctgagcttcctgggaacaggtataggttctttttatttcaataataacagaaacaactgtcaaaaccatgtgcctgtactatttggagtgctgtccttgcagaatctcattataagaaccttaggaa

SEQ ID NO: 40745 - DNA, 325 bp, Homo sapiens
cagttattgttctcatagcagtgttatgctcttgacttcctccagcactgacttttcattataatccttaaacatttggtcattgtggattagaggtgaatctcccccttgttgtttagaattaccagcagttgcagagagattttatggaggatgatcacgagcgagcagtgtcggtgactgctctatctgtccagttcttcaccgcacctactctggtgagtagtgcttgccttttctttgtaactgatagctggcactccttgcctttttttgccttcttaatagaactatgagcgtttgcagagtgattatgtgacagatg

SEQ ID NO: 40746 - DNA, 336 bp, Homo sapiens
aagaacactgtgccatttcttcagctcttccttctccttattaaaagcttatttattttccatttcatgattcctttagacagaattacctatttcctgctaccaactcagcactaattcttaatgatattagtggttagttcagaatgaattgccaactctcactcaaaggccctttaagtaaaacatcttactctaacttctgtgcccagcattttttgggtacatagctggtacttaatcaatatgttatttcagtcctaaatattaatttagttttagtatacggtatagactatttaaaacctttatttaactgtaccttttttttgagtg

SEQ ID NO: 40747 - DNA, 321 bp, Homo sapiens
aaaaaagttaaacgatgcatccttcagcctgggacccagcagacctcggcacgaagtccgagactcatggtctgtgctggttcctaccagaaaatcgagtgcctcaaatctctcacctccaaatatccagcacctcagcaaacctgaaaacagagtctgtttatgcaaaattgctggcattgcaaaaatgtgacctatctttaatggtcatggatgagggcattttgtgattttcacgtgagatgcaggtgacacagttctgctgtgataaaactgaagcgtgcagacaaaaccgtggtcgttcaactttaggaaactgac

SEQ ID NO: 40748 - DNA, 321 bp, Homo sapiens
ataagagtttcacttgtccagatcaaaggcatagaagaggagttggcaagagtgcccaactgtggagagagagaaaactagaataacaggatagggcataattgatttactgtccattggccaagtagaagtagcaggcccatagtgtgaatatcttcatattcttttattccagctaaaatccttactaatgtaaggggtgaaggagactcagaaggcattggccaaaagtgtataagaggaagagccttggtaactctcatgataaagtttaactatttttatatgctcttctcctttttccttgatttattttccttg

SEQ ID NO: 40749 - DNA, 320 bp, Homo sapiens
agtggagccatttccagccaagtctcacagtcacagtgctgttgaagggcggtggaagccagcccaggccttggcagagcacacgccggcccctgtactcagctgtgtggtggctgcaggaggtggaggagggtggctgaaatgggccttcggatccccctgggaggaagtggagcttatggctggtgatgatccaagccaaggttattgggagtgttgacagaaggccccctcatcacatgacagtgacagtgcagtgccagtggtctcagccaccatcgctactcctgtgttctgtgccttgtgctgggctctaggga

SEQ ID NO: 40750 - DNA, 335 bp, Homo sapiens
gtttatgagtcagggagcctcactgagagtgttcagtaagggtatgttgaataaattttccaaatcaaaattactttcatctgaatagtgccaggccacactggtttgcatgttttcttttgttcattttccagactttttgaaaaggcctttagagagttatgtgaaaaaactaaaagtaccagttcatgtaattcgaatggaacaacgttctggattgatcagagctagattaaaaggagctgctgtgtctaaaggccaagtgatcaccttcctggatgcccattgtgagtgtacagtgggatggctggagcctctcttggccaggatcaaac

SEQ ID NO: 40751 - DNA, 201 bp, Homo sapiens
ctagaactgcattgcattgaattaaatgggaattatcttcaaggctgcaaagtgttgagttgcaaggaaaggaaacctggtttcctttcttgtcatattttatccactgtttgacattgaagaagtcattgaacctctttgggtcttaatttcttcatttgatgaaggagagaaggttgaactagaatttttttttttttt

SEQ ID NO: 40752 - DNA, 333 bp, Homo sapiens
  misc_feature (1)...(333): n = a,t,c or g
gcattacccaaggtaaatgtttacagaatcctgaaatattattaattcaaacatttgatttacctagcgatatatgtcatgagcttatttatttatttaaacattgtgcttaatgaaggagttagttctttatcccaatgtttaattcatagcagcagctttaaatatttatgaagtttcctgtcgttttttgtttagttaatagactgaatggttcagttcattggctaagagaaagcagtgaaatttcagcaagagaaaagttctctacctcttgaaaaatgtgtttaaagaaaataagannnnnnnnnnnnnnnnnnnnnnnnnnnnnnn

SEQ ID NO: 40753 - DNA, 322 bp, Homo sapiens
ggaactagagctcatctaaagaagaagatcaaaatagtgaggggatttgaacccatagaggaaaaatggtacatagacacaagccaaattgtataaaagtccaggtttcttcctcagagacaatatagcatagtggctcaaaacattggctccagagatagattacctgtgttcaaatatccctgcttcaccatccctatcttgaaaatcttgaaagcaagcacttcagcctctctgcgcttcagggttttttaatctgtaaaagcggttattattagtatttaccccatcatatagttgtaaagattcaatgaactaatac

SEQ ID NO: 40754 - DNA, 334 bp, Homo sapiens
ggcaaatggagctgccctcactgtgagaaggagggggtccagtgggaggccaaggaggaagaagaagaatacgaagaggagggagaggaagaaggggagaaggaggaggaggatgatcacatggagtactgccgcgtatgcaaggacggcggggagctcctgtgctgtgacgcgtgcatctcctcctaccacattcattgtctaaaccctcccctgcctgacattcccaatggtgaatggctgtgtccccgatgcacatgccccgtgctgaagggtcgagtgcagaagatcctacattggcggtggggggagccacctgtagcagtgccagccc

SEQ ID NO: 40755 - DNA, 319 bp, Homo sapiens
  misc_feature (1)...(319): n = a,t,c or g
tgcatgcctcctcccactaagcagtggttccaaagtatgggcccataaccaggagctttgtatcatctggaaacttgtaaggaataaaaatgtgnnnnnnnnnnnnnnnnnnnnnnnnnnnnnnnnnnnnnnnnnnnnnnnnnnnnnnnnnnnnnnnnnnnnnnnnnnnnnnnnnnnnnnnnnnnnnnnnnnnnnnnnnnnnnnnnnnnnnnnnnnnnnnnnnnnnnnnnnnnnnnnnnnnnnnnnnnnnnnnnnnnnnnnnnnnnnnnnnnnnnnnnnnnnnnnnnnnnnnnnnnnnnnnnnnnnnnnnnnnnnnnnt

SEQ ID NO: 40756 - DNA, 319 bp, Homo sapiens
attaaactctggtctagaaaacagagatacttagatatctcacagaataaggataggaatgcaagcagttccagagtggctggatctaaatcaccaataacaggcttttgtctcattccactttgcaatccctagcatgttgactttggccttttgttgtgtggcctcaggattccaagatggctgctgtggctcctcgcaccagtgcattctaggtaggagaggaggggcagacgtcttctaatatctcattggccagacgtgggtcacatgttgacttttttttctcttttaacctttcctatggtactgaacatgt

SEQ ID NO: 40757 - DNA, 318 bp, Homo sapiens
  misc_feature (1)...(318): n = a,t,c or g
nnnnnnnnnnnnnnnnnnnnnnnnnnnnnnnnnnnnnnnnnnnnnnnnnnaactgtctcaaaaataaataaataaataaaaataaaatcctgtaaactaaaatggaactcatccaaatagaatggtaccttccttaaaatgttggaagctataaactactatttccaggtctctcaaagctagattatctttttaaaataatggctaatagctaaggaactcaagatctctccagctggctctctaatcatcagctatttgggatatctaaagtttcaactggaaagtaatggaccactgccttcttggggaccagtt

SEQ ID NO: 40758 - DNA, 332 bp, Homo sapiens
  misc_feature (1)...(332): n = a,t,c or g
cttttcccatttttaacagagaggctacatcctctcaaaccagtcagtattaggaattcccaggatcattctctccattttccatcctaattagatacctatctggcaccacatctctgaaaagctccaatttttaaccagcacataataaacaaatatgttactattaatacacgtttgtacacaagtcatttttattgtcttaggtatatccactcccagaccttctgagttattgaaagacaggaatttgtgatgtcacctcnnnnnnnnnnnnnnnnnnnnnnnnnnnnnnnnnnnnnnnnnnnnggaggttgcagtgagccgaggtt

SEQ ID NO: 40759 - DNA, 331 bp, Homo sapiens
  misc_feature (1)...(331): n = a,t,c or g
cttnnnnnnnnnnnnnnnnnnnnnnnnnnnnnnnnnnnnnnnnnnnnnnnnnnnnnnnnnnnnnnnnnnnnnnnnnnnnnnnnnnnnnnnnnnnnnnnnnnnnnnnnnnnnnnnnnnnnnnnnnnnnnnnnnnnnnnnnnnnnnnnnnnnnnnnnnnnnggcctcctttaatttcttaaccataaatatcctcccctcacttttattatggacattctgtcgacgcggccgcgaattccnnnnnnnnnnnnnnnnnnnnnnnnnnnnnnnnnnnnnnnnnnnnnnnnnnnnnnnnnnnnnnnnnnnnnnnnnnnnnnnnnnnnnnnnnnnn

SEQ ID NO: 40760 - DNA, 289 bp, Homo sapiens
  misc_feature (1)...(289): n = a,t,c or g
atttgctgactgcaattactataggctttggctcacaattctggggaaaatgccaattgaaggaaccctgcctatacattttattttctttttcttcgagacagacaaccttaaaataaggaccaaatattggttccttcaaatggtgtcaaaaagaatagtattatatgaggaggatagttatcacagaataagaactaaaatcccatttttttttttnagganaaaaaacacnttcaatgatncaggtgncngggtntaaggannnntgacntnccaaaanancccc

SEQ ID NO: 40761 - DNA, 302 bp, Homo sapiens
  misc_feature (1)...(302): n = a,t,c or g
nnnnnnnnnnnnnnnnnnnnnnnnnnnnnnnnnnnnnnnnnnnnnnnnnnnnnnnnnnnnnnnnnnnnnnnnnnnnnnnnnnnnnnnnnnnnnnnnnnnnnnnnnnnnnnnnnnnnnnnnnnnnnnnnnnnnnnnnnnnnnnnnnnnnnnnnnnnnnnnnnnnnnnnnnnnnnnnnnnnnnnnnnnnnnnnnnnnnnnnnnnnnnnnnnnnnnnnnnnnnnnnnnnnnnnnnnnnnnnnnnnnnnnnnnnctgatggcgggaaatccttttgtatcaagcagagggaagcatttttctgctt

SEQ ID NO: 40762 - DNA, 303 bp, Homo sapiens
gtctcctgccgacaagaccaacgtcaaggccgcctggggtaaggtcggcgcgcacgctggcgagtatggtgcggaggccctggagaggatgttcctgtccttccccaccaccaagacctacttcccgcacttcgacctgagccacggctctgcccaggttaagggccacggcaagaaggtggccgacgcgctgaccaacgccgtggcgcacgtggacgacatgcccaacgcgctgtccgccctgagcgacctgcacgcgcacaagcttcgggtggacccggtcaacttcaagctcctaagcca

SEQ ID NO: 40763 - DNA, 303 bp, Homo sapiens
ggcttttactagggattgatcacattggcatgcttcactgcccacatggctaacttagtctcctcagcttgaccttgcaaggtcaagctgatactgcatggcccaaggcccacaggtaaacaaaaacactcttatcaggcaagatattctaatggcttaaaggttatctcccaggagccaggcaggggcctattctttatttggaatgtccagggttcaaacatcccaagttcatcctgtatcacacaaaaggattaacttcaaaagtggtattcttggccaggtgtggtggctcacacctgt

SEQ ID NO: 40764 - DNA, 296 bp, Homo sapiens
gtatggattcagggatgtgcagcctacatattttcagagacatggggctaaggcctgcattctcaatgagggcaaaatttggttcttggggacagaaaacacttagacattgcaatgctttgtggctgtccaaagtaccaaacagatgccagtatatctgtggtgctgaaatttcatggtgaatggagtcagaaaatagactagcgattgccagggtctggtgggagagagagggaagggactgccaatgtgtatgggatttgttttggggaagataaaaatgttttggaattaga

SEQ ID NO: 40765 - DNA, 108 bp, Homo sapiens
attaaaagctctttccttattactgctttaaaatactttagccctcatgtctacattttctctgacagcagtgttacttgtctgctaatgtgaatttttttttttttt

SEQ ID NO: 40766 - DNA, 296 bp, Homo sapiens
cctcaaacagacaccatggtgcacctgactcctgaggagaagtctgccgttactgccctgtggggcaaggtgaacgtggatgaagttggtggtgaggccctgggcaggctgctggtggtctacccttggacccagaggttctttgagtcctttggggatctgtccactcctgatgctgttatgggcaaccctaaggtgaaggctcatggcaagaaagtgctcggtgcctttagtgatggcctggctcacctggacaacctcaagggcacctttgccacactgagtgagctgcactg

SEQ ID NO: 40767 - DNA, 298 bp, Homo sapiens
cgcggccgcgtcgaccaaagattgtgaatatacattgcccagctcagaaacttgccataaaaaaataaggcagcaaaattcatagtgcgaagagaactgtttcaatggcatttatttgtttttgcagaggagctcctgggtacctcccctagtgtgttccagcagccgttgacttagccactggttgaaagggggtaaacgggcttctctttgatacagagggctcttggcaatgatgcgcttgttcctgtaggcaggtagttagttgatgggagtgtcctccatggcttctctcacc

SEQ ID NO: 40768 - DNA, 299 bp, Homo sapiens
tttctctgcagtaccaacttgccagactcttgtgctaccattttaacggattcttcaggatcaacatgaaaaattaagtttaaaggaaaactagtgtttttcaaaaattgcaaaattacttcgtatttttaaagctaaacaaggcatttttaaaaaaaatttaacataaacattcacaatgtgtccctcgaatggcatttgagaaaagggagcacaggggaagtctcttgcttttcctattcatggtgggcaggaagtgagacaaccaagctggactaaaggcaactcactgtgcccaa

SEQ ID NO: 40769 - DNA, 306 bp, Homo sapiens
ttggaagtcatacactccatgacaagttctaattcttaaaccacctaaaaagctggtgaaatcctggcctgcactagcagacctagagaatccaaattctcttggaattcacttacagaccccacactaagacaattaaaatagtgtatgacgctcagttctaggttcaatgagagggcctgggacacaccagaagttcgcatgtggaaaggaacagttaaaaagaaagtaagctgtttaatgaggaagacaggcgatacacaacctccagaaaacaagactaacacccacaggtaaaagttgtgg

SEQ ID NO: 40770 - DNA, 295 bp, Homo sapiens
tattactttatcgtaaatagatgtggaagacaattttatacaatacatccatttttatttacttcttaagcatctggaagaatgaccaaatgaccaggaaattgacaggaacattgaagccaccaagcatgtgaagtaattttttctttaaccttacttttgtggctcaacagtgttttcagacatttctcttcattttatgaaagtgccttttttctcctgtttttccatatttattaaaaatacttatatagtatatagcagtacagatgaaaatagaaaagaacacattttg

SEQ ID NO: 40771 - DNA, 285 bp, Homo sapiens
ttggcagttttcctggtttttaaaaattattgttttatctgaatttttgtatgtttcagcatgaggttgctcctagtattctctcaaaatttttaaaatctctcctgcagttgtgtccccttcttcattatcccacagtgggagaatcctgaatattggcctaggattatgccgtgtcaaatctaaagtttcttttgggtttctgtgatgtactagaataacatctatttaatttaaatttcatatttaaattttgtttatatatttaaatatgatctgacagcc

SEQ ID NO: 40772 - DNA, 290 bp, Homo sapiens
  misc_feature (1)...(290): n = a,t,c or g
cctctcttcccttggtctctttgtctgtttatgccagtaacatgctgtttggttactgtagctttgtagtatattttgacatcaggtagtgcgtgattagtgggtgatgcctccagctgtgttgtttttttttccccgcnnnnnnnnnnnnnnnnnnnnnnnnnnnnnnnnnnnnnnnnnnnnnnnnnnnnnnnnnnnnnnnnnnnnnnnnnnnnnnncnnnnnnnnnnnnnnnnnnnnnnnnnnnnnnnnnnnnnnnnnnnnnnnnnnnnnnnnnnnnnnnnnnnnnnn

SEQ ID NO: 40773 - DNA, 291 bp, Homo sapiens
  misc_feature (1)...(291): n = a,t,c or g
atttttttctcctctttattttttatagtaggcagttgaagcagaaattatattgtctaatatgattctctgtgtatgagaaaaaatattttagacattataaacagagagtaatgggtcataaagaaaggtaaagtttttaggtcaagtnnnnnnnnnnnnnnnnnnnnnnnnnnnnnnnnnnnnnnnctgtagccccattcttaacagcaaaggctgagtgggaagtctagacttccatctccactatgctgtagcacaccccaacttccaattagaatagtgtcagag

SEQ ID NO: 40774 - DNA, 91 bp, Homo sapiens
gtcgacggcattaagcttagtggttgacaattcattgtattattttactggtaataagcttccaaggaaggtgattctttttttttttttt

SEQ ID NO: 40775 - DNA, 283 bp, Homo sapiens
aatgtaacgctgccatccacaagaaatgcatcgacaagatcatcggcagatgcactggcaccgcggccaacagccgggacactatattccagaaagaacgcttcaacatcgacatgccgcaccgcttcaaggttcacaactacatgagccccaccttctgtgaccactgcggcagcctgctctggggactggtgaagcagggattaaagtgtgaagactgcggcatgaatgtgcaccataaatgccgggagaaggtggccaacctctgcggcatcaaccagaa

SEQ ID NO: 40776 - DNA, 292 bp, Homo sapiens
aaatctcaggacaatcgttaactccttaaagctatccctggaccccaggataaaaatcataggtgctctccagctgtcaagccggagagctgataccttgagccaactaacaggcttaattctataaagaaacaattcttatagaacaaaacaatccactactctcaatagtcccaaggacttacttaggaccaggcatccctccgtaccctcccaacttttaatcatactttattctatctgtaagaaatggtgctacatctgtaaataatcaaacataggtacaaagaaa

SEQ ID NO: 40777 - DNA, 290 bp, Homo sapiens
ggaactacaagtgtgagccactgtgcccggccccgagagttctttttctgtattctgcatagaggacctttgtcagatatgtgatttgcatttctttttctcccaatccctggcttgcctttccctcttcttaacagtgcctttggagatcgaaagtttttaatcttgatgaactgccaatttatcagtttttcttttttttgttttatgaattgtgcttttggtgttacgtctaagaattttttgcataacttaagtttgcaaagggttctcctattttttttttctaa

SEQ ID NO: 40778 - DNA, 291 bp, Homo sapiens
ggcttcctcatcgacttaaagacccgctttcccatattggagaatccagagattttgaggaaaacagctgatgactttcttaatagaattgcattgacggatgcttaccttttatacacaccttcccaaattgccctgactgccattttatctagtgcctccagggctggaattactatggaaagttatttatcagagagtctgatgctgaaagagaacagaacttgcctgtcacagttactagatataatgaaaagcatgagaaacttagtaaagaagtatgaaccaccc

SEQ ID NO: 40779 - DNA, 291 bp, Homo sapiens
  misc_feature (1)...(291): n = a,t,c or g
ggaaactggtggtaccaagcagcgggtagatatatgggaactctagttttcactcaatttttctataacataaaaatgctcaaaaaaagtctaagctttttttttttnaaanaanctnggggtttttngttttngttttngttttaaaaccangtntaantttatnntncagnntaaagggcagttgcncaatntgggttaatngaancnttngccccggggnttcccgnaattttcnngcntaancntttnangtacnnggnattacaagcacaccccanccnccacccc

SEQ ID NO: 40780 - DNA, 281 bp, Homo sapiens
  misc_feature (1)...(281): n = a,t,c or g
caggtgttccataaatcagagctgttgtaggatcttcttaggtctgctaggctcgcctgcacctctcattctcccacctagtctctcagctgcatcctggcttttttttcccaatgctcttggggaaggaaatttgggtgggggaaaagagcttacaggtaatggctaatngaagagtttgggattttctgaganttttacttatcactgctntttaannaacccnttnaggncacttattgctacnatntngntctgtnagacanctacttgaatnaatg

SEQ ID NO: 40781 - DNA, 284 bp, Homo sapiens
gccaatttaaagacacaaattgtaaaacacaaattatatatttgatttttaaaaacaaaacaacaaaaaaaatctgatgtctatctgcaatgaagcagaagccaaacatcatcagcatgttctaatctagaataatctcactaaacctacctcagaatgagtttcagataggtagcctctgtgttggtaattttggaagagaaatatatgctcataacacaaaaaggtgactaacactaagacagttaaatctatacctatagaagctcaagtgcattcttact

SEQ ID NO: 40782 - DNA, 288 bp, Homo sapiens
  misc_feature (1)...(288): n = a,t,c or g
nnnnnnnnnnnnnnnnnnnnnnnnnnnnnnnnnnnnnnnnnnnnnnnnnnnnnnnnnnnnnnnnnnnnnnnnnnnnnnnnnnnnnnnnnnnnnnnnnnnnnnnnnnnnnnnnnnnnnnnnnnnnnnnnnnnnnnnnnnnnnnntaataagtgaggaaactgagaacaaagagatcaagtaaattgtccactgtctcacagctgctaattatctgaactgggtttagaactggacactgaagctgaggaactcataccatcaaccactgtgtaatctatttcacagctt

SEQ ID NO: 40783 - DNA, 282 bp, Homo sapiens
gcggccttgatttactttaagacaaaagttcgatgccatgggagtatgcccgctttgcccttacaatgaccaagaaaggtggcagaaatgaaaaagcaccccatcaccagtccggtgagccacggtctccacaccaagtgctaacttgccagggttctgggtaccttgcttagagggagctctgaaaagagctaatttatgatttttactttctttggctattattacaaaagagatatacgtatataaaacacaaatttgcagctataagtctctcccact

SEQ ID NO: 40784 - DNA, 286 bp, Homo sapiens
agcatgtctacatgtgttttatgatgtgtatacatatatgtatgtagatacatacatatatttaaatgtgaccattatcacattactctgttatattttattatattcatcctcacaaaattcattgttaaagacagggaactgaggatttgttttcaagtcttgcttgtggtatttgcccgtgcttgcacaagagtaacaataatggcagaatcatttattagatgactgaaaagagcaggcacacatggaggtttaacatatggtcgctgtccttatggaattc

SEQ ID NO: 40785 - DNA, 280 bp, Homo sapiens
cgttcatagactggaaataagtagtaacatctcccaatcctaggaagcatttataactagtctttgcctttttgggtgttgatagactagtggtgattataagctttcgagcttctgaaaagcacaacgaagattaaaataatcataggataataaaatactttaaaacccttctagtctttaattttaaaatgttccagtagaacacaaatttgctcaggtaacacacaagtaagcattaaatgccttcctgtgtatctgagaagtttgtatgaaatat

SEQ ID NO: 40786 - DNA, 287 bp, Homo sapiens
taaatgtttattaaaatttagactcaaataaagtccaggcactgctgttaatctacggtttcctcctccgtttctcttttttctccctacaatttgctcgttgaaaaacaagacatatgtctctaagagttccccataacctatattttgctaactgcattcacatggtatcacttaatgtgtttctctgtcttctgtgtttcctgtaaactggtagagctagagacttgatcacattcgggttcaacttttttggcaagaatacttcatgggcagcactgtgaact

SEQ ID NO: 40787 - DNA, 283 bp, Homo sapiens
caaagaagcaatcagccaaaatgatacctggaggcttatctgaggccaaacccgccactccagaaatccaggagattgttgataaggttaaaccacagcttgaagaaaaaacaaatgagacttatggaaaattggaagctgtgcagtataaaactcaagttgttgctggaacaaattactacattaaggtacgagcaggtgataataaatatatgcacttgaaagtattcaaaagtcttcccggacaaaatgaggacttggtacttactggataccaggttga

SEQ ID NO: 40788 - DNA, 287 bp, Homo sapiens
  misc_feature (1)...(287): n = a,t,c or g
aatcctcaagattttcagtttattatgtttttctgatgtaaggtcttttttataaannnnnnnnnnnnnnnnnnnnnnnnnnnnnnnnnnnnnnnnnnnnnnnnnnnnnnnnnnnnnnnnnnnnnnnnnnnnnnnnnnnnnnnnnnnnnnnnnnnnnnnnnnnnnnnnnnnnnnnnnnnnnnnnnnnnnnnnnnnnnnnnnnnnnnnnnngttgagatnnnnnnnnnnnnnnnnnnnnnnnnnnnnnnnnnnnnnnnnnattataggtgggagcctcctcaccaaac

SEQ ID NO: 40789 - DNA, 286 bp, Homo sapiens
gctgggtctgtaattagctttgtagttctggacagagctctctagctcttagctgctctgagtaaactgagttagttggacaatgatatttttgagggctctaataaccaatatttctatattagtaagtgaaaatcaactggaagaatttttttgaataagatgcagactaagtccatgcagatattctgaagctgccttaaacaaatgctttaattgagttcatgatggtgttatactcaataaatatttggagaggtgctgacttgccctccaaaaacctggt

SEQ ID NO: 40790 - DNA, 283 bp, Homo sapiens
  misc_feature (1)...(283): n = a,t,c or g
gaaaaaagcatctctccaaaatgctggtgttaaaaaaaaaagtcgccctctggccctcgcccatgagtaaattaacatggaattatttgggcaggctctcctgctgacaccttcaaaggcgtggcacatttctgaagggctaggagagacccaagtgcgtgtgatcaagggtgtattcatttcctattgcactatgnnnnnnnnnnnnnnnnnnnnnnnnnnnnnnnnnnnnnnnnnnnnnnnnnnnnnnnnctatatgttagaagcctgaaatgggtcacac

SEQ ID NO: 40791 - DNA, 282 bp, Homo sapiens
cttagaatagaaatgcaaatttcagttttggcattgttgacttcataaagcagtgttttgagggctcaggattcaggaaatacaaacagacatggcagagcagtttgctttgggttggcagaaagcaggaaaataaccagccttcttggattgcccacagtttttgtagactcctcagttctgagtggagcagaggggcatgcttaataaaacagtcaataaagaggcttttctttaaagatttctgcaactccgtcagaattctaagttttccccatagtt

SEQ ID NO: 40792 - DNA, 282 bp, Homo sapiens
ggagaaggcagtggaagcccgtagcacgagtatctctctgccagccccctagccagcctggctctgtaggctctggcagttgcccaaggctggggccttgcagactgtgatatgtacctcttgttaatcaaatattcctgggtagaatcagactggacatgtttaatgagcaattacaatgattgctctattgcttggcaagcacatctcaatgaatttgagcactaaccctcctaggcctcctgaatattttccggttattgttgccattagacagggatg

SEQ ID NO: 40793 - DNA, 283 bp, Homo sapiens
ctatgtgagacttaaagaattttgaaaagaaggcagagtgtctagtgctaaaaatcaagtaagatcaggaagaggcatccattgtcaatggctgttaggaagttgttggtgatattaacacacaaaggttccctaaaaggttgtatctgtggaaatgttgttatagcaggttaaaaatgagaaaatcgtaataatagtgaacatggactagtctttaaagaagcttagtcttaaaaggaaatagagaaggtattagctggggagagtgtaggtaagtaggatt

SEQ ID NO: 40794 - DNA, 288 bp, Homo sapiens
aaggaatccatttatcatccactgtcatccttctttcagaggatagaggtgatatagcaggtccaaattagcttccacaatttaggttttacaatccaaggggctgacgcatgggtggaacatggaggattcctagaaccatggtgccacctttttggggggcctgaatcttgacatccttagtttccaaaattctgctgtagaaaaactgattggcatatagatttgtagcagtcgtttggaaaggagactcttctgatttttttatactttgagtattggtaaaat

SEQ ID NO: 40795 - DNA, 289 bp, Homo sapiens
  misc_feature (1)...(289): n = a,t,c or g
gcnnnnnnnnnnnnnnnnnnnnnnnnnnnnnnnnnnnnnnnnnnnnnnnnnnnnnnnnnnnnnnnnnnnnnnnnnnnnnnnnnnnnnnnnnnnnnnnnnnnnnnnnnnnnnnnnnnnnnnnnnnnnnnnnnnnnnnnnnnnnnnnnnnnnnnnnnnnnnnnnnnnnnnnnnnnnntaatattttttaatgagaatttcagtctgttctataaaatcatatctagaagagagatcttaagacataagtcagaagttaatgaatttcaatgaaaattgcaataaaaattaa

SEQ ID NO: 40796 - DNA, 282 bp, Homo sapiens
aaaaaactttaatttcccattaaaggaatttcagtcataatagatgtcagaaagatctgaatcttttgttcatgtttaatgtctggaatgctgtcccctctcctgaaatctatgttaggcccagataacatcttatcttccaagatgccaacatttttcccaaccacacgagatctttcctactgttgaattactgtacgttattgtgacatgtatatttgtgtttactgctgccacttttaagtataaatatcttgaaagcaggaactatcttcttaattt

SEQ ID NO: 40797 - DNA, 320 bp, Homo sapiens
ttctctgccatctgtctccttcactgttttgtacgtatccccagcacctgcaaccccatctgctgtgtgtggaaggaatgactgaaggaaatgtccaataggcctggtgggcctgtggtgaaattgccagtcacgctctcacctttttctccagagtctgatctcctccttcccctaacaacttcctttctgtcatacatacacggtgtatctctagtcacaaagaaagacaaatctaaagtggttttccttcaaaaagctatctaaatttttcaaacatacaagggaatggaggaattgcttaataacaacttatgcat

SEQ ID NO: 40798 - DNA, 327 bp, Homo sapiens
atcagagtagtaaggacaaaggacagacatcagagcaaagggaaaatgaagagcatgaaacgctgttgcagagggaaagagcaagagaagttactggtgggtaacaggatcctacttcgtatttagataatataattatggctgccttatcattttcatctttccaaacaaagattatgggcttctggaatgaggattattcaagaaatttaatgcatacttccacacacaataaactatggtaccttgggtggccaaatttaattcaaaacttgggacaatttttcagttacccaagtttacactaatcttagcataaaactttta

SEQ ID NO: 40799 - DNA, 328 bp, Homo sapiens
cccgaataggatcttctgagaacacccagagcagtgttatgccaagttcaccctgcctatcctgagttcagcctccctttcttaaagtcacactacaaacgagcacagtcagtagcaccataaggaaagaacaaagagtcagaaggccctggctgcctagaagcttttaaatcccatacaaaccactgttttaaggaggttggatggtaagagcaacaacaaaaatgctacagaagatacaccatggcaagtaaaataatcaaaaccaagactgctcttcacactgaggggaatgaaagagtactggtggctgacaggtcaatagatt

SEQ ID NO: 40800 - DNA, 325 bp, Homo sapiens
  misc_feature (1)...(325): n = a,t,c or g
tttttttttgcagaatcagaatttttttaattgctaagaattttatgtagcaagtttgtttattcagtaacataatcacaaaatagaaatatcacattcacagaagtggaaataaagagcataaaatatttttaaaacaggaaagcaatgggatcactttcaagagcctcaaagaaaacctttaatttacaatgctacgctttcatgattaataggattaatgtgtggtttttctttgataaaagtagtcatgattttttagtattacatacattcattgcatatgacagactganaaaaatgtactggnctaattacttaattg

SEQ ID NO: 40801 - DNA, 328 bp, Homo sapiens
  misc_feature (1)...(328): n = a,t,c or g
gggcagcaaagtgggacatctgtctacagggccagtagccccaggtcatctgcttgccaaaaggagggggaccagcccccggggggagcccagagctcggcagggctggggttagtaagaagagaaaacagggttagtaggggctgggttagtaagtcagagcacagcaccagcggacagggtgtcactccatannnnnnnnnnnnnnnnnnnnnnnnnnnnnnnnnnnnnnnnnnnnnnnnnnnnnnnnnnnnnnnnnnnnnnnannttaaaaanaaanantttntngccttttttaagggnatganannattntttnggnnntttt

SEQ ID NO: 40802 - DNA, 315 bp, Homo sapiens
  misc_feature (1)...(315): n = a,t,c or g
agacgccccccaagctggggctcatgtccctggcacagagagagggcccacacccataagaggaggctctagaagatcccacaagaggggcccagagggcagtggcatgcatgccacggagagggtgctgtctcctggccagtgagttctggttctttcttaaatcagagcgctcccgtgcatatgccttagcaaaatctctgctgtgtttaacaagcctcagtgcatcctggaagtactttttttttttaaatcgacttgngcctcaatatactttttttttttttanggaactttttgtttggaaanaatttt

SEQ ID NO: 40803 - DNA, 319 bp, Homo sapiens
tgactcttcacaagggaaaattatagcttacttcttggtgttagtgtgagaatcagcctaggtaaactctagaactgtactagcactaatttaaacaaggatttctatatgtggttttgctgttgagcagcagattgtaaattatattccatggaataagtgttcaaggtattgttaacaggcataacacgtaaaagtgttctgtcgcccaacaagttcgagaagcattaggttaaagaaacaatcttgatttcgctagttgtttctaaatctccagtactatatatcttttgcattcttccttgttcattaaactcat

SEQ ID NO: 40804 - DNA, 320 bp, Homo sapiens
gcctgatcttctaggctcgagtccccatctggcaatacacccagcaaagctagagctttaaggccttttccctgatgagccttcatcagacagtccccgacgagctgcatgcactggctccgcagggtggtggcactgctgcgcgtctgggggtccagcttctccccatccacatcctctgcactggccaggtgggcgctatagagagccagggcagcaaagagcagccaggagtagttatggatatatggctggatgagcctctgccggtcactgatccgaatggttaccattgggtgggccgtgatgctgtgggtagg

SEQ ID NO: 40805 - DNA, 329 bp, Homo sapiens
cggctgcctccacggaccagcagtgctcaatatgacctgacctgggtagaaaggagtaaaactgagattcttctaaaatctcatctcttttgggagtcacttcatggcagctttgcctttaccctctgcttccccatacctcttgataggggatatgccttttctttatgggttaattctcattaaaaaagaaatattcttccttccactctcataaaacaatgaagataataaaattactccttacatctttttcatttcttccgttacctaaatcatactatctcagtgatctttgtctagttttccctactttacccagttaaggg

SEQ ID NO: 40806 - DNA, 320 bp, Homo sapiens
  misc_feature (1)...(320): n = a,t,c or g
ctttaagcaagttctatgtactatctggagaacaagttctgagttacaggctaagtggattttaggagggcaatttcaatttaggcaggaaataaataataatgatagtagtagtcgttatcagtagcagcagtaaattcttacatcatgcttcctatttgccagatattagttctaagcactttcattatattaacttgcttaatccttctaacaacattgtgaggctggcaaaccattgtcttcattttgcagagatgaagaaacaggctcaggaagactaggtaactttcccattgtaacccagatgagaggnggca

SEQ ID NO: 40807 - DNA, 329 bp, Homo sapiens
ccggcacatagtagtcacaaaactttcaaagagagtgcatatagttatctcattctctccaaatggctgcattatgctacatttccttttaagaatgcagcaaaatatatttaaacatcacctctactggaggtcactcaagctgtatgctattacaagcaacactgcaatgaatatacacatgatcctttacatttttgccaatctgttagatgaaaattggtatgattgtgttttaatttgtatttctttgattattagggatgtcaggcacatttcgtgttcactggccattatttcttttatgtattttctattcatatcccttg

SEQ ID NO: 40808 - DNA, 320 bp, Homo sapiens
ggcaaatgccttagtttcttaaaacgtattttctgatgtggctttacatttcaaaagtgaacttgattcaacctgagaaaactgattaaaaaattagtttaaatttgccagcagggaagtaaaataattatgggaagagtgtcttaagcctaatattaaatcagttttgttaaggggaaaactcaatagttctgttacttaggctgttagatccaagttgatttttgtgtctacagctaaattttgtttacaattaggctattttttaatataggatttagaaaccaagggtatgtgttttaaaattacactttttctta

SEQ ID NO: 40809 - DNA, 321 bp, Homo sapiens
  misc_feature (1)...(321): n = a,t,c or g
aaaaaggtagactggtatgagggggttacgtttatgctataattttaatgttgaaaagagacagagttcaaagcactgcatcccagaaagaagcaatagtctgtaggtgaatgctgaatgctacaaggtagagaaaacttgatgccttctaagaacttgaaagttacagagtagctggagcagaagtcagttgccctgaatgagcgcagagctgggtttcagagtgagttagaaaaatagtcgacgcggccgcgaattccnnnnnnnnnnnnnnnnnnnnnnnnnnnnnnnnnnnnnnnnnnnnnnnnnnnnnnnnnnnnn

SEQ ID NO: 40810 - DNA, 320 bp, Homo sapiens
  misc_feature (1)...(320): n = a,t,c or g
cttgagcttattagccccaggtttctaatgtataaaattgatttaataacatgtaagttacagggttgttataaggattagagctgcaatggtctaatccttataacaaccgtcgacgcggccgcgaattccnnnnnnnnnnnnnnnnnnnnnnnnnnnnnnnnnnnnnnnnnnnnnnnnnnnnnnnnnnnnnnnnnnnnnnnnnnnnnnnnnnnnnnnnnnnnnnnnnnnnnnnnnnnnnnnnnnnnnnnnnnnnnnnnnnnnnnnnnnnnnnnnnnnnnnnnnnnnnnnnnnnnnnnnnnnnnnnnnnnnnnnnnnnn

SEQ ID NO: 40811 - DNA, 330 bp, Homo sapiens
  misc_feature (1)...(330): n = a,t,c or g
nnnnnnnnnnnnnnnnnnnnnnnnnnnnnnnnnnnnnnnnnnnnnnnnnnnnngattagaggcatgatggaaaagagcaaggcttcctgagagaaacagggcgagcacaggaaaacctctctgagacagtgacatgaacttgaaacttgaagggtaaacaggagtgggcaagacaaaaggggaaagaaggaatgttccaggcagagagaaagagaaaagacccaggcacggtatagagccgaggacatttgaggtcgacgcggccgcgaattccnnnnnnnnnnnnnnnnnnnnnnnnnnnnnnnnnnnnnnnnnnnnnnnnnnnnnnnn

SEQ ID NO: 40812 - DNA, 218 bp, Homo sapiens
cactgatgatgctgatccactattacagattgagtagcaaaggttggtgaccccgatgagcccccattattatgaaaatacaaccgggaatggttaggtgtgtgttgcaacaggaaaaacaatgtctgtgttaaatgacactagttcagttttaagtcctgccacttgctagctgtgcaatcttgaataaattcatgcaatgataaaaaaaaaaaaaa

SEQ ID NO: 40813 - DNA, 399 bp, Homo sapiens
  misc_feature (1)...(399): n = a,t,c or g
ttttaagacannnnnnnnnnnnnnnnnnnnnnnnnnnnnnnnnnnnnnnnnnnnnnnnnnnnnnnnnnnnnnnnnnnnnnnnnnnnnnnnnnnnnnnnnnnnnnnnnnnnnnnnnnnnnnnnnnnnnnnnnnnnnnnnnnnnaataaacaataggaggaatggcctagttactttccctggttctttgtcctatacctgacaataaactgttaactaccagcacgcagcctggtacaagaaatgaccgcataagtttctttcttcaatcccaaaaagaaaaatgctggaattgcttccaagtcgacgcggccgcgaattccagatnnnnnnnnnnnnnnnnnnnnnnnnnnnnnaggnnnnnnnnnnnnnnnnnnnnnnnnnnnnnnnnnnnnnnnatt

SEQ ID NO: 40814 - DNA, 383 bp, Homo sapiens
ctgaaatgaattaggactagcaaatgcatttctacattccttacagtagtaaggtccattgctagtatgttataataaccacctttgaaagtttgctagacaaagaaagttttttcatattcctcacattcattatatatatatttttgaagtatgagtttggtcatgttttcaaaaggtactgaaaaaaatggaaggttttagtacatttttatattcatacaacttttttcagtgtgagtctcttatgtatttgtaagaagctgaaagtacttaaggctttctcacatgttcaacactcataggggttttctctagtgagtcatttcatgtttatgaaaggaactgatcaatgaaatgcttccccacattctttacactta

SEQ ID NO: 40815 - DNA, 404 bp, Homo sapiens
  misc_feature (1)...(404): n = a,t,c or g
aaagagcgcaggtaatgtataatcaggaagcatttttaaaacttcattaagatttttatctatttctatgtacttttctgtgtttttttccccacagtgaacctaaattaatattataaccaaaaaataagtttctgacttaatagtttcagaatggccttgaaaattccccatgctaggcacggcaaaatttctcagagaagggactgctgtcaggaaaaaacccaagatttagaagtgggccaaagagattactgggtatcctctcaatggagtgtgatttgtggtctaagaggccctccagggatgatctttgacttttttgtttgtaattaggccagtggttctcaaaatatgatctgaggagtcctggagagccagaggactttttcatgngttcgtga

SEQ ID NO: 40816 - DNA, 400 bp, Homo sapiens
ctttatttttcattacttgtcttctgctatttagctataaatccttatagaagagtataaataaataaaagtaattatgcaggaggcagtcatagtgaaatgctgcccactgtgatagcctgtgggttttttttaataaaatgccaactcagtttttcttaatattctataaatatctgaagtgaaattaaaccattgcgcatggctactatagatattttcttgcttctatccctggtttttaaatgtgcctttgctgtttatggtatatttttcctgcacatcatgactttgaagttctttacttactttccaaacccatttttaaaaatgggtttaatggatggcaagagaagaaggaagaaagcaaaaatgttacccaggattccccatccagaaa

SEQ ID NO: 40817 - DNA, 261 bp, Homo sapiens
gaaaatgttggttcttggtgtttggtgaaattgttaaattattttctaaattgttcaacttttaacaaatgacatttgatactaacactggaaagcaatttcagcgaattaaatagacccctctgtaaaccacgggaacattaagatgacacactgttcattcaagatggttttaattggtacaattattgtaattttcttgcaattatgtgttgagttgaaagcttttgtctggatcatttgagagtttttttttttttt

SEQ ID NO: 40818 - DNA, 331 bp, Homo sapiens
ttccttttctttatacagtggacttatttgttaagctgccagaatctttaagatattccaacagccttcccaaaacagaaaattcctcaatccatagacaaatgaatttaccttaggtacagtttggtgggttgtccccgctcctctgtttagtttgtcctccttcattcccctgacaacattttatctttgagtattttgggggaaagttttctgttcttgtttttcctctataaattatgtcgctcacacatgcagcatatgagctactgttgctgtggttgtattttatttgttgaacaatcctgtactttgaaatgattcatttaag

SEQ ID NO: 40819 - DNA, 122 bp, Homo sapiens
cggggcttcagtcctgcgataactattgcctacgtgcagtcaggcaccttaatgattgactatttggtttctgccgttacccggaggacttttaacctgaaagctgccaaaaaaaaaaaaaa

SEQ ID NO: 40820 - DNA, 325 bp, Homo sapiens
gtaagtttatttcagggagaaaatgcacaggaactacccactccctgctggaatgcaacagcatgcaaaagttttatcttttttactttcacctatgtggtttgctttaactcttttcactgaggaaatgccttgtttattaacttttctagacataggattcattcatcattaatgataatgtggtttccaagtattatttgtcagagaaatgtccactagaaatgataatggtactaactgtgtcctctttctgccatcactttaatcttactcatatctctgtgggaggatggagctgaaagataaacctttggtacatttt

SEQ ID NO: 40821 - DNA, 331 bp, Homo sapiens
gtgcagtagcaataccggaagaatgtaatagtttaatattctaaagaaatgttcaagtgactatccattttcttttcacttaaatgagtcttaattttttctgctttttcattgcagttaatacctgattgcctcctccttatttcttctgcctgtctactttccattctgcttttacaatgcttatatgtccttaatattttcttctgttaaattttgattgcacatctagagagttcagtgctttataaggtaaactatatcatataaacggaattcgtttttatagctttagggtcttaaatttccttaagaacttatacagaaagaa

SEQ ID NO: 40822 - DNA, 322 bp, Homo sapiens
  misc_feature (1)...(322): n = a,t,c or g
ctttaatttcatcccacatattttgatatgttgccttttaattagttggcatttatattaaaatattttttaggtnnnnnnnnnnnnnnnnnnnnnnnnnnnnnnnnnnnnnnnnnnnnnnnnnnnnnnnntgtgnnnnnnnnnnnnnnnnnnnnnnnnnnnncttttttttttnnaaanaaagtntttgncncccnggntggannncaggggnggnatnngggncaacncggccgcaanttccaaatttnnnaatngnaaatccngaaaanccccgaaggtccanttnannngngcntggggcnccntntnanttttttta

SEQ ID NO: 40823 - DNA, 327 bp, Homo sapiens
cgagactctgtctcaaaagaaataaataaataaaataaaatgcactaagctaaagatgaattatttggtttggatttgtctagatccttaagttgtaattatgtgcaattttttctcgctttactaaaaaaaattgacagaggatacaatagaactaataaaaatatttcagtgaatagagacagacctgaatactgtcatttaataaacttctagtactaaagtgtattctttgttttcacatgctttagtaaggaagcaataaaactaatcatgtttgttgtaataaacagtttctaataagcaacttattcactagatgttttt

SEQ ID NO: 40824 - DNA, 393 bp, Homo sapiens
ctccctgttacaactaccttcaacccaactcagtgattacaacaccatggaaatgtaccaggaaacttagagaaataaactttctgctaggaaaagaaatctcttgctcaaagccctacatgtcctcagatgggaacgtctgagattccagtctagataatgtgttcagcagtaatcagaaaagggcaactgtcctccctcttgcaacatacattatttaggcttctttcttgaggcctaacactagtctcctttttgttctctgtttagtgatgttcagaatgtggtccctaaaccagtagcaccactatcaattggaaacatgttagaaatgcaaattcttagcacctcctccaaatctacctgtatcagaacctgtagaggtaaggccca

SEQ ID NO: 40825 - DNA, 364 bp, Homo sapiens
  misc_feature (1)...(364): n = a,t,c or g
nnnnnnnnnnnnnnnnnnnnnnnnnnnnnnnnnnnnnnnnnnnnnnnnnnnnnnnnnnnnnnnnnnnnnnnnnnnnnnnnnnnnnnnnnnnnnnnnnnnnnnnnnnnnnnnnnnnnnnnnnnnnnnnnnnnnnnnnnnnnnnnnnnnnnnnnnnnnnnnnnnnnnnnnnnnnnnnnnnnnnnnnnnnnnnnnnnnnnnnnnnnnnnnnnnnnnnnnnnnnnnnngaatgtgaaaatattaccataaagagactatcaggtgcaggggatcaggaagaacaaaaatcaagcatatatatatatgctacgcttttaaatctcaggtaaatgtattggtggtttcttgcttgatgaaatagtcatcc

SEQ ID NO: 40826 - DNA, 366 bp, Homo sapiens
  misc_feature (1)...(366): n = a,t,c or g
ctttagcctacttaatgcaaacataacaagtatgaaaacctttataatgatccacttaatagtaaatatattttctnnnnnnnnnnnnnnnnnnnnnnnnnnnnnnnnnnnnnnnnnnnnnnnnnnnnnnnnnnnnnnnnnnnnnnnnnnncatnnnnnnnnnnnnnnnnnnnnnnnnnnnnnnnnnnnnnnnnnnnnnnnnnnnnnnnnnnnnnnnnnnnnnnnnnnnnnnnnnnnnnnnnnnnnnnnnnnnnnnnnnnnnnnntgtgtgttgcaaaggtggcatcccaatccccttgttgttcaagggtcaactatacaataattccatgttagcagaaaagtatacaattagaccagtggaac

SEQ ID NO: 40827 - DNA, 322 bp, Homo sapiens
tgtaattataattaaaatagaaatctcattttagaatgatgacttttcaatgaatgaaaattaagtaattataaatgaaatttaaattaattttgctttttgcttgcttgtttgctctgaaaattctgggtcacaaatgctagtaagaataaatgctggtaagaatagtcagaatgaatgcatcttacaaaaagaaactatatagtcaatatagtgatagagaatcaggggaatagagaatcctttctttttcagccactcttgagtcaagtctttaacatctacttagctgaaataattcaaaattatgctaaccgtacca

SEQ ID NO: 40828 - DNA, 313 bp, Homo sapiens
  misc_feature (1)...(313): n = a,t,c or g
nnnnnnnnnnnnnnnnnnnnnnnnnnnnnnnnnnnnnnnnnnnnnnnnnnnnnnnnnnnnnnnnnncccagcatgactctgcatatctgagcatatatctccttatagatcaattttatgtataaacccttagatcctaatccatacagaatagcactgatcaaatttaaatgcatgacttgattaaagacatcaatttcatagaagctggtggcaagaatatgtttaatatggcacttgatacctcctagatccataatgtaagtccaataggcagaaaagatggtaagttactatgtttcaatctgctata

SEQ ID NO: 40829 - DNA, 321 bp, Homo sapiens
gcatgaaccaccgcacccagcctggatcttatttttcaaaagacaaaatactagatcttttgaattttcttttgtattctttcttgtttccaccgcattgttctccaaatactgagaatgtattacatgatctcctctcctttgcttacccccaactccactctcctaccttaggtgttagatcaatctaaagttaagtcactagaatttggatcttgtgatatttcactgactatacaggtctgattattttataaggaacaaagttgtagcgttttatctagacataaagctagtttttttttagtcacctagaggttc

SEQ ID NO: 40830 - DNA, 319 bp, Homo sapiens
  misc_feature (1)...(319): n = a,t,c or g
tcacggttcaagaaattataaagctatttttgtaagtgccattaatatttcacacatgataattcacttttcatattgggcttaaattaacctattttctgattattgtggcacagaggaaacagattgaatctgcaagacaaccccaagccccaaaatgaagtgagaataccagctttaaaggttcactcggatttttctttcgcttaagtaggtcatctttgctgttactttggcgcttgggcngcgngncgcgaattccnnnnnnnnnnnnnnnnnnnnnnnnnnnnnnnnnnnnnnnnnnnnnnnnnnnnnnnnn

SEQ ID NO: 40831 - DNA, 307 bp, Homo sapiens
atcagtaatccctttgtaaattgcatttagggaaatttgatctgtggatcttatatgagagtttataaatacatattccttgcattctcccttttaatattcatatgatcctaaatatttgttaggttgcttctggccacttctttacacttaggattgaacttggtgccatttcgtatgttttgtacgaacacaatgttatttattctacatgcagttctttgatttgaatatttggggtcaaactaatccaagcacagaaaattgatagaataaaattcctaggcgacaacattccaacttctta

SEQ ID NO: 40832 - DNA, 309 bp, Homo sapiens
aattgagaaaaccaaactggaagaggcttcatgttatgatgaaaaagtgtcagagacaagtatttatcgagtaaatatgaaactgcaataaggacattatttgattggttgcagttacaaaactgcctgttttgatttacctttttggaaaattcctggtcacattggtgctggtgggtttaggaagttctccgaatccaggagagaccagaccttagccttgtccaggtttttgactccactgagagaaaaaatttgagtcaaagaaaaaacaaatcagctgcaaagcagaagcacaggctcagggat

SEQ ID NO: 40833 - DNA, 308 bp, Homo sapiens
aatgatgttgaacatctcttcatggggttacatgccatctgtatatcctcttcagtgaaatgttccttaacatcttttgctgttttctaattggattacttggggttttttaatactgagtttggagttatttatatattctagacagtagtctttattggatatgtggttcaaaaatattttctcccagtctgtagtttgccttttcagccttttaacatggtctttagcagaccaaaatgttttagttcttatgaagtccaacttaccaatttttccttttctagatcatacttttggtgtcaagt

SEQ ID NO: 40834 - DNA, 309 bp, Homo sapiens
  misc_feature (1)...(309): n = a,t,c or g
ctctgattggctagactcctacctggagccaagagtgagtgtggttcccccaaaggaataaagataaacagnnnnnnnnnnnnnnnnnnnnnnnnnnnnnnnnnnnnnnnnnnncagcagtttctgcctacctagcatccggtcgagcggccgcgaattccnnnnnnnnnnnnnnnnnnnnnnnnnnnnnnnnnnnnnnnnnnnnnnnnnnnnnnnnnnnnnnnnnnnnnnnnnnnnnnnnnnnnnnnnnnnnnnnnnnnnnnnnnnnnnnnnnnnnnnnnnnnnnnnnnnnnnnnnnnnnnnnnnnnn

SEQ ID NO: 40835 - DNA, 319 bp, Homo sapiens
gtttaaactcccaatgccccaaggataacaaaaatctattttgatcactttttattttcatcctttaaagagtacatcttattttaattaggcacatacatttccagattataagagagaacaaatatcccttctaaaaaaaaaaacagggaattgtggggagtgggggacagaggacttttaagcatgacaaagaaatttctgagatcttttctttctcttgcttttattgaaagagcccctaatattgtcgagaattagctacctcatatccatgaagctattatttacaggcagatgaataatttctctaaattca

SEQ ID NO: 40836 - DNA, 311 bp, Homo sapiens
  misc_feature (1)...(311): n = a,t,c or g
tgcgatattcatcacctcaaatgctcatcttttctttgtnnnnnnnnnnnnnnnnnnnnnnnnnnnnnnnnnnnnnnnnnnnnnnnnnnnnnnnnnnnnnnnnnnnnnnnnnnnnnnnnnnnnnnnnnnnnnnnnnnnnnnnnnnnntgtaccttaaaaatatgtataatgattatatatacataaaaaagatcaatactccctgataagcctgattaaaagattaaagtgagaaaataaaaatatatgaaatattatgaacccaaaagaagagagataactacaattatggaagatatgataattagaaa

SEQ ID NO: 40837 - DNA, 330 bp, Homo sapiens
  misc_feature (1)...(330): n = a,t,c or g
agcgtatcttaggaaagatacaatctctcctaccatttgggaaaattactaaagtcagcaggttattcagtcttttgttgagctgcttatgaagttgatacctgcaaaccttaaattccatgaccatttattattacagttgacccttgaacaaaatgggttcgtttatatgataattttttcagtaaatacattgggaaattttttggacattgtgataatttgaaaacttccagatgacatattgcctaaaattatcaaaaaaagaaaaatttnnnnnnnnnnnnnnnnnnnnnnnnnnnnnnnnnnnnnnnnnnnnnnnnnnnnnnn

SEQ ID NO: 40838 - DNA, 324 bp, Homo sapiens
  misc_feature (1)...(324): n = a,t,c or g
atgaaatgacaggacataacagagagaaaatgttatggacatgacattgaaaatacttagtgagctacctcaaatcctttttatttttattaannnnnnnnnnnnnnnnnnnnnnnnnnnnnnnnnnnnnnnnnnnnnnnnnnnnnnnnnnnnnnnnnnnnnnnnnnnnnnnnnnnnnnnnnnnnnnnnnnnnnnnnnnnnnnnnnnnnnnnnnnnnnnnnnnnnnnnnnnnnnnnnnnnnnnnnnnnnnnnnnnnnnnnnnnnnnnnnnnnnnngntatacatgaantagtncatganaggaattngctatcnccngaaaatg

SEQ ID NO: 40839 - DNA, 331 bp, Homo sapiens
  misc_feature (1)...(331): n = a,t,c or g
cctttgtgnnnnnnnnnnnnnnnnnnnnnnnnnnnnnnnnnnnnnnnnnnnnnnnnnnnnnnnnnnnnnnnnnnnnnnnnnnnnnnnnnnnnnnnnnnnnnnnnnnnnnnnnnnnnnnnnnnnnnnnnnnnnnnnnnnnnnnnnnnnnnnnnnnnnnnnnnnnnnnnnnnnnnnnnnnnnnnnnnnnnnnnnnnnnnnnnnnnnnnnnnnnnnnnnnnnnnnnnnnnnnnaagcatgctatttttaatcctcattatagtaggtgcgttatattagtggaataagacaagacatacaatataagaggattggaagaaactgaactgaaata

SEQ ID NO: 40840 - DNA, 159 bp, Homo sapiens
gtatttatgtggatctatttctgggctctctattctgtttcactgacctatttgtcttttctttctccagtaccacactgtcttgattattgtagctttatagtaagtcttgcagtttggtagtgtcaatcccccaactttgttctttttttttttttt

SEQ ID NO: 40841 - DNA, 328 bp, Homo sapiens
  misc_feature (1)...(328): n = a,t,c or g
ctttaaagtaataataataattgccaaactttttaaacaaattgtgtgctacacattgccaaatgtcacttagtcctggtgctgttactagaaccatcttagagatgtggaaatggaactaaggtgaagtcgacgcggccgcgaattccnnnnnnnnnnnnnnnnnnnnnnnnnnnnnnnnnnnnnnnnnnnnnnnnnnnnnnnnnnnnnnnnnnnnnnnnnnnnnnnnnnnnnnnnnnnnnnnnnnnnnnnnnnnnnnnnnnnnnnnnnnnnnnnnnnnnnnnnnnnnnnnnnnnnnnnnnnnnnnnnnnnnnnnnnnnnnnnnnnn

SEQ ID NO: 40842 - DNA, 321 bp, Homo sapiens
  misc_feature (1)...(321): n = a,t,c or g
agatactacttcatttaactctgataaggcctttcaaactcctgtttttatcgagtgcagtttattctaccactggcgtgatatagtggcctaactcaccacctgtggggagtgcttccttgttttcttccagtgtaacaagaggtatgtagtttagaaatgtcctgtattccactgatgctgtaatgaaaaccctcttttccagctagtgcatgtttatgtttattttattttttatgtttattttttataacccctctgctggcaggaattannnnnnnnnnnnnnnnnnnnnnnnnnnnnnnnnnnnnnnnnnnnngt

SEQ ID NO: 40843 - DNA, 319 bp, Homo sapiens
  misc_feature (1)...(319): n = a,t,c or g
ggcacaagcctgttagccagatattccatgctaatgcttttggtcctgatatnnnnnnnnnnnnnnnnnnnnnnnnnnnnnnnnnnnnnnnnnnnnnnnnnnnnnnnnnnnnnnnnnnnnnnnnnnnnnnnnnnnnnnnnnnnnnnnnnnnnnnnnnnnnnnnnnnnnnnnnnnnatccccttggtgataagtgagttcttgctcaattnnnnnnnnnnnnnnnnnnnnnnnnnnnnnnnnnnnnnnnnnnnnnnnnnnnnnnnnnnnnnnnnnnnnnnnnnnnnnnnnnnnnnnnagaataataaagtcatcaatacc

SEQ ID NO: 40844 - DNA, 322 bp, Homo sapiens
cagggatgctagaataaacaagacaggcgtggtctctaccttcatggaacttacattcaaacagtataatcaaaaataaatcaaaattgtaataactgttctcaaggaaaaaacaataataaaagaccaaggtaaatatattagaaagggttcatttaaaataaagtgacaaggaagggcatttctgagagcctaagaggtaacaattcttgtacccattttacagataaagaaactgaatctcagataggttaggtgacttagccaaagtcatagagccagataatggcactggcaagctctgaaatcaagtctttctgac

SEQ ID NO: 40845 - DNA, 322 bp, Homo sapiens
  misc_feature (1)...(322): n = a,t,c or g
ggcttttcatgccaggctcacggcccactgcccttttcccaggtctgtgtctcaggccccctccaccaggtcccagctgcactgaactccccacagttctccaaagagcccactccatgccgcacctgagcccaggcaccttaacgtcgaaccggtcgcgaattccnnnnnnnnnnnnnnnnnnnnnnnnnnnnnnnnnnnnnnnnnnnnnnnnnnnnnnnnnnnnnnnnnnnnnnnnnnnnnnnnnnnnnnnnnnnnnnnnnnnnnnnnnnnnnnnnnnnnnnnnnnnnnnnnnnnnnnnnnnnnnnnnnnnnnnnnnnnn

SEQ ID NO: 40846 - DNA, 325 bp, Homo sapiens
gtaagaagcagtatgacagggagtttctgctggacttccagttcatgcctgcctgtatacaaaaaccagagggcctgcctcctatcagtgatgtggttcttgacaagatcaaccaacccaaattgccaatgcgaactctggatcctcgaattttgcctcgaggaccagactttacaccagcctttgctgattttggaaggcagacacctggtggaagaggcgtacctatttgcaaagtgcagagcaggcatggattgccaattctggaacagagcaaagccccaacttgcctcactgggtgatgtcacacccacccatgaagagc

SEQ ID NO: 40847 - DNA, 322 bp, Homo sapiens
gtttttactcgatactccataaacagtgagtgcaaataaaatttatccctcatgaaaagacatatatcacaagacaaaaaccaatggaaatgaaaaattcctaaaagagctgttttcagtacacactagaaaaaaggatcctcacttctttgtggtattaaattatttgtcttcatatagttttcaactcaaaactagtcgtccaaagaccctttggaaaaatgaaactataaaaggcaatggattactcgaccacaagtaaatccctacaattttaaaatgacagtctacttcagtgcaatcgtttagacaataaagattt

SEQ ID NO: 40848 - DNA, 328 bp, Homo sapiens
  misc_feature (1)...(328): n = a,t,c or g
tttcccttcaagaatttaaactgctattttactggagaaaaagccactgaagaatagaaaaaagggatcatcgaagcacaacagggaagaataaacacagaaaggtgcacttgtaatagggggctcccgggaaaagactcggagacagcgacaaattatggaataggaaacagtcaaatatggatatgatcaccgaaatctctctctggtcaaatgttccagcacacagagatatttaccaagagaacaggcacagcaggggcttaaaaggagnccctggctgnntttagggcccactcagctcatncaggacaaccccccataccgg

SEQ ID NO: 40849 - DNA, 329 bp, Homo sapiens
ctttttttcaatggactgttataaagttaaaaataaaacaggactaagaacaaatcccaaagtcatactaatcaagtgattttgctaacctctctgcacatcttttcaaactcttaaaaagagtttaaaaaatgtttacgaaaattcattctgcagctccacagaagtgcttcaagtattgtgtaaagcttgatccaaaaaaaattaatatatcttaaatatgcacaaaaacaacagatatgttcaaatgtgttataatccaaattttaacacattttaaaatgaccaactcatcttgttgccaagcatttggtgatgaccataaagac

SEQ ID NO: 40850 - DNA, 317 bp, Homo sapiens
  misc_feature (1)...(317): n = a,t,c or g
caatagttgaattagtgagtatagtggggttccatgatttatcatgaattttaaagtatgcattattaaattgtaaaactccaaggtgatgttgtacctcttttgcttgccaaagtacagaatttgaattatcagcaaagaaaaaaaaaaaagccagccaagctttaaattatgngaccntaangtnctgatttcagtaagtctcataggttaaaaaaaaangnccccaaatagggggaaatntnttacttaactgnccgnaancngtntnttagtnttatnttgttcaggaaaaggnngaanaatanatnccttgt

SEQ ID NO: 40851 - DNA, 330 bp, Homo sapiens
ctagttctttatttggcagagagccagctgtgatcactgcagagcagtaacccctccgccctgctggctgtttgcttttgcaaatcaggagagagaaaacgaccattttgcggttgcccttacggtggggagacaggctagctcatcaacaataacagtatattttttggtaatgtggcaggaaaggaaggcattgaaggcacttacgtgggttagaagctctgctaaggcactgccccctgccctcctcttagaagggcccagttcaacacctcatctccacctggaagaggcggggactgtgccccatatctggcaggtggccctgga

SEQ ID NO: 40852 - DNA, 324 bp, Homo sapiens
  misc_feature (1)...(324): n = a,t,c or g
gggaaatccagcttccacttaggaaatgcttcaatcttccatgcaaaatttaattagccagaagtcagacgcagaaggccatgcaacgtatggttccatttatatgaactgtccagcacaggcaaacccgtcaaatcagaatacagattggttcccaggggctggggagggaggatgggaggtgacgccgaatgtggatnnnnnnnnnnnnnnnnnnnnnnnnnnnnnnnnnnnnnnnnnnnnnnnnnnnnnnnnnnnnnnnnnnnnnnnnnnnnnnnnnnnnnnnnnnnnnnnnnnnnnnnntggctcattttacattatgtg

SEQ ID NO: 40853 - DNA, 328 bp, Homo sapiens
  misc_feature (1)...(328): n = a,t,c or g
gaaattcttaaggtaaagataaaagacaaaacatacatcgagtggtctttagcaaccctgagttctttcctcagtagctcttcttggatagcacacttaagttttcatatcaaatagtaatacagctcacctctcactgactagagccttgttatgttttccgtaaagcttcatgctgatggatcaacctgttggtgaaatggtgttaaatggtcttaaaatagttcagaaatcaaacccttcaaatctttgggtaaagtctaagaggagcattatattagctgtacagtaaataatgctataaaaagactcttgnatgagttaatgg

SEQ ID NO: 40854 - DNA, 319 bp, Homo sapiens
ggaagggccagtggtgcgggggcgactgagagggatggttgggaagcaggaaagaaatatggaagtggagatggtgggaggaggatgggatccagtgtctggcttccctgcctggccaagcccagggcctgaaataataataggaacaacaagaataacagtgacaacactagcaactgtactaaaagaacggtaattacaggaaggaattaagtggttaagaacttggactctgaatttggcaggtccttgctttctatcccagccacttactgcctgggtgaccgtggccaagttctatcatctctttgagccttag

SEQ ID NO: 40855 - DNA, 325 bp, Homo sapiens
  misc_feature (1)...(325): n = a,t,c or g
cccagtgctttgggaggccaaagcnnnnnnnnnnnnnnnnnnnnnnnnnnnnnnnnnnnnnnnnnnnnnnnnnnnnnnnnnnnnnnnnntaataataatgataataataaatactgtgaaacagccttgttgctgatatggagnnnnnnnnnnnnnnnnnnnnnnnnnnnnnnnnnnnnnnnnnnnnnnnnnnnnnnnnnntcnnnnnnnnnnnnnnnnnnnnnnnnnnnnnnnnnnnnnnnnnnnnnnnnnnnnnnnnnnnnnnnnnnnnnnnnnnnnnnnnnnnnnnnnnnnnnnnnnnnnnnnnnnnnnataaagcagaaag

SEQ ID NO: 40856 - DNA, 327 bp, Homo sapiens
tggtgacaaagcaagattccatctttaaaaaaaaatgtagcaaataaaataaaattttaaataaaaaaagaacttgtttgtaaaaacagtatgcagaagcaaagctcctctgaacactgagtggagggtgtcagggagtgagtgaagttattctctttatatctgggacagggaagcaatagctggggacacagaggcagtcacccgagctctcagatacacttcaggggaggaggaggtcttccaaaaacagtgagggtctgtgaggctagccttccttgcatgaaccagtagtgagctgtgttagtccattctcacattactaca

SEQ ID NO: 40857 - DNA, 333 bp, Homo sapiens
gcccggcctaactttgagtttatcttaacctgttgtttcaacagagtagattgatagttaggcatacccgcattctgtaacatttgatgtgacttatgtctaatattaagtcaacattgctcacctattggctgatttagggactgggatttgtcggaacttcacagcctttgtaacgatttaaaaaaggagttaagaaaggtgttttctttttaaaataagtcttttcgttttgatgatatttttcaacattagtacatgcatttttggattatccagatgactgcctcataatcaagaactgttaacatcatttcggtacttatgttagct

SEQ ID NO: 40858 - DNA, 336 bp, Homo sapiens
cgcggccgcgtcgacacagattagaaagacttcaggaaattctaaggaaatttctgtacctggagagagagtttaggcaaataacaatcagcaaggaaaccttcaccagtgagaagaacaatgaatgtcatgaacccgaaaaaagcttcagtctggactctactattgatgcagatcagagagttcttagaatacagaataccgatgacaatgataagtatgacatgagcttcaaccagaattcagcctctggtaaacatgaacacttaaatctaacagaggattttcagagtagtgaatgtaaggaaagcttaatggatctctcccaccttaata

SEQ ID NO: 40859 - DNA, 327 bp, Homo sapiens
  misc_feature (1)...(327): n = a,t,c or g
aattgcttggtttttaatgttcagttctgagacatctttataaattctagatgagtcctttattaagtcatgcactgcataacannnnnnnnnnnnnnnnnnnnnnnnnnnnnnnnnnnnnnnnnnnnnnnnnnnnnnnnnnnnnnnnnnnnnnnnnnnnnnnnntactgtagccatcataagattctagctattcatgtgtttgtggtgatactgatgtannnnnnnnnnnnnnnnnnnnnnnnnnnnnnnnnnnnnnnnnnnnnnnnnnnnnnnnnnnnnnnncctgataattacgataaatgttcagttaatgtatttattata

SEQ ID NO: 40860 - DNA, 308 bp, Homo sapiens
ctccaggcgacagcactgcagacgccattatcctctgtttctctgctgcaccgacctcgacgtcttgcctgtgtcccacttgttcgcggcctataggctactgcagcactggggtgtcagttgttggtccgacccagaacgcttcagttctgctctgcaaggatatataataactgattggtgtgcccgtttaataaaagaatatggaaactgaacagccagaataaaccttccctaacactgaaaccaatggtgaatttggtaaacgccctgcagaagatatggaagaggaacaagcatttaaaaga

SEQ ID NO: 40861 - DNA, 320 bp, Homo sapiens
atttaatgaacatcaactgtatgctagctgctatgctgactgagaatacagcagtgaatcagaccactggggttccctaccccatcaagctcactgtttatcagggctctctggaactctgggagatatttagattttattctaagtgtaatgggaaattattacaggattttaaacgagagtgacatcatctgatttatgtgttgtaaaaggtcactgtagctactttgtggagagtgaacttacagacatggaagggcagaaagcaaaggagaccacttgggatctgatttagcaatcagcctgagaaatgatggtgg

SEQ ID NO: 40862 - DNA, 329 bp, Homo sapiens
cccatccatgtttcatcacttcaacagcgagtggaagcagaagagcatttatcatcatgaaacagacaagaattcttgctaattaccattttgttttaaagtatagtaagatttagggcaccctcgctaccccaactagcttctttccttgacttttatgtgggcagtgttgttataatttctctgttcaaataaagtctgtagaaagccacaaaaagagatctggaccctaaagcttaacggattctggaaagcagctggcttgtaacatgagtcattccagccaaagctttctcttttgtatgtttttctctgacctaaagagtggg

SEQ ID NO: 40863 - DNA, 337 bp, Homo sapiens
  misc_feature (1)...(337): n = a,t,c or g
ggtacactctatgatgcttacacaataaaatcaccaaatcacacacttatcaaaatgtatctccaccattaagctatgcctgactgtgtatcaaaatggaagaagannnnnnnnnnnnnnnnnnnnnnnnnnnnnnnnnnnnnnnnnnnnnnnnnnnnnnnnnnnnnnnnnnnnnnnnnnnnnnnnnnnnnnnnnnnnnnnnnnnnnnnnnnnnnnnnnnnnnnnnnnnnnnnnnnnnnnnnnnnnnnnnnnnnnnnnnnnnnnnnnnnnnnnnnnnnnnnnnnnnnnnnnnnnnnnnnnnnnnnnnnnnnnnnnnnnnnnnnnnnnnnnnnnnnnn

SEQ ID NO: 40864 - DNA, 321 bp, Homo sapiens
gtttaggcagctgaaaattttagctctccttctgcatataaaaatcctgcttcagcctgtataatgaggtgactacaaattaatagcagcagagagagatccaagtaatgtggtgaccagccaataagggtctagaacaccccaccatcatcaatatctattttcccatctctttccaaaaccaatacgtggcatgatcctcacaaactccttcccctggtcactctatagattccagctcactcctctgcttaaaaaactgttctcctattaaggtagtacggggatttctaagtctggaaaatgcaggaattccataag

SEQ ID NO: 40865 - DNA, 322 bp, Homo sapiens
ctgattttggccacaaacaacctgaaaaatctactcaaaacagtgggtttttacagctgggaaggattatctttttatatctgagaaggaataaaaacaacaataaattagaggcaactgtcaattaacacatcattcattatttttaagaatcagttgttttatttctatgtctcacaaatcagtacatttattatgctatattcacaaattcacaaaaatcactgggatgaatgggcagggcaatccaattttcccttatattttctaaggggaaaggtattttttgattgacgtgtgctgttaaacagtatttgtaaag

SEQ ID NO: 40866 - DNA, 329 bp, Homo sapiens
ttgagttccactttcattctccggggtgtatacctaggagtagaattgctagatcatgtccaacaatgggtggctgcctgctatgtttttactgtgctaattgatgtggtgtaaaaaaaaaaattagataacctttgaccgtgaacagtatcatctgaggaggtgagagacctgcttacagatcagatgaagaatgttgatttttatattactaggctgtaagaagaaattccaaaagactttaagaagaaagaggttaatatttaaaacataagcttttgaaaacttatcttctctaacacattctactttgttttgggaggaaagat

SEQ ID NO: 40867 - DNA, 319 bp, Homo sapiens
gctctacttaaaatggtaagcttttatgagagcaaacagatcttttatataagtaataaatattataaaatgatttttaatgtttataatttttaattcatactttgtgtgtgttttatactctataggacatattagtaaaatagtatgttcataataaatatgcatatattggagggctgtactaaattttgttttgattgctttttttggctggtttgttggggtatgtggtcaaataagtttggagaactctctttactgatctctcataatctggcaagctattattgacaggagtaattatttattcttaaag

SEQ ID NO: 40868 - DNA, 246 bp, Homo sapiens
caatacttaatggtcaccaaatggccttcccattgctatatccagtggtcaattcttagccacctgaattgacccatcatcagtatttgacaatggtaaataaattgttccctgcccttgagacagcttcttcacttcgcttccagttctccatgctgtcttgttttcctccagtctcactggctattccttcttggcctttgactgattcttgctcacttgctctgacctctttttttttttttt

SEQ ID NO: 40869 - DNA, 320 bp, Homo sapiens
cttgtgtcctctcatgtgatgccaactgtagtgaccttgtggggtgggctgggaaggacacaggagctccatttcacagatgggaaactagtggctcggaaagcccaagtgatctgctgagggtcacacagtgtggggcaaagtcaggacagtccggtctttttatattcaagtctctagttgtttccccctgggagacattgccttctttctagagataattagcctcataatatctgtagataagtccttagaattttccaatctctttttaatcctttttttgttttctttttcttgagagtcttgctctgtcgtcg

SEQ ID NO: 40870 - DNA, 331 bp, Homo sapiens
cacagcccgaggtccgtggcaggaggagatgacaagcagggagaacaccaacggaataaactctgcagtttccttcagatcatccctgcataggtgtttctcgaaactcatgttcagtgagaacagcagacatagactcaggacaaaccctccgtctcctttcaggttaggttggcccatgggctggagcgtctgcgtcttggtcggcccggcagtgtacatgtcaagcagcgcgcaaagactccacagccatttctgagcactgctggcctcatgctccagacagccctgggacaatgggccaccaagggaaatcaatgattgcgtgggc

SEQ ID NO: 40871 - DNA, 322 bp, Homo sapiens
ctgaataattaagtgttgatctttgtaagaaagaagacaggaaaaaaaagaaaagtagatataaatttacaaaaattcagatgttctggatcaataggataccagtaaacagtatctgccctaattaaagatcacatatattcagggttctttgtctaagaagaaagggctccaggcaactcattcgagttctactctcaattaaaatgattacagtgaaagagttttggtgcttctaagtggataaccttaacttataaaaaagggacgtgtggaattctaagatgtgtgcattcaaatgtttttggcaatgacttcagct

SEQ ID NO: 40872 - DNA, 332 bp, Homo sapiens
  misc_feature (1)...(332): n = a,t,c or g
caactggttagtgttgggaagaattgcgactgaatcgtgagaaggacacctatgggtctgggggtgtcctgtttcttggtcagggtagtggttacatggatgtatcacttggtgcaaatttcttgattttatacactcatgggttttgntttttngancttttantanacggaatcttgantatgtaccccacnctggagtccnctgncntnannnnnnntngctntnacntttgnctnctggnntcggtcgatctangnnntaacacctcctgantngctnncatnncnggtcctatgcctctnntgctctcgcgntttttntacnnatac

SEQ ID NO: 40873 - DNA, 320 bp, Homo sapiens
  misc_feature (1)...(320): n = a,t,c or g
aaatggcaacacttatgtattgacttactttaaaaatctgactttttattttgagagaattgtagatttatatgcatttttaagaaataatagagctagtgtgtgnnnnnnnnnnnnnnnnnnnnnnnnnnnnnnnnnnnnnnnnnnnnnnnnnnnnnnnnnnnnnnnnnnnnnnnnnnnaatatagtcaagggacagagaagttccacaccaaaatatatgtcttgttccccttttatagccatatctacttccttccttcatctcttcccacccgctggcaaccactaacccatttatccacaaatccatttgtataa

SEQ ID NO: 40874 - DNA, 332 bp, Homo sapiens
  misc_feature (1)...(332): n = a,t,c or g
caggaggaaaatgtagaaaagttcaggtactataaaaggcagggcacagtcaccatttcttcagttagtagctatagagcaatgtcaagactgttttcatttcagatctcaattttagtatttaaaaaaacaactacnnnnnnnnnnnnnnnnnnnnnnnnnnnnnnnnnnnnnnnnnnnnnnnnnnnnnnnnnnnnnnnnnnnnnnnnnnnnnnnnnnnnnnnnnnnnnnnnnnnnnnnnnnnnnntgttgcttaaaaataaataattcattaatttttaaaattacagaaaacattgaataagttttctaaatactcagttcttagaagc

SEQ ID NO: 40875 - DNA, 330 bp, Homo sapiens
tatccatttctctctactgacattaacttcaaaggggctccaacaaagttaagagaattgttacgtaagaactaaaatgaggaaaaaaaggccaagagttatatatttgcatatttaacctatatctcaccagaatgccatgctagttaaagaaaaaaagccattatcaaaatatgcttaccctaatttcttgacatattctaaatatccaattaggatttcatgatagactgcagtcctcaagcatttaggacggaagaaatgaacactatcgaggtaagatatgtatactctcctctggttgggtggagggcagtcagagccatactc

SEQ ID NO: 40876 - DNA, 329 bp, Homo sapiens
  misc_feature (1)...(329): n = a,t,c or g
nnnnnnnnnnnnnnnnnnnnnnnnnnnnnnnnnnnnnnnnnnnnnnnnnnnnnnnnnnnnnnnnnnnnnnnnnnnnnnnnnnnnnnnnnnnnnnnnnnnnnnnnnnnnnnnnnnnnnnnnnnnnnnnnnnnnaatgaatacaatatacactgcttggtggtggatgcaataaaatctcagacttcttctccccatgttgcctttccttaaaacagtttcttttgttttttgttatcatttctatgttcgtcccttcgttcagtctcgtaacgatggtctcaggaagtaacagaagtgactgctgtaatgacggtctcaagcagtaacag

SEQ ID NO: 40877 - DNA, 325 bp, Homo sapiens
  misc_feature (1)...(325): n = a,t,c or g
acagaatgttatccagctattaaaaatgannnnnnnnnnnnnnnnnnnnnnnnnnnnnnnnnnnnnnnnnnnnnnnnnnnnnnnnnnnnnnnnnnnnnnnnnnnnnnnnnnnnnnnnnnnnnnnnnnnnnnnnnnnnnnnnnnnnnnnnnnnnnnnnnnnnnngcaaaanttacccnggnggggnnacncccntggggnctnanttnttcaggaaactgaggnggaaaaacccnttgaccntggaaggnnaaggtnacanacngccaaaatngcnccanggncccnancnngggcantaangcnanaccntgtttnnttaaaaaa

SEQ ID NO: 40878 - DNA, 334 bp, Homo sapiens
ttaatgcttaattaaaactatttatgtccagaactcttgcgaacccagtgaggatagcctcactgctatgaatattattaaacgctatttggtaaatatgcatgtatttttgttggatatataaccaggagagaacttgttgagtaatatgtatgtgtataatgtaatatgttctagcagatatgaccacacaggtgcaataaataagagttctgaatgttccattcacccataaacatttgattttttttattttatccattctagtgtgtagtgttactgcaatatattattaatttgccatttttaatgaccaaagatgatgaatgttttt

SEQ ID NO: 40879 - DNA, 335 bp, Homo sapiens
attacatgccaaaagtcatacagtactctagcctcaaaaattatgctaatgctcctattgactgacaacttaagattccctttcgattttgctgaaaccaaagaactggaaacaacctagtatataacaggacttattaccagttattacaatggttcacacccttaataacactgactctaatatttcaaaatgtcctcttttgctggtgggctgaggtttttacaatgtgaagcagtgcactgtactaaaatttgaaagacatgagactatgtctttcttttggaaaataggaggacacctggactaaaggcagattaattttttaaaaggcg

SEQ ID NO: 40880 - DNA, 326 bp, Homo sapiens
cgcggccgcgtcgactagtaggcatggttagaactcttaaggttttaatccacattatctcctctttcctgagtttctaagagccatgattatgaagcctcagcagtgtttttaacaaagtacactgtaaattgtaaccagaaggcagcggctttaaaggagtgcttatttgcctaaatggctgttgacatacttaatagttttgtatctgattctagtatgctaaagcatttcagtattatgagaatacaatttacacactggatccccttgtacttattctttcagttgtcaaaatgttacgtcgacgcggccgcgaattccag

SEQ ID NO: 40881 - DNA, 335 bp, Homo sapiens
gagctggcaaaggtctgcgttcagaacatcgggagaaaatgaacaggatgcggcagcgcattgctcagcgtctgaaggaggcccagaatacatgtgcaatgctgacaacttttaatgagattgacatgagtaacatccaggagatgagggctcggcacaaagaggcttttttgaagaaacataacctcaaactaggcttcatgtcggcatttgtgaaggcctcagcctttgccttgcaggaacagcctgttgtaaatgcagtgattgacgacacaaccaaagaggtggtgtatagggattatattgacatcagtgttgcagtggccaccccacgg

SEQ ID NO: 40882 - DNA, 320 bp, Homo sapiens
  misc_feature (1)...(320): n = a,t,c or g
gctcttcccaccagggccagcaaaccacagcccaaggccatgtgcaggctgccggtctgtaaatacagcggttctttttgtagacannnnnnnnnnnnnnnnnnnnnnnnnnnnnnnnnnnnnnnnnnnnnnnnnnnnnnnnnnnnnnnnnnnnnnnnnnnnnnnnnnnnnnnnnnnnnnnnnnnnnnnnnnnnnnnnnnnnnnnnnnnnnnnnnnnnnnnnnnnnnnnnnnnnnnnnnnnnnnnnnnnnnnnnnnnnnnnnnnnnnnnnnnnnnnnnnnnnnnnnnnnnnnnnnnnnnnnnnnnnnnnnnnnnnnnnnn

SEQ ID NO: 40883 - DNA, 327 bp, Homo sapiens
  misc_feature (1)...(327): n = a,t,c or g
cttaaaactggtgacagttttacctatagaaggtaatactgggcctctggacagaagaggctcaggtaggaggccagggacttcgagcacccacaccaaggctgctgcaccacgtcctcaaataagacattaaaagaaaggcccacnnnnnnnnnnnnnnnnnnnnnnnnnnnnnnnnnnnnnnnnnnnnnnnnnnnnnnnnnnnnnnnnnnnnnnnnnnnnnnnnnnnnnnnnnnnnnnnnnnnnnnnnnnnnnnnnnnnnnnnnnnnnnnnnnnnnnnnnnnnnnnncagactcnnnnnnnnnnnnnnnnnnnnnnnnnnnnnnn

SEQ ID NO: 40884 - DNA, 334 bp, Homo sapiens
agaacatgtaatgggacctgtgaccacggagcaccttttcccaaggaaatagtttaaggcttatacttgagagggagtctagagacaatggactttgactctctctctggcattcaggctgtggggtcatccctatctcttgatataaacccagcaatatctaatacttcacatatcttgcttacaaagatgttcacctcagaaggaacaaaccttttggatttgtatggaatagacgtattttctctaataaagctcctgttggcttttcacagttgattctgaggtcagaattcagggggccatttttgggtgctgttgaggagatagagtg

SEQ ID NO: 40885 - DNA, 334 bp, Homo sapiens
  misc_feature (1)...(334): n = a,t,c or g
cttaaacggggttgatgccgggacttgggtttggctcaagctcaccctgtccgagaatgttggtaaccaagctttcccatgccagagtcacccagggcttgtgatgaaagcacaacacgttgggctnnnnnnnnnnnnnnnnnnnnnnnnnnnnnnnnnnnnnnnnnnnnnnnnnnnnnnnnnnnnnnnnnnnnnnnntggtccaaagaccacaatttgagaaacaccactttaatgtttctaaatttctctgataataaacatcacctgggatgcttggctaaaaatataattgcnnnnnnnnnnnnnnnnnnnnnnnnnnnnnnnnnnnnnn

SEQ ID NO: 40886 - DNA, 332 bp, Homo sapiens
gtgatgactgtttgcctgggaagcgtattggtgaggctacagtacagacagccatcaccctgtcactatatattaatttttattgtagacttttatataaatgggatcctacaatgtgtatactcttgtgccaagctgacactcaggcttattatttctatattcactcatgttgttcaacatatcagtagtttattattatttattgccaaatggtattccattacatggatatatcagtttatttatctactcatctgccttttcaacaattggtgctggaaaaagtgggtgcccatatgcaaaaaacactaagtttgactcattccttg

SEQ ID NO: 40887 - DNA, 325 bp, Homo sapiens
gagcaacatctggaaaagaagattaagggatgaagcatgccaacatttctccccaggtcaccccaaaaatgagttgaaaattctggatggcttctgagctgcttgctctttccgcccccagtcgggatctcaggagagagcgtccggcaagtagcttgggtacagttgactaagtgtgaacatcagtagccagccgcatagccaacctgcagtcacccatggccctgcatacaagagtgtcactaggagcagatatcacttgccactggtggttgtgtgtatctgaatcacctgggcactgtgaaacacacattcctaggcccca

SEQ ID NO: 40888 - DNA, 324 bp, Homo sapiens
  misc_feature (1)...(324): n = a,t,c or g
aaagaattgagtggaagcactattttggagtcgctgaaaggtccttccaatttgttgtttatagatgtagcatttaataaagtttttttgctgtaaaaatgaaccatagaagtaggacactacttttaaacattacaagttttttattgtgccattcagagatgagtaatttttttttttgttaacttgaatcttgaacctgttacttacctcattntanctgggganaacagnggaatattttactttaataaagttggctttcatggggctaattggctgcctccttgtancatttggnggccatgggtccaactgtgctag

SEQ ID NO: 40889 - DNA, 302 bp, Homo sapiens
  misc_feature (1)...(302): n = a,t,c or g
nnnnnnnnnnnnnnnnnnnnnnnnnnnnnnnnnnnnnnnnnnnnnnnnnnnnnnnnnnnnnnnnnnnnnnnnnnnnnnnnnnnnnnnnnnnnnnnnnnnnnnnnnnnnnnnnnnnnnnnnnnnnnnnnnnnnnnnnnngaactcagttattttgggtttttatggaagcactatatagacgtgattgattagatcataggccattggtttaccaacccacccttaagcccctctccctcttcagaggtgggggggggtgaggcgtgaaggactgaaagtttcaagcctctaatcacatggtt

SEQ ID NO: 40890 - DNA, 300 bp, Homo sapiens
  misc_feature (1)...(300): n = a,t,c or g
tgcacagtgtatttcctctgctcaaggcactttgaccatatgaggtgttcacatctgatcaattggtccaaccttagactaagggatacaaatcaagatgtttcaagtgcacaaagcaacagtaaagcataagttcttttttttttttngnntcnttttttttttaatananntaaanttttaagggacnangnccaangngcnnnntttntttnnanntnaatncnnggncaanntnggnncccanncccnattaanaanctttggactnatngggnaaaangttgtaaaaananttgg

SEQ ID NO: 40891 - DNA, 302 bp, Homo sapiens
gagtcatcttgttagtataaattatcaagtgttatctgaggggctcactatgattcagaaagacactcctatctcttaggaaattccaagaatttaaagtctatctatcaggagctggggacaaagattagccaaattctttatcatgcagccttatctagctaaaagtgtctgagtttctaaagaaatgggttcaatattttaatggtttttttcttgtcctatttctattaataatggcctataatgctctctgacccctacattcttctctaggtttcttagtagtgaggtctaacttg

SEQ ID NO: 40892 - DNA, 290 bp, Homo sapiens
ctttgttaaaactcctagctcctctgaggcagcactgagactggagcaagaaggtagggagctgtgagatgagatacgcagctgctctgagaggagagaatcctcaaatgcaggagggatggacagactgctgctttctatagcttccagaaagagcatcagtttccttctgctttgaaagctcctaatgctgtttaagtggcagccctctctcgtgtggctatgctgaggccttggtgctgaatggactgtcttgtctcatagaatgattttaaccagaccctggaaag

SEQ ID NO: 40893 - DNA, 208 bp, Homo sapiens
  misc_feature (1)...(208): n = a,t,c or g
gggcaacatcatgagactgcacctctacaaaaaataaaaatagaaaattggcctggtgtggtggcacgggcctgtggtcttagctattctgnnnnnnnnnnnnnnnnnnnnnnnnnnnnnnnnnnnnnnnnnnnnnnnnnnnnnnnnnnnnnnnnnnnnnnnnnnnnnnnnnnnnnnnnnnnnnnnnnnnnnnnnnnnnnnnnnnnnn

SEQ ID NO: 40894 - DNA, 343 bp, Homo sapiens
  misc_feature (1)...(343): n = a,t,c or g
attttaaactccattagagcaggactttttgtccacttttatacgctcagcatctataagaacaccaggatgtaaaaagtgcaccacaaatatttgctgactgaattagtgatgagaaaaatttaacaggaaagagaaaactcacctgtactaccattaaaaactatagaaataaaactagcnnnnnnnnnnnnnnnnnnnnnnnnnnnnnnnnnnnnnnnnnnnnnnnnnnnnnnnnnnnnnnnnnnnnnnnnnnnnnnnnnnnnnnnnnnnnnnnnnnnnnnnnnnnnnnnnnnnnnnnnnnnnnnnnnnnnnnnnnnnnnnnnnnnnnnnnnnnnnnnnn

SEQ ID NO: 40895 - DNA, 345 bp, Homo sapiens
  misc_feature (1)...(345): n = a,t,c or g
nnnnnnnnnnnnnnnnnnnnnnnnnnnnnnnnnnnnnnnnnnnnnnnnnnnnnnnnnnnnnnnnnnnnnnnnnnnnnnnnnnnnnnnnnnnnnnnnnnnnnnnnnnnnnnnnnnnnnnnnnnnnnnnnnnnnnnnnnnnnnnnnnnnnnnnnnnnnnnnnnnnnnnnnnnnnnnnnnnnnnnnnnnnnnnnnnnncagaaaagtattattatcaagcacattctaggggaagaaaataggactggtcagagaaaaaactgagtacatttgaaaaacaaattacaaacaataaacattttgccccattaaatcatgtattccacttatatatcaaaaaagtctgta

SEQ ID NO: 40896 - DNA, 344 bp, Homo sapiens
  misc_feature (1)...(344): n = a,t,c or g
gagccaacaggttttactgatagagtgaatgtagggtgtgtcaaaaagtgaggcatcaaagatgactacaaggtttttgtcttgagcaactataataatgtacagctgtagtcgcctttagctgagatagggaattctgtgggtagagctggtttgtgggagatcaggaattcgattttgagcctgttgagacatctattaaagatgcaagtggcagtgctgagtatgcagtagatnantggaactggggnttgggagagaaggcttgtttanagatataaatctgagaattgtcctcatgcncatgctcataggctnaatgtttntttctgagttcaccaaat

SEQ ID NO: 40897 - DNA, 327 bp, Homo sapiens
  misc_feature (1)...(327): n = a,t,c or g
gcctggctaattnnnnnnnnnnnnnnnnnnnnnnnnnnnnnnnnnnnnnnnnnnnnnnnnnnnnnnnnnnnnnnnnnnnnnnnnnnnnnnnnnnnnnnnnnnnnnnnnnnnnnnnnnnnnnnnnnnnnnnnnnnnnnnnnnnnatttgtctcaatttttgttttcttttttcctctctcttgcctctttaggattgaatatttttaaacgattctactgtatcttctttgttagcttattgtctacaacttttgggagaggttgctttagggtgtatagtatgtctttaagtgatgaccttacaataatgcatttctgtttttctta

SEQ ID NO: 40898 - DNA, 338 bp, Homo sapiens
ctcaagcctaatataaggaaagggggcccctctttagtgaaatattgtacgtttggagacgccattgttcttttacacaaaatatcaagcataaggtaataaagactgcgtgcttacccctaagatcaggaagaaagcagttctgtccacgctcaccatttatattcagaagtagaactaaaggttctagccagtgcagttagcccagaaaaagaactaaaggcatgtatattggaacagaagaagtaaaattcttctgatccacaaataatatggttatctctgcagaaaatctgatggaatctacaaaaagagctactagaactagttgaagtcat

SEQ ID NO: 40899 - DNA, 294 bp, Homo sapiens
caacaacaaacagagctaggaccagccacccaccccccaacccaggggaaatgcatccaccacacaactaccaccgctgcgctcatgacactctcagagacaggcacgggagctcctggcaaggcacaaccagggcaagtgacagtttgccagtcctgggcaagcagacacttatcctctctccagtccccaatcccaccagcctgcacaagcagagaaacatcctgcataaattaaaagatcatctggatcatcaaaagatctgagcaaacaaaacgactgagacaaaaaaca

SEQ ID NO: 40900 - DNA, 290 bp, Homo sapiens
  misc_feature (1)...(290): n = a,t,c or g
aaaagaaatcttagactttaagtacctacttactagtccaaggtaacaaattataatttctcaaatgagaggctagttaatacaaggatgttttgataactgtagaaggcacttaatacactttcctaaacagaagacagagtgagaacgaagtacatcaatttgaaggcctnnnnnnnnnnnnnnnnnnnnnnnnnnnnnnnnnnnnnnnnnnnnnnnnnnnnnnnnnnnnnnnnnnnnnnnnnnnnnnnnnnnnnnnnnnnnnnnnnnnnnnnnnnnnnnnnnnnnnn

SEQ ID NO: 40901 - DNA, 291 bp, Homo sapiens
ccggatcacacgaggcttgctgctgctagggccttgaaaatacagctcaaatctgcgcatgagttcagcagggtactggttctgggggcttcggaccatcccagggtcccgactccgctgctccatcattagccgatgctcaatgtaaacgtccaggacatctttatttaccacttccctctccttgtactgaggcagcagctcttgtacggcatcagcaaagagcttcgcgtagcgcctggcattctcacaaattgagtccaccaactcggggtcatcctcggctacgtc

SEQ ID NO: 40902 - DNA, 292 bp, Homo sapiens
gccagattctgtccttcataacctcctccccatcttaggcatcgagccagatcatttccagtacccaggggcaacacagcaacaggaggcaaaactggcaagttagctttgtcaatggtctctagaatccagcctactgtgccgtctccaccacacaccaaaatccggctatcaggaacatccttgaataatcggagccctatctcaggaccatcctttaggaggttgaacacctgtcgagggtttaatatatactggaacttccagagcaccctctgcccctgcttcccgc

SEQ ID NO: 40903 - DNA, 293 bp, Homo sapiens
ggaagactggagacatgctctgctctccgaggagcaacacatcctgagaccattgttagccatcgctgacgatcacataaaaaggtggaagattaaagcaggaattacaggttcaaaaaagacttttttcctactaagcctccatgaaagcagctcgtgcttccttctctgatgcctgcatggaagtcatgggcatttgtaaacttgtcctacttggaggaataatttaggttgatgcttttctagtccattccccttcacaatgcttttgtactcttgtgtatcctcatgaa

SEQ ID NO: 40904 - DNA, 295 bp, Homo sapiens
ataattcttatcctgactactctattgaacactgtaaccttctcctgcttccacactcccatcctttttagcgtactcaactctttttttttctgtagtacttatcttttaagttactatgtaatttacttactaaagatgtttgttgtctttccatagaaagtaagatccatgaaggcaagatctttggggttttttccctcaaagatgtatcccgagtgcctggaacactgccttgcacaaatctcctttagcattggaaacaccaaatcgggtatccttgggacagttatgg

SEQ ID NO: 40905 - DNA, 340 bp, Homo sapiens
  misc_feature (1)...(340): n = a,t,c or g
tctcataatgccacagtttgtcatggtatttgtggcagcaggcaaagtccttgttcagactttgattaaattgctgtggcatttttctattaaaaagatctcctgtttcaatctatagtttgcctgtgatctgtgggttaaaaagagctattttttaatactatttttaatagtattcaaatggaatactattccatttgattcagtgttttgagataatatatgattttgcttagtctcatttggatgaaatgaatatttccagatctacatgtcaaataagagggtactgcaacttgaaacttgtgatactttctcactactggngcagtcgacgcgg

SEQ ID NO: 40906 - DNA, 322 bp, Homo sapiens
  misc_feature (1)...(322): n = a,t,c or g
nnnnnnnnnnnnnnnnnnnnnnnnnnnnnnnnnnnnnnnnnnnnncgctgttttctttaaaaagtgaatcannnnnnnnnnnnnnnnnnnnnnnnnnnnnnnnnnnnnnnnnnnnnnnnnnnnnnnnnnnnnnnnnnnnnnnnnnnnnnnnnnnnnnnnnnnnnnnnnnnnnnnnnnnnnnnnnnnnnnnnnnnnnnnnnnnnnnnnnnnnnnnnnnnnnnnnnnnnnnnnnnnnnnnnnnnnnnnnnnncggaaggaggatagcttgagcctgagaggtcaaggctcagtgcagtgctactgcactgcagcctangtggca

SEQ ID NO: 40907 - DNA, 334 bp, Homo sapiens
cccacgcccacctcgcccacctgtgcctccactgccatatcacactgacaggcgacacagtgatgaactttcccaggcatgctgctgctcagccgggtgttcctctccacctttcaaagtcctcacagccatctcccaggcctcgagccacttcccctaggcctgcacaatagtgacagggtttccctcaccctgtcttactcaggaattttcaactgtaaacccccaaaagccttctgcacctctattccccacatagcttagaatcatttctcaaaccagagcatatactcaaaatatgtttgttaaacagaacaaatgtgttttacatgca

SEQ ID NO: 40908 - DNA, 323 bp, Homo sapiens
cacccggcctaaattacatcaattttctaaagagaaaataggaattgaaattcagtttgcttaagtgtaaccagaaatccagtaacttcacataagttaaaggaatagcacggaacaaggaattctgttaatcgaactatggtatgtagctttctttaaacactaaataccaaggaaccatgttaaacaagtgttgaaattatgattaaagtaactggggaattgctgattttactttagaatcctcactaaaaatgtggagttgtttttctacaattgccatcttctaattcccacaggaagcatggtatataacaggaaaa

SEQ ID NO: 40909 - DNA, 335 bp, Homo sapiens
  misc_feature (1)...(335): n = a,t,c or g
nnnnnnnnnnnnnnnnnnnnnnnnnnnnnnnnnnnnnnnnnnnnnnnnnnnnnnnnnnnnnnnnnnnnnnnnnnnnnnnnnnnnnnnnnnnnnnnnnnnnnnnnnnnnnnnnnnnnnnnnnnnnnnnnnnnnnnnnnnnnnnnnngccccctttcaacaaatatttagtgctaaaataaaaaaaaaatcaacaggagtggaaataacttcgtatggttactcaaagatagccactaaatttctcttaatatgtaaatgtatagttctctaaaatttatttccttcttaaagtcttacccaatttagcttcatcattttatttctctatctttata

SEQ ID NO: 40910 - DNA, 324 bp, Homo sapiens
ataaattgcactaataacaaacatcttattgagcatttactgtgtgccaagcactgtgctttactgtattattttataagattcttaaaacaacctgacagttaggtattattatatctccctccaattaatttagtaacttaccaaagtttttatagctagtgtacgagctgagattttaatttatgtctcctaactactggctctgctgccttcgtgagtatgctttaagatgctgatgaaaaagggttgaaatgatctgaaattaatgtcctaaatttcataatttctctgttgtctgctaaattccaggctgtaagactg

SEQ ID NO: 40911 - DNA, 326 bp, Homo sapiens
  misc_feature (1)...(326): n = a,t,c or g
gaaaaataatatatttttggaatttagaaattaattgcatttaatctaattcttgtttatgactgtattacaaacttgtattgagccttcaccttatcctttcctatactattaattagctaaacaaaagaccttttgatttgggtatagatagatcacctcaactgaatgatttgggcatcagaatcattctgaaatatctagagctcactttttcccctaagacaaaacaactgagaatcanaaagtctggggtctagtcctggctttgtaatcaaccagcagtgtaaccttgaatgtatcatttaatctctcccatcttgtat

SEQ ID NO: 40912 - DNA, 210 bp, Homo sapiens
gaccatatgacatctgggaaattgggagatttctgaaagaaatttaggcaaaaagaataaatccttctagcaattctgtgttaaagacgctccagtttttctaggtcttaatataaaaaaattacatttttagtgattctcaggaaattggctttctgagaatgataaacagttctaatggggaaactcctctttctttttttttttttt

SEQ ID NO: 40913 - DNA, 321 bp, Homo sapiens
caggaattggaaacatttgtccaactttagatgattcatactctggagaacacagggggttaactctaaatgtttcctttacactgattgttgttttgtcagggcctctttagtgttagaagaaaagtgtcgtatggaaattgctctttaacatttctgaaataaaagtgaaacaggctctttgcatttctgttccagtcactgaagattcttaaaaacacactgaacaaataggctcattcaccaccaataaatagctgtttcgatttcttcagggttcatctttgtatttccttggaactccctcaaaatatccatggg

SEQ ID NO: 40914 - DNA, 328 bp, Homo sapiens
atccagctaagtatcaaaggaaagaaaaatatatttgaatcatttattgtccccatcgagctggggaacatggcttacaggaagcagagaaaggtgtgaaattcctaacattgccaccagtgttacatctacaactgatgagatttatgtatgaccctcagacggaccaaaatatcaagatcaatgataggtttgaattcccagagcagttaccacttgatgaatttttgcaaaaaacagatcctaaggaccctgcaaattatattcttcatgcagtcctggttcatagtggagataatcatggtggacattatgtggtttatctaaa

SEQ ID NO: 40915 - DNA, 409 bp, Homo sapiens
  misc_feature (1)...(409): n = a,t,c or g
cttgagggcnnnnnnnnnnnnnnnnnnnnnnnnnnnnnnnnnnnnnnnnnnnnnnnnnnnnnnnnnnnntctcgaggatccgaattccnnnnnnnnnnnnnnnnnnnnnnnnnnnnnnnnnnnnnnnnnnnnnnnnnnnnnnnnnnnnnnnnnnnnnnnnnnnnnnnnnnnnnnnnnnnnnnnnnnnnnnnnnnnnnnnnnnnnnnnnnnnnnnnnnnnnnnnnnnnnnnnnnnnnnnnnnnnnnnnnnnnnnnnnnnnnnnnnnnnnnnnnnnnnnnnnnnnnnnnnnnnnnnnnnnnnnnnnnnnnnnnnnnnnnnnnnnnnnnnnnnnnnnnnnnnnnnnnnnnnnnnnnaaagtggnnnangganactgcgtcatccggaggtcacatntggcacctganagcca

SEQ ID NO: 40916 - DNA, 324 bp, Homo sapiens
aaaacaaaaacaaaaacttgcactcttgtgtatacacaatggtcatctacataaatcaaacagtacaggggctaagtgtgggttctgcagctggacagcctatttcaaaaccgagttcttccacctacaccccttgcctcagtttcctcatgtgcaggatggagacgataatggtaacaacttcgctgagttgtgagaattaaataaattacatgcaaagagcttagaaaggtgtacggcacataaagtgctcaatattatctactatgactattcaatgtcattttaaatttcaggaattaacctgatcataagcagaagagg

SEQ ID NO: 40917 - DNA, 323 bp, Homo sapiens
ggccaatggtccatctcttcaaactgaagctgagagtccaggtctaggcagaggagacagggagactgggcaaccccagtgggggacgggggacccaggacttcacccaaacacaggtaccagagacagatgccatgagctccttctgctggagccctcagcacaggggagtggtctatacccttaaccttctctgcaatgtccagggtgcaagttcaaattccagaatcctttagaaacttacccccacatgtactagccttgtgacccagcccagagtcctgaatgtctctaagcctcagtttcctcatccacaaaatggg

SEQ ID NO: 40918 - DNA, 330 bp, Homo sapiens
cacaaactctctcaatacagataaactcacacataccggagatatatatataatagatatatataaaattattttaatgcattgtagtgtaatatttatgcatactatactgtataacatgttattcaaaagggattgccatttctgagacacagtaacaaaaaaatgaggaaattattttgcttctatttatagcctctgtcaaaagtcaaaagactataaatgctttgcaaaaatggtttcacgtttgcttaaatgcttcatcacagtcacattcaaaatagtgactctaaacaaagaagaaagcagcactgtcatcagatgcatgat

SEQ ID NO: 40919 - DNA, 338 bp, Homo sapiens
ggcagatgtaatgttattttgcacatgggaaactgaagctaggaatgtttgttcatgctaattcaaataggtagcaccagaaccagaattaacgtgctattcttcaaaattgctgctgctattgacaagaggtagttgagcattttcaccatctgccaatatactgtgaaaattttagtaccaattgatgcttttgagttaaagcagatcagctatgagaagaactagtggtatacaacattgtacagctgagcacgtggctcggtgggtggaggagaaactgcatcccctttgggtcgttgcctgactgaagggaccatgtgcatgatatgtttggg

SEQ ID NO: 40920 - DNA, 343 bp, Homo sapiens
  misc_feature (1)...(343): n = a,t,c or g
ttcccaaacaaaatcaaggaaaagatgtcaaattcctatctaaatactgccagagcatgttcatttctaccatacataaacatatatacctaataaaaaccacaaccaaaacattcaggcctgttctttcctgtgcttagcaggaaagcaaactggttatcagcaatttatctctgattcagagtcagtacaaacacaattccgcccacccgctttccaccttttgactcctacagtacagcatccaaaatgaggatgcnnnnnnnnnnnnnnnnnnnnnnnnnnnnnnnnnnnnnnnnnnnnnnnnnnnnnnnnnnnnnnnnnnnnnnnnnnnnnnnnnnnn

SEQ ID NO: 40921 - DNA, 342 bp, Homo sapiens
aaattatattataaataactgcagggcacctcaaatacaacatatattatacaaccaaagccattatcctttttccttaacacctccagagtcattccatcctaaacttcccacttctcaatttatccctcctttccagttccactgttactatgcccagattctgttatcctgtctctcacggactactataattggccttactgcccctagttccttattcctgaattctactgcaataatttacttatagcctttgctcaaaacaaacaaataaaaccctttcaatgacctataactagaatacaagttcgaattctctggccttacattcaaggaccc

SEQ ID NO: 40922 - DNA, 340 bp, Homo sapiens
ctgacccctgatttaaagattgatagctttgaaatggaaagttttaactttctttttttttctttcccttgttctgattgggctgttaattcattaggtatttactcagtgtgtatcatatgaggcatgattcctctgctaattttggtagtggtagaaagatacttttgccaagcttggttgttaggttttcatttgtccaagagttcctgaccaagtgtgaatggatgttgaaatcaaggtgtttctttggccacacaatgtgcctttgggggctatatctatgtgcttctggtaccttcttttaattttcacaaagacactgcttgccgaccacacg

SEQ ID NO: 40923 - DNA, 231 bp, Homo sapiens
cttcaatctattagtatctttttgttttcaaacctttaagctttttcaaaaactgggtacaatttgcatccctggggcataggacagtgcctgacttagggcagggcaagccctactctagcaattcaaattcatatttgaattgaactgcataccttgtatcggcccatcccacaggacttgacattcattcttatcaaatttaatttttttgaggtttttttttttttt

SEQ ID NO: 40924 - DNA, 333 bp, Homo sapiens
ttttgatattagatgatatacatccagtgcaaccactgtcccaggcagagtagattcataactcattcacaaaactcagtagcaaaaaacagtttattttattatgcctatggactctgtgggtcagaacttaagacagggcacaatagggaccagtagtttttgctccaggatgtctgagggctccactggaagggctccaagactgcagtctttctgtcaggctgggggctgattgcctcgggaggtgtttttattcacatagctggtggtcgatgctggtttttggctgagatgtcagctgagacagttggccagaagaactacatgtgg

SEQ ID NO: 40925 - DNA, 330 bp, Homo sapiens
ctttaactgtctgaaaataagttatatagtgtttaccctttaccccgaaatatgtccttgtattatttcttaagaaaaaaagattctcttttattgccactgtagttagtacttgtagtagatttgactttgttataatacttttattcatctatccagttttgttagtggacccaataataacctttgtagattttttttcctgcagtacatgatccagttttggatcacatattgcatttcgtggtaatatcttttcagtctctttcaatctagaataattcctcagcctttctttgcttttatgacactggccttttaaaagaatac

SEQ ID NO: 40926 - DNA, 338 bp, Homo sapiens
cttgtggttccaagagcctgtctcaggtaccttgaacactccctgtatcctttcaagcaggcgaggtagctgttattcctatttagtagataaataggcaccgatgggggaaaagattttttaaggctacaccaaaagaacttttagtagcagggctggaattagaaggtctctagactgcgaaaaaggctgtcagaagagcgaggacatcttgtccttgtcaaagccagtaaagggtagagacagactcaaacatatgaagaatttccttttcatattttccttttggggaggaatgttggcttagagttcatggagatatattcttaacctctccc

SEQ ID NO: 40927 - DNA, 335 bp, Homo sapiens
ctttgctttagtttatctttttgggcatacttactttaggagacttatcaaaatcctccataaaaaataatttcatctggagttagttcatggtccaatttttttcttttattaattttatgccatctgtcttaccattagatttattcaggtgttagaattttagtttgtgggctcattttgttttggagggtttaaaattgctttttcttcctttccttcctcttcctgtatacctcctaaatatctaatagggtcttcttccttaggtccccctccattcttgctagctgggacccttgaagagcaagtgtggctagaaaaaaaataccagt

SEQ ID NO: 40928 - DNA, 332 bp, Homo sapiens
gtgaatttatatttgtaaaatgcctactacaattcctagcacataacttagaatagtttaaaaagtttaggagatatatgtgtgtgtgtaggggagtacatagagttaatatagggagaaaatattttgggttgaaagaacttgcataatggttagttataaatatattcccaggacttttatttagccagatgagacataaggaagatttattgaataataccgttaattttattccttctgtctactttaatcatcttctataaggggaccctaatttgcctaacctgtagcaagtgcttctccaggctgatatactaatcattcttagt

SEQ ID NO: 40929 - DNA, 332 bp, Homo sapiens
  misc_feature (1)...(332): n = a,t,c or g
aggtcacttcctccaagaggccccagatcttcaaccattgctctgagattgaattgtctgtatcccctctggcttcagcagggcccagtgtacagcaggtgctcaaaaaaatgttcattgagtgattcccacccccaactcaggcaaaagcagctcccaaagatggggtgtccacagtcacacacttccagaccactagctcaaggaaaacccctccccaccccggcctttggtttctttcatctgtaaatgaatgaaagcattgaacaataatgttctctaagatttggggataaaaaaatggtnacctagactgggcatggtggctcatg

SEQ ID NO: 40930 - DNA, 337 bp, Homo sapiens
gaggaagggagggaggagaataggaagaagagagattaaataagtgatatggatagaactgttttgatttgtggtggttactttatattggatgatcaggaaagaattatttaaggagtggcatttgagttcaaccctaattcaagacaaaagtctgccatttgaagatcatggggaaggaaattccagagaaaattagaagctaatgcaaaggctcaaagttgtgaacatgtgacgaagtataacctgtaagatgtgaatgttgataggtggggaaagcaagaaatgaatgatagttgttgtacttattgattgagcatttaaaaaccttatccta

SEQ ID NO: 40931 - DNA, 332 bp, Homo sapiens
aagccaaagaggaaccagaaacaatagaagaacataaaaaagaacatgcttcaggagactctgtggtttcccctcttcctgtaaccactgtgaaatcggttaacgttagacaaagtgagaacacttctgctaatgagaaggaggtggaggtgagtttaaagcaaattttttttccttttaaaaaagtgttccagactcacttgctacagtcacttcatgttttggcacaagctctcatatgctcggtgtctgtttggcttggctgtgactcagtgcaggtgaaccctgtgcatgtcagcattatgttgctggggggagaaagaaatgcctcg

SEQ ID NO: 40932 - DNA, 337 bp, Homo sapiens
  misc_feature (1)...(337): n = a,t,c or g
nnnnnnnnnnnnnnnnnnnnnnnnnnnnnnnnnnnnnnnnnnnnnctcaagcctctgatcttctgcagagatgagagagagggaaatgcttggctctgtggaatagggaagggaacctgggaatctgtttcctattcagactttgaacatgttcctctattttcaccttttccttaccaccaccttctatggtacctattgcctctagtttatgggccttaccagacctcttcagggcaaataagcatgcttctcatttgcatcctttttttcaggactgaggcttcaactttctcagctctgctacctgctgttccacttgcattccagcttccaa

SEQ ID NO: 40933 - DNA, 353 bp, Homo sapiens
  misc_feature (1)...(353): n = a,t,c or g
tgcaaaactctaaaaaccactgaagtgtacatcttatttatttatttttagagacagggtcttgttctgtcacccagtcttggaaaaaataataataataaataaaataaaattgatggtgatcataatgacggctgcaaaactctaaaaaccactgaagtgtacannnnnnnnnnnnnnnnnnnnnnnnnnnnnnnnnnnnnnnnnnnnnnnnnnnnnnnnnnnnnnnnnnnnnnnnnnnnnnnnnnnnnnnnnnnnnnnnnnnnnnnnnnnnnnnnnnnnnnnnnnnnnnnnnnnnnnnnnnnnnnnnnnnnnnnnnnnnnnnnnnnnnnnnnnccagctttataagggtt

SEQ ID NO: 40934 - DNA, 351 bp, Homo sapiens
tacaggtccaaaataaacggaccctgataggtaccacaggtgaagttgttggcaaatgacatcacttatgtaatggtaggtccttcactggaggtcaattatggagcgatgctgtgagggaaaggtaggtagatgtctctgggctgggagaaggcaaatgatgaggggacttggagtttcagggggggaaacaataaagattctggttggcaagtttcttggcaaaattttaagggtggtaaacattttaaatcagtatgtcagtaacttctgcatgagaagtgccaggtacttcacaaaactttaatataatgtgtgagccttagggttgaaagtagggatggcactgct

SEQ ID NO: 40935 - DNA, 345 bp, Homo sapiens
atcacacctggggaaagggaagattcagtagagagaacattgtttcctgtagcccatattatgaatagtttgggtctctgtcagaataccagtctgtgtctgcaaaggggcatttgagtgaagagagggggaatcttctgcccattctcccgagaaggacatgcagacaagagagttgagtctggccactgctgtaatggactctatagcttcctgtctgcagctctcaagcaggctgcatgtttctccagcacaactcaacggttggagttgggtgtaggcggagcagtgaggccatcaccagtgttcatcaggaagaggctgaccaggttgaatagtatattc

SEQ ID NO: 40936 - DNA, 344 bp, Homo sapiens
actttatttacaaaaataggcccagatacggcccacgggccatagtttgctgactcctgcactaagccatctttcttcttgtgttctccctccttcccctgcacagtagtaagagcgttagggtctggaatcatcagaattttaattctacccttgctaacaaccaactgtgtgatcttaagcaaactgcttgatcattctggcactctgtttcttatgtcaaatcaaggatctttggattatatgatcaataatggccctccttaaattccaaagaatcactgcagagtatgtctcctcccctgatactcctaattcattccagcatggaatacactatatga

SEQ ID NO: 40937 - DNA, 340 bp, Homo sapiens
  misc_feature (1)...(340): n = a,t,c or g
nnnnnnnnnnnnnnnnnnnnnnnnnnnnnnnnnnnnnnnnnnnnnnnnnnnnnnnnnnnnnnnnnnnnnnnnnnnnnnnnnnaactggggctcatggaagtggagagtagaattgtgggtattggaggctgggagaagtatggggagatgnnnnnnnnnnnnnnnnnnnnnnnnnnnnnnnnnnnnnnnnnnnnnnnnnnnnnnnnnnnnnnnnnnnnnnnnnnnnnnaagtggttaattataatttattgcataaatgtcaacattgttacattgttgcatatttttcaaaaagatannaaaaggattatgaatgttcaggacacaganatgatgtttg

SEQ ID NO: 40938 - DNA, 340 bp, Homo sapiens
  misc_feature (1)...(340): n = a,t,c or g
nnnnnnnnnnnnnnnnnnnnnnnnnnnnnnnnnnnnnnnnnnnnnnnnnnnnnnnnnnnnnnnnnnnnnnnnnnnnnnnnnnnnnnnnnnnnnnnnnnnnnnnnnnnnnnnnnnnnnnnnnnnnnnnnnnnnnnnnnnntctggttggggtgcatgctaggtaggaaaacctgggccttcaggtggagcagagtctggaactgcagtcatttttcaggaaagccgtggtggtggccgaagaggcaactaaatgtgatcaatcctagagacacagcacaaacaggagatcacgtatttgagtcagttctggggagagtggtcgacgcggccgcgaattcca

SEQ ID NO: 40939 - DNA, 342 bp, Homo sapiens
  misc_feature (1)...(342): n = a,t,c or g
gtgtaattgaatcttattcttaataatatttgatgttttaaaaagatattggccatttgtggtaaatgtgctaggggactctatgatagatatgatgggtgtttttccttgctttgtgaggcctttctgaaaacnnnnnnnnnnnnnnnnnnnnnnnnnnnnnnnnnnnnnnnnnnnnnnnnnnnnnnnnnnnnnnnnnnnnnnnnnnnnnnnnnnnnnnnnnnnnnnnnnnnnnnnnnnnnnnnnnnnnnnnnnnnnnnnnnnnnnnnnnnnnnnnnnnnnnnnnnnnnnnnnnnnnnnnnnnnnnnnnnnnnnnnnnnnnnnnnnnnnnnnnnnnnnnnn

SEQ ID NO: 40940 - DNA, 336 bp, Homo sapiens
  misc_feature (1)...(336): n = a,t,c or g
attagctcctcgtgataaattgtagttatttcctttcctttatcatttgacatttgacttgcttgtggtagttttgtcgtgtgaaagtttttttttttttcctgaaacggagtntcgntntgtcgcccantgcantcnatcctgggngacaanagngaaantccgtntnantaantaantaantaantaantaantaantaantaantaannggatgaatgaatgantgacnnaaactntttngaatctgggnntttncnntnaataatatanaancctntacntttcatttcanattcctngtncttntttaccnctgaangggnctntattgcg

SEQ ID NO: 40941 - DNA, 349 bp, Homo sapiens
  misc_feature (1)...(349): n = a,t,c or g
aaagaaatgagcagcaaacagggtcataggctacttgtaaaaagttaatgaaagatttactcagctttacttcaaattctatataattacaagctgtgattcttattctaccatactaccttccaatttaacacaacttacaaagaattaatttttagcaatacctggtaaaattttaaatatttttgttaaaatactttttaaaagctattaaaaatacaaacagttttttgttgttgtttgttgcaaatccaagcataaacccatggacagagataataagaaattcaaaataaaaagtctgtattctagttttacacaaccaaaggaaattgtctttgntaactgt

SEQ ID NO: 40942 - DNA, 345 bp, Homo sapiens
  misc_feature (1)...(345): n = a,t,c or g
nnnnnnnnnnnnnnnnnnnnnnnnnnnnnnnnnnnnnnnnnnnnnnnnnnnnnnnnnnnnnnnnnnnnnnnnnnnnnnnnnnnnnnnnnnnnnnnnnnnnnnnnnnnnnnnnnnnnnnnnnnnnnnnnnnnnnnnnnnnnnnnnnnnnnnnnnnnnnnnnnnnnnnnnnnnnnnnnnnnnnnnnnnnnnnnnnnnnnnnnnnnnnnnnnnnnnnnnnnccgattccccaaaaaataaagtttttgattgtgttgcccaacttacttgtgcaattcatccatttttgtgtatagcagaagttctttttcattgcagtataatattctattgnttgtatatgctata

SEQ ID NO: 40943 - DNA, 346 bp, Homo sapiens
  misc_feature (1)...(346): n = a,t,c or g
tgaaaacgtccacaaaaaaagatttttattcaaatggacaaattattcgtaatagctgaaatctcgaaacaacccaaatatttatagcctgtcaatggatcaatttgtaatggtttatttatatagtagaaaccactcagcaatgaaaaggaagaaaccaggctgaacactgactggctcaagcccataatcccaaacacttagggaggctctgctnnnnnnnnnnnnnnnnnnnnnnnnnnnnnnnnnnnnnnnnnnnnnnnnnnnnnnnnnnnnnnnnnctgcaaaaaaaagttaacaaagaaaaggaacnaacaactgataaacacagcaacatggatgaact

SEQ ID NO: 40944 - DNA, 348 bp, Homo sapiens
cgcggccgcgtcgaccagagatcagttttaatagtgagtcattagaagagggggatgtgcagcagtcagaaatgaccaaggtcttgctgttaactctgtgtgaaaccctaaggctgtcatccagggtgggtattaggagacagggcaggagtggtggaagatgagtattgccctctggatcctgaatggactttgaagagttgaccaaagagtttagatggatacagaataggatgggtagtgggttttctggacttgtaaaatttccccaggcaaagtatcacaaattggcatctgtaggaacagcaatatgacaacacacctgatatgtaaagccaggtcttgtat

SEQ ID NO: 40945 - DNA, 328 bp, Homo sapiens
  misc_feature (1)...(328): n = a,t,c or g
tgatattttacatccatcagactgggaaatattaagaagagctataatatatactaatggatgggggaaggtgttcttactacactgctggtggaaatgnnangnnttaaagtgcttttttattttttanntaganggtttctttgnttttccnntnctggnatnccgtgnnattatnatngccngnttttcntncttacttctgggntntanngntncttnaacctgntcntntngctgagctgagtgtactgngcctnntcnccnngntnaacnnntgctntntgtactgntctggnatgtccttgnnnnatntnntgnnnnttgt

SEQ ID NO: 40946 - DNA, 336 bp, Homo sapiens
  misc_feature (1)...(336): n = a,t,c or g
aagaaattaaacatcagttgtttaaggcaactaggaagtctacagtttaatctcatttactgttatttagtgatatgccatttagtatatgaaaacactgtgggtataggctgttggttgaagcagactatgtgtgctttggagggggcactttgccaagggaaaaaatcttttgatttttttgttccctcttctggagagttctcaaaatctatccttttgacttttattggcagttgtcattttcatcgtcatctccatattcttttattttttttgacttactctgtggcaaaccatctctagcctgaagttataccaatgaanaanaaatct

SEQ ID NO: 40947 - DNA, 336 bp, Homo sapiens
tgtcaagtgaaagaagcctacaaatattgattccacttaaatgtataaaaagaaaaatttacaaagaaagcagaatagtaattacttagggtttcagtgagagcaggaaataaaatgggggtgatagaaatgttctaaatttgaattatggtgactgcataactataaatttactaaaaatcattgaattgaagacttacaatgggggaatcttataggtatgaaatttattaatcagtaaaggtttttaaaggaataggtatagaatttttacttagtttcactctaacagaagtttttattaacatgggtaacttctgattagactatgatatt

SEQ ID NO: 40948 - DNA, 336 bp, Homo sapiens
  misc_feature (1)...(336): n = a,t,c or g
aaagtagtaaaattgtgctttaaggcccaataggcacaaaatacactacacacagattattcaggatcccaatgtaatgtgtaaatactgattaaaaaaaattacaactctaccataccagaaatttgatgtaagctaataggctagccataataaacattaaacattttattaacaataattttgcttgccttcttagaatttagaagggctttgggggatggtttggatggcccaggtctcttaaaaaaggtgtccaaggaagtttgaattgatgtcgacgcggccgcgaattccnnnnnnnnnnnnnnnnnnnnnnnnnnnnnnnnnnnnnnn

SEQ ID NO: 40949 - DNA, 197 bp, Homo sapiens
gtcattcagtactcatgatgttgtactataaaagatttctacaataagaacagacagaactccagagagaaaacagaagataatccaaaacaggtttagaatgaacaagatttgaaggattacgaggattccagaattacaaatatttgaaggataaaatagtgagatatttatttgctttataaaaaaaaaaaaaa

SEQ ID NO: 40950 - DNA, 335 bp, Homo sapiens
  misc_feature (1)...(335): n = a,t,c or g
taggatctttgctttcttattcttttatccctagtgcctacaacagagcctaggaggcatctggaaaagatttcccgaacaaaatctccgttgtactaatattaatttagccaaaaatagaaaaataactatgttggaaaggtgggatgagaggaaacagactggtcatgggaagaactaaattctcatctaccagacgaggcaaagtcaatagatatttacaggtgatagatcaagaaacaacaggannnnnnnnnnnnnnnnnnnnnnnnnnnnnnnnnnnnnnnnnnnnnnnnnnnnnnnnnnnnnnnnnnnnnnnnnnnnnnnnnnnnnnn

SEQ ID NO: 40951 - DNA, 336 bp, Homo sapiens
  misc_feature (1)...(336): n = a,t,c or g
ccactgtataatcccactttcagaaacttagttttatagatatgttcacatggactcaaatacagacggtagctactttctatctgatgtggtccaaactggtcattaataggtgaattttaaacatggaaaatgggaagaatcttctcccaaatgtaattttaatttcaagcaaataaatgtgcattcacttgcaaatcttatgatgtaaatcagaggcctctttcgtccatatcggtcaactgataaaagttctgattcgtctattttgcaaaaaccttgttcntaatacttnatttacaatcttcagattntgtttntttaaagnggnggaaa

SEQ ID NO: 40952 - DNA, 330 bp, Homo sapiens
  misc_feature (1)...(330): n = a,t,c or g
tttatatattagtgagcattattatactctccttattttgtctttcctgtctggccttgactttgttggtagagctgttacgtgtttagagactggctgtattcatgaaggcagtttttgtcttggtatagccagctcccaattctggttgaaaaaaaatgagcaacagtgatgttagtgataatgataacaagaaaaggaaagaatcttgatatccatgttaataagaattttttaaaaattatagccactttattatattactactttccttagtaaactgccttttttactaggttataattttgatagtatttaaaaatganccta

SEQ ID NO: 40953 - DNA, 330 bp, Homo sapiens
  misc_feature (1)...(330): n = a,t,c or g
ctgcctctaggatgtgtatcaatatagaaaagaaaagatatcaaaagactcaatgtgtagtaaaatgagttttnnnnnnnnnnnnnnnnnnnnnnnnnnnnnnnnnnnnnnnnnnnnnnnnnnnnnnnnnnnnnnnnnnnnnnnnnnnnnnnnnnnnnnnnnnnnnnnnnnnnnnnnnnnnnnnnnnnnnnnnnnnnnnnnnnnnnnnnnnnnnnnnnnnnnnnnnnnnnnnnnnnnnnnnnnnnnnnnnnnnnnnnnnnnnnnnnnnnnnnnnnnnnnnnnnnnnnnnnnnnnnnnnnnnnnnnnnnnnnnnnnnnnnnnnnnnnnnnn

SEQ ID NO: 40954 - DNA, 336 bp, Homo sapiens
attagccatggggatttttatgggaagggactaccgcaggcaaagggaggagcaggtgtagtggccctgaggtggctctatgcctggatgttccaggaacagtaaaaaggccaatacagctgtctgaataaatgttaatctccttccctccactaattacttttttctctttttctatttttgagcttctactataagccaggcattgtgatatatgttggggttaaaacggagagcaaaactagacttgactcctgccatcatgaaacatattacctagtagataaggcagacattatgtagaggatcatacagaatacatgtaaactaatagcc

SEQ ID NO: 40955 - DNA, 332 bp, Homo sapiens
tgaaaatactttattgcagaaaagattctagcatgactccaatgctgcaagtgttaggatattttttcagaggtactcatcaaacttgatatgtagactgttgatgcacagagaaaaaaactgaggcctaacattcatagagagtcagagaaagtaaagatggaagagggatctcccatagcaacacaagtggcagtggctgcgatcaacttttgtttttttaatatcagttttttttgtttttgtttatattaacagaagtattgatgtttggggctggatgattcttggttataggaggttgtttgcagaattgtaggttgtttaacacc

SEQ ID NO: 40956 - DNA, 338 bp, Homo sapiens
  misc_feature (1)...(338): n = a,t,c or g
gttttccctcaacctccacctatccacggggatcacgattaccacacacaggcaaggacacagaagcagagaaggaaggtttgggatctgaggtcactgcgagccaggggtgggggtcctgctttctctggagtgctcacccctgaaggagacgggctccccaaaccgccatcccagaaactgccttcagaaccagacctnnnnnnnnnnnnnnnnnnnnnnnnnnnnnnnnnnnnnnnnnnnnnnnnnnnnnnnnnnnnnnnnnnnnnnnnnnnnnnnnnnnnnnnnnnnnnnnnnnnnnnnnnnnnnnnnnnnnnnnnnnnnnnnnnnnnnnnnng

SEQ ID NO: 40957 - DNA, 265 bp, Homo sapiens
cacaaatcctgcgtgtatattttctctttggtatgtttctgacatgatgttactgtcaacactttgcatcttagctgagttcaaaataatgtattatatataaataaaatatttatttacaagtatctttgatgttgtttgtgtgctctaaaaccaaatggcataccatacagtctcttcaaatttaagtctgagtgaaaatattcagtactactccaggataatcactgacacatgtaaatatctagatctttttttttttttt

SEQ ID NO: 40958 - DNA, 337 bp, Homo sapiens
ttagcattaggtacagcaggataatgctgtgcaacaagtcttaatgaaagttagaacacctgtatttgagttccggctctaccagttcatctataaaatggaaattatgctaacttcactttctgtttcacagtatttctgtgtgaaacacatgaaccgatgaaaaagcccttttaattgcaaagcagcacttcattatcttagcatttaatgagtaagtgcataggctttgcactcagaaagtggattcaaatccttgttctgccatctactagctaagtgatttcaggcaagttccttaatgtctttgtgtatgactctctatatctgtaaaact

SEQ ID NO: 40959 - DNA, 337 bp, Homo sapiens
atttaagtagaataagtttatttgcagacagtcctgaaatgtatgttccatgtatacaaaccatcctaagataatgcatcacttttacagttgtaatttaaagggagttgttgaagtgagcattgaagagctgtctgaactgagggaaaagattaatttcttgtgaaattagggaatagggtaatgggcctagggagagctttctaaagggctagctaggtcatggtttctaatactaacataagctttctcagttttaccttatgtcttgcctgttaaggtcagggcctgctagtctacttttggacgtgccatttcttcttctcttcttcttctt

SEQ ID NO: 40960 - DNA, 337 bp, Homo sapiens
ggggaaaggaattttgggtgagataaaaagacaggtttgaaaaagcatacaagttcagggaactgcaaatggtttcttaagaccaaagcgcaatgtcagtgtgaagaagtggcaggcaatgggaaaggataaatcagtggagcccagacaatgaaggagctttgtacttgatgctgaggagtgtggatttgtttctgcagataatggggaacttctgatttttctttttttaggtggacagatagaatcaagtttgcttttgttaattcatgtgacaatgtagaaggtggactgaaggtagggagagtattggtcgacgcggccgcgaattccagat

SEQ ID NO: 40961 - DNA, 331 bp, Homo sapiens
  misc_feature (1)...(331): n = a,t,c or g
gtttgacagtaccctcagatatataggaaccattataatagtggggtgggacagggaacaggtgatttcttgtagttctttaagtctataaaagtgagtggaatctaactaaatattgattatagatttcaataaagtggcttaaatattcaacacattcatttcattaaataaactgtaatcgtctacagcaaattattctaaaaccatcaacactttttttttttttaacttnntntnagggtnanggnantttntngggatgncantntttnatncngtnnattttcaaaatncagntngatnccnccntgattttnngggtcagttt

SEQ ID NO: 40962 - DNA, 332 bp, Homo sapiens
cagctgtccctcccagttctcctgcgcagctctccccgcctcccacgaggctttcccaactatttcatctgatcattacacattgtatgcatatatcgaaacatcacatgaaaaaatatgtgcaactattatgtatcaacaaaaatggcctggatcgttcctcttcctcccctcgcccccttatgttcagggaacttgctcaaacacaattaccatttcaggtttggcactacagtgagaaattccttcctaactccaagccgaccaaataagtctaagatgggagattaagaaaatttacatttccagcctgggcaacatagcgagacctc

SEQ ID NO: 40963 - DNA, 367 bp, Homo sapiens
  misc_feature (1)...(367): n = a,t,c or g
gctgcccaggcctgcacgtctaaaccttggcttggttgtgctgatgtttactgtgtgctggcatgctgccctgggtgcaggagagaccgagtaaaccaatcaataagtcaaataatccaaggctgcaataaacactatcaaggaaacagtttccacagggaagctcacatgagccctcagtctaaggcccccccaagttcaatggagatgacagaatggaacatggggaagcagtcagggaaggcttccctgaggaggtgacaagctgagtatagataggaaggatgacagtgggccactcaagggaagcgtgaaggaagaggattccagaaaaanggaactgggnaggcagaagactccaagaggg

SEQ ID NO: 40964 - DNA, 367 bp, Homo sapiens
cacgtttccacttaaatcgttttgcacaaagtcttgcttcgctcagatgagatgagatatgatttcctagagatgtaaaaataagaatgaatgtggcgcccccttcttccagatgtaatagaaagctctgccctatcacaaggggggtgttgaagcgccccttgtgttttaactgtatttaactgagcacaagatgcacaagctgtggtgggaaaccctcagtttacctttggagtcttccctgcagatcgcagacctgtttccaggctgatgtttctggtgtgtaattgctagcgtttctgaagggttttcccaattgttttagccttgtgaagtattcttaattataacttgcctttcagcgatg

SEQ ID NO: 40965 - DNA, 357 bp, Homo sapiens
  misc_feature (1)...(357): n = a,t,c or g
cgtgtnnnnnnnnnnnnnnnnnnnnnnnnnnnnnnnnnnnnnnnnnnnnnnnnnnnnnnnnnnnnnnnnnnnnnnnnnnnnnnnnnnnnnnnnnnnnnnnnnnnnnnnnnnnnnnnnnnnnnnnnnnnnnnnnnnnnnnnnnnnnnnnnnnnnnntttctgcatggggtttggtcagggctgggtctgtgccctgaagaggagctcattccagcccagctccccactgctgcagcgtgtgtggactcctccagaagggtgtggtgtgggcttctccagaagggtgcgggagttttcctgtaggagtttatcgtctctggtgcantgggcntcanaggggaccatatttcctcagggg

SEQ ID NO: 40966 - DNA, 357 bp, Homo sapiens
caaagatgtagaagatatgataacttacagggaacaaatttttctagaaatcagtttaaaaagcagtttgatgtagaggtattttaaatattgtacactttgcctttttgagtaacattccagagaataggtattttttgtaggctgtttcactgaactcagttaatgaaaactgtattaacataattgttgtagcataatattaatagtgcaaaagtacatataagtcattttgatgaaaaatattccaagactaagttgagaaaagagatactattttggatgtgtatcagtatttttgtttttaataatgattgatttgtggagcattgttttttcacataattagttttaaag

SEQ ID NO: 40967 - DNA, 356 bp, Homo sapiens
ctggaactgactgtggactcagctatggtgcagtgaggaaggtctggacaccacgcatccaatccccttatctcaaatgagcaagaaccttgctggactggcttagttttgccaccattaaaagaaaaaagccctttgcagtcagtttaaattggaggtctgaactggccacaggatggtgccgacgtggtcaagaaaacctgatggaaaaaccagtggaaaaaagaatttccaaaggacccaactgagtaaaatttgtacaaaggactcggcgtggccattgaaggttgcatgcaactttgatgaaggtcgtttagaggtggcatgaagctggcctcttgcatccaaggaaaaaa

SEQ ID NO: 40968 - DNA, 356 bp, Homo sapiens
gcaagctgaaggaatagcaaagcaccatggcaacagccccaacttgcaattggatctttttcctgtgaggcattcccctttcaaatgagcatccgcatccaacaatagctttatttcaagcatccaagcccggagtcatgccatcgcctgtgcctaggagacctggcttttggaggtgaagccaatgcaagccagtatttctgcctgctggctcactgcaccaggcattgttctcaaagatgtccaatcatcctccttctgggtaaccctgcttgcgtatgtgtgtgtgtttcccatgatacaaatagtttgtaaccaggcatctctgaatcaatcatctcagctagcatatttta

SEQ ID NO: 40969 - DNA, 363 bp, Homo sapiens
agcacactgaaaggcatgggcagtgcaggatgcccccactcctctccttccttcctgggagagaagcctcaggttcttagccttctctcaatctctcagagccttccagctgcagcaaccacctaccctctttcctttgttaactgcccccaggcatcagaactatgctggttccttcagcactctatgtaaggtgatcaaaatttttttttagaaaactggcctgttgggtagtacactgaagggctggaaaattaagcacgtgatctccctcttttcccccaagggagaggtcctgatctgagacaatctctcttgagactaagctaagactccttggaggaggggctgatgtgggcaaaa

SEQ ID NO: 40970 - DNA, 363 bp, Homo sapiens
  misc_feature (1)...(363): n = a,t,c or g
cagagacaagaaagtgtgtgacctgtgaccctcgccccacaggtggcattaaggactcaggtctgaaagaagagacagccatatagggagctctcctgcccagggaaagggaactaatggagacactggcttaggtagagctgccccagttgctggtgcagagagggcaccagcatacaacatgctggtatgggccaaacagcatggctaaaactgctttttaattttttaannnnnnnnnnnnnnnnnnnnnnnnnnnnnnnnnnnnnnnnnnnnnnnnnnnnnnnnnnnnnnnnnnnnnnnnnnnnnnnnnnnnnnnnnnnnnnnnnnnnnnnnnnnnnnnnnnnnnnnnnnnnnnnnnnn

SEQ ID NO: 40971 - DNA, 363 bp, Homo sapiens
  misc_feature (1)...(363): n = a,t,c or g
ctccgtctcaaaaaaaaaacaaaattattataatctctactaattaagttagtgggtattggtatagggatattcaaatagagaaatgtaactgaaaagagaggcatgaaagagaaccacgtatatagagaaacttagtttatgatggagttggcattggagattaatgtgaaaaggacagatatttcagtaattggttagccacatgggaaataaaaagaaatgtgattctgtgttagccatgttgctgcaattttgctgtgcagcaaacaacttccaaatctcagtaagatataacgacaaacntatatttgtcacacagaggtctataagtcacacagaggtcanatcaggtctactccc

SEQ ID NO: 40972 - DNA, 355 bp, Homo sapiens
  misc_feature (1)...(355): n = a,t,c or g
gtttcagccccccacgcccaactaatttgtaatattttttttgagacagggtcctactacattgcccagtctgnnnnnnnnnnnnnnnnnnnnnnnnnnnnnnnnnnnnnnnnnnnnnnnnnnnnnnnnnnnnnnnnnnnnnnnnnnnnnnnnnnnnnnnntatgttgatttttttaaaacttcaacccaatcttacagcattgtaatgatgatgctgtgagtgtactgattattgattatacaccaaatggtgtgattggacccatggagaaggaaatgcagtgctccgtgtctaagtgtttgccacttgaaggaagctgtcacaagaatcaaggtccaggggattctccactg

SEQ ID NO: 40973 - DNA, 351 bp, Homo sapiens
  misc_feature (1)...(351): n = a,t,c or g
nnnnnnnnnnnnnnnnnnnnnnnnnnnnnnnnnnnnnnnnnnnnnnnnnnnnnnnnnnnnnnnnnnnnnnnnnnnnnnnnnnnnnnnnnaaaaaaaattgtgtcaagaaatttgggtaccttacatctctagaaagagttcatcaagattttatttcattgattcaagtatttaagtttaagtactaaatatacacctgagctagaataatagaaaatattctttattataggtttcagtaattcattaattgggaagactatgttaccaaaaaagaagtcagggcataggaaaaaaggttaaggattaaactacttaattaaacaatcagcattcattaactatactttg

SEQ ID NO: 40974 - DNA, 354 bp, Homo sapiens
agccaattaactagtgaaacactgtgctgccgtttttattaggttcctatctttgttttttatgtggcacagataaaatttttagagcgttgcaccctgtttcttttctcttaagctctgtggtttttattgctcaattttctgtggtgtgtgattttcaggaatgcctaagttgttatagaaaaacaaattgtgttttcaaaaggtgctaacaaaatatctaacagtagcaatacttttaattgtcttatgcttttcaacctatagtttcagttttatctcattttaaatttttataactgctttgaggaagatattttataagcgaggaatcaaaagatgacaaaagatgaa

SEQ ID NO: 40975 - DNA, 356 bp, Homo sapiens
ctgacttagaacaacttttttgacttcctgcaaagaggacccttacagtatttttggagaagttagtaaaaccgaatctgacatcatcacctagcagttcatgcagctagcaagtggtttgttcttagggtaacagaggaggaaattgtttgattgctgataagacaacagtggagaaaggacgcatgctgtttcttagggacacggctgacttccagatatgaccatgtatttgtggcttaaactcttggcatttggctttgcctttctggacacagaagtatttgtgacagggcaaagcccaacaccttcccccactgatgcctaccttaatgcctctgaaacaaccactctga

SEQ ID NO: 40976 - DNA, 365 bp, Homo sapiens
ctccctcaaaaatatatgtaaataaataaaatagcatgggaattaaaaaccaggaccatcattggcagagactagtagaattgaagccatgaaaacaggctccctacaaaggcaagaacaaaatactgatccctcacactcactggcccactgttcacttgattcctttatacagcctgggaatccaagatcagcacctctttatttccccttataatgacactagagattctcctactctttccctgaaactcaggaaaaaaaaagaacaacactcagcaggaaaaggtggaattaaggggagaagctgagtagcacatattcattgacaggagccaagaatagaaatcagttttaacaaagaa

SEQ ID NO: 40977 - DNA, 469 bp, Homo sapiens
  misc_feature (1)...(469): n = a,t,c or g
ggagnnnatttggaggnnttnnnnnnnnnnnnnnnnnnnnnnnnnnnnnnnnnnnnnnnnnnnnnnnnngagatctctcgaggatccgaattcgcggcgcgtgtcnnnnnnnnnnnnnnnnnnnnnnnnnnnnnnnnnnnnnnnnnnnnnnnnnnnnnnnnnnnnnnnnnnnnnnnnnnnnnnnnnnnnnnnnnnnnnnnnnnnnnnnnnnnnnnnnnnnnnnnnnnnnnnnnnnnnnnnnnnnnnatcaaagtttcttattttcattgtagaccccaagctaagctcagaatcttttctgatccgtgttgcaggggctgtgaggggcgaggagggtcatgggggtggagtctctgtgtcccttgggaggccacagggagtggatgggccccaactgcccactctctgcaggctccaggcacgtttcctgctgctgaggctctggcaacgtcgacgcggccgcgattca

SEQ ID NO: 40978 - DNA, 364 bp, Homo sapiens
ttttttaacaagagattggtttaataaaaaatgttgatgctctagaaagattgatatttctaccaacaagtaaagggaatttttaaatatttaaaatgtatgtaagtggtgcccctagaaatgagagagaagaatgaagcggtcattatatactatccagtacactccttgtttgcaaacacagaagaggttagtaagaggttatctttcctctgaaaggcagtttctgtataggttcctccgagtgaagatcagaatgttatcagacactggctgtagctcagatgacacagtaaaaaggaagtaggggctaaatttagaaattacatgaaagcgtttcaaaaatagatatatagctaagaac

SEQ ID NO: 40979 - DNA, 362 bp, Homo sapiens
  misc_feature (1)...(362): n = a,t,c or g
atcatcaattatttggacttttcctcttaattaaaaagatgatagcattatatgaagcacactcatttgatgccacaatgccactgattctttacatggatggtattaattgacttcttttagaatattttctttgacatactgggtgctcttggcagaaagttattcctggagttttggcaatattgaactcaaaagccaagctacagaatatattttttcatcagaaataatttaaggagaagctacttcccacctgaccattcctctatgctatgggccattttcttattttccttctttaatgctggagggaggatactctcagtagatgcagggactaattcactacngaaacccat

SEQ ID NO: 40980 - DNA, 368 bp, Homo sapiens
  misc_feature (1)...(368): n = a,t,c or g
attatcctctcaaattaaggttctcaacaaccatactttatagagcataatnnnnnnnnnnnnnnnnnnnnnnnnnnnnnnnnnnnnnnnnnnnnnnnnnnnnnnnnnnnnnnnacgaaaaatttaaacgtnnnnnnnnnnnnnnnnnnnnnnnnnnnnnnnnnnnnnnnnnnnnnnnnnnnnnnnnnnnnnnnnnnnnnnnnnnnnnnnnnnnnnnnnnnnnnnnnngtgatcgtgccacccannnnnnnnnnnnnnnnnnnnnnnnnnnnnnnnnnnnnnnnnnnnnnntaccatacagacagacagacagacagacataaatcataactgctatttgtgaaaaaaaaaanaangggnccatttgg

SEQ ID NO: 40981 - DNA, 358 bp, Homo sapiens
  misc_feature (1)...(358): n = a,t,c or g
gcaggacgcagaaaaggcaagacaccataactgagcccagccaggctccttttaagcaaaggttctctgagcttcagccagtaatttttcagtctcttattgactgattttggtagcagggattgctaggaagtattnnnnnnnnnnnnnnnnnnnnnnnnnnnnnnnnnnnnnnnnnnnnnntttaaaaaactgttgccttgattgaaatcaggagtnntggtaggtaagacagaaggggagaatggaaatggatgttcaggagggccatttctggaataaaagagtgntnatttttcctctcataaaactttcagaattaagtaaatctctctggaaagcatctgggtaaggggag

SEQ ID NO: 40982 - DNA, 367 bp, Homo sapiens
  misc_feature (1)...(367): n = a,t,c or g
ttttgagctgttttagacagcaaagataaaaaacttcatgtagacactgctttctgttttgaaccgagaaaatattcatcactattaaagttcaattaaaacttaaaaactcttatatactatattgtgactgagacttccctgacctcaaactttattatacattataaaatgtaaaagggaaaaatgttgttttcttccgtgaaatagttaccagggcaattcctgaagaaccaagtatatcagcacaaattaggaaattgaaattattatagcttatgtgttctttgttactatttgaattacnagggcaaagtaattcacaattcaacactggtgtgtgaattaaaatatcacaggtgnttgg

SEQ ID NO: 40983 - DNA, 358 bp, Homo sapiens
gaaagttgctatccaatgggtacagagttgcagttatgtaagatgaaaaagtgcataaacaatcttgtgctgtacacttagaaatatattgacaggctaaatctcatattatgtgttttttaccaaaatttttttaaataaaaaacaatctacaggagaatatttgggggcatgcaaatgggtacagggtgaaggggtttatctagaagaataatctacatagaagaagaaacaagtataaaggcccagacctatttggtaaactgaaataagtccattatggcataggcatagtgaactaggagagtggtgatagatgaaactagaaatgcaggtaggggcttgatcaaacagggac

SEQ ID NO: 40984 - DNA, 333 bp, Homo sapiens
  misc_feature (1)...(333): n = a,t,c or g
gacagannnnnnnnnnnnnnnnnnnnnnnnnnnnnnnnnnnnnnnnnnnnnnnnnnnnnnnnnnnnnnnnnnnnnnnnnnnnnnnnnnnnnnnnnnntttggcatccatcatcattttttaaaaatcttttttatcatgtttttcttctttctgcnnnnnnnnnnnnnnnnnnnnnnnnnnnnnnnnnnnnnnnnnnnnnnnnnnnnnnnnnnnnnnnnnnnnnnnnnnnnnnnnnnnnnnnnnnnnnnnnnnnnnnnnnnnnnnnnnnnnnnnnnnnnnnnnnnnnnnnnnnnnnnnnnnnnnnnnnnnnnnnnnnnnnnnnnnnnnnnnnn

SEQ ID NO: 40985 - DNA, 347 bp, Homo sapiens
taaatttttccagagctttttatctccaccatttttttctatggcagtccaaaataacaattttactaatttttctacatttttaggcatcgaaaaaactattctattcacataccaattaattctataatacagtcaaatactggcttttgaacacttcaaaattatttcagctctatcttttccatatttcttcctaaaaattcagtccaaaagtcattacgtgagactgacagaggtgggtgtccatgctggagagaaatccacagtggcccagaacagggtattagggtattagagcctacagaatgaggaaaagtttctaatagagcatacgaatggactag

SEQ ID NO: 40986 - DNA, 348 bp, Homo sapiens
cttttattgaaaaaaattttagaaaatggcagttaataaaaggcacaaacaaatcaacagggatatactagtggaaaacacaatataaaactaaaatgccattggcttctttaattggttaaaagcaaaaatgtaacaggcagaaagtctgtttcaaacaaattaaaaagctatgtgttttttaaattcttcccaaatcagatatatacacacccacaaaaatagtgtgtgaaggaaagctgtcatacacaagaagttgtatcctgaattcttcaaggaaacacatattgaaataggaattaagagtcagcaacagattaataattttttaaaattgagtcttaaaat

SEQ ID NO: 40987 - DNA, 381 bp, Homo sapiens
aaatgcagaaatatttattttggtttccttcattgtttttggaaattttgttttggtttataaaacatagaaatagccaacacttaaagcaaacattcaaaaccccaaggtgacaaattattgactttttgtgcaattaagaatacatatatgaagttaggctaccaagtagtgttattacaatgacaattctttagtgcaagccctgttgtgcttgtatataatacatgtactctcacagaccccaaaacagctgctttaaatgtacaaatgacagctcaattcagtcaaatgtggcaaagactcacaataaagtgaactgctgttaatttcccaaattaactttaaaaaatccctggagaagtgaatcccaggaaatga

SEQ ID NO: 40988 - DNA, 391 bp, Homo sapiens
  misc_feature (1)...(391): n = a,t,c or g
gtatctgtagtccatgagttatatcctggctcagtggagtgatatttatgtattatttttacttttctctcagtgtcttatattaagattaacatgttgttaatagttgctttgttgattaatctctcttgttggtgttttaataaatgaaataggcttgcctttagatcgggtgctgatattgcctgtttcctagtaatgggctgatcaaatgatcatgtggaattcttggtttgatgataaccttattaattgaaattttttactgatgtggctttaaaagaggtttattttgtatatgtttagaactctctgattttgatgaattatatgggaatgagaaacngannaagnggtatntgctggcgagttaaataggcnaggtcccacg

SEQ ID NO: 40989 - DNA, 388 bp, Homo sapiens
taaaaatctttgaaaatgtcctcaaagtaaaatattactaaatatcttattaagttgatagcccatgggcactgacagttaacactatggaaaaagggttaatataaaacaatataaaactattacagacaatagcttatcaatattaccttcattccattactgggatttttcacgtagtaacttttattcgtgaaatgatttcatttacaaagctattattctttgctattacttcagcttttagctgttttaactttattgtgatgttttcttctgacatttcagtaaagggcatttgtttcaccttggacaggaactcctgaataattttttcaccttgctctctttccagatagcacttctttgctgctggttccatgatatc

SEQ ID NO: 40990 - DNA, 386 bp, Homo sapiens
aaaacagttagtttgctttattttaaaacagtaacttccttatatgggggcactgtccaaaattcaatactgatacaaaaatatgtttcttttaggtcaaaatacgtttcaggtgaattttctgaattttgttaaagagaattttaaaccatataaaacaggtgaatgagaggtgaacatgaacatgtgtaacataagccacagtacaaatttaaacagaacaatcaagccatgtcatttccccaaatcatttttgttaatatttaggagaatgcatatattttcaagaacttaaaagtgaatctctactcccatctcctaatactcccagccaggaagtacaactttcttcttttactagatttaaatattccaaatattactcc

SEQ ID NO: 40991 - DNA, 390 bp, Homo sapiens
gcccatgctgctttattgctaaaatatatatatacacaggtgcagagcttccaacttttttaacagttcctttttacatcaaagaattaaatttcttcaaaaaccccaaagatgcatagattaagaagcaagctgccttttgtaatacttaaaataatattcaatgaaactcttaacgttatacaccaatggtgcaatggagaatatggaggacagcaagtaaacacagtgagcaactcttattcttacaaggcagtaggtaaagtataatgtgaaggacagtctaagataatctttctggttataagaaatgggtcggttttgtgataagtgccaagactgttactgtttaaggattgatgataatgtattaccagaatacctttctta

SEQ ID NO: 40992 - DNA, 392 bp, Homo sapiens
ttctcatgttaaaacaacatttgaagaatctttgtggattttctgatagtaaaattcagaagtactctccatctgaatctgcaaaagtatatgataaagcgataaaccgaaaaacaggagttcattttcatccaaaacaaacactggacttcctgcggagtgacatggctaattccaaaatcacagaagaggtgaaaaggagtatagtaaaacagtatctagatttcaaacttctcatggaacatctggaccctgatgaagaagaagaagaaggggaggtttcagctagcacaaatgctcggaacaaagcaattacctcactgcttggaggaggcagccctaaaaataatacagcagcagagacagaagatgatgaaagtgatggggaggat

SEQ ID NO: 40993 - DNA, 339 bp, Homo sapiens
  misc_feature (1)...(339): n = a,t,c or g
gaaggcaagagtataatgtcacagccaataataatatgtccaccacctcccaatatggttcacagttgccatatgcatattataggcaggcttcaagaaatgattctgcaatcatgtccatggaaaccaggtctgattactgcttcaacccacacccagggggatgcagacgccagacatgaaagttagaagaacggatcatgtgccaactgtacttttttaagacaaacgctcctttgtagggttttaaacttttctaatagatttagattcacttttgggcttggcttgttctcatangncntttatctaagttngtgnttctnaggcgtctgaacc

SEQ ID NO: 40994 - DNA, 444 bp, Homo sapiens
  misc_feature (1)...(444): n = a,t,c or g
gcnnnnnnnnnnnnnnnnnnnnnnnnnnnnnnnnnnnnnnnnnnnnnnnnnnnnnnnnnnnnntctcgaggatccgaattccnnnnnnnnnnnnnnnnnnnnnnnnnnnnnnnnnnnnnnnnnnnnnnnnnnnnnnnnnnnnnnnnnnnnnnnnnnnnnnnnnnnnnnnnnnnnnnnnnnnnnnnnnnnnnnnnnnnnnnnnnnnnnnnnnnnnnnnnnnnnnnnnnnnnnnnnnnnnnnnnnnnnnnnnnnnnnnnnnnnnnnnnnnnnnnnnnnnnnnnnnnnnnnnnnnnnnnnnnnnnnnnnnnnnnnnnnnnnnnnnnnnnnnnnnnnnnnnnnnnnnnnnnnnaaatgnaacatatncttgngnccanaatttntttatttttaaggcncacacaancatacccaaccaggncanannanctgnganataacaatggg

SEQ ID NO: 40995 - DNA, 339 bp, Homo sapiens
ataatacctgcttgctgtaaactacaccaacgagtcacctatgtcacggcccatttcccatttctcttgccccaattccaatcctcagaggaaggtagggtaaacacataattcaccatccaaagcagttcaccaaacactgaaagagggtactattaataattataccagaacaacaggtgtaaaccagatatttcccaaacaaaccgagacatatggtcacccttctcagaggtagccacagggaacatatccttgttgttccagatctttttttatttttaaggcacacacaagcatacccaaccaggtcagcagtagctgtgatataacaatggg

SEQ ID NO: 40996 - DNA, 456 bp, Homo sapiens
  misc_feature (1)...(456): n = a,t,c or g
ttgangcctatgtnnnnctntgaaggcnnnnnnnnnnnnnnnnnnnnnnnnnnnnnnnnnnnnnnnnnnnnnnnnnnnnnnnnnnnnntctcgaggatccgaattccnnnnnnnnnnnnnnnnnnnnnnnnnnnnnnnnnnnnnnnnnnnnnnnnnnnnnnnnnnnnnnnnnnnnnnnnnnnnnnnnnnnnnnnnnnnnnnnnnnnnnnnnnnnnnnnnnnnnnnnnnnnnnnnnnnnnnnnnnnnnnnnnnnnnnnnnnnnnnnnnnnnnnnnnnnnnnnnnnnnnnnnnnnnnnnnnnnnnnnnnnnnnnnnnnnnnnnnnnnnnnnnnnnnnnnnnnnnnnnnnnnnnnnnnnnnnnnnnnnnnnnnnnnnnnnnnncgctctngaggnnagcatngtnnaangtggacttancttnaaangctttaattngngactacagnnnggagntgac

SEQ ID NO: 40997 - DNA, 352 bp, Homo sapiens
ctagaaatgaattttaacagccctgtctcagtctgaatgaggcaaatttaggcccacatcattaggtatttcacaacttaacacctaaaatttaacataaatttacaaaaataaggcttattttaaagtcatctggagaaactgttttacaggtatcttaactttatttagctctctgtagaattaacatctttgcaaatatattattcaaccaagcatttgccataaagataagcatcaactttcccattggacaagtgatagtgttcaagctacttgacttgggaataacagaaaccaccatgacttctcaacaaatacattttaaaatgaaatatgctcaggctgataa

SEQ ID NO: 40998 - DNA, 349 bp, Homo sapiens
cgactctgttctaaaacattttaatgttaatatacatctattaatttacagatattagtttatttaaccctcacagctctacaaagtagccgctgttcctatcattctgattctgcacgcaaggacaccgtggtacaacagagaggcaagcagcctgctgaaggtcacagggcctgtaagtggccaagtcctatttcctaactcccacatcacagcaatcttcccagatggtagcttgcaaaaaaacccccaaaaataaaaacacacccctacacatagtaaccataagtaatggctcaagtcatcttagggagttggaaccagcacttaaaaagaacagtagaggctg

SEQ ID NO: 40999 - DNA, 347 bp, Homo sapiens
tgatttaatgactataagcaagacaaagcaatagaattgtgcttcttttgcagactggggacaatgaaatgtttagctacaattttcccatacaaacatgaaacaatattcatatagaataaacaccctcacaaataactgatgggtgatgaacacacaccaagttcgaccaaagcaaaaaataaactgaaaattgttgggtggggttattcatattttaaattcaacatgcttgctctatttaaaaatacctgtagaagctcataataaatagcttctattttcagacatagcagagaaggcatattccattgttaactgtaaaagcaactcttaaatttaaaatt

SEQ ID NO: 41000 - DNA, 327 bp, Homo sapiens
  misc_feature (1)...(327): n = a,t,c or g
gcagcatggacttgacttaatgtaatctaggtaacagcagcatgtttactttattattccaaaatgtatacttctagacgaagagtgacaaaggacttttatgaagtctcacactttggaatgctctgctttataagatacatgnnnnnnnnnnnnnnnnnnnnnnnnnnnnnnnnnnnnnnnnnnnnnnnnnnnnnnnnnnnnnnnnnnnnnnnnnnnnnnnnnnnnnnnnnnnnnnnnnnnnnnnnnnnnnnnnnnnnnnnnnnnnnnnnnnnnnncactactcaggtggctgaggcaggagnatcggtngaccctggcagatgt

SEQ ID NO: 41001 - DNA, 383 bp, Homo sapiens
agacaaagaattcttaaggcatcttttctctgcttataataccttttccttgtgtgtaattatacttatgtttcaataacagctgaagggttttatttacaatgtgcagtctttgattattttgtggtcctttcctgggatttttaaaaggtcctttgtcaaggaaaaaaattctgttgtgatataaatcacagtaaagaaattcttacttctcttgctatctaagaatagtgaaaaataacaattttaaatttgaatttttttcctacaaatgacagtttcaatttttgtttgtaaaactaaattttaattttatcatcatgaactagtgtctaaatacctatgtttttttcagaaagcaaggaagtaaactcaaacaaaag

SEQ ID NO: 41002 - DNA, 384 bp, Homo sapiens
gagaaccacacccttctccaaaagtgctggtactgcatcagtgagatgagtagggtttttgtttgggattgtaagactattaagatcctagtaagtcagtggtagtttactgtgatgtgagcattgtagattcccccattgtcactaatcacacaacaatttgagaagtaggctataaaacaaaaaaaggttgctgttttctatttttaaataaaccaaaaaaaaacagaaaagatgtgaattttccccagttatgtgggaaaggtaaagcaacaccaaataaaagcccacagcagcttcatctttacgataactcagtgcatatgtgaaagagaatgatgcattaactgaaatacctcattgaatattatactactactggta

SEQ ID NO: 41003 - DNA, 386 bp, Homo sapiens
  misc_feature (1)...(386): n = a,t,c or g
tgaatatttgagtacaagtacaatataggttttcatttgtctggaatgaatgtccaggagcacaactgctgggtcttatgtttaacttgattaaaaaattatgtttaacttgataagaaattcataaactctttcccagagtggctgtaccattttacattcctgtcagcaatgtataaaatatccagtttgtatcctcatcagtatttggtattttcactattttttctttagccattgagataagtaagtcatagcctcgctgtggtttcaatttgcannnnnnnnnnnnnnnnnnnnnnnnnnnnnnnnnnnnnnnnnnnnnnnnnnnnnnnnnnnnnnnnnnnnnnnnnnnnnnnnnnnnnnnnnnnnnnattttctaattg

SEQ ID NO: 41004 - DNA, 390 bp, Homo sapiens
  misc_feature (1)...(390): n = a,t,c or g
aaacaattttgtgaattttatttttacaaaaattttttaaattcatattttaaaatgtataccaaggcaaaaaaatcatataagctatatcataaatacaagagtttcaaaacatacaagagacatataatgtaaaaaaaaattatatatatgaagtccaatgtaatttataatacaaaaaaatacagcaagggaaaatgctttagaaatgctcatctgcaaactacaaaacaaaatcctcctcttgaccgactgcatgaactgccatgaaatttgcagctccatcatactaggtatctcttctttcttcatgttaccttgtctttcttcccannnnnnnnnnnnnnnnnnnnnnnnnnnnnnnnnnnnnnnnnnnnnnnnnnnnnnnnn

SEQ ID NO: 41005 - DNA, 389 bp, Homo sapiens
  misc_feature (1)...(389): n = a,t,c or g
ctgtacccacaggcagttgagtatgctgggtgagagaatgcaagagggaaacaatcagcctgcggagctaacagaccagcttatacagggcctgtgtgtgaagtggtagagttcggagttttctctgaatttcaatgagggagaaggaaggtagcattaaaggctattaaccaataagacaccaagattcaatttatgttttagatcattctggaagtgctatgtagagcaagttagaggagagccagactagcagcagagacttcccagcagagttgggaaagtgctacagtaatcttggtgagaaatggtgaggaattaagggaatggtgagggagttgagataggattggtaagggaatgaagatagatggggggttcanagctgc

SEQ ID NO: 41006 - DNA, 392 bp, Homo sapiens
  misc_feature (1)...(392): n = a,t,c or g
gccatgaggaccctcgccatccagccaccattccaaggaggtgcaggagaacagctctgtgataccatttaacttgttgacattacttttatttgaaggaacgtatattagagcttactttgcaaagaaggaagatggttgtttccgaagtggacatcgcaaaagctgatccagctgctgcatcccaccctctattactgaatggagatgctactgtggcccagaaaaatccaggctcggtggctgagaacaacctgtgcagccagtatgaggagaaggtgcgcccctgcatcgacctcattgactccctgcgggctctaggtgtggagcaggacctggccctgccagccatcgccgtcatcggggaccagagctcgggcaagaacntcttc

SEQ ID NO: 41007 - DNA, 355 bp, Homo sapiens
  misc_feature (1)...(355): n = a,t,c or g
gagatagattagattagattagattggattagattagattagagggatagctggatgggtgaatggatagatagatggagctattgatatggatggatggnggncnnanctgccccctcgcccgtnnccccctnctnagcncccctgaaccacnnncccggccncnnngcctgncnggnctntncccngactctgnnccnncgccngtnnggncccaccccncncaatccccttttgccccccnanctccnctcnctcnccgagtcnctcctcnctgcncgcaccccttctccctggccangcnnnctccctgncccccnctnncccncncnntcnncancccnccctntncctg

SEQ ID NO: 41008 - DNA, 336 bp, Homo sapiens
ggctactatcacaagcctgtggggcaaggtgaatgtggaagatgctggaggagaaaccctgggaaggctcctggttgtctacccatggacccagaggttctttgacagctttggcaacctgtcctctgcctctgccatcatgggcaaccccaaagtcaaggcacatggcaagaaggtgctgacttccttgggagatgccataaagcacctggatgatctcaagggcacctttgcccagctgagtgaactgcactgtgacaagctgcatgtggatcctgagaacttcaagctcctgggaaatgtgctggtgaccgttttggcaatccatttcggcaa

SEQ ID NO: 41009 - DNA, 335 bp, Homo sapiens
gggttatcaataagctcctagtccagacgccatgggtcatttcacagaggaggacaaggctactatcacaagcctgtggggcaaggtgaatgtggaagatgctggaggagaaaccctgggaaggctcctggttgtctacccatggacccagaggttctttgacagctttggcaacctgtcctctgcctctgccatcatgggcaaccccaaagtcaaggcacatggcaagaaggtgctgacttccttgggagatgccataaagcacctggatgatctcaagggcacctttgcccagctgagtgaactgcactgtgacaagctgcatgtggatcctg

SEQ ID NO: 41010 - DNA, 426 bp, Homo sapiens
  misc_feature (1)...(426): n = a,t,c or g
gaaatattttatgattacctaattgatttgaaactaaacaattgactacacttttctagaatgtaagattttgtaaattttaccaatctgtatgaaataaaacaacaaaattttaccaaagtatataatccttataacaacctggttgtgtgatatattatccccatttacagtctggtggatatccacatcanatagaaacaaaaatcataaaaaggantgaagataaataaaaacatcttcaccaagattacttactgttactgcagaaatgagacacaagattgcatcctggatgtttctggcgcattattatttcttctatctacactgncttcnattttatgtggtgagctcaccntaactccatattaagctatgggcaaggaaccccgtgcccttnattantctgtgatggnggcttgg

SEQ ID NO: 41011 - DNA, 391 bp, Homo sapiens
gaacgtctgaggttatcaataagctcctagtccagacgccatgggtcatttcacagaggaggacaaggctactatcacaagcctgtggggcaaggtgaatgtggaagatgctggaggagaaaccctgggaaggctcctggttgtctacccatggacccagaggttctttgacagctttggcaacctgtcctctgcctctgccatcatgggcaaccccaaagtcaaggcacatggcaagaaggtgctgacttccttgggagatgccataaagcacctggatgatctcaagggcacctttgcccagctgagtgaactgcactgtgacaagctgcatgtggatcctgagaacttcaagctcctgggaaatgtgctggtgaccgttttggcaatc

SEQ ID NO: 41012 - DNA, 400 bp, Homo sapiens
  misc_feature (1)...(400): n = a,t,c or g
nnnnnnnnnnnnnnnnnnnnnnnnnnnnnnnnnnnnnnnnnnnnnnnnnnnnnnnnnnnnnnnnnnnnnnnnnnnnnnnnnnnnnnnnnnnnnnnnnnnnnnnnnnnnnnnnnnnnnnnnnnnnnnnnnnnnnnnnnnnnnnnnnnnnnnnnnnnnnnnnnnnnnnnnnnnnnnnnnnnnnnnnnnnnnnnnnnnnnnnnnnnnnnnnnnnnnnnnnnnnnnnnnnnnnnnnnnnnnnnnnnnnnnnnnnnnnnnnnnnnnnnnnnnnnnnnnnnnnnnatcgnncatggtgctggatgcctgtaancccatctactanggaggcngangcagnacattcactcgaacccatnatgtgnaggttgcanncgacctgatcnttgcccattgnctcancgcc

SEQ ID NO: 41013 - DNA, 374 bp, Homo sapiens
  misc_feature (1)...(374): n = a,t,c or g
gaagcatggcaacatagttcacttaaagttaaattacaccaaaatgtctttattaaagaaataatgtcaaaggtagataatgtcagtcacagaactccaaaggataccattcatacagaaaataattatactgtttctgtctcttgttgggaaatgagagctgtactggaaaatgttaccattcatgcatttttggtattgctgctctctttcatgagtgtctcactagcttcccttcatctacaantcacttgctacactancaggtgtctattagnctatgtcncctactttggtataaangtgcatcataantagactntaactaggnctgacccatggcgcagacaacancatatcccccggagtttttg

SEQ ID NO: 41014 - DNA, 380 bp, Homo sapiens
  misc_feature (1)...(380): n = a,t,c or g
gggtcattaaaaaatatttacctagatttcttctagctttttataatttctactttatttaacttctatttaattttaattcatctagaatttatttcagcatagatctgaaaaaatttaactttatttttcctccaaataaccaatgattctagtaccacttattaaataatcattccnnnnnnnnnnnnnnnnnnnnnnnnnnnnnnnnnnnnnnnnnnnnnnnnnnnnnnnnnnnnnnnnnnnnnnnnnnnnnnnnnnnnnnnnnnnnnnnnnnnnnnnnnnnnnnnnnnnnnnnnnnnnnnnnnnnnnnnnnnnnnnnnnnnnnnnnnnnnnnnnnnnnnnnnnnnnnnnnnnnnnnnnnnnnnnnnaacagattg

SEQ ID NO: 41015 - DNA, 385 bp, Homo sapiens
gttgggctaaccagaggtgagctcagtcttcttaaatctgtgactctgttccagatcaacccttagtgaaatctgaataattatttcctcactttaatcagacgaaatgggagctctcactctctaggaaaagcattaatgttcttcagtcaccactgttcttccataatacaaacatacagagcaaccaaaaaagagagtgacacccacaattaaatttttaaaatcagcaaaaaccaacctatagatgattcagatattggaactggagacagactttaactgtcatgttcatagggcttatgggaaaatagttgaaacagtggttgaataaggaatctcagcagagaaatggaagcttaaaaaaaccaatggaaaggccggc

SEQ ID NO: 41016 - DNA, 402 bp, Homo sapiens
gaggttatcaataagctcctagtccagacgccatgggtcatttcacagaggaggacaaggctactatcacaagcctgtggggcaaggtgaatgtggaagatgctggaggagaaaccctgggaaggctcctggttgtctacccatggacccagaggttctttgacagctttggcaacctgtcctctgcctctgccatcatgggcaaccccaaagtcaaggcacatggcaagaaggtgctgacttccttgggagatgccataaagcacctggatgatctcaagggcacctttgcccagctgagtgaactgcactgtgacaagctgcatgtggatcctgagaacttcaagctcctgggaaatgtgctggtgaccgttttggcaatccatttcggcaaagaattca

SEQ ID NO: 41017 - DNA, 375 bp, Homo sapiens
  misc_feature (1)...(375): n = a,t,c or g
gggttcacagagcacacgttgagtagctctggtctgtaggaccttctctcttggaatgttcatgagcatcaccaggtggggtggtgggagtcctgtagttttttcttcttgctgnnnnnnnnnnnnnnnnnnnnnnnnnnnnnnnnnnnnnnnnnnnnnnnnnnnnnnnnnnnnnnnnnnnnnnnnnnnnnnnnnnnnnnnnnnnnnnnnnnnnnnnnnnnnnnnnnnnnnnnnnnnnnnnnnnnnnnnnnnnnnnnnnnnnnnnnnnnnnnnnnnnnnnnnnnnnnnnnnnnnnnnnnnnnnnnnnnnnnnnnnnnnnnnnnnnnnnnnnnnnnnnnnnnnnnnnnnnnnnnnnnnnccaagtgctggnatgac

SEQ ID NO: 41018 - DNA, 383 bp, Homo sapiens
  misc_feature (1)...(383): n = a,t,c or g
gtgacacccttagaacagacacactgtgctgcccacccctatcctggtcttctcgggctgctgtccatacttcctggctccattccacttaaccagtcccattggcttagagcctggcgaaaggtagttaatggtaagataatgacctcaggcttccccatcaccattgggcctgtgtgtgactcttctggacccatttatccatctgagttcactgttgctgctggctcttttattgataatcccctcttttcccctgcaccccctcnctgccactgtnctcaggtagcccttnatttagcattntcaanacnttttgtannaanaannataatntatgcctatgtgnttngnaantnattnannnnannnnaanttngaag

SEQ ID NO: 41019 - DNA, 393 bp, Homo sapiens
  misc_feature (1)...(393): n = a,t,c or g
gaattcgatggcatttactacgttcaccgtgtttgtaaaaccatcaccactacttgcttccatggcttcttcatcaccctgactatgaatcctgcaccccttacctgtgaccccccaggcctctcaccactggcaaccactgatctgctttctannnnnnnnnnnnnnnnnnnnnnnnnnnnnnnnnnnnnnnnnnnnnnnnnnnnnnnnnnnnnnnnnnnnnnnnnnnnnnnnnnnnngtattttcaaggctcacgcatgctgtagtgtgcatcagtacttcattnnnnnnnnnnnnnnnnnnnnnnnnnnnnnnnnnnnnnnnnnnnnnnnnnnnnnnnnnnnnnnnnnnnnnnnnnnnnnnnnnnnnnnnnnnnnnnnnnnngttgtaaa

SEQ ID NO: 41020 - DNA, 393 bp, Homo sapiens
  misc_feature (1)...(393): n = a,t,c or g
gtggtaaactttgattaatttgatgaaaagtggtggtggtggttggtatttttaagtctagtgtgaaactcattaaaagtatttgggtgaataaaaggactctaggctacagaattctggctagagnnnnnnnnnnnnnnnnnnnnnnnnnnnnnnnnnnnnnnnnnnnnnnnnnnnnnnnnnnnnnnnnnnnnnnnnnnnnnnnnnnnnnnnnnnnnnnnnnnnnnnnnnnnnnnnnnnnnnnnnnnnnnnnnnnnnnnnnnnnnnnnnnnnnnnnnnnnnnnnnnnnnnnnnnnnnnnnnnnnnnnnnnnnnnnnnnnnnnnnnnnnnnnnnnnnnnnnnnnnnnnnnnnnnnnnnnnnnnnnnnnnnnnnnnnnnnnnnnnnnnnnnnnn

SEQ ID NO: 41021 - DNA, 347 bp, Homo sapiens
ggtatgtgtgtatattggtagaaaaaattcccggaagtagaattgctagaacaaagatttatgcattttaaatattcctttattataaaactaatgaaagtaaacatgttggctatgaccacgtatgctctatgctcagtttttctagagttgtgtatgcttaatataggagtaagattcttttaaaatggcatattcattgccttatttgattttcatagtcaatcgttttaatttttcagtctacatatataggtgtttggaaaggatataaatatcttctgctgcatgtacctacagtgataaactctctcctcctacatacctttgagatttttttttttttt

SEQ ID NO: 41022 - DNA, 401 bp, Homo sapiens
  misc_feature (1)...(401): n = a,t,c or g
ggttgcttttaatgatgacaactcatgcatttataagatatgaccattattgcttctataacactggctttaaattatctgttgtttattaaatgtgtagtatagcaattacaggatagaaattataatgttttgtgtatttatttttaaaaactgtgtgtccatagaaaaagcctaagtgttgcatcatccccaattaagttaactacaactgggggaagctgggttgattggcccggcagggaatagcaccactatactctcagcgtcatcttacccaaattagagttaaatgagccagaggaagactatagactcttttgtgagctggtgttgcaaattcaaatacaaaaagtaaagttatgatggtcgctgnttaaatttgtattaatcatctatgg

SEQ ID NO: 41023 - DNA, 401 bp, Homo sapiens
  misc_feature (1)...(401): n = a,t,c or g
gnnnnnnnnnnnnnnnnnnnnnnnnnnnnnnnnnnnnnnnnnnnnnnnnnnnnnnnnnnnnnnnnnnnnnnnnnnnnnnnnnnnnnnnnnnnnnnnnnnnnnnnnnnnnnnnnnnnnnnnnnnnnnnnnnnnnntacagtttttaatgccttctcactagattccattttgctatgaagtcatttctttgctttaactgaattggtccatgaatcacaaaccagccctatctatgtaccttttattgtgtgcacctaagcatgcacctaagaaaactcccaattacataaaaattagccaggcacnnnnnnnnnnnnnnnnnnnnnnnnnnnnnnnnnnnnnnnnnnnnnnnnnnnnnnnnnnnnnnnnctggagctggaatgctgtggtgcaatctcagc

SEQ ID NO: 41024 - DNA, 243 bp, Homo sapiens
  misc_feature (1)...(243): n = a,t,c or g
gcggggcttcaccatattggnnnnnnnnnnnnnnnnnnnnnnnnnnnnnnnnnnnnnnnnnnnnnnnnnnnnnnnnnnnnnnnnnnnnnnnnnnnnnnnnnnnnnnnnnnnnnnnnnnnnngagggctcctttttatatcctcatgcactgctgttttgttattcagtgtgtttcggcctcgggtagaggggcaacagattttcagttgaagcttaagtgctatcctggggcagntgtgttgc

SEQ ID NO: 41025 - DNA, 419 bp, Homo sapiens
  misc_feature (1)...(419): n = a,t,c or g
gcaaaaataaatgacctaagaaatttatctgccaataaatttttaaaacgttgtgtttaaaaattactctggggcggccgcacacagtggctcatgcttnnnnnnnnnnnnnnnnnnnnnnnnnnnnnnnnnnnnnnnnnnnnnnnnnnnnnnnnnnnnnnnnnnnnnnnnnnnnnnnnnnnnnnnnnnnnnnnnnnnnnnnnnnnnnnnnnnnnnnnnnnnnnnnnnnnnnnnnnnnnnnnnnnnnnnnnnnnnnnnnnnnnnnnnnnnnnnnnnnatctttctcaaaaatgaatggttcaagatagtgagctgaatataacttaatgagttttatgctgctatataagtcataatatatttatggcatatatcaactaaattatcatacttaaattgtgatttccatgtgaaaatag

SEQ ID NO: 41026 - DNA, 414 bp, Homo sapiens
  misc_feature (1)...(414): n = a,t,c or g
gattctactgagcatgttgatgggttagcataagcactttgggtgcaggcctggggaaagctgaatagccctggattcagaaaacagagttccagccactcctgcagatgattcaggaggctgcggctgggcagcagaggtggcagtgggcagtgaagggctagcaaatgagacagatgcctggcatgaaacgcgactacttccataggacccccacgcaaacaataattctgtcatatctgttgaactcacagatgtttggtgtggatatagtgtgaaccaaataaggacctttgtttcatgccagggtcagtagggcaaaggaaagtttctcagggaagacaaaattcanaagaccatcacaacttgntatttcangaatggccannnnnnnnnnnnaaaagnntttttttt

SEQ ID NO: 41027 - DNA, 420 bp, Homo sapiens
  misc_feature (1)...(420): n = a,t,c or g
gaactggtttctctgggaaataacaaattatttggggacattaagcatgggtactggcagggaacggtggcttttaactgttatcccagcatttnnnnnnnnnnnnnnnnnnnnnnnnnnnnnnnnnnnnnnnnnnnnnnnnnnnnnnnnnnnnnnnnnnnnnnnnnnnnnnnnnnnnnnnnnnnnnnnnnnnnnnnnnnnnnnnnnnnnnnnnnnnnnnnnnnnnnnnnttacagccaccacacctggctgacataaagcatttaaataaaattgttgcataagataaaggaattgaaggaagtgatatctaagtatttgtcatttagaaatatctaagtaagtcacacattaatattataagtagacactnnnnnnnnnnnnnnnnnnnnnnnnnnnnnnnnnnnnnnnnnnnnnnnn

SEQ ID NO: 41028 - DNA, 413 bp, Homo sapiens
gagatggcagtcaataccactctgtgttgaaaaaattccatgttcacaaccacctcagatagaacacggaaccattaattcatccaggtcttcacaagaaagttatgcacatgggactaaattgagttatacttgtgagggtggtttcaggatatctgaagaaaatgaaacaacatgctacatgggaaaatggagttctccacctcagtgtgaaggccttccttgtaaatctccacctgagatttctcatggtgttgtagctcacatgtcagacagttatcagtatggagaagaagttacgtacaaatgttttgaaggttttggaattgatgggcctgcaattgcaaaatgcttaggagaaaaatggtctcaccctccatcatgcataagtatggtgcattgaattttattag

SEQ ID NO: 41029 - DNA, 411 bp, Homo sapiens
  misc_feature (1)...(411): n = a,t,c or g
gctggtgtcttcaaacgacatgtcctaaaagtaaatgtgggtaagttgaatgacctgagcatccattcctcagctattcaaaaagtaggggtagtgccacctatcttggcagtgtgttgagggtgcccagcacgtaccttgccatccctcgttctgtaggctctcacttccagttcctcagatgaggtacagggcagggaggagcttctcccgttactgtcatctcagtctaaccacattcaggacacttgtttattttaaataaacaggtgaattaagaaaaagttttttaagtctttacctaatcagtctccatgctctctttttggcctgtnctnccttctcctgngcgcttncttccangcctttcatgtgcntctncanggctgggcccnactnntttggtactgc

SEQ ID NO: 41030 - DNA, 419 bp, Homo sapiens
gaattctatgaacacagaaaagaggaacgctgttcccgtgtttgggggacaacatgtacaaaacacccccatatcaaaatggtgatggaaagtggggactggctggttggtggagaccttcaggtgctggagaaaataagatggaatgatgggctggaccaataccgtctgacacctctggagctcaaacagaaatgtaaagaaatgaatgctgatgcggtgtttgcattccagttgcgcaatcctgtccacaatggccatgccctgttgatgcaggacactcgccgcaggctcctagagaggggctacaagcacccggtcctcctactacaccctctgggcggctggaccaaggatgacgatgtgcctctagactggcggatgaagcagcacgcggctgtgctcgaggaaggggtcct

SEQ ID NO: 41031 - DNA, 411 bp, Homo sapiens
gcccaaggctccgggctttgcccagatgctcaaggagggagcgaaacacttttcaggattagaagaggctgtgtatagaaacatacaagcttgcaaggagcttgcccaaaccactcgtacagcatatggaccaaatggaatgaacaaaatggttatcaaccacttggagaagttgtttgtgacaaacgatgcagcaactattttaagagaactagaagtacagcatcctgctgcaaaaatgattgtaatggcttctcatatgcaagagcaagaagttggagatggcacaaactttgttctggtatttgctggagctctcctggaattagctgaagaacttctgaggattggcctgtcagtttcagaggtcatagaaggttatgaaatagcctgcagaaaagctcatgagat

SEQ ID NO: 41032 - DNA, 415 bp, Homo sapiens
  misc_feature (1)...(415): n = a,t,c or g
gaaggaaatgctttctggctttagtgcagtaattgtcttcagaacaatatgccaataatgactcatcccttctttattcatagtaactttggttttagcttttttggggtttcnnnnnnnnnnnnnnnnnnnnnnnnnnnnnnnnnnnnnnnnnnnnnnnnnnnnnnnnnnnnnnnnnnnnnnnnnnnnnnnnnnnnnnnnnnnnnnnnnnnnnnnnnnnnnnnnnnnnnnnnnnnnnnnnnnnnnnnnnnnnnnnnnnnnnnnnnnnnnnnnnnnnnnnnnnnnnnnnnnnnnnnnnnnnnnnnnnnnnnnnnnnnnnnnnnnnnncatcgtaactttgaaaagaatctcactctaggatagaaaattacaagtanatttaatgcangtagaaagngcatttgagacttaagtc

SEQ ID NO: 41033 - DNA, 343 bp, Homo sapiens
  misc_feature (1)...(343): n = a,t,c or g
gcagcattcagaatccagaaataaaccctcacattaatgtcaaataatttttcaaccaggtaccaagacaatttcagtggggggaagaatagccttaaatggtgcngggtaaaagtaggnnnncnctactgtgnagaatattgagcttnnnaagacttcttgaaannganggctggccgncctggnggtgtannngtantnctntnggtacagagcccattgacntttcgcntnttnggctgntnnncntgcnngtatgnatgnangggtngctntntccacngggcntctgnggntcatantntgcctngncnntctngngngcgnntcttagnggctttct

SEQ ID NO: 41034 - DNA, 414 bp, Homo sapiens
  misc_feature (1)...(414): n = a,t,c or g
ggaagctgatgcttacctacaaatcttgattgaacaattaaaggtatggcattagtttgtatattaaatttatataaatagaaaatgttactgagcttgatttttgagtaaaaacagttacttgatgttaatttacagccctcatgtggttcttcagcagtttttaaagcagacttaaaagatctagctgacttattcaaaggtctttatctctaattatattggtaaatagcatatttacataatgcttttttggtcattaagaaaaaaaggtaaatatgtaggcataattagaaaaaaataaggcaagatttggttcatattctgtttaaaatttccatgaaactgtgttttagtggctcaatttctttttttggntgntggtttttgagacagagctcactctgtncccag

SEQ ID NO: 41035 - DNA, 332 bp, Homo sapiens
  misc_feature (1)...(332): n = a,t,c or g
gcgacgaagtggccatgcctgtgtgaggggcgggcccaggccctagaccctcccccaccattccacatccccaccttccaaggaaaagcagaagttcatgggcacctcatggactccaggatcctcctggagcagcagctgaggccccagggctgtgggtggggaaggaaggcgtgtccaggagaccttccacaaagggtagcctggcttttctggctggggatggccgatggggcccacattagggggtttncantccntnctgtngcanntntnntgtnnattnnngctnnnananntannnnnntnntnnttntttnnnnnnnnnatgg

SEQ ID NO: 41036 - DNA, 404 bp, Homo sapiens
  misc_feature (1)...(404): n = a,t,c or g
gcggcacgagnnnnnnnnnnnnnnnnnnnnnnnnnnnnnnnnnnnnnnnnnnnnnnnnnnnnnnnnnnnnnnnnnnnnnnnnnnnnnnnnnnnnnnnnnnnnnnnnnnnnngccaaaaaaaaaaantananttactatatganccaccanttttanttatatnccccaaaaaaaangaaanccgggncttgaacaggngttnatccncccatgttnntagcagtntnattcncagtacccanaaaatggaancanccctggggtccattgacnttngaatggataancaaaacttccaccttacaangaatgttntacagcnttnaaaaggaaggaaattgnnacncatgctacaacntggntaaaccgtaaagacttgatnctaatttagtcagtncaaaagc

SEQ ID NO: 41037 - DNA, 128 bp, Homo sapiens
gctgcataagtctgtggaatacatggagagacaaagcagccctttcttaatatatatgctttcttctagagcagtgctttggaaacttgtatgtgcattccaatcatctgggcatttttttttttttt

SEQ ID NO: 41038 - DNA, 380 bp, Homo sapiens
  misc_feature (1)...(380): n = a,t,c or g
gaggatgaggattatcaccccattttacagaccagaaagttgagattcagagaacttgactgactctcccagtgtcatacaacagttaaatggcagaattagaacttgaaccaaagtctgactcatatagatcagggctatttcaatatttacttattcatccagacgtgtgtttgttcaagtcagtgtcagtgagctagatactatctgtaggtacagtgtcttaagatatgttacttgnnnnnnnnnnnnnnnnnnnnnnnnnnnnnnnnnnnnnnnnnnnnnnnnnnnnnnnnnnnnnnnnnnnnnnnnnnnnnnnnnnnnnnnnnnnnnnnnnnnnnnnnnnnnnnnnnnnnnnnnnnnnnnnnnnnnnnnnnnnn

SEQ ID NO: 41039 - DNA, 379 bp, Homo sapiens
gctgaattaatcattgtggctaggggaaaaggcactctgatttggggcctgggtcatgtgcctaaagctgagtcagctccacctaaaacattgagagagggagtgatacaaccccaaaagaagaaggttgtagggctctttccagattaagggggaatggatgcagggggagggggacaaaaacaactgtgcactatacccagaaattgtttaactgtttcctttttttctctaactttttgaggtacaccatacattcagtaatgtgcaccaattttagacttcagtttgatgaatcctcacttacatgtatacattggggcagtcaccctccagatcaagatacagaacattgccaggtccctaaaacattccctct

SEQ ID NO: 41040 - DNA, 366 bp, Homo sapiens
gaagagtacatcagtttatagattactaaagtaatttggttatagattgtagaagcataatcactaaccctgtcagacatcttcatgtaggaaaaggcaaggtcaagttcatttactgtttcaggaacgttgtaactcaggcgagtgacacggggggccgtgtgctctatcctgttttaagattcttcctgaggagctgcatttcatcacagtcaggggttcaagcagaaataagcaaacctggcttaacattttctattttgtctcacattattctatttaaagattatttcatgtcatttctttgattatcaaaccttcctttctcccacctttctttcagctgatgactgcctctttttttgg

SEQ ID NO: 41041 - DNA, 339 bp, Homo sapiens
  misc_feature (1)...(339): n = a,t,c or g
gggaacgtctgaggttatcaataagctcctagtccagacgccatgggtcatttcacagaggaggacaaggctactatcacaagcctgtggggcaaggtgaatgtggaagatgctggaggagaaaccctgggaaggctcctggttgtctacccatggacccagaggttctttgacagctttggcaacctgtcctctgcctctgccatcatgggcaaccccaaagtcaaggcacatggcaagaaggtgctgacttccttgggagatgccataaagcacctggatgatctcaagggcacctttgcccanctgagtgaactgnactgtgacaagctgcatgtg

SEQ ID NO: 41042 - DNA, 336 bp, Homo sapiens
  misc_feature (1)...(336): n = a,t,c or g
gacagtgtactatatattatatagcaaaagaaaaccgtggaccatggattgcattagacngngtttggttctttagnggcccttaatctgaacaggtatttcattctttatcttttataatacataatttataatggggatttttaaaaaannnnnnnnnnnnnnnnnnnnnnnnnnnnnnnnnnnnnnnnnnnnnnnnnnnnnnnnnnnnnnnnnnnnnnnnnnnnnnnnnnnnnnnnnnnnnnnnnnnnnnnnnnnnnnnnnnnnnnnnnnnnnnnnnnnnnnnnnnnnnnnnnnnnnnnnnnnnnnnnnnnnnnnnnnnnnnnnnngtntggt

SEQ ID NO: 41043 - DNA, 379 bp, Homo sapiens
ggaaacctctgcagcctgggataggagaacctcaactgtaattgcaggattgctagaggctcagcatggacaagttgtttgtgagtttaaaactctgaaggagcccagtctcaatggagcacccacacttttgtgagttttacctctaccccgttctcacagtgaaaatacgacaaaaatcctctcatgcttctgtcaggggaaagggggaaagtagccatttagaaatacacctagagcattctcttcttcctaacaagagcagccctcaagggaaactatttcatcatagcctaactgacaggttttaccacagcctaactgggctggggaaaggaaaatatccaactctgacctcttctagccttcttgctcatct

SEQ ID NO: 41044 - DNA, 378 bp, Homo sapiens
  misc_feature (1)...(378): n = a,t,c or g
nnnnnnnnnnnnnnnnnnnnnnnnnnnnnnnnnnnnnnnnnnnnnnnnnnnnnnnnnnnnnnnnnnnnnnnnnnnnnnnnnnnnnnnnnnnnnnnnnnnnnnnnnnnnnnnnnnnnnnnnnnnnnnnnnnnnnnnnnnnnnnnnnnnnnnnnnnnnnnnnnnnnnnnnnnnnnnnnnnnnnnnnnnnnnnnnnnnnnnnnnnnnnnnnnnnnnnnnnnnnnnnnnnnnnnnnnnnnnnnnnnnnnnnnnnnnnnnnnnnnnnnnnnnnnnnnnnnnnttatgctgagtgaaaaaagccttacataaactattattgtatagttctatttatatgaaattttagaataggcaacactagtccatggtgggaaaacgtaa

SEQ ID NO: 41045 - DNA, 434 bp, Homo sapiens
gccctaattgacatctctaggatctctgtagatggaggcagaaatggccggggaaagcctgagatgattccaaggcccactagattaagccaaatctcattttattgctcaacccacacaccccaaatcaatcaattgcagcttcaatcacaggagaaaatgaaaactttaaagctatctacttcttgatttttctttgtgtactgagacttcacagaaaattctggagatggagggaaggatgaagaaagtattgaaattgaacaaataaatcacacacaaaataatattgcacatatttcctgggcttgtctctaccacttataaagtgaacagggatgaaatgacatcttggtttcacagttgaagagtccatatgctcttttactttatctccacttactgagtttggcttttaaggggcacttctccta

SEQ ID NO: 41046 - DNA, 391 bp, Homo sapiens
gattggtttcatcatatgtcattttgcttaaagccatagtttccaagagcctgttgacagcattaggtaaggacttacggtgtcctttgttgatgcacgttgtctcatcagccagtctgttaagcaccacccacatgccaagctctgtgttggctgctgaaggccggatgtgaattggtcagcctgggtccccaccttcacagagctgtgtcctcatccagggacagtgtgcagtgggcagggctggggacgcaagctgggagggaggaagggaagaagtcggtacaaaggctcagaagtctgagcgaatgtcctcagggggcagaggagagggtgagggagggatggaggcagctggcccgcaggctgcaagaaccttcctcggacacgc

SEQ ID NO: 41047 - DNA, 399 bp, Homo sapiens
  misc_feature (1)...(399): n = a,t,c or g
nnnnnnnnnnnnnnnnnnnnnnnnnnnnnnnnnnnnnnnnnnnnnnnnnnnnnnnnnnnnnnnnnnnnnnnnnnnnnnnnnnnnnnnnnnnnnnnnnnnnnnnnnnnnnnnnnnnnnnnnnnnaattttgtatttttagtannnnnnnnnnnnnnnnnnnnnnnnnnnnnnnnnnnnnnnnnnnnnnnnnnnnnnnnnnnnnnnnnnnnnnnnnnnnnnnnnnnnnnnnnnnnnnnnnnnnnnnnnnnnnnnnnnnnnnnnnnnacctgcttttgaagaataacttggcattctcggtgggatacagaactttcctcctttgacctattgattccagccccttgctctgccatttctccttttatgcaagagcttgtagtaatccctgagtcagcgaga

SEQ ID NO: 41048 - DNA, 297 bp, Homo sapiens
  misc_feature (1)...(297): n = a,t,c or g
gcagtgtggagttaagtatgcaacttttgaatatttatcttccttataattgccttgcaaattagctcgtaatttaaatcaatctacctgccaaacttggtgaggtttctttgattattcaaagcttaaaagtttactgcagnnnnnnnnnnnnnnnnnnnnnnnnnnnnnnnnnnnnagaattttgtatttatcattcctttggttttgtttgttngnttgagacanagnntnactntggnanccagnctgnagngnannggnnngatnnnnnngnntnnntgnnncnnngncttg

SEQ ID NO: 41049 - DNA, 382 bp, Homo sapiens
  misc_feature (1)...(382): n = a,t,c or g
gagtgagccgagnnnnnnnnnnnnnnnnnnnnnnnnnnnnnnnnnnnnnnnnnnnnnnnnnnnnnnnnnnnnnnnngccaggtttgtgctgtttgtaagtccaggaataagcctaaagaataggcaannnnnnnnnnnnnnnnnnnnnnnnnnnnnnnnnnnnnnnnnnnnnnnnnnnnnnnnnnnnnnnnnnnnnnnnnnnnnnnnnnnnnnnnnnnnnnnnnnnnnnnnnnnnnnnnnnnnnnnnnnnnnnnnnnnnnnnnnnnnnnnnnnnnnnnnnnnnnnntcgcatnctntannactanncctangcttngncgaaacactcnttganccantctagagcntggtnccattnncctngttgctcatctanncaagg

SEQ ID NO: 41050 - DNA, 340 bp, Homo sapiens
  misc_feature (1)...(340): n = a,t,c or g
gaccatgtcaataccctgtatttctaacctcctgaaaagatgatacctcaggtcattccaaaaaatcccttagcaaatatttactgagagcttctctatgtgcatgacactatcttatgagctggggatataaaagtaaatgacacttcatcattcctttcagaagcttacnnnnnnnnnnnnnnnnnnnnnnnnnnnnnnnnnnnnnnnnnnnnnnnnnnnnnnnnnnnnnnnnnnnnnnnnnnnnnnnnnnnnnnnnnnnnnnnnnnnnnnnnnnnnnnnnnnnnnnnnnnnnnnnnnnnnnnnnnnnnnnnnnnnnnnnnnnnnnnnnnnnnnnnnt

SEQ ID NO: 41051 - DNA, 328 bp, Homo sapiens
gagagaatgtgccgtcatatgaaaaaggtcagtcaactcaccgtttcgagctctgtcagagctgtgtgtttccactgagctcgggtttctccgatgtgtttctgtggtatgcagtttgtcacaggagtattttttcatcactactctttgatgatacagattgtgtttctgttttcttagaactttgaactatcaccattggcagcaccctcagatgcagttatctaaagttctttcataaatttattcattcaacaactatttaccaggatcttgttatgaatgagaggctgttaacaggcactggagacagagcaggtacgaggct

SEQ ID NO: 41052 - DNA, 406 bp, Homo sapiens
  misc_feature (1)...(406): n = a,t,c or g
gctccgtctcnnnnnnnnnnnnnnnnnnnnnnnnnnnnnnnnnnnnnnnngcaccagctcaaagaaaaaaataggggattatcattacacatagcaagaagtctgaagacaggtaattctggaattggttaattagttgcaaaatgatgttgataacccagatgcttctcaactttctgctttggcatcctcaatgtgttgcgttttgtgctcagatgtaagccttcattctaacaaaatggctgtcacagcttcaaccattcacatcttcaggaaaactgtactcaaaggcaagaagggcaatctcttcttgtgcttnnnnnnnnnnnnnnnnnnnnnnnnnnnnnnnnnnnnnnnnnnnnnnnnnnnnnnnnnnnnnnnnnnnnnnnnnnnnnnnnnnnnnnnn

SEQ ID NO: 41053 - DNA, 404 bp, Homo sapiens
  misc_feature (1)...(404): n = a,t,c or g
gaaaacaggatcgataaattattttaaaaacagtgggaataagcagattaaaaactataatagttgaaataacagacataatttataaatggatgcagatgaagagtaagttagtgcgttgaaagatcagcttgaagaactcttccagaaagaagcagggaaagataaataaataaaaaagaaaatgttnnnnnnnnnnnnnnnnnnnnnnnnnnnnnnnnnnnnnnnnnnnnnnnnnnnnnnnnnnnnnnnnnnnnnnnnnnnnnnnnnnnnnnnnnnnnnnnnnnnnnnnnnnnnnnnnnnnnnnnnnnnnnnnnnnnnnnnnnnnnnnnnnnnnnnnnnnnnnnnnnnnnnnnnnnnnnnnnnnnnnnnnnnnnnnnnnnnnnnnnnnnnnnnnnnnnnnn

SEQ ID NO: 41054 - DNA, 408 bp, Homo sapiens
  misc_feature (1)...(408): n = a,t,c or g
gagtagcaggcatcttactgtnnnnnnnnnnnnnnnnnnnnnnnnnnnnnnnnnnnnnnnnnnnnnnnnnnnnnnnnnnnnnnnnnnnnnnnnnnnnnnnnnnnnnnnnnnnnnnnnnnnnnnnnnnnnnnnnnnnnnnnnnnnnnnnnnnnnnnnnnnnnnnnnnnnnnnnnnnnnnnnnnnnnnnnnnnnnnnnnnnnnnnnnnnnnnnnnnnnnnnnnnnnnnnnnnnnnnnnnnnnnnnnnnnnnnnnnnnnnnnnnnnnnnnnnnnnnnnnnnnnnnnnnnnnnnnnnnnnnnnnnnnnnnnnnnnnnnnnnnnnnnnnnnnnnnnnnnnnnnnnnnnctcactttcttttggggctgcnctttaccaaccctgttctggtccccatgcctttcagtacaagg

SEQ ID NO: 41055 - DNA, 410 bp, Homo sapiens
  misc_feature (1)...(410): n = a,t,c or g
gnnnnnnnnnnnnnnnnnnnnnnnnnnnnnnnnnnnnnnnnnnnnnnnnnnnnnnnnnnnnnnnnnnnnnnnnnnnnnnnnnnnnnnnnnnnnnnnnnnnnnnnnnnnnnnnnnttaattcaaatataattttaaataagaccttgaaaatataccaatcaagtaaaattgcttcaatagggtatttgctgggggatttccaattattcaaggggataaagctggcacattggtgagaagaccacccacatactctttacatctagaaagtgtagttttcttaggtacgtgggcaatcctaaacacttgtgccagatttcctttccttgccaaagcactgaagaatcttggcagctaaacaaagaattgaaccctacattttctatcaggtaagtagagttctggctaga

SEQ ID NO: 41056 - DNA, 399 bp, Homo sapiens
  misc_feature (1)...(399): n = a,t,c or g
ggattcatgttattcttgtactgtctccctcatttgtgtcttgaatggaagagagaaagatggatgtagccactgagccaggaattttacatacccatagcctatctcatctgggctagagcccgtggtttggttactggtatactatttagtagtgtgactgttgtgaactttttatagtactgtgctttcctaaaatgttgttttgagatttatcaaaatctggaccatatatttcttatgagtgtcaagaatgtgaacatccttgtcaaaaggaaacataagaagaggaaaatcataaactaaaattggaacatgtcatagtgagaaaaggaatgaggaaaaaacaatttgagctcttttcccccctgctcctttgaaaaatatatatggnaacca

SEQ ID NO: 41057 - DNA, 389 bp, Homo sapiens
gcttaaaatgaagtttcagtggggcctcactttgctttctgaaatgaaactatttaatttcccataacatggtttatgatataaaaataaggttctggtattatagtagagaaggactgtccataccttatggatgctttactgttgggatttaagtttagctggtgatttctcactgccttttcacttgatgtcctcccctggggaaggccactgctgctttgtaccctgctctgtacagcagggctataaatccctcatacaaatttcccaacgtggcagggcactttcagttgttatttagtggatactgagtgtggcttggaagcaggaaagagaagttacagcctcttccagcccaacaatgtcttcttctttttttttttttt

SEQ ID NO: 41058 - DNA, 399 bp, Homo sapiens
gaaggcatccagaccagaaaccgaaaaatgtctagcaaatccaaaaagtgcaaaaaagtgcatgactcactggaggacttccccaagaacagctcgtttaacccggccgccctctccagacacatgtcctccctgagccacatctcgcccttcagccacatgtcctccctgagccacatctcgcccttcagccactccagccacatgctgaccacgcccacgccgatgcacccgccatccagcctgtcctttggaccacaccacccctccagcatggtcaccgccatgggttagagccctgctcgatgctcacagggcccccagcgagagtccctgcagtccctttcgacttgcatttttgcaggagcagtatcatgaagcctaaacgcgatggatata

SEQ ID NO: 41059 - DNA, 398 bp, Homo sapiens
gataacttattgtgaagggttagctttactgtacaggatagcagggaactggacatctcagggtaaaagtcagtacggattttaatagcctggggaggaaaacacattctttgccacagacaggcaaagcaacacatgctcatcctcctgcctatgctgagatacgcactcagctccatgtcttgtacacacagaaacattgctggtttcaagaaatgaggtgatcctattatcaaattcaatctgatgtcaaatagcactaagaagttattgtgccttatgaaaaataatgatctctgtctagaaataccatagaccatatatagtctcacattgataattgaaactagaagggtctataatcagcctatgccagggcttcaatggaatagtatccc

SEQ ID NO: 41060 - DNA, 402 bp, Homo sapiens
  misc_feature (1)...(402): n = a,t,c or g
gatgatacaaaatggcctcacatcttccctgatcccagtgtgcgcagaccgcagaccagttgaaaccgaaaggtggactaagatgggaggcctccaaccagggagaagccactggtgttaacagcatgatctctgggcttggctattgcatccccacctgctgtctgacattgggcaggggacccgagctctttaaagactaaagtccttgtctgcaagatagccgtaatagtacaacacccaactcattaaagtgtcttcaggataagtgaggagtatttgtaaaatgctaagcactgtgcctggaattaccaaagggagcttttaaaaagtcaacaacttttgagggccagatagaaatttcatattttggccnnnnnnnnnnnnnnnnnnnnnnnnnnn

SEQ ID NO: 41061 - DNA, 356 bp, Homo sapiens
  misc_feature (1)...(356): n = a,t,c or g
ggcaccatcggcgtcgacttcaccatgaagacgctggagatccaggctgcagatctgggacacggccggccaggagcggttccgcaccatcacccagagctactaccgcagtgccaatggggccatccttgcctacgacatcaccaagaggagctccttcctgtcggtgcctcactggattgaggatgtgagaagtatgcgggctccaacattgtgcagctgctgatcgggaacaagtcagacctcagcgagcttcgggaggtctccttggctgaggcacagagcctggctgagcactatgacatcctgtgngccattganacgnntgcaaggactnnancacgnggangangctt

SEQ ID NO: 41062 - DNA, 387 bp, Homo sapiens
  misc_feature (1)...(387): n = a,t,c or g
gggagtgtgcttactccatttctttagaattcggagccatggtgggtttttaaataagtgttttgaggcttcctttcctattcctacagtcatattttataataattattaaaataccgtatgtgtaatgtttctcaaacgtgacttggttcaatttttgaaacatacttaatttttgttcacaagcaaaaatttttgattggaatgtttcaaactataagcaacatgtaggcagagacattgnttatgtggtatcgtatctcatttcctacaacagtcctggcacacagttgcttactgaatgntaccagggaattaaaaatggcatgngttatacnatanttannaaantaacagntgggactnttgnnnaactnacgantttgg

SEQ ID NO: 41063 - DNA, 414 bp, Homo sapiens
  misc_feature (1)...(414): n = a,t,c or g
gaccctttaggatgttctcacaatcacagatcannnnnnnnnnnnnnnnnnnnnnnnnnnnnnnnnnnnnnnnnnnnnnnnnnnnntatttgtgtgtgtaaggatatgagtgtgtatgtgtatttatgattttgtacgtgtacacgtgtgtatgtcatattcccttctgacttaacattataatttctgaaaatctttttcttcatttttaatttgtcttcagttgtcgtttgtgctaaagtttgcatgaagttttcttatccctcactttccaggtagcagtggaatttactctctaccttctgttgtgtctgctcatgtgacaagttcttttggtaagaaagtaaagtctaaactataaaagttaaactctgaaagaagaaaattcaggtgcaaagtgacnaggatttcacc

SEQ ID NO: 41064 - DNA, 390 bp, Homo sapiens
  misc_feature (1)...(390): n = a,t,c or g
ggactgaggcaggtaggtgagagctcattgcaagtgactggttttgtggtatatgaagacaagggtgggtggaagggcatctgttgctcataaggctctgtgtgcctgcatcatcatgatgctagacaaggatggacagagtcttggtattgtgctgaagagaggtgcnnaanggcttcncaccgganactangcaatgatgacccttaagacattcggcttnacattatangctgcttaccnnngattgggcttgtnataggctgatgatggtgtctccaagcagcanatttcccatgccctgttnacnggcagtcttgctcttagcttgcctgaggccantgaacaggcttnangacctgcagggccccacttcctgacccagactgc

SEQ ID NO: 41065 - DNA, 399 bp, Homo sapiens
  misc_feature (1)...(399): n = a,t,c or g
gaggagatagtggaccatcagtgcctgaatgcaaatcatagtgagtggtgtgcaggaaagaggttgggcagggcctgtctgaggaggcatcgtgggggccgatccttgaagaatgtgaaagggacaggagaagagcaggcagctctcaggcagaggtgaggggcagtgcaaacgtggagcagtggccccgatcactcagggacgtggcagccttgggaaggaactgggtttattctgaatgcagcgtgagacctactcactgaagctgtaggacatgctttccatgtgctgtgacgtgatctgcaaggaagattctaggcagaagcaacaattttgtgattgaaaaattccacataaagaagtaattcctgattccctgtactgacctgaggtnctgga

SEQ ID NO: 41066 - DNA, 430 bp, Homo sapiens
  misc_feature (1)...(430): n = a,t,c or g
gaaaaattagccnnnnnnnnnnnnnnnnnnnnnnnnnnnnnnnnnnnnnnnnnnnnnnnnnnnnnnnnnnnnnnnnnnnnnnnnnnnnnnnnnnnnnnnnnnnnnnnnnnnnnnnnnnnnnnnnnnnnnnnnnnnnnnncaagagcgactctgtctccaaaaaaaaagaaataactactaagggtaagatatcaagtttattactgaattttgaggaactaatgaaaaattggtaatgaaataagcattctaagacannnnnnnnnnnnnnnnnnnnnnnnnnnnnnnnnnnnnnnnnnnnnnnnnnnnnnnnnnnnnnnnnnnnnnnnnnnnnnnnnnnnnnnnnnnnnnnnacaggtgagtgagcattaccacctgactctgctcctgtcagatcagcacagcatcagattctcataggaacacaacc

SEQ ID NO: 41067 - DNA, 424 bp, Homo sapiens
  misc_feature (1)...(424): n = a,t,c or g
gcgannnnnnnnnnnnnnnnnnnnnnnnnnnnnnnnnnnnnnnnnnnnnnnnnnnnnnnnnnnnnnnnnnnnnnnnnnnnnnnnnnnnnnnnnnnnnnnnnnnnnnnnnnnnnnnnnnnnnnnnnnnnnnnnnnnnnnnnnnnnnnnnnnnnnnnnnnnnnnnnnnnnnnnnnnnnnnnnnnnnnnnnnnnnnnnnnnnnnnnnnnnnnnnnnnnnnnnnnnnnnnnnnnnnnnnnnnnnnnnnnnnnnnnnnnnnnnnnnnnnnnnnnnnnnnnnnnnnnnnnnaatggtaatgttgggggaatctttcggaagaaaaaaaaaaaccaaagatttttaaaagaaaatctgaaagataaaaagagaatcaatccatgaagctcagttatgatggggtgacagtagctaaagcccaaaccctcga

SEQ ID NO: 41068 - DNA, 380 bp, Homo sapiens
  misc_feature (1)...(380): n = a,t,c or g
gggtacctggtgtccccagtcaagcccatgaagcccatgcggcctgctacatggggtggggtcgtagggaggctgtttgcctccacgtctaggaaggcctgtgagaggagcagtcaagacttccggacaacttagctgggccctacttgggcccaagtttcagaatagtgaacccctatcnaggctgtgantagatcaggcacnggatccattcnctgtccctgacactaccttcaagccanttnaagctgnactncatngncgatcanncaggntttntgntganacntacccgagngagtcntgnngtatnctatcaatcttcccatagggccaaatgactgctttgncggatggctgttggnntgnatccatgcttg

SEQ ID NO: 41069 - DNA, 410 bp, Homo sapiens
  misc_feature (1)...(410): n = a,t,c or g
gaggagatggaccccttctccccaggagagagggtacctcctggtgcataggtagatgaggagggcagatggaagacttgaagggggctcttagaactggttcagggaagcagaaaatatgagataaagggaccagacttgggatttgaggcaagataagatgatttggcaggcactgggaagcatttcaggggattaccactagatgatgaaaaggtgctaagcaaggagggtagaggcagaggcagtctaggtgagtgtgtagcgggcttggtgttgataagagttaaaaagagcnnnnnnnnnnnnnnnnnnnnnnnnnnnnnnnnnnnnnnnnnnnnnnnnnnnnnnnnnnnnnnnnnnnttgggnncaggagttcgagactacctgcaacatggtgaaaccctgt

SEQ ID NO: 41070 - DNA, 420 bp, Homo sapiens
  misc_feature (1)...(420): n = a,t,c or g
gcttgataatccctaaagaaatccacctgcatatttctccaatactgcccacccctctgttggcacaaagcattgttcaaattgagaagggtgcaacaggagaaagaggaaaatgaaaaatagtaatgaccttgatacattttataaaacaatttgaggaagttgcctataactctcttgctttcaattcagaagaaggcagatacaccaagaaatgctggaaaaccccagccaagaacttcaaaatgtgtatattttcttgtagctactgaaatgcctgtcctgccatggggtgactgtcagggcctgagaaagagccccttttcttggggatttgggaaacnagagttcttcatatcagccaaatgggcaaaatcacaagcttctgctgggataaagcattgtgatgatcatgctttc

SEQ ID NO: 41071 - DNA, 367 bp, Homo sapiens
  misc_feature (1)...(367): n = a,t,c or g
gaaattactaagtatttccattgtttaactcttttacacttttgttgtaaaaagttacatgggaggccgggcgaggtgagacacctnnnnnnnnnnnnnnnnnnnnnnnnnnnnnnnnnnnnnnnnnnnnnnnnnnnnnnnnnnnnnnnnnnnnnnnnnnnnnnnnnnnnnnnnnnnnnnnnnnnnnnnnnnnnnnnnnnnnnnnnnnnnnnnnnnnnnnnnnnnnnnnnnnnnnnnnnnnnnnnnnnnnnnnnnnnnnnnnnnnnnnnnnnnnnnnnnnnnnnnnnnnnnnnnnnnnnnnnnnnnnnnnnnnnnnnnnnnnnnnnnnnnnnnnnnnnnnnnnnnnnnnnnnnnnnnnnnnnnnnnn

SEQ ID NO: 41072 - DNA, 409 bp, Homo sapiens
  misc_feature (1)...(409): n = a,t,c or g
gccatatcctgagaacactcaggcagtctgtagtgatgtccatgtggttaaaaacgaggtctgtcagtaaacttggatgcagatcttcggtgtgagtgatcttggaagcagattctccaggcagagttgagcctagaggtgaatgcaaatgcagtagacagctttactacaacttcatgaaagcccctnnnnnnnnnnnnnnnnnnnnnnnnnnnnnnnnnnnnnnnnnnnnnnnnnnnnnnnnnnnnnnnnnnnnnnnnnnnnnnnnnnnnnnnnnnnnnnnnnnnnnnnnnnnnnnnnncttncnnannatanaataatnancnnctactacaagcncccnccaccnttntcgncctnattatttattgttantntangcaggnttttnccanattnttnannccgc

SEQ ID NO: 41073 - DNA, 408 bp, Homo sapiens
ggaaacccagttaattgggcaatttactgtctataagataaggtgaaaacaaaccagtccctcatgaagggttcacctatcctttggagtcatttatttatgaagactatataacagaaatgttgaaataggaagatcatattgaaaataaatttcatgatctcttttgaatttctgaatacagaaaatatttaagaactcactaaaaagaaatattttctttctttaaaagtctgtttataagtcataaaaaagttgagcaataaatttgttttccagttttctcaaatatttctccatccttatttgttcagtaagaaaacatcattgccacttaattcccttttccatgttctttagagactactccaaaccttaactgcctttctggtctacattcaggctttc

SEQ ID NO: 41074 - DNA, 408 bp, Homo sapiens
  misc_feature (1)...(408): n = a,t,c or g
gcggcacgagaactggaagaannnnnnnnnnnnnnnnnnnnnnnnnnnnnnnnnnnnnnnnnnnnnnnnnnnnnnnnnnnnnnnnnnnnnnnnnnnnnnnnnnnnnnnnnnnnnnnnatnactntngttnatntctactnatntgaatgncaatttnangggtnccnnctctagtggctntanaannantttacntngcgannccatngagncnatnctttctttcacatgtctgnngactttcttttcatngcgcccttatggcaggacatgctacagtgcttntctnctannatgactgcatgnctngcgcncncgngnncatnnnactgnttatctgtnnnaatnagactnatttnctttatnanataancngggtgngacctacccgcaggtatagtatgattc

SEQ ID NO: 41075 - DNA, 400 bp, Homo sapiens
  misc_feature (1)...(400): n = a,t,c or g
gagctgagacagacccactaaggggaaagcgactagaggtgaggtaggtatgccttcacagatctggtaggtcttgggagccatcagaagaccttggntttacttcgactcagaagccattggcaggttttgagcaaaagaaggacatgatctgacttccatttcagatgggttgaccacgtgtaatagcttcccctttcttgctaagttgtgatttgaatgggtcaataaattacatggttacctgatttttagaagacaactttgttgtaggtaaggatagaattctgcatgaggccagttgttataattcagacagatgagaatgccttggaacagattgaggtcagtaaaggtagtgggaagtggtcagattctggtgtattttcatgctctgttg

SEQ ID NO: 41076 - DNA, 394 bp, Homo sapiens
  misc_feature (1)...(394): n = a,t,c or g
gcggcacgagaactggaagaannnnnnnnnnnnnnnnnnnnnnnnnnnnnnnnnnnnnnnnnnnnnnnnnnnnnnnnnnnnnnnnnnnnnnnnnnnnnnnnnnnnnnnngacatcgnaanttcccaaaggtgaagttggacttctggtttgcanaatcacacaacttacaccatttaatggctatgctggagcaaaggctcanacagagaanaaaaaactganagatgtctttaagaaaggagacctctatttcaacagtggagatctcttaatggttgaccatgaaaatttcatctatttccacnacagagttggagatacattccggtggaaaggggaaaatgtggccaccactgaanttgctgatacagttggactggtgattntgtccaa

SEQ ID NO: 41077 - DNA, 395 bp, Homo sapiens
gtgacagtttctttattatataactttagggaattaaaaactcagtgggaactaacttctacttgaatgttcaggtattatgtttatgttttttcttatttttaaattttgagtcacaaatggaagctgaagctctctagagattgctacagtgtcttccagaactgttttccagacttactcagacatgagaaccccatgtgatacttgtttttaaatatatggattctgattagtaagtgtaaggctgaagaatcttttgcttctaaacagttctaataagcaaatttgaagagagccattctgtacttttatgttatggaagagagattaataggcaatctgaatttttttcttttaaaaagtgtgcctgggccgggcgcggtggctcatcc

SEQ ID NO: 41078 - DNA, 396 bp, Homo sapiens
  misc_feature (1)...(396): n = a,t,c or g
gcggcacgaggttgataccttttaaaattataaataacagttgggtttcccttgtgggttaggatttggcattaagtcattactcatataagtatttttagtatgagaaatatttcataatcttgtatttgagatcctcataatcagatagtttacttggttactttagatatatgatcttgtgaaatagaaaatattaagcctgattttcctaataacctcaaaaacatgtcttagtcttcctatgctttttttaatgagatgattaagaaagtatccaccnnnnnnnnnnnnnnnnnnnnnnnnnnnnnnnnnnnnnnnnnnnnnnnnnnnnnnnnnnnnnnnnnnnnnnnnnnnnnnnnnnnnnnnnnnnnnnnnnnnnnnnnnnnnngtctt

SEQ ID NO: 41079 - DNA, 410 bp, Homo sapiens
  misc_feature (1)...(410): n = a,t,c or g
gagtcttattagagaatgcaccatggcagcttgagcctaaagaaggagcaagaattctgcttctcaaaccaggatgggggttgtcttaggcatcaagaattgcacaggcaaaagctatcaatatatgaatacacaataccccnnnnnnnnnnnnnnnnnnnnnnnnnnnnnnnnnnnnnnnnccccatagatggtttatcaggggagccacaggcaattccatgagctcgtgcagtaggacagaggggagtgaggcatgagggcgggtgagttgggagcagattgctcaatacttcgtttaccggcctacggagcttagacttcaagaatatctattgtataaaagctcttcttcaggaaattcccaataattttacttcttccaattaagtcctgctaggagattcagc

SEQ ID NO: 41080 - DNA, 93 bp, Homo sapiens
ggacatttttaatgctgcttaaatttagagcaatccaatcaataacatgcatttatttatttatttagagacggacagagtctccctctgttg

SEQ ID NO: 41081 - DNA, 189 bp, Homo sapiens
gaaggaccaatgccaagcccagatggagggttccaagttccccttccccactcgctagtagatataacgggcagaggccccagggaactgcagagcccccagtgaaaggagccgggttcctgaatgattgtgtggaggcaggcgggccaccacttgctgttagatgaatgagaatgaactttttttttg

SEQ ID NO: 41082 - DNA, 410 bp, Homo sapiens
  misc_feature (1)...(410): n = a,t,c or g
ggaatccctctaataggtatatattgctatattttctattcttgagagaaaaaactaaaatacaaatactttttcaccaaccctttttaataagactggcggcaacatgtaagtcactttgtcttttgataggtaggaggaatgaaaatagcannnnnnnnnnnnnnnnnnnnnnnnnnnnnnnnnnnnnnnnnnnnnnnnnnnnnnnnnnnnnnnnnnnnnnnnnnnnnnnnnnnnnnnnnnnnnnnnnnnnnnnnnnnnnnnnnnnnnnnnnnnnnnnnnnnnnnnnnnnnnnnnnnnnnnnnnnnnnnnnnnnnnnnnnnnnnnnnnnnnnnnnnnnnnnnnnnnnnnnnnnnnnnnnnnnnnnnnnnnnnnnnnnnnnnnnnnnnnnnnnnnnnnnnnactccagc

SEQ ID NO: 41083 - DNA, 406 bp, Homo sapiens
  misc_feature (1)...(406): n = a,t,c or g
gggcctacagggtgtctggtacatgtagatgctcagtatatcatgaagcccacccttgccccctttggcaagttagagagtcattcgttctttcaaaaatatttactgagcatctgctaagtgctggaaactgtttcaatgtggggaataaaacagtgaannnnnnnnnnnnnnnnnnnnnnnnnnnnnnnnnnnnnnnnnnnnnnnnnnnnnnnnnnnnnnnnnnnnnnnnnnnnnnnnnnnnnnnnnaccccgtccctaatagaaatgcnnnnnnnnnnnnnnnnnnnnnnnnnnnnnnnnnnnnnnnnnnnnnnnnnnnnnnnnnnnnnnnnnnnnnnnnnnnnnnnnnnnnnnnnnnnnnnnnnnnnnnnnnnnnnnnnnnnnnnnnnnnnnnnnnnnnnnn

SEQ ID NO: 41084 - DNA, 396 bp, Homo sapiens
  misc_feature (1)...(396): n = a,t,c or g
gnnnnnnnnnnnnnnnnnnnnnnnnnnnnnnnnnnnnnnnnnnnnnnnnnnnnnnnnnnnnnnnnnnnnnnnnnnnnnnnnnnnnnnnnnnnnnnnnnnnnnnnnnnnnnnnnnnnnnnnnnnnnnnnnnnnnnnnnnnnnnnnnnnnnnnnnnnnnnnnnnnnnnttcctgnttactnatctgngngnatgttcatacncncncatgcntatncgtgtttgaaaaaanatntattatcataattcttcatcattctgattataaagtaaaanaatctanctnatattctntttgactcanggcatctatnaaaagtatttttgaattttatggttaaatttgaangttatttttggggggccatttttccccatggtaattataggaaaaaaaat

SEQ ID NO: 41085 - DNA, 400 bp, Homo sapiens
  misc_feature (1)...(400): n = a,t,c or g
gcacagggatttatttattctatcccctttgatcctttttcttgcatgcttaggtaggaaaaatcactggctaagctgatcaaagaaatctgagaggcaaaaccaagattcaacgtaaaaatgtgatgcttaatttctgaagaactgagtactctaccttctagctacatctacatttacacatagaatgtttaggccccagaagcagcaaatgttcacaaaaaatggcaaagtcatacaaacaacaatcttaaattactgtggaatgttccaaataaacaacattgcattttaagaactgcatttaaaaataagttctccgaatgcttttacactgtttaannnnnnnnnnnnnnnnnnnnnnnnnnnnnnnnnnnnnnnnnnnnnnnnnnnnnnnnnn

SEQ ID NO: 41086 - DNA, 226 bp, Homo sapiens
  misc_feature (1)...(226): n = a,t,c or g
ggtgtttattgcattgcccattaaaattttttgtacggtcagatttatcaattttttcttttattgtttctagctttagtgtcatagctagaaagcctttccctatatccagattacagaggaatttgtccatgctttccttgtggttccattttatctatttangngcctgatccatttgnngnnnantnnncnnnatngncnnnnnnnnnncnnnnnncnttgc

SEQ ID NO: 41087 - DNA, 401 bp, Homo sapiens
  misc_feature (1)...(401): n = a,t,c or g
gcggcacgagaactggaagaannnnnnnnnnnnnnnnnnnnnnnnnnnnnnnnnnnnnnnnnnnnnnnnnnnnnnnnnnnnnnnnnnnnnnnnnnnnnnnnnnnnnnnnagacaaaaaaaggctcctgtctatgtgtctggttatccgtggaggcttaaaaattaaaatttcataggcaggtcacatgtgccttgaattgtatatttttccctatttcctcctctgtgttaactagaaaaactaaacatgtctccttgatgtgcatatgattatgctagtactttcagtttgtggtagggactatatttaattgattgccattctgctccttactaatgtaaggaactggcagttactactcaaaaaatctcataggtattgaattggntttcaaatgatc

SEQ ID NO: 41088 - DNA, 308 bp, Homo sapiens
  misc_feature (1)...(308): n = a,t,c or g
ggccatttatatttctttttctataaaaatcttggtctatctctgagcaatgtaggtttaacctgattctaaggttgctggtcttctctatttttagaagctctaactgtgatgtaagctgaaagtatttctttgcagtttgttattttcctttaactttgcttatgcaaagtatactttgccatgaaaaagtcttttgttgntgntttttcatgtaattgtatttatcagnccttttccttattgnttctggatttggaganntanntngaaaaccctntntntntcannnngnnngnnntnaccca

SEQ ID NO: 41089 - DNA, 385 bp, Homo sapiens
  misc_feature (1)...(385): n = a,t,c or g
gctggaggaaacttatatgactacaaacagatgaatggaaatatccatacagtggacattattcgtgaataaaggaatgaactgttgacaaacacatcaacatggataaatatcaaaaatatttatgctaaataaatgaatgcacctgcccttaaaaaacagtacatacnnnnnnnnnnnnnnnnnnnnnnnnnnnnnnnnnnnnnnnnnnnnnnnnnnnnnnnnnnnnnnnnnnnnnnnnnnnnnnnnnnnnnnnnnnnnnnnnnnnnnnnnnnnnnnnnnnnnnnnnnnnnnnnnnnnnnnnnnnnttacccaggcnnnnnnnnnnnnnnnnnnnnnnnnnnnnnnnnnnnnnnnnnnnnnnnnnnnnnnnnnnnnnnnnnnn

SEQ ID NO: 41090 - DNA, 385 bp, Homo sapiens
  misc_feature (1)...(385): n = a,t,c or g
gttttcctattaaggaaaataaactgttcgaagttgaccttgttttctgatgccagctccagcattgatcttttagagataatgtagctatagtattgctgaatttgttggccataaagacacagcaaaagaattaaagtaggaacannnnnnnnnnnnnnnnnnnnnnnnnnnnnnnnnnnnnnnnnnnnnnnnnnnnnnnnnnnnnnnnnnnnnnnnnnnnnnnnnnnnnnnnnnnnnnnnnnnnnnnnnnnnnnnnnnnnnnnnnnnnnnnnnnnaaaaannnnnnnnnnnnnnnnnnnnnnnnnnnnnnnnnnnnnnnnnnnnnnnnnnnnnnnnnnnnnnnnnnnnnnnnnnnnnnnnnnnnnnnnnnnnnnnngcactc

SEQ ID NO: 41091 - DNA, 380 bp, Homo sapiens
ggcacagggtaagggcttgctatgaaattctgacccattgaactcatcctttatccccgctaaacttcctccttgtcttgtaatcactaccttggttgataggaccatcatccacttgagaaatcattcttggctcttccctttctctcacttgctatttccactcacctaccagtatcctacatagttttgtaagctgattgctccccaccatcttggctaccaaagtcctgagtcttgcccacaccatctcttgtctcagttactgcagtgacatcctaatcagttccctgcctgtaatcttgtcccttcccctttgaatccatcactccatatgcctgccaaagggatctttctagaaggcaagcctagccatgctg

SEQ ID NO: 41092 - DNA, 382 bp, Homo sapiens
  misc_feature (1)...(382): n = a,t,c or g
ggtgagccatgttagttcccttttctcccaccacctgcttcatcaaacattcctgtaggtataaagtagctttggaacacccaccaagaacacgtaggctttaatgtacttacccacaagggaatctgcacttctggcatgtttctaagacatgagatggaaggaaggggcacatggaatctaatacctggaaatactgccaggtgacctgccattggtggagttctcctaacctggcatgtacatatacatatcctccataattctgagtggctgaacaaggactatttccctatatccttttttcttctcaattccaatgaaagctcagtaacaattcagctttctgcatataanttgatgcctggagtanggnanctgc

SEQ ID NO: 41093 - DNA, 378 bp, Homo sapiens
gagtgggtgcggttgacaggccagggccgatgccacggagtgaccagggtcccggcagaatctcttgcagctgggcctggggctgacacgggaagggggctggactgggaagccgtcctgcctccacatcgccctgtgaccctggacaaagctttgcctctctccgggcgccatttcctgccccttaaggaaggagagcagaacgagatctcatcccactgtgagctggggcacgggaggacgtggccaccccaaagcaggccttgcctgggcttcagcagtcactacaggccccgccccagcccattctccgtgggatggggctcacccagctgggccacggtgactgtggaggctgcacagtcttgactccccggg

SEQ ID NO: 41094 - DNA, 381 bp, Homo sapiens
  misc_feature (1)...(381): n = a,t,c or g
ggcagacaatcctttttatagtcttcggagggattacaaacagtgtttgacaaagcagttaagagcatgtactttgctactcggattcaaatcttggctctgctattttgnnnnnnnnnnnnnnnnnnnnnnnnnnnnnnnnnnnnnnnnnnnnnnnnnnnnnnnnnnnnnnnnagaannnnnnnnnnnnnnnnnnnnnnnnnnnnnnnnnnnnnnnnnnnnnnnnnnnnnnnnnnnnnnnnnnnnnnnnnnnnnnnnnnnnnnnnnnnnnnnnnnnnnnnnnnnnnnnnnnnnnnnnnnnnnnnnnnnnnnnnnnnnnnnnnnnnnnnnnnnnnnnnnnnnnnnnnnnnnnnnnnnnnnnnnnnnnnnnncagganaagt

SEQ ID NO: 41095 - DNA, 299 bp, Homo sapiens
gttccatccaaatctaaagaaactgacaaattcattgcaaatggcttttaagaacatccttggagaaaaactaccaactcataggttccaaatgcaatatttatccctcagaagtgtgctgcttcctgcaataaggcacacaaccccaacccacagccttgactaaatttaccataacttaagtggcatcaggtagagagatgttcagtgcttgctttgcattacagcttatgttggcttccaatttgtgatttataatcaattcttaggatatttaaagagctcaatgaaaggttttt

SEQ ID NO: 41096 - DNA, 300 bp, Homo sapiens
  misc_feature (1)...(300): n = a,t,c or g
ggggccatggacatccccacttccagcccatgtacactagtggcccacgaccaaggtgtcttcatttccatgaaaaagggactccaagaggcagtggtggctgtggcccccaactttggtgctccagggtgggccagctgcttgtgggggcacctgggaggtcaaaggtctccaccacatcaacctattttgttttaccctttttctgtgcattgttttttttttncctcnnaaanggannntcncggtttttngaaccantannngggggnctttttgnnnannancaatattnttata

SEQ ID NO: 41097 - DNA, 375 bp, Homo sapiens
  misc_feature (1)...(375): n = a,t,c or g
gaaataagagttgatttatgccttcccttttgcctatttgactttttgcgccttcttacttccttagctctttctggatttggtgttctcgttttcttaaaagcctaggtaaattatatttatattaaacaagtgttgaacgtttgtaatggtaggntcgtgacagatctntaatccagatttgcctatcacatataaaggaanaggganaanaacnnannanaatnnantgangatanggnaanggagaacccnncttatttcttnatcactnacnttnnantncngtnattnatgaatnnncgtaagtnnnntgtggnnnntnnnnntnnnnganntntnnnntntnnnngngtnnanttnantntntnttat

SEQ ID NO: 41098 - DNA, 410 bp, Homo sapiens
  misc_feature (1)...(410): n = a,t,c or g
gcaatggtgtttgcctgtaattccagccacttgtaannnnnnnnnnnnnnnnnnnnnnnnnnnnnnnnnnnnnnnnnnnnnnnnnnnnnnnnnnnnnnnnnnnnnnnnnnnnnnnnnnnnnnnnnnnnnnnnnnnnnnnnnnnnnnnnnnnnnnnnnnnnnccctaagcagttcatttggggtttttgtttttgtttattgcttttcgaagcagtttccgaacagctcttgtcactcaaaaaccccttctgggaagaattctaagtctcctgtacaactggaattggtgcctatggtagaaacttcaataactgtcatacagaggtaggcagggcccagcancaaaggcctttaggagataanaagtgcaacttttcacctggngctggctgangagcctgccaccggag

SEQ ID NO: 41099 - DNA, 373 bp, Homo sapiens
gagcagatttgaggaattcagggtgaattttgttggccagtggctacaggggctgattgggagcggggttgggccaggtgaaatggattagtttatccaaatctcccagctgtcctcatggtttagccacaccaccacctttaaccctagaactaagacaaggggagaagtgcgggtgagaagtgagtaaggcgaaggttgcttccaagcaccccctcacccaccgtttgtgcccctcccaaccctatggactggtacttcttccctggctgagggcgggctggtattaatggttcctgtgttccatgcctgggggaggcaaggaagggctggagatgggtctcagggcacatctgcacaggacagaggtctc

SEQ ID NO: 41100 - DNA, 318 bp, Homo sapiens
  misc_feature (1)...(318): n = a,t,c or g
gnnnnnnnnnnnnnnnnnnnnnnnnnnnnnnnnnnnnnnnnnnnnnnnnnnnnnnnnnnnnnnnnnnnnnnnnnnnnnnnnnnnnnnnnnnnnnnnnnnnnnnnnnnnnnnnnnnnnnnnnnnnnnnnnnnnnnnnnnnnnnnnnnnnnnnnnnnnnnnnnnnnnnnnnnnnnnnnnnnnnnnnnnnnnnnnnnnnnnnnnnnnnnnnnnnnnnnnnnnnnnnnnnnnnnnnnnnnnnnnnnnnnnnncannnaacatacaanncgaatnttanctgggggcantggntntgcctgnaatcccanactttangaggcc

SEQ ID NO: 41101 - DNA, 403 bp, Homo sapiens
gatctcaagaggaaggatgaagcttttccaaaatcacatgccttcatctcattttacagaaaaatttgtgcctaatattaaccaaaggaaatggggagcggcagggccagtgggtttcctggtgaactgagggttgcatcttggacaggttgcatgtggaagggacagcagggttcccaaggaagctttgcacggtcatgggtagagccatcccttcttcatccatagtgaatatggctggaaatagcgggtagtcttggatttgacctccctcccatggaagtgctgtctccagctcgctcctggaaaaactgctttctccccaaagtgtgtctgagcagcagatttaagcatgaagttggttttgtggggctacagtatggactttgggaagatggtgcca

SEQ ID NO: 41102 - DNA, 402 bp, Homo sapiens
  misc_feature (1)...(402): n = a,t,c or g
ggattgtagagcatttcaggccagcgtcacaacaggcggcctgcgaggtcttagttatggtcccaaatgggacataataactgaggaaggnnnnnnnnnnnnnnnnnnnnnnnnnnnnnnnnnnnnnnnnnnnnnnnnnnnnnnnnnnnnnnnnnnnnnnnnnnnnnnnnnnnnnnnnnnnnnnnnnnnnnnnnnnnnnnnnnnnnnnnnnnnnnnnnnnnnnnnnnnnnnnnnnnnnnnnnnnnnnnnnnnnnnnnnnnnnnnnnnnnnnnnnnnnnnnnnnnnnnnnnnnnnnnnnnnnnnnnnnnnnnnnnnnnnnnnnnnnnnntgccatttcactccgcctgggcaaaaggagtgagaccctgtctgaaaaaaanaaaannnnnnggattttttttt

SEQ ID NO: 41103 - DNA, 430 bp, Homo sapiens
  misc_feature (1)...(430): n = a,t,c or g
gagcttgtcaagaagactacagaattagataaaagtggatgtagaagtggaacagaaacattgataaaagaaaccacaggctgggtnnnnnnnnnnnnnnnnnnnnnnnnnnnnnnnnnnnnnnnnnnnnnnnnnnnnnnnnnnnnnnnnnnnnnnnnnnnnnnnnnnnnnnnnnnnnnnnnnnnnnnnnnnnnnnnnnnnnnnnnnnnnnnnnnnnnnnnnnnnnnnnnnnnnnnnnnnnnnnnnnnnnnnnnnnnnnnnnnnnnnnnnnnnnnnnnnnnnnnnnnnnnnnnnnnnnnnnnnnnnnnnnnnnnnnnnnnnnnnnnnnnnnnnnnnnnnnnnnnnnnnnnnnnnnnnnnnnnnnnnnnnnnnnnnnnnnnngaaaccatagtggaacctctctgtgtgagggtggcatgggcttgaggga

SEQ ID NO: 41104 - DNA, 430 bp, Homo sapiens
  misc_feature (1)...(430): n = a,t,c or g
gacagatgctgaatactttagctgatagtttctcttcagcatttctgtgtttggaatgtatgttatatgacagttccaaagttacacacattgcattcctaaatatgttgtgtaatacacattgcacatgtgtcagaattatatgtttaaccccaatgtaattgtgggatgtagaagatatagataaaactacaccttaccatataaaatatgcagaagtacaccagtgacgtcagttttgctatggttgcagtaagcagggcagttctacaaatttaccattttaaaagcattttgtcaaactttctggatacaaagatgctgccaaggaactcacagcctaatacatgagttaagatatgaacatagcatacattattttgcattgngctgaagnntttaagnaccanaangaatgngngaagngcta

SEQ ID NO: 41105 - DNA, 430 bp, Homo sapiens
ggagagctagcaccatgagcttcaatacctggtgaaatttatagctccttattgtgaagcagcatttctaattgtccgacagaaagtgtgccataaaatatgtactccaacatgagtaaacttgatggaataaatactatataactagaatgattcttatatttttaggtcaatcctgaaagtttttatcaggtatcaaatttggacacaaaaatataccagtaacaatgagattttatgtcaggaactaactatctagaaaatgggaagtacaggtgtcagggaagaatgggaaatgggaatggtcagaagattattatattccattcagcagagtgttgagcattgtcagacctttcctgggtaatctatttctaaagggtggtgcatctttgctcatctttctaggctaccttacacaggggaatta

SEQ ID NO: 41106 - DNA, 386 bp, Homo sapiens
  misc_feature (1)...(386): n = a,t,c or g
ggatcttaagataatactgagaaggtgtaggttgaggtcatttggggaggctttgaatgttaagttcaggatacagacttaatctgatgaattgcgaggagtctttggaggcttctacacgaaagcaatattgtcagaattgaatttaagcaaatttaattgggcagaggtttagtctgtattggatatggggaaccagtttggaagtcccggtgagaagtttaggtcatcaaaacctgcctgtccnnnnnnnnnnnnnnnnnnnnnnnnnnnnnnnnnnnnnnnnnnnnnnnnnnnnnnnnnnnnnnnnnnnnnnnnnnnnnnnnnnnnnnnnnnnnnnnnnnnnnnnnnnnnnnnnnnnnnnnnnnnnnnnnnnnnnnnnnnnn

SEQ ID NO: 41107 - DNA, 257 bp, Homo sapiens
  misc_feature (1)...(257): n = a,t,c or g
ggaaaaacaagataaaagtatgcataatacaatgccacttgtataaaacaaacaatggcaaaatctttgtatgactctgtttgcactcacccatgtttacagaggattgtatgagtgtgcagaaacaaatggaacaaccactcgggtgtccgtatggggaggatgggcaaagagactgatatggntggagaacanacanggctgnatganccanncnnannnagntnnncncanctggacctggnggntnatgcctg

SEQ ID NO: 41108 - DNA, 379 bp, Homo sapiens
gcggcgtggatcacggtgaggtgttggcctgggaatgagccaagttaagccagggcagcccccttcctccagctctctgaatcattctggatttagatccccagatttcctgcagattcgaatgaaccaagatcaccaaaataaaaggaaaccaggcaccacctgtgaggatttggaggaaataacaaatgcagacttttggcaatatgacggttaaagtaaaaaaactcaatggaaaaagtatttggaaaactcagtgaaaaagttcaacacttgctcatgaaaaacaatacaaagacacaagctgctagaaaggaagctaatctgataaagaatatctacaaatgcattgatacttttccctctgaggttgggagaa

SEQ ID NO: 41109 - DNA, 378 bp, Homo sapiens
  misc_feature (1)...(378): n = a,t,c or g
gagaagggccagggaatctactttcagcaaatgttccaggtgacacatttagtacctaatttgggaaatgttaatctagtccaatcccattagtaagaaaggaggggtccttagtccaaaggaagtgaccttccaagataacatagaccagcagtgtcagggttgggacttgaaccaagccaggtctccaggcccccactagggtcttgttcaatgggtaaccatgttagttctaggagaattttatcattggaaatgcacatttgtcacaaacagcttatagatgagttggataaattagggctcattagggctcattctctanccttttagagctaagaaaagaanaagaanaagtattaaagaagcactttgggg

SEQ ID NO: 41110 - DNA, 360 bp, Homo sapiens
gcaacacttctaatctttgtggtaagatctggctgacaagtttaccgtaaatcatttaaaacttattttaaaattgacttcatacctttcctgaattgtggaaagttactttgttttgtaattataagatttttagtttgaacaataataaaaaattttgtgcctgttttaaaacctgctctgttgtggtagtttcctaaaatgtgaacagttattcttaaaataatgtatttttacaagtttattaagtaaaaccagaatagtcttaagtagcattgaaagtatttaaaaatatgcataacttagtaattacaatgtttttgtttttgatagcaattcagagtccataaactcccaaag

SEQ ID NO: 41111 - DNA, 361 bp, Homo sapiens
  misc_feature (1)...(361): n = a,t,c or g
ggaagaaattggcatttgaatcagcgtactgaataagaaagatctgccctgccccaatattgacaggcaccattcagtcagctgaggtcccagatacaacaaaaagggagaggagaaatgaattcatattctctttctctccccttctctctcttccttcctccctctccctctccttttccctctctccnnnnnnnnnnnnnnnnnnnnnnnnnnnnnnnnnnnnnnnnnnnnnnnnnnnnnnnnnnnnnnnnnnnnnnnnnnnnnnnnnnnnnnnnnnnnnnnnnnnnnnnnnnnnnnnnnnnnnnnnnnnnnnnnnnnnnnnnnnnnnnnnnnnnnnnnnnnnnnnnnnnnnnnnnnn

SEQ ID NO: 41112 - DNA, 406 bp, Homo sapiens
gaaacattctaggacattcagaaaagtcatccatggaattttggaatgccattctctctgtatctttgcagatcatgaggaaggaaagttgatgaactagtacgggatggctcagacttgtaaagtgtctaagtcacaacgctgcagagccagcttccgggtagcaatggcatggcctcagctgtgccaaggctacaactggagcttccttactcgcatctgaggcaaacacagcaaggctggcccaggccgcccacagtcaacagatgttcacgggagatggatcagcccctcttttgcttgttctatcaaggaaagagatctaaccatgggcaagggtggaacacacccggttcaggtcagggaatgagttgctctaagtgaacagtgaattcttacttctcac

SEQ ID NO: 41113 - DNA, 405 bp, Homo sapiens
  misc_feature (1)...(405): n = a,t,c or g
gtctctctctcttgctctctnnnnnnnnnnnnnnnnnnnnnnnnnnnnnnnnnnnnnnnnnnnnnnnnnnnnnnnccttctggcatttctttcctcgaacaattttctcccattaacgcacagaatagttcttggccacagactcacgccgacacagcatatctctagagctttctttctgtgtggttcccaactctctcatattttcccccacaaattctagcctcctcaaactctgaactctgctgcttcaactcaacaagaccatagggcattctttgggtttcccctccagcactgtggtctgaaaactctctaggcagcaagttgggacaatcagagggctcacacccaggtttgtttcttacattgcttttccctctttctctaagagatcactgcatg

SEQ ID NO: 41114 - DNA, 405 bp, Homo sapiens
  misc_feature (1)...(405): n = a,t,c or g
gnnnnnnnnnnnnnnnnnnnnnnnnnnnnnnnnnnnnnnnnnnnnnnnnnnnnnnnnnnnnnnnnnnnnnnnnnnnnnnnnnnnnnnnnnnnnnnnnnnnnnnnnnnnnnnnnnnnnnnnnnnnnnnnnnnnnnnntaattttaataaagtaataaatagtgataaattgtcacgaagagctagcctcaccaaaaataaaaaatctaaaaacaactcaaactatctttttttttttngaaacggantttngctntngtngcccaggntgnagggcantancncantctnggntaatngaaacntcngcntccgggnttnaaacaattttttngcctaagcctcccaagttgcnggaatnataggccccngcnacnangcccagttactttttggaattttnagaa

SEQ ID NO: 41115 - DNA, 417 bp, Homo sapiens
  misc_feature (1)...(417): n = a,t,c or g
gctgggttgtaagagttctttatatattccttataggactctatctaggcagtttttacactaaaatcaaactaataatttgccctccaaagtgcctgctaaaaaaaaaannattattaggggaaaatanccttaggggggattttaaaaagtcaacttanngaaatctntcaaancaagagataaccntgaaaaatncanccaanctgaaaaaaanatggagggtaaattcaaggggnccnnnnnnnnnnnnnnnnnnnnnnnnnnnnnnnnnnnnnnnnnnnnnnnnnnnnnnnnnnnncaaactgnttgaaatcggcagttntannnnnnnnnnnnnnnnnnnnnnnnnnnnnnnnnnnnnnnnnnnnnnnnnnnnnnnnnnnnnnnnnnnnnnnnnnnnnnnnnnnnnnnnct

SEQ ID NO: 41116 - DNA, 408 bp, Homo sapiens
  misc_feature (1)...(408): n = a,t,c or g
gtcagcacagagggaggaaagacagcagaactggcagtcacagtagctctgatcatcctggagctaagctcctctccacagaagagaagcaggcagcagagaccatgaggcccccctcagcccctccccgcagaggatgcatcccctggcaggggctcctgctcnnnnnnnnnnnnnnnnnnnnnnnnnnnnnnnnnnnnnnnnnnnnnnnnnnnnnnnnnnnnnnnnnnnnnnnnnnnnnnnnnnnnntggactgttggaaaaccattgttacattttgaaatgtgagaaannnnnnnnnnnnnnnnnnnnnnnnnnnnnnnnnnnnnnnnnnnnnnnnnnnnnnnnnnnnnnnnnnnnnnnnnnnnnnnnnnnnnnnnnnnnagaagtgaaaaggccctgcccgct

SEQ ID NO: 41117 - DNA, 351 bp, Homo sapiens
gctggaagacaaactggtattgtcatttcaagcaaaaagaaataagatagccagttgtaactggcctgtatagcttatgtcttaacacatgcaatgttaagataatcacccagactttgaacaacattaaaaataacatcctttttttgtaacttgaaaggcacagatgtaaggagcctctgctttgcccccactacctgacttattgtagacgtctttcttacataatcatgcatcacttaacaacagggatacattctttgagaaatgtgaagttaggccaaaacatcattgtgcaaacttcagactatactcacacaaaccttgatgatatagcctattgctcctagg

SEQ ID NO: 41118 - DNA, 427 bp, Homo sapiens
  misc_feature (1)...(427): n = a,t,c or g
gtaatgaaaaaaaaaaatccaaatttgcaaatactaaacagatgtcttagtttgagttttccgaagcaaattccaagaggagaatatgggtacaatttgcttatatgaaaagtgattccagaagcacaacgaaatcatgaagtggtgacatggaaacggaagaaagccaataaaagggtggtaaacaatgaggaataccactctgagcaattggggctcagtcttgctgtggggccctctggaaaacattttaaataacgcctcagggtgccaaaccaggaggcaaacactggagtgtatactactcctattcctaacagactgaggattgttcctgggggtagtaatttcccagcatttccagccgtctctgctttgcatatgttcatgggcagtgtatattccttanaaaaccctaaggaaggga

SEQ ID NO: 41119 - DNA, 427 bp, Homo sapiens
  misc_feature (1)...(427): n = a,t,c or g
gcagaaaacaggtcagaaggaattacccagaatgaagcacagagaaaatgatgggaaacataggccagaacatgggacatcgagggcaaatgtctaatggatgtttacttaatgttctgtaaagagaaaagagagaatgaggcagatttattattagaaaagataaagactaaaatttctcagaattggtgaaagaagtctacagattnnnnnnnnnnnnnnnnnnnnnnnnnnnnnnnnnnnnnnnnnnnnnnnnnnnnnnnnnnnnnnnnnnnnnnnnnnnnnnnnnnnnnnnnnnnnnnnnnnnnnnnnnnnnnnnnnnnnnnnnnnnnnnnnnnnnnnnnnnnnnnnnnnnnnnnnnnnnnnnnnnnnnnnnnnnnnnnnnnnnnnnnnnnnnnnnnnnnnnnngaccccggaaggcggaggt

SEQ ID NO: 41120 - DNA, 418 bp, Homo sapiens
ggagagctagcaccatgagcttcaataccctgcttcatctggaccagttactctctctgcctcggcacagctctcatgagtcctgaaaattccttcccctttctttggttttgactcagtacttccctctttctcaacttcctgttttagtggctcacagtgctccatagcttcctaagaaagggtgtgtgaatggaaaattcaaacatgacagatcccaaaaaggtttttattttatgtacacgtcttgtcaataatttggatgaacgctaaattaaaggctggaaataatttccctcagaatttgaggtcttctagctttcagcactgctattgataaatctaaagccaatcttcccaatcctttgtgcaggtctgggtttttttacatatagaagtaaatcccggccaggtgtgg

SEQ ID NO: 41121 - DNA, 438 bp, Homo sapiens
  misc_feature (1)...(438): n = a,t,c or g
gctcacagctgcagtctaatagtaacacagaggtaattttaactttttacttttctacccttgggagtagggatgagtagaggcttacctccttccagaggcagctcatatccccccacccccattcccggaagttgagatgtctcttctctgttccacgcaggcatcgtctaagttgggaacaggtcttatgtcttaaaatttgggattctttaaaaacatnnnnnnnnnnnnnnnnnnnnnnnnnnnnnnnnnnnnnnnnnnnnnnnnnnnnnnnnnnnnnnnnnnnnnnnnnnnnnnnnnnnnnnnnnnnnnnnnnnnnnnnnnnnnnnnnnnnnnnnnnnnnnnnnnnnnnnnnnnnnnnnnnnnggtagtaagtagctgtaatcccaggtctcgggagctgagcaggagaatccttgacctangagggngagg

SEQ ID NO: 41122 - DNA, 423 bp, Homo sapiens
  misc_feature (1)...(423): n = a,t,c or g
gagaagttaaagcttccagagataaactaatagctcaagacgttacagctaaaaatgcagttcagcagttacacaaagagatggcccaacggatggaacaggtatttctcacatcgttgtcattattaacttgatattctggtgactcttgtttgttaaaataagctaacactgttagactattttggacctcactattgtattaatactaggtgattcttttatataaaagtaagccattannnnnnnnnnnnnnnnnnnnnnnnnnnnnnnnnnnnnnnnnnnnnnnnnnnnnnnnnnnnnnnnnnnnnnnnnnnnnnnnnnnnnnnnnnnnnnnnnnnnnnnnnnnnnnnnnnnnnnnnnnnnnnnnnnaggttaacccagaagtggnggngcatcctgtatcccaactcttgggaagct

SEQ ID NO: 41123 - DNA, 404 bp, Homo sapiens
  misc_feature (1)...(404): n = a,t,c or g
gtggatatcatcattggtagttctctagctggctatctgtaagtctccaaagctacacttgaactgtctagcatttagattagtacagctagaggagctaagtttgaatttttaaaaaatcggccaggcgtggtggcttatgcctgtaatnnnnnnnnnnnnnnnnnnnnnnnnnnnnnnnnnnnnnnnnnnnnnnnnnnnnngcatgatgtttttgagattcatccatattgtggtgtgtatctgttgttcgtttctttatttttttcactttttttagagacagggtctccnnnnnnnnnnnnnnnnnnnnnnnnnnnnnnnnnnnnnnnnnnnnnnnnnnnnnnnnnnnnnnnntatgcccacaattcatttatgtattcatctattgatagacattcagg

SEQ ID NO: 41124 - DNA, 414 bp, Homo sapiens
  misc_feature (1)...(414): n = a,t,c or g
ggctgcacagaaagccaaccactgaaaaaggagtattggcagggaagaaggctttaatcaggttctgcaaccatgatannnnnnnnnnnnnnnnnnnnnnnnnnnnnnnnnnnnnnnnnnnnnnnnngtttatatagcaannnnnnnnnnnnnnnnnnnnnnnnnnnnnnnnnnnnnnnnnnnnnnnnnnnnnnnnnnnnnnnnnnnnnnnnnnnnnnnnnnnnnnnnnnnnnnnnnnnnnnnnnnnnnnnnnnnnnnnnnnnnnnnnnnnnnnnnnnnnnnnnnnnnnnnnnnnnnnnnnnnnnnnnnnnnnnnnnnnnnnnnnnnnnnnnnnnnnnnnnnnnnnnnnnnnnnnnnnngaaactttctcaagtttcaagactgggagggccatttctgtgtggtacagtgggc

SEQ ID NO: 41125 - DNA, 421 bp, Homo sapiens
  misc_feature (1)...(421): n = a,t,c or g
gagaaataaaattcaaagccaagagccttacgtatagataaaaatggaggaatgagaacatagcatttatccaggaatcatgagttaatcatgttaccaggctttagggcaaggggctgggtgaacagtcactataatattacatgcatagttctttgaaaatgtcannnnnnnnnnnnnnnnnnnnnnnnnnnnnnnnnnnnnnnnnnnnnnnnnnnnnnnnnnnnnnnnnnnnnnnnnnnnnnnnnnnnnnnnnnnnnnnnnnnnnnnnnnnnnnnnnnnnnnnnnnnnnnnnnnnnnnnnnnnnnnnnnnnnnnnnnnnnnnnnnnnnnnnnnnnnnnnnnnnnnnnnnnnnnnnnnnnnnnnnnnnnnnnnnnnnnnnnnnnnnnnnnnnnnnnnnnnnnnnnnnnnnnnnnnnnnn

SEQ ID NO: 41126 - DNA, 405 bp, Homo sapiens
ggattttggtggcaactacaactttttagtttttatttcacaagtgtgtattgagatggctactgtatgctgaacactgccaataggtgtggttattccttcattttcagggataattttttcacttaaaggatttacatgatttgggtggttctgttttaagtagaggaggaaatttgaactctacatagttggattcttttccccctgaaaccaaagatttaaaattttgtcgatgttgtttatgttctaataaatatgctcaatccttttaaaaagacagcagtctgacaaagaccagaagtgtaccttgcttgatgtctgcaagtcaatacagttaatctaggcctagtttgcagattttaccccattgcctaacttaataggtgcttgcaaatgctcttt

SEQ ID NO: 41127 - DNA, 398 bp, Homo sapiens
  misc_feature (1)...(398): n = a,t,c or g
gcggagctagtttaaaatgcggatttccgggccctggagcttctaattcagtaggaagcacctgaaggaattctgacacagattgccatgcaccacactctgaaaaaccctagcctagaatattcttagtaattattgaatgtagccaggactacaggcacaagccaccgtgctcagctaatttttaattttgtagaaatggggttgggnnnnnnnnnnnnnnnnnnnnnnnnnnnnnnnnnnnnnnnnnnnnnnnnnnnnnnnnnnnnnnnnnnnnnnnnnnnnnnnnnnnnnnnnnnnnnnnnnnnnnnnnnnnnnnnnnnnnnnaatttttttttttttgagacacagngtcactttngtnacccaggctgaagtgcnntgncatgttctcggtt

SEQ ID NO: 41128 - DNA, 406 bp, Homo sapiens
ggatatttgtatttcaaaagatcttttaactttacacaagattcctaataggtcccacttaagtataagttaaatagcatatttcacttcatgtcaatttaatttagatataactttttagaaataatacttcctgtaactgtacttagatgacttccttagatattccagatgattctaagggaaaattaaatgcaaattattatgacatattatttaaccctattacgttatgattataatagcagagaccagtcatctttttaccagaatgttgtatgtttctgagtgatcagatgcattgctttctcaatccaaaaataacatgtactaataattcactgctatttcaaaaagttaggcttaggatgttcccaataactatacatccccaagagtaaggaac

SEQ ID NO: 41129 - DNA, 398 bp, Homo sapiens
  misc_feature (1)...(398): n = a,t,c or g
gcattgcattggtattaggggaactggtagactgtgctgttattagtaccttgcagtcagactggcattgttcaaatcccagctcagccacttgctggaagaaacaatggtcatgctgagcctggactggcaggactccagatcctgatgacatatcactgttttatgtagccctgttggactgatttcacttttttttagtctcaggatttaattcacaatgagnnnnnnnnnnnnnnnnnnnnnnnnnnnnnnnnnnnnnnnnnnnnnnnnnnnnnnnnnnnnnnnnnnnnnnnnnnnnnnnnnnnnnnnnnnnnnnnnnnnnnnnnnnnnnnnnnnnnnnnnnnnnnnnnnnnnnnnnnnnnnnnnnnnnnnnnnnnnnnnnnnnnnnnnnncag

SEQ ID NO: 41130 - DNA, 407 bp, Homo sapiens
  misc_feature (1)...(407): n = a,t,c or g
gnnnnnnnnnnnnnnnnnnnnnnnnnnnnnnnnnnnnnnnnnnnnnnnnnnnnnnnnnnnnnnnnnnnnnnnnnnnnnnnnnnnnnnnnnnnnnnnnnnnnnnnnnnnnnnnnnnnnnnnnnnnnnnnnnnnnnnnnnnnnnnnnnnnnnnnnnnnnnnnnnnnnnnnnnnnnnnnnnnnnnnnnnnnnnnnnnnnnnnnnnnnnnnnnnnnnnnnnnnnnnnnnnnnnnnnnnnagcagccatttcttgtttagtgtatagcagccttctggactcggtctccttgcatctactcttgcctccttatagctactagtgtctttttttcccccccccaatggaagttagatcatgtcactctcctattcaaaattcattcatggctactcttaaaataaaatccaaa

SEQ ID NO: 41131 - DNA, 400 bp, Homo sapiens
  misc_feature (1)...(400): n = a,t,c or g
gattctttattattatttttagagacagggtctctgttgcccatactggagtataatggcgcagtcatagctccctatataacctcagggctgaaacaatcctcctgcctccacctcnnnnnnnnnnnnnnnnnnnnnnnnnnnnnnnnnnnnnnnnnnnnnnnnnnnnnnnnnnnnnnnnnnnnnnnnnnnnnnnnnnnnnnnnnnnnnnnnnnnnnnnntgaggattgcttgaggccaagagtttaccttggcctcccaaagctttgagattacaggcttggccatcgtttccagccaatagcatttctatatgccaacagtgaacaatctggaagagaagaaagcacttcatttacagcagctatgangaatacctaggaatcaatttaacaaaaga

SEQ ID NO: 41132 - DNA, 411 bp, Homo sapiens
  misc_feature (1)...(411): n = a,t,c or g
gtttttagaaagagtatcacaaagaggaagtgtccttctcataacatcctatcatggggtgtataatagccacatgatgtcatggttgatattaaccttcatcacttggttagtgtttgctaggcttctccactgtgaagttagtgtttttccctttggaagtaagtcagtaaatctaactaccctcagatgagagagagcaggaattaacttcctcctccaggggatactaaaatatacataacataaaatttannnnnnnnnnnnnnnnnnnnnnnnnnnnnnnnnnnnnnnnnnnnnnnnnnnnnnnnnnnnnnnnnnnnnnnnnnnnntgtctccactgaaaccctgcactcataaaacactaagtgtaaagggaattcttacattaaattgtttggcataacatcg

SEQ ID NO: 41133 - DNA, 405 bp, Homo sapiens
  misc_feature (1)...(405): n = a,t,c or g
gnnnnnnnnnnnnnnnnnnnnnnnnnnnnnnnnnnnnnnnnnnnnnnnnnnnnnnnnnnnnnnnnnnnnnnnnnnnnnnnnnnnnnnnnnnnnnnnnnnnnnnnnnnnnnnnnnnnnnctcagaagtcataaagaagaaggttgacttgcctgacctcatgaacctgttggaaacagaagacaaatggtaccctaggagaaaccattggcaacatgtaagacagaaagattgtgtccacagtatataaaaaacttctacaaatcaataaggaaaaggctaaccacccagaagatatatgagcaaggaatatagacaggcncttcntaaagggaaacatacaagcagcagctggaagcctctagaaagagcagcagaaggacccagtaagcttgagagtgatcacc

SEQ ID NO: 41134 - DNA, 342 bp, Homo sapiens
  misc_feature (1)...(342): n = a,t,c or g
ggaaaaaatgtagatttcaaaatataacagcctatttggtattttttcttaagtaaaggaaaatgagaccatgtagaatctataacaaattttattgaacctttcctggaattttcaaagtttcacttaactctaacaggttcaaggaaataatgaaatattaaattcacagactttgaaaagcttattattaatatgtttaaagaactttctttaagcatcttaaatttttcttaancagntcancaacaaaatcaacaccctcactaaccaagtgaaatcaaactgacagattgtctgtatcagccttataatggtctccttgggtttatgatctgggga

SEQ ID NO: 41135 - DNA, 347 bp, Homo sapiens
gctcattattccgatattatgaaccaggagaagttaagggaccgatctaaaattcctcaagaagtaagacacaattctaagcttgaagaactccagtcctctccccgggtgaccctgtgttcttactaggactaccttatactaccttgactctgcagtaccttctttcaagcctaaagttacttgattacggacaagccatgaagagtaaaggggtgtggcccagagagatttccagttgaagaaagaatgattcaacagtcccattaaaacaaagagacattttctgcaggctcccccaggacacacatgctatggtctattgctgcggggtacatggagcccct

SEQ ID NO: 41136 - DNA, 348 bp, Homo sapiens
  misc_feature (1)...(348): n = a,t,c or g
gataccctacaacaattctatatatgtatacatactaggaaaactcctgcacatgtataaacaatatagatgtacaagaatacagcatacaacattgtttgtaataatcctaagctggaaacaactccagtggctacaaatagtaggatggataaaatatgttctgnnnnnnnnnnnnnnnnnnnnnnnnnnnnnnnnnnnnnnnnnnnnnnnnnnnnnnnnnnnnnnnnnnnnnnnnnnnnnnnnnnnnnnnnnnnnnnnnnnnnnnnnnnnnnnnnnnnnnnnnnnnnnnnnnnnnnnnnnnnnnnnnnnnnnnnnnnnnnnnnnnnnnnnnnnnnnnnnnnnnnn

SEQ ID NO: 41137 - DNA, 339 bp, Homo sapiens
  misc_feature (1)...(339): n = a,t,c or g
gttggaatatttcccatttcagattttcatattagagatactcagcctgtactaagttcttggcattcactatgagtacaatcttgggtcccatcatttttgccatgacacgggtagaaagggtttctttcctttttttttttttaaatnncttnattnatttttngaaaggnaanntngcttngtnncccagnnngnagngcagggccngnnncnnagctnnnngaanccttttttnccnnttttaangcanttntccngcctaanccnccngagaagcnggaacnacgggccacatnccaggcccactaagngtngggttttaaganaaaccaaatt

SEQ ID NO: 41138 - DNA, 166 bp, Homo sapiens
gtgctcatgtatcttgatctaattactaaataattacatatttatttacctgataaatatgtatctagttctacaaggtcacatttatgtggaagtccaaagtcaagtccttaggggataattttgctttggctcagttgttccctgcttcctttttttttttttt

SEQ ID NO: 41139 - DNA, 347 bp, Homo sapiens
gggaacgtctgaggttatcaataagctcctagtccagacgccatgggtcatttcacagaggaggacaaggctactatcacaagcctgtggggcaaggtgaatgtggaagatgctggaggagaaaccctgggaaggctcctggttgtctacccatggacccagaggttctttgacagctttggcaacctgtcctctgcctctgccatcatgggcaaccccaaagtcaaggcacatggcaagaaggtgctgacttccttgggagatgccataaagcacctggatgatctcaagggcacctttgcccagctgagtgaactgcactgtgacaagctgcatgtggatcctga

SEQ ID NO: 41140 - DNA, 429 bp, Homo sapiens
  misc_feature (1)...(429): n = a,t,c or g
gagggttctcccttcttattaccctactattccacaaggtattgtcccagcctctttggttgaagctgggttaccattacatctttgttctagcctgtgacaaagggacaaaaaggaggtggaggacaacaagcaattttcctttacacaagtgacacagtgttgcacatatcactcctgggcatgggtcactggaaggagttttgtcacatcgcctagtctagctgcaggggaggctgggaaatgtagtctgagtagccacacgcccagatgaaactccagggatgttctcttaccaaaaggaaaaaagggaaaatgaacactgggggacacttgtagtcacattagaagttgcacagtgaaagattggcnnnnnnnnnnnnnnnnnnnnnnnnnnnnnnnnnnnnnnnnnnnnnnnnnnnnnnnnnn

SEQ ID NO: 41141 - DNA, 426 bp, Homo sapiens
ggataaaaaaggctggcctccttctcccagcggctgctcccctggtgcacttgctgacatttgggggtgcatccattgagatcttcagtgccatgctaacttgaaacttgaagtgcttgccttcatcctctttgcgggcatggtaggagtgcccccctttttattgtttttactaaccactcaggccgcaggggccgctgcgaggctggcctgtccctggcttgtgaggaagctgagtgttcctcccaggagggcctgaggatggggccaccctgtgtccagagcttgctgtctgctcacgatgcctcttgtttgtgctattccttggaactgggaagagacagtgatcctctggtgtgaggctgaagaaatgccccggaagcattgtgaagatctgaggagagagtaccactgtagaaaatgtgt

SEQ ID NO: 41142 - DNA, 425 bp, Homo sapiens
  misc_feature (1)...(425): n = a,t,c or g
gagaagtttaagaggaagaatatatgggcactattagcctccttttgcaaagggaagagttaggattctgtccaaagcagagaaaagataagaagtgtatgtaaaggtaatataattaccaaacaatagagaggaagatgatgaagtgaaggggcataatgtaagtaagtccctcacctttcttaagtcagtagacattgtcttaaggttaataaattaagaaattatcaaagtagatgcagaactaattttttttcaagtctaggccgtgagggtgagaagagacttgcttttcaccataagctattctgcactgnttattaccaatgtgcatgtattacttngattttaaaaacaaaaagtttagggaataanaaataacctgnttgcaaaaggctatgtgtaagaaaatgttgggagataat

SEQ ID NO: 41143 - DNA, 422 bp, Homo sapiens
  misc_feature (1)...(422): n = a,t,c or g
gcggcacgagcggcacgagcatgcgttggaatctctacttgaagaatccagttatcttcaatattggattacctaggttctctttaacttagtcccttaaaattgtgcttcagaaaatcaattttatagagatgtagtttacatacaataaactgtgtctatttaaagtgcaccatcaatgagtgnnnnnnnnnnnnnnnnnnnnnnnnnnnnnnnnnnnnnnnnnnnnnnnnnnnnnnnnnnnnnnnnnnnnnnnnnnnnnnnnnnnnnnnnnnnnnnnnnnnnnnnnnnnnnnnnnnnnnnnnnnnnnnnnnnnnnnnnnnnnnnnnnnnnnnnnnnnnnnnnnnnnnnnnnnnnnnnnnnnnnnnnnnnnnnnnncggaatctcacatgttggccagcctagcttgactccggnctcag

SEQ ID NO: 41144 - DNA, 425 bp, Homo sapiens
  misc_feature (1)...(425): n = a,t,c or g
gcnnnnnnnnnnnnnnnnnnnnnnnnnnnnnnnnnnnnnnnnnnnnnnnnnnnnnnnnnnnnnnnnnnnnnnnnnnnnnnnnnnnnnnnnnnnnnnnnnnnnnnnnnnnnnngcctcccgagtnnnnnnnnnnnnnnnnnnnnnnnnnnnnnnnnnnnnnnnnnnnnnnnnnnnnnnnnnnnnnnnnnnnnnnnnnnnnnnnnnnnnnnnnnnnnnnnnnnnnnnnnnnnnnnnnnnnnnnnnnnnnattggagctgcagcctatggaagctggtgtcatgagctcttgcctagatggtcacagcacacacaaacctgcaggttaggtgactgaaggtcagaggttaccagtgagtggttgaagtgatagagagctgcagcaaactcttcatctgatgaacccttgagtccatctttgncacctc

SEQ ID NO: 41145 - DNA, 420 bp, Homo sapiens
gcagaacaaaacaaaaaaaacaaacacccaaggtacctatctccccaaaggacaaaaagaaatgctctcataagggctctgttactcagtcaacaaacatttactgagcacttactatgtgccaaggtaagtggtgagtgcggtagacgtgagagctccttgtcttgggttccagggtcaggcagacaccccacatcagtcccactagtgtggtgtgcactagtggaggtgcacacagaccagggacatctggcccctgtggcttatctgttaccagccctcacccacccccagtctctgtctattgggactgtatccagggtggaaaaaagaggggccagagggtcccatctctgtgccccccacccacccgtcttcacttctgctcagaaacaagccaacgacctggtggccacactg

SEQ ID NO: 41146 - DNA, 427 bp, Homo sapiens
  misc_feature (1)...(427): n = a,t,c or g
gaatgttctcaacttccacgcccaggtcttgtagcttctgttcccatggaagggacccatccgttatgtaaagagggccaggctcttctggagggagaagctgtgtggagcacaaccagccccaaagtgccacacgtatgagttaggcagtcttgagtccgccagtcctaatggagccactgctacgctgagtcctactcaaattcttgacccataaatgtgtaagcaaataaaatagtggtggttttaagccaccaataagctttagtgtggtttgcatgtggcaatagataatgaatacagtcacaattctagctgctaatcagagtctagctgctaaaaaaatttaggaacttttataaaaaacagattannnnnnnnnnnnnnnnnnnnnnnnnnnnnnnnnnnnnnnnnnnnnnnnnnnnnn

SEQ ID NO: 41147 - DNA, 418 bp, Homo sapiens
gctctcagtagaagtacagtgtcttactaacatttggtgttgcttcatagaatatgtggacttggatgttattggtgaacttttccattcatttttaacaaatcattgtctgccatgtgtcaaatactgttccaggcactgagcccagtgatccctgccttcactaaaggcacaggctcttgggatggttgcttagtaaccaaacacagttatcaagtgggcttagttaattgaacattttttctgtatattcaaggaaaatatcaagagactgagtggacccaaaaatacagagtctgtcaggattgcttttagtcctggctagccaagcaaccctgcatctctcccagttagggaaggaagggaagtgaagccctgaagcatcatttgtggtttaaatgagaatgccttggtattt

SEQ ID NO: 41148 - DNA, 425 bp, Homo sapiens
  misc_feature (1)...(425): n = a,t,c or g
gccaggcaccaatctcaatagagcattcatgtaaatgaacaagaataaggtttctatgctatttcttccaggctttgagagagtagacatttctcttctttctgatttttagctctgagtattggaaattccaaaagaagcaatactcattggagaaatctttatttgtggcttataatcataaggatggttagacacattttcttaaaggtaacaaccagtttatattctccattgccccttcacccttggtgatataatttactgtaaggatatttttggaaggctaggtcttcagccaaggatatttcttcttctgattctccctttctcagctttagttcctctatttatatattaannnnnnnnnnnnnnnnnnnnnnnnnnnnnnnnnnnnnnnnnnnnnnnnnnnnnnnnnnnnnnnn

SEQ ID NO: 41149 - DNA, 416 bp, Homo sapiens
  misc_feature (1)...(416): n = a,t,c or g
gagatatttgtagcagtcctttggaattggaggtgggatttcttttaaatggttaatggtgttcactttcttatactttgtgaataaaatgcatatcttatatatctcacaatcctgattgaagattggaaaatccaaaagtgaatggccaaaagttgccaggcctttattctcactagattttacaatgatttgcagatctttctagcacactttgaaactttggttttagattggacaagacagttttcttctctaagatcagaattaacgcnnnnnnnnnnnnnnnnnnnnnnnnnnnnnnnnnnnnnnnnnnnnnnnnnnnnnnnnnnnnnnnnnnnnnnnnnnnnnnnnnnnnnnnnnnnnnnnnnnnnnnnnnnnnnnnnnnnnnnnnnnnnnnnnnnnnnnnngtatgg

SEQ ID NO: 41150 - DNA, 390 bp, Homo sapiens
  misc_feature (1)...(390): n = a,t,c or g
gtttacttagataacgtaactcaatttagactgtttgaactacataaatgtgcatgtaagcaattaagtcttatttgggagaggcaaatgtatgtccttaggtgttttttttttttngaaagggagnntcgntntgtngcnntcnaccntnggnancanancaaannttngtntnaaaantaaaaaaattaaaaaaaaaaaaattnancngnnttaannttnnccnggggggntngtaaaannnnaantggcccccccncccnttngtnantncagaaaatnaanttnagnccccngnanttngntttttaancnagttnnanggaaaggctaanccngttnngggcccnctttgnngccagntttttnaaaagtngtnaaagncgggcg

SEQ ID NO: 41151 - DNA, 392 bp, Homo sapiens
gcggcacgaggcatactgcccaggccactgtgtgtttttgactggggtgcatatccttgacttatttttatttttttaaattttcattcttgactttctgtccctaatgggaatcactgtctttcttctttctcatcaagaactgaaaactacaggactaagttatcaaacagggtaccacagagttcttatcgtttgatccagtgccaggtggagttgggagggcaggaaagacaaaagttctgtgacttcagtgaggccttttctgccttggaaaatgatctttagatgtggagatggcctgaaggacagcttcataatcttggcagtcggttcaagtgaagacagacaagggaatgaggtttcctagctttgagtggcagatgctgaag

SEQ ID NO: 41152 - DNA, 238 bp, Homo sapiens
gaagatagaaagattttctttattaatgaccccaaccgtatttctttagatacaggagttttgaactcaaatacttaggagaaaacaagttatgactgcattatcctgcaactcattaccagtaatatattgcaaagcgaaacagcttggaaaagagggtgggagaaaagggaagtgagggagggaagataaagaaaaggaattaagttgatcaagtggaattctttttttttttttt

SEQ ID NO: 41153 - DNA, 375 bp, Homo sapiens
gatggaaagaaaggaagaaaggcaggcaaaagccccagacaggccaaaaccttcatccttcatgcacccaacctgtaccaaacaccagcatggcctggctgtgagtgcacagcagatggaggtttgctgggcagagacactgggctggcctagacactgcctttggtgataccctaaaccaaaggggccagtcccacagtaagaaggagaccactactactcctgctgccctcctccccccaccttgcctagtttacaagacaggaggaaagagagaaagcaaaaagttagaaaacaaaacaaaacagaagtaagataaatagccagaagaccttggcgacaccacccggccctggtagttaaaaaaaagtaaca

SEQ ID NO: 41154 - DNA, 371 bp, Homo sapiens
  misc_feature (1)...(371): n = a,t,c or g
gtcgatattaactatcactataggactacagggtaattgcataatagtactgatttcagcaatagctttaatagcagcagttcattgtaaatttggtaaagtatgagtaagaaaatcatgtgtataaagcactaattctgtgatctgtttaactaaatgaactaaactctgggttataggaaactttattttacgcaaagaaaggtggaaacactggctcctttgtaacagagaatgacctgtgttgaccttggagaagcancaggacagtagaggcagataccacaggaaccccagngacagttcttaccacagaactgaagtcatggggacttacggcattgggtgctattggatttgcccagacacga

SEQ ID NO: 41155 - DNA, 390 bp, Homo sapiens
gccacaatgatattgcattgctcaagttaaagccagtggatggtcactgtgctctagaatccaaatacgtgaagactgtgtgcttgcctgatgggtcctttccctctgggagtgagtgccacatctctggctggggtgttacagaaacaggaaaagggtcccgccagctcctggatgccaaagtcaagctgattgccaacactttgtgcaactcccgccaactctatgaccacatgattgatgacagtatgatctgtgcaggaaatcttcagaaacctgggcaagacacctgccagggtgactctggaggccccctgacctgtgagaaggacggcacctactacgtctatgggatagtgagctggggcctggagtgtgggaagaggccag

SEQ ID NO: 41156 - DNA, 392 bp, Homo sapiens
gttttttttcagtgttcaggaaaacactttaattgctacttaatttacatcataatcactgggttacagctttagctcattggcaattttggaagcaatatttttgaaggctatggatgtccccgatatccgcttaaaccggaccccgttcagagacagtcttggcagcttgcacacttccatttcccactgcacgaggttctccgcgtgcccatctccgtggacgcagaagagcaagaagcgctccctctgctcatagtcgcagttattggcgtccaacactttgcggatttcccgcatcatgtccccgggatccattgaactagtggttttcatgctccaggtgaagcgtagggatcgaggctttgcttctttggtttcatctttttgct

SEQ ID NO: 41157 - DNA, 392 bp, Homo sapiens
gacaaaaacctggtgcttaggggtggatcctggggtggctcttcagtctgccagttaagcagggttgggcaaggaaaagttacagattacatggaaagtcaacaaaccacggtgcagagaagctgttgaagtcagcgtgccctgccctggctctgtgtctctgaccagggcagggtcagagtgcccaagtgcatgtgggtaaggcacatgtggatgaatgtgtgtctggacacgtgattgtttgtgtacacttgcagttcttgagcctgagcctgtctgtgtgagtaggcaaatacggatttaccctgtgtccccatgagactaaggagggagctactctccctatctggtgggtgctactccgtgtagacatgaactggggataagtagga

SEQ ID NO: 41158 - DNA, 407 bp, Homo sapiens
  misc_feature (1)...(407): n = a,t,c or g
ggaaatttaaaaaaatttttttcatctttagcattaatggcaaatatttagagctatatttaatggaagtatatgtgaattggtggtataaacagatttttccaaactctttttacttgtaatttctgtggctgtaacaacttttactagcctcttaggagtttcttaaatcctttttccccattttctttggtctatgataaagaagtaatctgaagtagnnnnnnnnnnnnnnnnnnnnnnnnnnnnnnnnnnnnnnnnnnnnnnnnnnnnnnnnnnnnnnnnnnnnnnnnnnnnnnnnnnnnnnnnnnnnnnnnnnnnnnnnnnnnnnnnnnnnnnnnnnacnnnnnnnnnnnnnnnnnnnnnnnnnnnnnnnnnnnnnnnnnnnnnnnnnnnnnnnnnnnnnn

SEQ ID NO: 41159 - DNA, 383 bp, Homo sapiens
  misc_feature (1)...(383): n = a,t,c or g
gggctcggcgtggtattcttccaggatcttatagtgcagttctgaagacaaagaagactctttctatcctaggaattctaagaaaaaatgtaaagatttttcaaaacaccaggtgttttgttttgttttgagacgnnnnnnnnnnnnnnnnnnnnnnnnnnnnnnnnnnnnnnnnnnnnnnnnnnnnnnnnnnnnnnnnnnnnnnnnnnnnnnnnnnnnnnnnnnnnnnnnnnnnnnnnnnnnnnnnnnnnnnnnnnnnnnnnnnnnnnnnnnnnnnnnnnnnnnnnnnnnnnncgtctnnatanannnanannanggannangannannaagncccngngnggnggccccatncctgnantccnannctttcgtaggccagg

SEQ ID NO: 41160 - DNA, 388 bp, Homo sapiens
  misc_feature (1)...(388): n = a,t,c or g
gcagttaaccaagcagggtggtgaagcagcccattctcagacaggtcaaggacaggcctcgctgcttttgagttgttggggagggaggggctttcggtaactggccacctgcgcccacccccacccctccgccccagctccttctgcctggtttgggtgctgccccccacccaggaggcagggagtgttctgggttgctaggctggcagggatctggggcacagcgaatgttttgatggttgtaccccagttagtggaagagtgctttgggaaggcagtgnacggctgtggaaggagctctgggcttgaagtcatcagacctggcatggcgttaaagcatcttcacttccgcctggctgaccttgttcagctggcctgggactcctgc

SEQ ID NO: 41161 - DNA, 407 bp, Homo sapiens
  misc_feature (1)...(407): n = a,t,c or g
gaaatgtctttgactccaagaagaaagtgaaattaaccaatgcggaaggagtagagtttaagctttccaagaaacaactacaagctatagaatttaacaaagctttacttgctatgtacacaaaccaggctgaacaatgccgcaaaatatctgccagtttacagtcccaaagtcccgagcatctcttacctgtgttaatccaagctgcccagctctgccgtgaaaagcagcacacacaagcaatagagctgcttcaggaattttcagatcagcatccagaaaatgcagctgaaattaagctgaccatggcacagttgaaaatttctcaaggnaatatttctaaagcatgtctaatattgagaagcatagagganttaaagcataaccangctggtatctgcgntagt

SEQ ID NO: 41162 - DNA, 393 bp, Homo sapiens
  misc_feature (1)...(393): n = a,t,c or g
gttaagatcctaattaagaaattacatgcnnnnnnnnnnnnnnnnnnnnnnnnnnnnnnnnnnnnnnnnnnnnnnnnnnnnnnnnnnnnnnnnnnnnnnnnnnnnnnnnnnnnnnnnnnnnnnnnnnnnnnnnnnnnnnnnnnnnnnnnnnnnnnnnnnnnnnnnnnnnnnnnnnnnnnnnnnnnnnnnnnnnnnnnnnnnnnnnnnnnnnnnnnnnnnnnnnnnnnnnnnnnnnnnnnnnnnnnnnnnnnnnnnnnnnnnnnnnnnnnnnnnnnnnnnnnnnnnnnnnnnnnnnnnnnnnnnnnnnnnnnnnnnnnnnnnnnnnntnggnattccatatttgncncccttnggnngggnaancctggcaacntaccntttngaggncctgac

SEQ ID NO: 41163 - DNA, 392 bp, Homo sapiens
  misc_feature (1)...(392): n = a,t,c or g
gcgaaggggtctccaatcccaaatagacttgctctccaattccaaaagactctttaagcagcagtgacacttcaaaaccatcgaggtttagatctcctcactgccgagaaaggcggcctgtgtatctttttagaagaggagtgctgtttctatactaaccagtcaggactagtacaagatgctgctggacgaataaatgaaaannnnnnnnnnnnnnnnnnnnnnnnnnnnnnnnnnnnnnnnnnnnnnnnnnnnnnnnnnnnnnnnnnnnnnnnnnnnnnnnnnnnnnnnnnnnnnnnnnnnnnnnnnnnnnnnnnnnnnnnnnnnnnnnnnnnnnnnnnnnnnnnnnnnnnnnnnnnnnnnnnnnnnnnnnnnnnnnnnnnnnnnnnnnn

SEQ ID NO: 41164 - DNA, 397 bp, Homo sapiens
  misc_feature (1)...(397): n = a,t,c or g
ggcgcctccttaaagttgccatatagatgcgaactgctcaacacacagatctcctactccatccagtcctgaggagccttaggatgcagcatgccttcaggagacactgctggacctcagcattcccttgatatcaggccccttcactgcagagccttgcctttcccctctgcctgtttccttttcctctcccaaccctctggttggtgattcaacttgggctccaagacttgggtaagctctgggccttcacagaatgatggcaccttcctaaaccctcatgggtggtgtctgagaggcgtgaagggcctggagccactctgctagaagagaccaataaagggcaggtgtggaaaaaaaaantgtncaantncaanctgnaaanaaatgntntgaa

SEQ ID NO: 41165 - DNA, 401 bp, Homo sapiens
  misc_feature (1)...(401): n = a,t,c or g
gtgagactgcataggnnnnnnnnnnnnnnnnnnnnnnnnnnnnnnnnnnnnnnnnnnnnnnnnnnnnnnnnnnnnnnnnnnnnnnnnnnnnnnnnnnnnnnnnnnnnnnnnnnnnnnnnnnnnnnnnnnnnnnnnnnnnnnnnnnnnnnnnnnnnnnnnnnnnnnnnnnnnnnnnnnnnnntaaaattaagaaccattcccaaagaaaatccaggcccaggtggcttctctggcaaattctatcaaacatctgaggaaaatcagtactaatattacatgaaccttcacacctcttgggctggtatgagaattaagtgaaaatttgtaaagaaattagcacattgtgttatatgtacacagtaagcaccatgtaaacatttgttaaataaattccagtcaat

SEQ ID NO: 41166 - DNA, 400 bp, Homo sapiens
  misc_feature (1)...(400): n = a,t,c or g
gaatttgacaaattcctaggttaaacaggtttcttcaccgtagaagtcagaggttctaataataaatgtcaattgcatatagctaaaatttttctgaatttatgacttcagtgtatacttttataatcagtgtgggacataatacaatttggaaaatattgcttgaatactatttgaagattgaaagtataaggaacttgnnnnnnnnnnnnnnnnnnnnnnnnnnnnnnnnnnnnnnnnnnnnnnnnnnnnnnnnnnnnnnnnnnnnnnnnnnnnnnnnnnnnnnnnnnnnnnnnnnnnnnnnnnnnnnnnnnnnnnnnnnnnnnnnnnnnnnnnnnnnnnnnnnnnnnnnnnnnnnnnnnnnnnnnnnnnnnnnnnnnnnnnnnnnnnnnnnnnnnnn

SEQ ID NO: 41167 - DNA, 349 bp, Homo sapiens
gatggaaaggactagacattgtatgtatgagacttttctcccccttttcaacttagaagaatgagaggtctgggttctgacctgtgctaaatctgtgtggcccaataaagagcacttgcttgaaattcagacatgggtctgaatctaggctctgccttgactggatgaccttgggtagctattgaattctgctgctttggcttcttccagataataatagtattttcttgtctcctggggtggctgtaagtagctcctcatcccaaccttccttcttctcctgcagaatatatggatttcagagaggcacaagaaggaactgatgtcatttattgaaaagcttcataat

SEQ ID NO: 41168 - DNA, 356 bp, Homo sapiens
  misc_feature (1)...(356): n = a,t,c or g
gcccacacagccggctctgcatgaattgctctttnnnnnnnnnnnnnnnnnnnnnnnnnnnnnnnnnnnnnnnnnnnnnnnnnnnnnnnnnnnnnnnnnnnnnnnnnaggagacacggagacacagagacacaaagacagacacacaaaaaagagactgtcatgtgaaaagacagacacacagagagaacatcgtaagaagacagaggaggagattggagagaagcaactgtaagccaaggaacaccaaagactgcaggaaaccccaaaaactaggaacagggcatggaacagattctacccatattctcaggaagagtccctgccaacacctggaattcaagcttctggattcca

SEQ ID NO: 41169 - DNA, 392 bp, Homo sapiens
  misc_feature (1)...(392): n = a,t,c or g
gctggaagaannnnnnnnnnnnnnnnnnnnnnnnnnnnnnnnnnnnnnnnnnnnnnnnnnnnnnnnnnnnnnnnnnnnnnnnnnnnnnnnnnnnnnnnnnnnannnnnnnnnnnnnnnnnnnnnnnnnnnnnnnnnnnnnnnnnnnccactanccatataccaatgatggcnnnnnnnnnnnnnnnnnnnnnnnnnnnnnnnnnnnnnnnnnnnnnnnnnnnnnnnnnnnnnnnnnnnnnnnnnnntatntattacctcnnaagtttttttcttncangnntttntgaccttttaccctncgnctaccctanccccnattnnganggcactggcccccanaggcntnancccgctnaancccnaaaaagnccattctaancccatncgatta

SEQ ID NO: 41170 - DNA, 422 bp, Homo sapiens
ggatcactattttattttaaaacagaataaaaagcagcttcaacttggcagttctcagggctgcttggggccaccaaaggcacctccagaacatggctccttgtgggcttgggctccggctgctatgggatcagggaccacactggaaacctgccattggcaggtggctgctctgttttctgcagagactccctcctccagcctgactggcatcttctctgggaacccacagagaacagatctgccctctggggtgacgaggaggcctcaggcagaaatctccctcacactgtggatactgtcatatatccacagaattctctcctgatagctgatccccacagtgaccctgcaaacaattgtcatttccctttgataaacgtggaaactgaggacagggagttggaacagccagtacagct

SEQ ID NO: 41171 - DNA, 423 bp, Homo sapiens
  misc_feature (1)...(423): n = a,t,c or g
nnnnnnnnnnnnnnnnnnnnnnnnnnnnnnnnnnnnnnnnnnnnnnnnnnnnnnnnnnnnnnnnnnnnnnnnnnnnnnnnnnnnnnnnnnnnnnnnnnnnnnnnnnnnnnnnnnnnnnnnnnnnnnnnnnnnnnnnnnnnnnnnnnnnnnnnnnnntaaacatttgttgcacatccacctgctttccattgaggaggatatagaaaatatacatctcctgtttagtaaataaaatctctgccatcgccatatacaagtttagaatttagtaaatgacacaacacgaacaaccagtaaagaatcccagacaattctgttcattcaaaattacatgcgatatcncgcagtggccaggataaagacatggatcagaagaaatggaaaggccttcaggacacaaggggcaacaaaggaagggtggct

SEQ ID NO: 41172 - DNA, 409 bp, Homo sapiens
  misc_feature (1)...(409): n = a,t,c or g
gaactggaagaacaagaggcaggctgggcctcagggaggatcatggagtcctcctgggtagcagaggggtagcacgtgaccaacagtggtgaggcaggcaggcattgcccgagactggccagaccccctctgttctgctggcatctgcagggtatacagaacctttcactaggcacctgggggccgcctggcatgatggttctgattaaggtgtatgatgggacttgggagaaagtactcccgggtgactatgatgtgcacctgattaagaaacactgattnnnnnnnnnnnnnnnnnnnnnnnnnnnnnnnnnnnnnnnnnnnnnnnnnnnnnnnnnnnnnnnnnnnnnnnnnnnnnnnnnnnnnnnnnnnnnnnnnnnnnnnnnnnnnnnnnnnnnnnnnnnnnnnn

SEQ ID NO: 41173 - DNA, 376 bp, Homo sapiens
  misc_feature (1)...(376): n = a,t,c or g
nnnnnnnnnnnnnnnnnnnnnnnnnnnnnnnnnnnnnnnnnnnnnnnnnnnnnnnnnnnnnnnnnnnnnnnnnnnnnnnnnnnnnnnnnnnnnnnnnnnnnnnnnnnnnnnnnnnnnnnnnnnnnnnnnnnnnnnnnnnnnnnnnnnnnnnnnnnnnnnnnnnnnnnnnnnnnnnnnnnnnnnnnnnnnnnnnnnnnnnnnnnnnnnnnnnnnnnnnnnnnnnnnnnnnnnnnnnnnnnnnnnnnnnnnnnnnnnnnnnnnnnnnnnnnnnnnnnnnnnnnnnnnnnnnnnnnnnnnnnnnnnnnnaagtgattatcccacctcacttcctgagaagtaactgggattacaggcataangccacngcacctggcat

SEQ ID NO: 41174 - DNA, 373 bp, Homo sapiens
  misc_feature (1)...(373): n = a,t,c or g
gctggatgatctggtttataatgaacattagccaactcaaccctgccctgcccaaggctgataatgagatggatactagaacactgtttaacttaacagtaacatacacattcacaaactctttctctttgtagtacgctggatactacttttatttttatttaattattattattattattattattttggagacagagtttcattctgtcgcctagtagtggcgcnctcttggctcactgcatcctntgcctctnnggtntaancnagnntcccgngtaanccnaccgaggagctgngattatcgnnanccaccactgnnccggnntaangntantgtttttagtaganacagggattnnccangtnggcc

SEQ ID NO: 41175 - DNA, 379 bp, Homo sapiens
gaagaaacctggttgccagttcgtcatcaaccactcgactgtcacttgacattgtgactgttatgagctggcgctgctgcagtttggcatttccctcttcatcctcagtgagcttcagcacaggtcggaacctcccaaccgccaaaatgcaggcctgaggagggttaatcactgcagtaaattcgtcgatgccaaacatccccaagttggaaatactaaaagatcctccttggtattcttcaggcaacaattttccatctcttgctttctttgatagagcctttacagagtcagcaatttcctggatacctttagcagcagcatcttttatgattggagtaagtaaagcctttatctgttgccacagccactgaaatgc

SEQ ID NO: 41176 - DNA, 336 bp, Homo sapiens
  misc_feature (1)...(336): n = a,t,c or g
gcctatgcatactttgctttttccatcccataacccattagactaagtgactaaaggacgagatgggtgggtggcattaacagtgtgaatatgctgaacaaagggatgacatgtcccattcgagatttcatcacactagtcagaatggcacacaatttaaaagtcgtgaattgnnnnnnnnnnnnnnnnnnnnnnnnnnnnnnnnnnnnnnnnnnnnnnnnnnnnnnnnnnnnnnnnnnnnnnnnnnnnnnnnnnnnnnnnnnnnnnnnnnnnnnnnnnnnnnnnnnnnnnnnnnnnnnnnnnnnnnaanaaactaccgggtgtggnggncntcct

SEQ ID NO: 41177 - DNA, 375 bp, Homo sapiens
  misc_feature (1)...(375): n = a,t,c or g
gctagaggctcctccctaggaccctttccttctctcgttaggaggggagagggcgtgagcagcagtgtgattctggcgggacagcttggcctctggcagccctgccttctggaagtggcagacagtgtaggagtctgagccagcctagactgggtgggaagggaagacagttgggagcagcagtctgcccacctggctccccaagcatgtcctgcccttgagccttggtcctgtctttgggactgtcctgtggttcccaaactagtcctcagcgagggactctttaaggccnagggctncctccncanggctggcaagtgtcntttccatttgtgtanganttgnccaantanncccnnaganagngtngaggag

SEQ ID NO: 41178 - DNA, 368 bp, Homo sapiens
  misc_feature (1)...(368): n = a,t,c or g
gggaagaaggcagtggtagtggatatcacagagcattgccattgacatcaaactctatggcgtggccttatcgattgcagtgggaagttgttgaagacttgaagncgtaaatcntgctcnnatcataccttnttgntcctctttgtgcacagtacacncacnctcncacacncacnnncacacacncncnttntnnncaaactctntnttgacagggctantatctnncttactcccttcnatcngnnntntntnatgtcctganntgcncattttncttnatgtgaancnccnatgncatgtcnttntcntccccntgatcttanatncnnnncttttnnnctttccttccnntctttattnntctc

SEQ ID NO: 41179 - DNA, 405 bp, Homo sapiens
  misc_feature (1)...(405): n = a,t,c or g
gcggcacgaggtnnnnnnnnnnnnnnnnnnnnnnnnnnnnnnnnnnnnnnnnnnnnnnnnnnnnnnnnnnnnnnnnnnnnnnnnnnnnnnnnnnnnnnnnnnnnnnnnnnnnnnnnnnnnnnnnnnnnnnnnnnnnnnnnnnnnnnnnnnnnnnnnnnnnnnnnnnnnnnnnnnnnnnnnnnnnnnnnnnnnnnnnnnnnnnnnnnnnnnnnnnnnnnnnnnnnnnnnnnnnnnnnnnnnnnnnnnnnnnnnnnnnnnnnnnnnnnnnnnnnnnnnnnnnnnnnnnnnnnnnnnnnnnnnnnnnnnnttctgtgttgcatgtggtactttttgtgtgtgaggagtccagtgtgaagattcagacttcaggcagccacttgtacaagcactgcctgttgctctctg

SEQ ID NO: 41180 - DNA, 390 bp, Homo sapiens
  misc_feature (1)...(390): n = a,t,c or g
ggtaaatctccgcagtaagtacagttcaacgactgagaacattgtgatgatggtgacctttaagcatctgaattctgatgatacttatttatctataaatgagaatgacaatacttagattattaggataatggggaggactaggggaggactagagtatataaagtgcccggaatcatcctgggtgctgtcttagtgtatcagatatatttcaaaccttagtatttgtggcctttgaatttaaacagttgctgnattagcttcaattgttagagatagtgtccatgagtggaatatgtcagctagaagctactccttttagatnctccacattctgaaaggtacgactatntnttctttttgatnctgntcttcctctcctananggag

SEQ ID NO: 41181 - DNA, 403 bp, Homo sapiens
  misc_feature (1)...(403): n = a,t,c or g
ggtattcaaggacttcagtgagctagaacctgacaagtttcagaataaaaccaatgggatcactccaaggcgctggctcctactctgcaacccaggacttgcagagctcatagcagagaaaattggagaagactatgtgaaagacctgagccagctgacgaagctccacagcttcctgggtgatgatgncttcctccgggaactcgccaaggtgaagcaggagaataagctgaagttttctcagntcctggagacggagtacaaagtgangatcaacccatcctccatgtttgatgtccangtgaagaggatacatgagtacaagcgactgctcttgaactgtntgcatgngatcacgatgtncaaccgnattangacagaccctantaagttantcgtgcca

SEQ ID NO: 41182 - DNA, 412 bp, Homo sapiens
  misc_feature (1)...(412): n = a,t,c or g
gccatgagcttcaataccctggtattcagtgtccactcccctaagggattccccaaaccccaatcatctcagctctctgggacactgccctgctagctcccaaaccgagccccaggcaccccagcaagcattaggccaacccgccaccaagctactcccacacccgcagccacccagccccagcccagcagcaaaccttgagtcagcgccaccagcctctgcacctctcctcctctgcctccactctgcccagctgggggaagctcaggcaccacctgaataagaaaccccagagtccttaccgatggtcagcgtgtcactctcatggtcgctgcccaggccagcatcagaactgctctgagaaacactgtcctcctgatggcaaanaaggaggtgagaacggctcanggac

SEQ ID NO: 41183 - DNA, 329 bp, Homo sapiens
gagggcttgctctaaatcgtttagaggataacaggatctagagatgctctctgcttgacaacaaaagtcagggtgcagtcggtccacccttgactgctcttggcttggtctctaccctcactacctcagttctcaataacttagtgaatcactgccctcctcaaagccatttccactcagctctttccagagaattctcagttttatgagacgggaaactttatttcacgagaaagcctcattgtcagaagtatcttcattcaatgggcacaatatgctgtgtatctcaccaggtagctgtcaggggccaccgagagtgtcgttaaaaa

SEQ ID NO: 41184 - DNA, 346 bp, Homo sapiens
  misc_feature (1)...(346): n = a,t,c or g
gnnnnnnnnnnnnnnnnnnnnnnnnnnnnnnnnnnnnnnnnnnnnnnnnnnnnnnnnnnnnnnnnnnnnnnnnnnnnnnnnnnnnnnnnnnnnnnnnnnnnnnnnnnnnnnnnnnnnnnnnnnnnnnnnnnnnnnnnnnnnnnnnnnnnnnnnnnnnnnnnnnnnnnnnnnnnnnnnnnnnnnnnnnnnnnnnnnnnnnnnnnnnnnnnnnnnnnnnnnnnnnnnnnnnntatggtatttctagntctagatcccttangaancgnccactgatntctatactntctactcttaanactgnactccttctancnnatnantttacnaanctnangnntcatccctg

SEQ ID NO: 41185 - DNA, 345 bp, Homo sapiens
  misc_feature (1)...(345): n = a,t,c or g
ggcagcagatcagttgannnnnnnnnnnnnnnnnnnnnnnnnnnnnnnnnnnnnnnnnnnnnnnnnnnnnnnnnnnnnnnnnnnnnnnnnnnnnnnnnnnnnnnnnnnnnnnnnnnnnnnnnnnnnnnnnnnnnnnnnnnnnnnnnnnnnnnnnnnnnnnnnnnnnnnnnnnnnnnnnnnnnnnnnnnnnnnnnnnnnnnnnnnnnnnnnnnnnnnnnnnnnnnnnnnnnnnnnnnnnnnnnnnnnnnnnntacaggtgtgagccagcgtgcccggtctgccatatgcagtttactggagagacgaactgctcactggaagatgattaacatctcagagttttta

SEQ ID NO: 41186 - DNA, 339 bp, Homo sapiens
  misc_feature (1)...(339): n = a,t,c or g
gaagagaaatactgaaaggactcgattatctccattcggagaagaaaatccacagagacattaaagcggccaacgtcctgctgtctgagcatggcgaggtgaagctggcggactttggcgtggcctggccagctgacagacacccagatcaaaaggaacaccttcgtgggcaccccattctggatggcacccgaggtcattaaacngncgggctatgactcnnaggctgacatntggtccctgggcntatcngctattgaacttngcannagggnanccncctcattccgagctgnnccccntgaaagnctcatnccttcantntnnaacnnnncctcc

SEQ ID NO: 41187 - DNA, 321 bp, Homo sapiens
  misc_feature (1)...(321): n = a,t,c or g
ggtttctccatgttgnnnnnnnnnnnnnnnnnnnnnnnnnnnnnnnnnnnnnnnnnnnnnnnnnnnnnnnnnnnnnnnnnnnnnnnnnnnnnnnnnnnnnnnnnnnnnnaagtttttntnaaacttncatttacagngatgaaaacattntatgttagcccatgtaccatactgattcatgnantgtattaacnnnnaaatngaatctnaagncacntgntcanattncnnnnactnccnatgaagatnccnnngctcacacnggctgatatgactnntatccntacccanattngacnngnacctgctctgggnactatt

SEQ ID NO: 41188 - DNA, 358 bp, Homo sapiens
  misc_feature (1)...(358): n = a,t,c or g
ggatatttgctcagaagctgcataaggcacttgtgaagttactgctcccattggagtatatggcgatctttgccttgtgtgccaaagatcctgtgaaggagagaagagcacacgcacgacaatgtttactgaaaaatatcagtatacgcagggaatacattaagcagaatcctatggctactgagaaattattatcactgttgcctgaatatgtantnccatacntgantcacctgctagnccatganccnnatntnaccngagcacgnnatngntgancnnntcnngcctgnnagngngncntcccnnannnncnnncccccnannnnnnggnnncgnnnannngnnnccagagaca

SEQ ID NO: 41189 - DNA, 360 bp, Homo sapiens
  misc_feature (1)...(360): n = a,t,c or g
gcagaaactaaacaaattgatatggctggaagtaagttctttgcagtggaaagaaaaataacatttgttatgaatataacatttagtttgtgaatttatttctaaagtatttcctcaattagcttaaagttgagttcctccagtatactgaattccgtcttttctgaggccttaccaattgctactgctttgcttgtaatgctttcccactcccactccatcctagctaatttacttgactttaaactgttatcctaatcctaactttatttgcnaggtatttttganccccatgacnanctntactgnnngacttctcaaaantttattgnaagagggnacnttgngnttctnnntagg

SEQ ID NO: 41190 - DNA, 156 bp, Homo sapiens
gggaattaatacgtcctcccaatcagaagtaaccagctttcctctctttgtttggctgagcctctgcagcctgagctcatgatatcacaggcagttcgcttaaaagcaggaaggcggcattttcacctgaagataaatttccaatgggattttctg

SEQ ID NO: 41191 - DNA, 374 bp, Homo sapiens
  misc_feature (1)...(374): n = a,t,c or g
ggatagtctatgctgtatgtgacatttatgtaaacaaataatggcatctgttactttggagagtatcaccttggattacaaaaaggtgataaaagcatttacgaatttataataaagcacttactaaggtaattgtttatacattttttaggtctgtnannatncttatcctcttntacaattagacttgttgatctanggaccattctctttccttacgataactatgtnactatactgacctacattccattaatctgaaatatagctatgancgcatcttatncntnngtgcttactnncacgncnctanncactgacctagctctactatgtctgcgccctatcacacnngntgnnaacaccctgncata

SEQ ID NO: 41192 - DNA, 371 bp, Homo sapiens
  misc_feature (1)...(371): n = a,t,c or g
ggggttacaggtatgagccactgtgcccagcatcttgtctctacagaaaattaaaaaagaaagtaaaagaaattagctgagtgtggcacctgtggcctagnnnnnnnnnnnnnnnnnnnnnnnnnnnnnnnnnnnnnnnnnnnnnnnnnnnnnnnnnnnnnnnntgngccnctgtgctncancattgncagcnnnngatantnnttgattgntntnangactttcnncgactnanacantgtncctgnacacttactgggaccnanncactatgannatgannnctnnntatccnnaccattctnnctaannctatnnnnctctgtgnntgctctgntcnanctctgcactggnggggantccngaatccc

SEQ ID NO: 41193 - DNA, 367 bp, Homo sapiens
  misc_feature (1)...(367): n = a,t,c or g
gggagactgcctctgcacacacacagagactgcccctacacacacacacagactgcccctgcacacacacacacacagaaactgcccctgcacacacacacattgctcctnnnnnnnnnnnnnnnnnnnnnnnnnnnnnnnnnnnnnnnnnnnnngcacacacatacagagactgcccctgctgtctcttcttgcttttggtgaagctgccagtgggttgagaagcaactgtgtggtcaccccacctgtctggtnctttgcnaggcctacagccctctcagcnctttctntatgcnctacanacgtnctacannntgtntgagtctacctgggagangggtaacactgatgaagaagccatntccct

SEQ ID NO: 41194 - DNA, 369 bp, Homo sapiens
  misc_feature (1)...(369): n = a,t,c or g
gctgtcccccacgggtggccccaaagccagctgcccatttaactgggcacagcatggacactggcctcagctctcagccttctgaggaggaccagtccaccatgcctgaagtcaaagacctctcagaagccttgccagaatcatcaatggatcccatcacgggagngtgatttttttttcnatntttannngagannantttttcttttnttntntnntattganagttaactnnnnngnnatannnatatttttntnnnnnttantnnanttaaatnaaaaantatttnnnantatnnagannttctgtgatgnantgnaattntantnnaagtgnttgctntgttacttannatantnnnatcaatc

SEQ ID NO: 41195 - DNA, 357 bp, Homo sapiens
  misc_feature (1)...(357): n = a,t,c or g
gggaaaaaattcaaagtgctcaagtccgtagaagagatcctagtgttccattacagctcttagtgttccctactctccattctcctataggagtgattgttcaaaatgttgacttagttaaattgtcctttttaacgcacagtacgactagaactttctcaatttatttagatcaaatagctattcttataggccaaatacaactgagaatagtcagactcattggcaccgatcgagataaaaatgtagttcctttaaacaaagcacaggttcgacaagcctttattaattcgtcagaatggcagtcaaatctggctgattttgttggcagnatanatattcattaccctannacta

SEQ ID NO: 41196 - DNA, 373 bp, Homo sapiens
  misc_feature (1)...(373): n = a,t,c or g
gggagcctggcgaagttgtgttttcaagccctctacttctctttccagtgggtaggagcttttggcagtgtttactttacctagatggcttatataatccagtaagagatgcaaagataaaattgctgcggttgttacagaagcatggcggcctccagactgacccattggttgccctttagattttgtaaggatgcggtgctgggaggtggtgcttccctaccccctagaaatgctgccttccaactaccactctcccagatgtgacccttgcgattatttcctctgaggtttgaggatgaanataagttggagggaaagagagtaactaatangggatgaaatatancnnaactanaanaangcggngagg

SEQ ID NO: 41197 - DNA, 374 bp, Homo sapiens
  misc_feature (1)...(374): n = a,t,c or g
nnnnnnnnnnnnnnnnnnnnnnnnnnnnnnnnnnnnnnnnnnnnnnnnnnnnnnnnnnnnnnnnnnnnnnnnnnnnnnnnnnnnnnnnnnnnnnnnnnnnnnnnnnnnnnnntacagagcatcttaaggttggaaggactcttagagaccatagtccagcctcccacttgatactgaaacacgtttgtgaattcatggcagatgtctaacttccctcaccacctttccgatatggacagttctcatgcccagaagcaaaaccttctttattgtgcttgtcctcccttgactgtcatgcatataatcagcatctttcccactaagtgaagggcccagactcgagcacaggagcacagcaccccttaaactcacga

SEQ ID NO: 41198 - DNA, 374 bp, Homo sapiens
  misc_feature (1)...(374): n = a,t,c or g
gatttttttctgcaattatgaatgtgtactgattacattgaattggacttcttttatttgtgagagatatgtactcaaatttctaaattattttgatagtacgtactcagcaagtaccaagtaccatctgattttgtggatgggaatttctataaaatagaatcatgagaacaggtcgaaatatatatgngngctanttcgtttgggngnatcaatgngnaacacgtgaccntttntttnggnttcaaggtgannntgannaanacnngggannggnggtcnanacanggncgncnanncgggnnttngtgaanttnggggntnnnaaatcnnnnanccgngannctncnantgnnnacngantgcnnnggaga

SEQ ID NO: 41199 - DNA, 396 bp, Homo sapiens
  misc_feature (1)...(396): n = a,t,c or g
gnnnnnnnnnnnnnnnnnnnnnnnnnnnnnnnnnnnnnnnnnnnnnnnnnnnnnnnnnnnnnnnnnnnnnnnnnnnnnnnnnnnnnnnnnnnnnnnnnnnnnnnnnnnnnnnnnnnnnnnnnnnnnnnnnnnnnnnnnnnnnnnnnnnnnnnnaagaataagatttttaaaaacattttcgcatctggaggctccagggggcttccctgagaaacggcagcctctgcggtcagagaggctgcaattcaagcgttcccacaaacagcaccatgtgctcatgcttacctgcttggtgtgtgagtcacctggagatggggtgcagaaacattgacatacctgagctatctttcttcctctgcctttgcaggtgtttgatatacagaggaaagtcaccta

SEQ ID NO: 41200 - DNA, 397 bp, Homo sapiens
  misc_feature (1)...(397): n = a,t,c or g
gtgaaataattttgccctaatttaccttatttgcaactgcagtatattttcctatgtcagttgttttcttgttgtccagtggctccaatctctgaatgtgctttgactatactacctttattagtacctagtctctgctttctggaataattgttacctgcatctgagatttgcagataagagagaatatttgcagaaatcttacccactctctaaaactctgctctannnnnnnnnnnnnnnnnnnnnnnnnnnnnnnnnnnnnnnnnnnnnnnnnnnnnnnnnnnnnnnnnnnnnnnnnnnnnnnnnnnnnnnnnnnnnnnnnnnnnnnnnnnnnnnnnnnnnnnnnnnnnnnnnnnnnnnnnnnnnnnnnccncaaaaaaaatnggctagatgg

SEQ ID NO: 41201 - DNA, 239 bp, Homo sapiens
  misc_feature (1)...(239): n = a,t,c or g
ggacccacccttcccgatgcagtccctgatgcaggctcccctcctgatcgccctgggcttgcttctcgcggcccctgcgcaagcccacctgaaaaagccatcccagctcagtagcttttcctgggataactgtgatgaagggaaggaccctgcggtgatcagaagcctgactctggagcctgaccccatcatcgttcctggaaatgtgaccctcagtgtgncagnccngtgnccncctg

SEQ ID NO: 41202 - DNA, 377 bp, Homo sapiens
gagagcagagctgggtgaatacatcagaagaatcacgaccgtgcctctgcccactgcgcccaacatacccattatcgattatgaggtgtccatcagcggagaatggtctccgtggcaggccaaggtgcctcagattgaagtggagacgcacaaggtggcagcccctgatgtcgtcgtgccaacgctggacacagtccgccacgaagccctcttgtacacttggctggccgaacacaagcccctggtcttgtgtggccctcctgggtctggcaagaccatgacactcttcagcgccctccgggccttgcctgacatggaggtggtgggtctcaacttctccagtgctactactccagagctgcttctgaagacttttg

SEQ ID NO: 41203 - DNA, 409 bp, Homo sapiens
  misc_feature (1)...(409): n = a,t,c or g
gggcgcccgggcactgacagccctgaggagtggcgacagggggaacaaatgcaggcccggacgccatgtgacaccgtgagcgctgagggcacgtggggcgagaggaggtgtgtttgggctgcggcagacacagaagatttcctggaaaaggggcctgagccagccccagaggatggggaaggttccgcctgcccctcctccagtcggggctctcctcaccagttcccagggtgacagttcactcttgaaactgaaagcaaagctaaaccaagaacacaaacccacacacagcacagaggccacgctctctggtgggtggcggcggtagtggtgaaaaggggggtgctgacgaaaaccagggtatgtggccaccttgtcccccanctccangctctctggaggcttgctc

SEQ ID NO: 41204 - DNA, 410 bp, Homo sapiens
  misc_feature (1)...(410): n = a,t,c or g
ggatgaaaagtgccaaaacatatatttacaaatttagaaaattaggggtagatccagaaatcccaaagtattctggtatcagagtgtgaatcacagacctgcagaatccatatcacctgaaagctttagaaatgcagaatctcaggccccatcctggagctactgaattaaaatctctattttaacacgatccctagggattcatatacacattaaagtttgnnnnnnnnnnnnnnnnnnnnnnnnnnnnnnnnnnnnnnnnnnnnnnnnnnnnnnnnnnnnnnnnnnnnnnnnnnnnnnnnnnnnnnnnnnnnnnnnnnnnnnnnnnnnnnnnnnnnnattaaaaatgcaaaaattaagcangtgtgggtagagcgcacctgtagtctcagctaccttggaatgctaaa

SEQ ID NO: 41205 - DNA, 419 bp, Homo sapiens
  misc_feature (1)...(419): n = a,t,c or g
gcaataacaatcacacagaaattcaagaaatttctttagcattaagaagtcacatgagtaaagcaccaagtaatacattccacccccaagatttctctgatgtattagttttattttgtatgggaactctcatagaacagggaaggacaattggttggaaagactgttctatagctgccagagactggataagcgtgaccagtcaacaattccacgcaatctcctgaagacagatgctgtcctttggcagtgggccatatgggaagctgcacaattcactgttctttctaagctgagaaccccactgggcagagctcaagacaccttccagacnattgaaggngatcattcgaagtctcgagctnacacattaaaccctgatcaggatgttagtcagtggacaactgcanacaatgatg

SEQ ID NO: 41206 - DNA, 430 bp, Homo sapiens
  misc_feature (1)...(430): n = a,t,c or g
gaaggtttgtgttcccgacgccttggtagttggcataggctaaagaaaagggatctcagccccgaggaagggtcaccctcctagagatagctactaccccgtctcaggagaccctggtatttctagagcacgctttgctttcaccaaacccaaggaggtgacaggaggagcccccgcacaggacctaagaatgctgtgaccagaagatgggatcgcggaacagcatgcagtgcnntgatccgggtccggagaccccctncgagggcttgncccgaanaggggcntggcctgcgtcctgagtgaggaanaggaanaagaggatgaaatatgtgggatttggccccacttgggatgctacccctgacaccccgggaacctggaanttcaatgagaatccngacncaattggaactggccacacggncatttg

SEQ ID NO: 41207 - DNA, 334 bp, Homo sapiens
gtgagaaaagcctaatattgaagtatctctcctatgaggtgttagaactatttgcctacaatttattggggaaaaaattgctcatttgtgtacataaacctaggacagagcacatagggaagataacattccaacacaggggaattttgcccaaggctcatgaaagaacccaagccagttttctcaagacttgacctcaggcctactggaatatttctctcaaagtctcctgttctcacactgacaagactgatgtccctgtgttaggattggacagaggaatgtttctgtgtgcaaggaagaactgcttaatgtaagagggcccatctgaatt

SEQ ID NO: 41208 - DNA, 333 bp, Homo sapiens
gggttatcaataagctcctagtccagacgccatgggtcatttcacagaggaggacaaggctactatcacaagcctgtggggcaaggtgaatgtggaagatgctggaggagaaaccctgggaaggctcctggttgtctacccatggacccagaggttctttgacagctttggcaacctgtcctctgcctctgccatcatgggcaaccccaaagtcaaggcacatggcaagaaggtgctgacttccttgggagatgccataaagcacctggatgatctcaagggcacctttgcccagctgagtgaactgcactgtgacaagctgcatgtggatcc

SEQ ID NO: 41209 - DNA, 335 bp, Homo sapiens
ggcagcatccttccatggcagaaggcggaagcgcaaaatgggatgaatgctgtgtccttgtacggcaaaagagcaggagagagagaacctactcctgaaagcccctctatagcggcattaatccatctatgagggcagagacctcatgaactgagcacctgcccagatgcctcacctcttaacaatgctgcattggggatgagtatctaataaatgaattttgaggggcaaaaacattcaagccatagcaatcactttgaaaacagttaagcaatttcttaaaaaggtaaacgtatatctaccatatgatctactcattacagtcaatgagtcta

SEQ ID NO: 41210 - DNA, 340 bp, Homo sapiens
gctggatagtaggtagggacagtggtgggaaagcccaaggaagcaccatggaggtgggcggcgctggggacccgagagaccagggtttccagggtctccttgccctcctctgggcccttgatctctctatgaccttggccaagccaccttccctctctgggactcggttttctctctctaaaatgaggagcttaccaaagttagtatttctcaaaccttttaaccaaagtcccaaacaagctcaggagaatgaatttgtaagcatcgtgtaaaatattgccttttatcttaaaagttcatgaaaattttgcagtctgaagtatctcaaagcttaaattac

SEQ ID NO: 41211 - DNA, 334 bp, Homo sapiens
gaactggaagatatgtctgcccaccccttcctcagtttgagaacctcaggagccatcctaactggtgggcaaaagaaagatgcaaagagctctcaaggtccctgtagcccaataaagccatgatctttataagcatccttaacagtaaggctgccaaaaaaaagcacaaagtggggcaaatactctgcaaatagagtcatgcagtttctgtccggtaggtggaagtaccacccaggccttgatcctgcttctgttatcttgttcccatagcgttaccactagttgtgtaccaagagtgctcttctgtttctcaagccaaaaggagtttattggt

SEQ ID NO: 41212 - DNA, 340 bp, Homo sapiens
  misc_feature (1)...(340): n = a,t,c or g
ggataataagacagaatcaaaaagttctggcattgattcagtatggtggtgagggagagaaagaaagaatgtatacattttgtgaaatgagtaatataaaagtaagagcagattcaaaatgatattttttctttgataactttcttctcctaacttcaaaattaattttcctgagtgttaatagtgctggttgttaaatgagaaaagttttgaagtggttgatgtttcgattcttttaccacattttttaattgtaattttaannnnnnnnnnnnnnnnnnnnnnnnnnnnnnnnnnnnnnnnnnnnnnnnnnnnnnnnnnnnnnnnnnnnnnnnnnnnn

SEQ ID NO: 41213 - DNA, 441 bp, Homo sapiens
gctactttgtaacttaacagcattatgccaacgataatttaactagaaaaagttcctgagagaataacaaatctgtgattttattatgtcttttatcatgttttgcagctttcagattcagatgtcaataatttgtttctatgatcagagtatataaatcccatgcaaacatatctcagcataactgattttgtttctaaataattaaacaggataaaatgttatttgttgtaagctgttgacatttgtaaggaaattttgtttcactgaatatgtttagagatgccgccagaacattaaccattgtttcatttttatgtaagttgaagaaaaatgaagctagatagcatgttctccatttgcagtctacaaaggggaattttattgcttaaattaaagtttcattttctggcctgtgcaagagacttttatatctaaaag

SEQ ID NO: 41214 - DNA, 394 bp, Homo sapiens
gggaacgtctgaggttatcaataagctcctagtccagacgccatgggtcatttcacagaggaggacaaggctactatcacaagcctgtggggcaaggtgaatgtggaagatgctggaggagaaaccctgggaaggctcctggttgtctacccatggacccagaggttctttgacagctttggcaacctgtcctctgcctctgccatcatgggcaaccccaaagtcaaggcacatggcaagaaggtgctgacttccttgggagatgccataaagcacctggatgatctcaagggcacctttgcccagctgagtgaactgcactgtgacaagctgcatgtggatcctgagaacttcaagctcctgggaaatgtgctggtgaccgttttggcaatcc

SEQ ID NO: 41215 - DNA, 405 bp, Homo sapiens
  misc_feature (1)...(405): n = a,t,c or g
gcttttcaggcacaggaccatagattgtaatattttccatagcagttgcccaattttatctgtaaaaattgctttttnnnnnnnnnnnnnnnnnnnnnnnnnnnnnnnnnnnnnnnnnnnnnnnnnnnnnnnnnnnnnnnnnnnnnnnnnnnnnnnnnnnnnnnnnnnnnnnnnnnnnnnnnnnnnnnnnnnnnnnnnnnnnnnnnnnnnnnnnnnnnnnnnnnnnnnnnnnnnnnnnnnnnnnnnnnnnnnnnnnnnnnnnnnnnnnnnnnnnnnnnnnnnnnnnnnnnnnnnnnnnnnnnnnnnnnnnnnnnnnnnnnnnnnnnnnnnnnnnnnnnnnnnnnnnnnnnnnnnnnnncacaaaacttccaatggatgccgaacgtataactttttttttttttt

SEQ ID NO: 41216 - DNA, 394 bp, Homo sapiens
gggcaggtaaggtttttgtctcgtgatcagcatttatttatcccactgtatggagactagtacaaaatccatttcacattctgaaaactcttagtcttagtgagaacgttcagtacacagctgctgatcttaatcctgggaattaaataatgactgtggccaaatagaagaagaaaggagacagtttacccttataagggcttagacagaaataaaaaagcaaacaggaacagaattagattacctcatgttaaggagtggtataataaaagcagttgacttacattacactgtaatggtcaaccatgtatctctttgacctcaagatcataacaggaatttgtctacatccctacaagtaaaatttccaaaattaaaatatctgtagcatcag

SEQ ID NO: 41217 - DNA, 407 bp, Homo sapiens
ggaactgaggccatgattaagagggaggacacagatactgggctgaagggagaggaagctgggaacactgcatggggctgctgcacactaggacttattcctggcccccagtgactcttggggaagggatgagttgaatgggcaaggagtgacccacccttaccatggacctctggaatcctggcagccaaagaccccatgacccccatggacacttaagctggcaaggataaccgtttagagaggtagtaggggcaggactccagcctgcaaggagcccagggggtttggtgcaggagtgtctgaagtggagcatgaccagggatgcccatctctcaaggctcaccatgctcccctaggagagtttagccttacagaaactatcggacctgaacagagcaggacag

SEQ ID NO: 41218 - DNA, 404 bp, Homo sapiens
gagcaggctgggtgcgttaaaaagcccaagtattttgaaaaaactcgaacagatttgacaagggtagccagcttggagtctagcaacttgccaatgtgtttaccaatctgggggcttgtttttcttttcttctttcaaataaatggcagttaactggctttacagtaaacattgaagagaggaggatttgtttattgtcactgggaatctgaccactatactgtcctttttttgtattctgggtaaatgttttttggaaaagatttgtcttttctaagtggaagttaaatttgttatactgccatcccctaaagccaacagagatttgtagatttaaagggatcacatttgaagacaatagtggttaagaaagcaagcaagtcccttaacagtcaggtcataac

SEQ ID NO: 41219 - DNA, 402 bp, Homo sapiens
  misc_feature (1)...(402): n = a,t,c or g
ggtgcattctatataggaagctccttcatatttttaatcttctttttaaaataatttcaaactacaatgagttttgtttattttctgattacaagatatttataaaatattcactcaatctataacattatgaaaaagatattaaatactttataggtttctgtgtcctttctgtgtataggtcatgttaattttctctgtattgatctattttggcatatagattgctgaaatgagtacagggtcagatgtaacggtttaatacctttgaaatcctccctccatttgggccagatttcttctttttaattcttgnatttggnaatgaaaaattcatttttatgtntgctcacgacaaacctctttanaagtactatctgctgcccaaatctgtaatggatt

SEQ ID NO: 41220 - DNA, 430 bp, Homo sapiens
gggaacatgaatctgtgctacagatataaaaactattttgaaggctataggaacaaccacatttgccaggactcatgcttaaatagactgtgtacggctgtggagatcataaattgagaaagcatgatatttgagcaagaaaaatttactgaggtttgttaagatttgagaagagagatggaaaatcttcctgttcagttggagaagaagctgaggaataagtctttgtgcatatgaagagtgttttgtaggctgtgtataggtattttctgtttcttcagaatgtagcaaaaaacagtgtgaacttaagttggtatagaggaatttaggagataatttatgactagggattggaagctattgaaatagtttatcatgacaattctttgaaatggatgagttttcattatatttaggattttattctccg

SEQ ID NO: 41221 - DNA, 417 bp, Homo sapiens
ggtacagtgttgggtaccagagggagatagagaagaaggaaagatgtggttcctgcttttaaagaacaagtggctgagggttacccaagaggaagttcagagagctactctgttgttggagaatgccatgcctttgggagaggcagtccacacgctcagggagcttccagtttgatgaaggcttggacgtacttttttccggccaaatgtgtagagtacttcataataagactcatttcttagtgctgaagttatttttaagtgccaaaactggatgagcaacgtcagggttaaataaataaacttctaggagaattttgagtaaggtttgggattggggatggctgatgaaaaacaatggaggtggagcaagtcatgagttgaagttgggattcaaatggtgagtattggctttgg

SEQ ID NO: 41222 - DNA, 417 bp, Homo sapiens
gatttgtcacataataaaaaccctaacgtctagtttgcccagcacttgtgacagtatcaagttccccagttcattctttttgctttcaattctcagggtgccagcaatgtccaaatggtggcacctgttactaatcattagataagagccatgactccaagtgtcacccaccttcagatacaacaaaatgcaaacagatttttttgtgcatctcttcaagaataaacttacttctttagcaaaatttctttcatattttattgaccagagttgggtctcacatctcccagaaaaattttctttcagctattagaaatcgtagactattcttagataatggacagtacaatggattaattggagaatgatgactatagaaagaagtattaagagataaagctgaaaacagatggagat

SEQ ID NO: 41223 - DNA, 418 bp, Homo sapiens
  misc_feature (1)...(418): n = a,t,c or g
gaatnnnnnnnnnnnnnnnnnnnnnnnnnnnnnnnnnnnnnnnnnnnnnnnnnnnnnnnnnnnnnnnnnnnnnnnnnnnnnnnnnnnnnnnnnnnnnnnnnnnnnnnnnnnnnnnnnnnnnnnnnnnnnnnnnnnnnnnnnnnnnnnnnnnnnnnnnnnnnnnnnnnaaagtaagtactgttccaggtacaccttatacagctcttcaccaaagttgctttcttattaaaaacagaatttannnnnnnnnnnnnnnnnnnnnnnnnnnnnnnnnnnnnnnnnnnnnnnnnnnnnnnnnnnnnnnnnnnnnnnnnnnnnnnnnnnnnnnnnnnnnnnnnnnnnnnnnnnnnnnnnnnnnnnnnnnnnnnnnnnnnnnnnnnncataatggtacatgcctgtaatcccagctactagggg

SEQ ID NO: 41224 - DNA, 422 bp, Homo sapiens
  misc_feature (1)...(422): n = a,t,c or g
gnnnnnnnnnnnnnnnnnnnnnnnnnnnnnnnnnnnnnnnnnnnnnnnnnnnnnnnnnnnnnnnnnnnnnnnnnnnnnnnnnnnnnnnnnnnnnnnnnnnnnnnnnnnnnnnnnnnnnnnnnnnnnnnnnnnnnnnnnnnnnnnnnnnnnnnnnnnnnnnnnnnnnnnnnnnnnnnnnngaaccactcttcatcaacttatctgggaccctgaaatgaaatagggtgacccattttctagctttatatgattttctggcttcatatgatttaaatatttttaccgttttttgnnnnnnnnnnnnnnnnnnnnnnnnnnnnnnnggnnnnnnnnnnnnnnnnnnnnnnnnnnnnnnnnnnnnnnnnnnnnnnnnnnnnnnnnnnnnnnnnnnnnnnnnnnnnnnnnnnnnnnnnnnnnagagg

SEQ ID NO: 41225 - DNA, 422 bp, Homo sapiens
  misc_feature (1)...(422): n = a,t,c or g
nnnnnnnnnnnnnnnnnnnnnnnnnnnnnnnnnnnnttggcctctctttaaagtttttgtcttgaattccattttgtctgatataagtatagctatttttgctcttttatggtttccatctgcatggaatatctttttgtatccctttattttcagtttgtgtgtgtgtgtgtttctaaacagatttaaatatatcaggctgtctccctctggtggaatgcacattttgtgtgctgtttgtggttatgattcctatcatgtggagacagcccccctacaggcgagaatgaaactgatgtacagaaacaatgagatgaggtggagtaagaatcctgcagtcattcaagtccctggttcaaattgttcctctgcatgtctgcccctgtcttgttaatattctctggattctgtaagccaaaaga

SEQ ID NO: 41226 - DNA, 405 bp, Homo sapiens
  misc_feature (1)...(405): n = a,t,c or g
gattatctgtgaaaagtaggttagatgtagtagagagggagggaggagtgatgtggacttgttgctgagataaaagtaggcatttttcagatatcccagattgcaagcaattagctttaaaaaatgtttacatacacaaaaaattttttaattttgggaatattatttattaaaaacttctaaatcaagctttttttctgctggatagaaatgaactttggttaattggctttggttgaactttgagcaatggaattgatattatttttgaaaaatatcatatggctaggattggaaatggctaacagttaacttcttaagcccgggccacggnggctngccccctgnaattccnaccnttttgggagcccaagccggcnnatcccgaagnccggaaatnaaacc

SEQ ID NO: 41227 - DNA, 389 bp, Homo sapiens
  misc_feature (1)...(389): n = a,t,c or g
gtgactcttgtacatatttgaactttaacagtaaccagacatattttgaaatgaaggcactttggcttccttattagcaagccatctttaaaatgctcatactcatatggctaaggtttagatcattcaattcaacaaatatttattgggctttcggtagatgccaggcattcagctaggtgccagaaagaagaataggacatggatggccctgttttcagagaacgttctcttgctgtctattaagacagagaaggctttaaaaaaaatttcatttcangccgggcactgtggcttacncctgnaatcccagcnnnnnnnnnnnnnnnnnnnnnnnnnnnnnnnnnnnnnnnnnccgagaccatntggccaacatgggggaactccgt

SEQ ID NO: 41228 - DNA, 392 bp, Homo sapiens
ggatgttttcagggctgaaggttccccctacctagtcgtgaacacatcgggtgctggagcacctgtgttcccatgaggccagcgtgggccatgcatggcttcaaaaggccctcgaggcttgactaagtgcgccagtttcattctgaacatgctgctctaaaacacatccctgctgagccacaggaggatcagatattgtgagcttctggcccgttgatgctcaagagctggggcatgcggggaagactccagaacttctaactctcgctaaccttacatctgggattcttacgccctcagctgaagaactctatgaattcagctttgaagaggttcttctaacacttggccaatttcaaccaggctttgctaaagtcctctgaaattggggg

SEQ ID NO: 41229 - DNA, 392 bp, Homo sapiens
  misc_feature (1)...(392): n = a,t,c or g
gcattagtaactttttaatcatatctgttgctgaaagaggtcattcttttcacaaaatttctatctttctgatagttcataaggatcgtagcatttaactaaaaagtaattatatatttacatgcaacagtgactatgttagaaattaggggaaataatatattccagtttgtaagtattcacagaagaatgagatatttgttatttatttagatttatttttttctaaaaatgatttaaggctttttacaaagaagcataagtaaacaagtgaaaataaatattagtaataaagagtcaaagggaaggtaaaaaaagaaagcaaaatggagttggtagtgagataggtcacaaaactgnatgtatgactagatgcctaaacatgcttgata

SEQ ID NO: 41230 - DNA, 390 bp, Homo sapiens
  misc_feature (1)...(390): n = a,t,c or g
gccagttcccaagtcaaaacctcagatgctgccactaattctttccaccaatctacccacaagtcctattggttccagtaccaaaacatgtctaggttttgcccacttgtacctctgccacttccactctggaaccagccatttacattaccccaccccatccggacataagcagnggcctnttanccagggnctttgcctntnttgnnttcccagcatgctntttcgancnngncnaannttttnaaaaatatcnccaaaattggctggcacagnggctnacgcctgcatntnnnnnnnnnnnnnnnnnnnnnnnnnnnnnnnnnnnnnnnnnnnnnnnnnnnnnnnnnnnnnnnnnnnnnnnnncaccntntttactaaaaatgcaaa

SEQ ID NO: 41231 - DNA, 389 bp, Homo sapiens
ggagtataatgccctgtataatgctgagtataatgctgaactcctagaacaaagaagtaaatcagatgcagtcccttcccccatggggagacagacttgcaaacagctagcacctgagtcagattgtgaattgtgccaccatagaggtctcagccaagtgtggaaggtgcactctcccagggaggtggcgtgtacattaaaccctggagaataaatggagcttcaagcaggaaggaaagaacatcccacaggcaaaaggaacagcaaaggcaaaggcacagagttaagaaagtatggagtcttcagaaacccttggggtgtggcttggggacagaggacggggaatagattttaaacgtccttcagtgtgaggaggtaaagagttttga

SEQ ID NO: 41232 - DNA, 431 bp, Homo sapiens
  misc_feature (1)...(431): n = a,t,c or g
gtttgtgtgtgtggtgaacacatttaaaatctgttttcttctcagtagttttcaagtatacagtacattgttattaactgtagtcacaatgtgtacagatctcttgaacttacttttcttgtctgtgtgaaattttgtatcctttgaccaacatcttcctaattccacacctctccttcccannnnnnnnnnnnnnnnnnnnnnnnnnnnnnnnnnnnnnnnnnnnnnnnnnnnnnnnnnnnnnnnnnnnnnnnnnnnnnnnnnnnnnnnnnnnnnnnnctgaccttaggacttttatnnnnnnnnnnnnnnnnnnnnnnnnnnnnnnnnnnnnnnnnnnnnnnnnnnnnnnnnnnnnnnnnnnnnnnnnnnnnnnnnnnnnnnnnnnnnnnnnnngatgtttagtgcaaggacaccatgcnagttaattt

SEQ ID NO: 41233 - DNA, 416 bp, Homo sapiens
  misc_feature (1)...(416): n = a,t,c or g
gaggcattagccaccacacctagccttctaacaggcttttcaaccatatattgtgattttacctgtgtaggagatagatggtagcgtctgtcttttacagttgacaacccagaggctctaagacaggtgtccccaaccctagtctgtggctcattaggaacaggttgcccagcaggaggtgagtgagtggtgggcgagtgagcaaagcttcatctgtgtttttacaannnnnnnnnnnnnnnnnnnnnnnnnnnnnnnnnnnnnnnnnnnnnnncannnnnnnnnnnnnnnnnnnnnnnnnnnnnnnnnnnnnnnnnancagtnnnnnnnnnnnnnnnnnnnnnnnnnnnnnnnnnnnnnnnnnnnnnnnnnnnnnnnnnnnnnnnnnntcatctaattgcaggaaaacaagctca

SEQ ID NO: 41234 - DNA, 379 bp, Homo sapiens
  misc_feature (1)...(379): n = a,t,c or g
gctggaagaaaataaaattaagccctcagctcacatcatatgctaattaaaaaaacaggtggattaaacattaatcccaaacnnnnnnnnnnnnnnnnnnnnnnnnnnnnnnnnnnnnnnnnnnnnnnnnnnnnnnnnnnnnnnnnnnnnnnnnnnnnnnnnnnnnnnnnnnnnnnnnnnnnnnnnnnnnnnnnnnnnnnnnnnnnnnnnnnnnnnnnnnnnnnnnnnnnnnnnnnnnnnnnnnnnnnnnnnnnnnnnnnnnnnnnnnnnnnnnnnnnnnnnnnnnnnnnnnnnnnnnnnnnnnnnnnnnnnnnnnnnnnnnnnnnnnnnnnnnnnnnnnnnnnnnnnnnnnnnnnnnnnnnnnnnnnnnnnnnnnnnn

SEQ ID NO: 41235 - DNA, 420 bp, Homo sapiens
  misc_feature (1)...(420): n = a,t,c or g
ggcnnnnnnnnnnnnnnnnnnnnnnnnnnnnnnnnnnnnnnnnnnncttgcactgcataaaaacaattgcaacatcaacagaaataaaaattaaaggaataattctcctccgactctgccgttccatccagtgaaactcttcattctggggtaaagttccttcagttcttgttcatagataggtatatacttcataagtcaaacaatcnnnnnnnnnnnnnnnnnnnnnnnnnnnnnnnnnnnnnnnnnnnnnnnnnnnnnnnnnnnnnnnnnnnnnnnnnnnnnnnnnnnnnnnnnnnncaagacctccaacatnnnnnnnnnnnnnnnnnnnnnnnnnnnnnnnnnnnnnnnnnnnnnnnnnnnnnnnnnnnnnnnnnnnnnnnnnnnnnnnnnnnnnnnnnnnnnnnnnnnnnnnnn

SEQ ID NO: 41236 - DNA, 408 bp, Homo sapiens
gctgactttctgaggttgaacttaagtataaatatttggcttaagatacttagtcttcttaatttgatatttttaaaaatcatagattattaatagacaaactgttggctctgtactttaaacagtcttcattgataaattactgacttaaaaaacctcaatttggagaaaaagctatagtaaatctcttggattttaacagctattctatctagaaaataggactagaggaagattacacttgaaaattatatgattaataagagactacatggcaaataattgcagtgagataaaaatgaaaattatctttcttaattatagcaacttctatgttataaaggatataaactataagaaacgctgcactttaaaaagtactagcgagaattcctgttaacttctctg

SEQ ID NO: 41237 - DNA, 403 bp, Homo sapiens
gatctacctacgtacacatatacaatagtattgatgattctgaacaataacagggtaaaacagttggtttgccattgttaaaaactgatttacagtaacttacaacaactgtacttttgttggattagcaaatcatgtgtttaaacaaatcccatatgttgggcaacagttcaaataagcacggagaagtgttgcccaaacttggttctctgactcttatgtatttgtaaggctgggcttcaaaatcaaaacaaaaaccccaaaaacagcaggcaaatgctttttaactctgacaccgttgccataaatccctgatactcaaagtctaacaagaaagacatggaaaattagcagcccattttcagaaagatcaaaatgatctagggttctaattgcttttgca

SEQ ID NO: 41238 - DNA, 415 bp, Homo sapiens
gatagcccaacaggaaccttacagaggatgttaacctcagaagctttttagtttcttcttttgtatttgtcctgtatttacgtctttcagtaaagtaaaaactcagttattgacttgaattgctttggaagcattgaagtcttccaccaaattgattcattactgtactaattcagttcattccagtggtctgaatctcctattccatggtttaatcatcactctggctccttctgcatatgaagctattgcatcttactggtcctacattgaagtgtattgtatctgtttgtacaaccgatcatacattttaagtttttatatttctccatctaccttgtttcttcacagagctacaggcaaccagctgctttcatcgtcacacaataccctctgccaaacactgtaaaagact

SEQ ID NO: 41239 - DNA, 418 bp, Homo sapiens
ggcaagtcattcagtacagccccagctctcacaaaatcttctctaccacgtttggcacgtctaataatgattataggcattgctacaaattcaatggtaatattgtaggctaccaggttagagacctctctaacttagtctgtctctttctcttctttccatttctcctcctttttcttccccttttccttcccccacttctttccttacatcctccttccttccctcctgcctgttttttccctccctttaactatctctctctactttccttccttgaacaattaaaggaatgcattaaagcccaaacaacaaaactgattaactcttaatgcttatctttctgaggaatgataatctatatgaacttgacaccaagactaaaagcttaagtggttgagtggatactaccaatatc

SEQ ID NO: 41240 - DNA, 419 bp, Homo sapiens
  misc_feature (1)...(419): n = a,t,c or g
ggtgtatttaaaattgtttgaattagtggcctgtcaaagctatcctttgaaaaacaaaacaaaaaacctacaaaaccatctctactttctccttttcctcttggaagttggaacagttcacatttcaaaaccttgcttgagctaagttcttaaaaaaccttgaaaagacttacatcaagtgctgcatactgttataaaggctttacatgtattaatttatttaaaacttccaacaaccctgtgagagataaaccaaggcacagatattaagtaatttggctttggccacacaactaataaatggcagagctagtatttgaacacacagtggctcaaaaatatctatactctnactgctttgctgtgtagtgactganagctttgagtttncttggatcaaaattggggctttggccatt

SEQ ID NO: 41241 - DNA, 421 bp, Homo sapiens
  misc_feature (1)...(421): n = a,t,c or g
gnnnnnnnnnnnnnnnnnnnnnnnnnnnnnnnnnnnnnnnnnnnnnnnnnnnnnnnnnnnnnnnnnnnnnnnnnnnnnnnnnnnnnnnnnnnnnnnnnnnnnnnnnnnnnnnnnnnnnnnnnnnnnnnnnnnnnnnnnnnnnnnnnnnnnnnnnnnnccaactgtattttaacagatgaaatctgtgctgtgtcagctttagggagacaagtcatggtcacattttttggcactcatatacaccctaaattctgtggtcttcattataagttaaggaacctgtctccccttttgcatatcaagtacatgccatctcttaaaagtcatagtgccctttgcccggccgcggtggcttnagnnnnnnnnnnnnnnnnnnnnnnnnnnnnnnnnnnnnnnnnnnnnnnnnnnnnnnnnnnnnnnn

SEQ ID NO: 41242 - DNA, 393 bp, Homo sapiens
  misc_feature (1)...(393): n = a,t,c or g
gcttcaataccctgtacttctacaacaaagccacaatattcccctaataaaatataggagtgaatgatggataaggggaggagaaaaggaatccctgcagcctcttcacacaacaccactttgatcaagtttaagaatcaactcctggcaatagcactttagagataacaatattcttaatgaaacactttcccatcacaacagattattaaagcaatccattattcttctctccacctattaaaaaagtctgatttagtgaaaaagacaatcctcaaaaatccaggacttaccataggctgctctgtgttatagttactgcccccactgagagtcccctagaggccagaaggatctcattcactactgngttccctcacagtgcttggcaca

SEQ ID NO: 41243 - DNA, 420 bp, Homo sapiens
  misc_feature (1)...(420): n = a,t,c or g
gaaggtatctctgagaaggggacatttaaataaatccagccattcgaaatctggggaaagaggcatccaaccagggaacagaaagtgcaaagtctnnnnnnnnnnnnnnnnnnnnnnnnnnnnnnnnnnnnnnnnnnnnnnnnnnnnnnnnnnnnnnnnnnnnnnnnnnnnnnnnnnnnnnnnnnnnnnnnnnnnnnnnnnnnnnnnnnnnnnnnnnnnnnnnnnnnnnnnnnagagtgtgtttgctttcacctgtagtcccagatactnnnnnnnnnnnnnnnnnnnnnnnnnnnnnnnnnnnnnnnnnnnnnnnnnnnnnnnnnnnnnnnnnnnnnnnnnnnnnnnnnnnnnnnnnnnnnnnnnnnnnnnnnnnnnnnnnnnnnnnnnnnnnnnnnnnnnnnntaagaagaagaaagt

SEQ ID NO: 41244 - DNA, 425 bp, Homo sapiens
gcggcacgagcggcacgaggagatctctttccactgctatgacggttacactctccggggctctgccaatcgcacctgccaagtgaatggccgatggagtgggcagacagcgatctgtgacaacggagcggggtactgctccaacccgggcatccccattggcacaaggaaggtgggcagccagtaccgccttgaagacagcgtcacctaccactgcagccgggggcttaccctgcgtggctcccagcggcgaacgtgtcaggaaggtggctcttggagcgggacggagccttcctgccaagactccttcatgtacgacacccctcaagaggtggccgaagctttcctgtcttccctgacagagaccatagaaggagtcgatgctgaggatgggcacggcccaggggaacaacagaagcggaaga

SEQ ID NO: 41245 - DNA, 427 bp, Homo sapiens
  misc_feature (1)...(427): n = a,t,c or g
gcgagcaatgcannnnnnnnnnnnnnnnnnnnnnnnnnnnnnnnnnnnnnnnnnnnnnnnnnnnnnnnnnnnnnnnnnnnnnnnnnnnnnnnnnnnnnnnnnnnnnnnnnnnnnnnnnnnnnnnnnnnnnnnnnnnnnnnnnnnnnnnnnnnnnnnnnnnnnnnnnnnnnnnnnnnnnnnnnnnnnnnnnnnnnnnnnnnnnnnnnnnnnnnnnnnnnnnnnnnnnnnnnnnnnnnnnnnnnnnnnnnnnnnnnnnnttgaccaacaaaatttcagggagtaataaaggctgtatacagagttaaaataggatgatgtgttaagaaagtaatggannnnnnnnnnnnnnnnnnnnnnnnnnnnnnnnnnnnnnnnnnnnncacacannnnnnnnnnnnnnnnnnnnnnnnnnnnnnnnnnnnnnnnn

SEQ ID NO: 41246 - DNA, 391 bp, Homo sapiens
  misc_feature (1)...(391): n = a,t,c or g
ggatgagatatagctaaagagaaaattattgtggattggaagatagatttgaagaaaatatgcagaatatagaatggagaaaaaagagatagcatatgagaggactattaagatatagaggatnnnnnnnnnnnnnnnnnnnnnnnnnnnnnnnnnnnnnnnnnnnnnnnnnnnnnnnnnnnnnnncccatctgtnnnnnnnnnnnnnnnnnnnnnnnnnnnnnnnnnnnnnnnnnnnnttagctgggcatggtggtgcatgcatgannnnnnnnnnnnnnnnnnnnnnnnnnnnnnnnnnnnnnnnnnnnnnnnnnnnnnnnnnnnnnnnnnnnnnnnnnnnnnnnnnnnnnnnnnnnnnnnnnnnnnnntgtctcaaaaaaaaaaaaaa

SEQ ID NO: 41247 - DNA, 405 bp, Homo sapiens
gaggttttccacaccagaatttaccatccttaacaccttccacattccttcctttacaattgactttgtagaaatgaaagtaaagatcatcagaaccattgaccagatgctgaacagtgagctgcagtggcccgttccagatatatatctcagggatctgaaggtggaggacattcctctagcgagaatcaccctgccagacttccgtttaccagaaatcgcaattccagaattcataatcccaactctcaaccttaatgattttcaagttcctgaccttcacataccagaattccagcttccccacatctcacacacaattgaagtacctacttttggcaagctatacagtattctgaaaatccaatctcctcttttcacattagatgcaaatgctgacatagg

SEQ ID NO: 41248 - DNA, 349 bp, Homo sapiens
  misc_feature (1)...(349): n = a,t,c or g
gagtttaaaaacttttatgactataattttaatctttgttggcagaagaattataaatcaaattgcatattaaatgaactggagtttataaagaaatttagtagaaaatcttttctaggccaccacacccagccttttttggtatattctataaaatgaataatnngncgcttccctgtatccccnngtattttctttgntttnngcnnnnanngtgcttgnnncnncanngccnnannacttntnagnnnattatctatgtactttnngggnnncttgnnnttncatcgccgactntntttcntcnngctnagnnncnaantntncncnnnggatancnttnccttaa

SEQ ID NO: 41249 - DNA, 177 bp, Homo sapiens
  misc_feature (1)...(177): n = a,t,c or g
nnnnnnnnnnnnnnnnnnnnnnnnnnnnnnnnnnnnnnnnnnnnnnnnnnnnnnnnnnnnnnnnnnnnnnnnnnnnnnnnnnnnnnnnnnnnnnnnnnnnnnnnnnnnnnnnnnnnnnnnnnntagtgttgccatcnaatntnntgcttgntngactgaaatnantgnggacaattt

SEQ ID NO: 41250 - DNA, 349 bp, Homo sapiens
gtttatctgtgctacatttattgtgtccatagcttttccctcctgctatactgtaaactcctggaagacagagtccttgttgctttcttgctcccaatgcctagtatgtggccttgcttgaggtatataatagataccaggtaaataattaaagaatgacatgagctacaccttgtcacatagtagaatttaaattaacttcattcaaccaatgtttattgaggcaaagagaacgggtttggatatctagatagatacaattcagcaaacagttgttgagctcctgctatgtgccagatatcttactagttattaaagataaggacatgagtaaggtagttccaccccc

SEQ ID NO: 41251 - DNA, 354 bp, Homo sapiens
  misc_feature (1)...(354): n = a,t,c or g
ggagactgcatagggctcggcgtggtggctcccagcactttgggaggctgannnnnnnnnnnnnnnnnnnnnnnnnnnnnnnnnnnnnnnnnnnnnnnnnnnnnnnnnnnnnnnnnnnnnnnnnnnnnnnnnnnnnnnnnnnnnnnnnnnnnnnnnnnnnnnnnnnnnnnnnnnnnnnnnnnnnnnnnnnnnnnnnnnnnnnnnnnnnnnnnnnnnnnnnnnnnnnnnnnnnnnnnnnnnnnnnnnnnnnnnnnnnnnnnnnnnnnnnnnnnnnnnnnnnnnnnntnnanncntaaaatngnttaccntgtttgatnnccnactggnnttntnatnntaatntatanncnaatt

SEQ ID NO: 41252 - DNA, 327 bp, Homo sapiens
  misc_feature (1)...(327): n = a,t,c or g
gaaagactgtcctgaatgtagctccagtttcattgtaagcttcctctgtgatgaaactaaattatattttagaatgctctctgctaatgctagggggaatgttcttggtttacttcttggacattcatcatatgnttatgtatgggttnctatnntannntaacnctgnatctttatnacanaccctanntanctaagaatnagnatnnngngntnggcgtgntagttctcacttnnaattcnngntatttanangtcatagtgncncnggtnnaancnanngnagntatnnattntggnttctgggnggnacatantngnttttgg

SEQ ID NO: 41253 - DNA, 307 bp, Homo sapiens
  misc_feature (1)...(307): n = a,t,c or g
ggtaataaattgccaaacattttgcaggagtttctcaccagcaagttcttgtgttagtttattttaccaacatcttttgtctggtttttctttagtaaaagtatttataattctgtattatacttccataggtagatcattgttgaaagtccagaaggttgagcttccatgatgtaatatgatatgaaatcttgtattgctagtggcatttggtaggaaaagggatggggagtggntaaaggngaattannctgantgctngtntcaatnngnnnntntntnnangccnnngnnaantnnnntttta

SEQ ID NO: 41254 - DNA, 363 bp, Homo sapiens
  misc_feature (1)...(363): n = a,t,c or g
gcatagnnnnnnnnnnnnnnnnnnnnnnnnnnnnnnnnnnnnnnnnnnnnnnnnnnnnnnnnnnnnnnnnnnnnnnnnnnnnnnnnnnnnnnnnnnnnnnnnnnnnnnnnnnnnnnnnnnnnnnnnnnnnnnnnnnnnnnnnnnnnnnnnnnnncacacncacacacacnnaangtacaagcccttctacctcagtctgtctcnctaactcttgatccntctttaacacctncaggnatncatctttcctatgtgtncacacnctgtnatgtctttgttcctnanttgncttgtatgcatnttanttgcnnatnnntttttctctnnttntnttgctnannnanntnntgatntncnttctct

SEQ ID NO: 41255 - DNA, 136 bp, Homo sapiens
  misc_feature (1)...(136): n = a,t,c or g
gggtctggtggacttgtggtccgaagacctgggttgtgccctggcctggcttccctctggctgtggaaccacnggcctgtnncttanncttnactcggctccatttggncngnnnnggccgnnnnnncnnntttgc

SEQ ID NO: 41256 - DNA, 385 bp, Homo sapiens
gctttctattcatcagtaatattaagtttcttgaaatgctcaagaatttattaaattatgttaccaacttgttgacataatttaaaatcatttaaaattattgtaggggtagctgataaatgcctgaattagatggtccaatgatgtctttcttcttcctcttagcctccctcatgtccatttacttgcacttctagtaggtgatggggaagaaaattaaacaatgagaaacactgtgaatttgttgtctaacaggaaccagaactggataaaaattttagtgagggaaattataaagaaacagagtaaaactgacttcaaagtgattctttcatttaagtaaagaaatggtaacaaataaaaaaaattccatctgcagggcaaa

SEQ ID NO: 41257 - DNA, 369 bp, Homo sapiens
  misc_feature (1)...(369): n = a,t,c or g
ggatgaagtggcgggaaaagtgggacaggagagaggtttggacagatactcagaggtgggatcaaagaggaactgctacccaggtatgggggcagagcagaggggtttgctgactctaggatttgaaatctggggacctggcactctagaaacaccgggagcagtagggagctgggccaggaagtgatcggtcctggttaagcacctatcgtgttttggatatcttcactagtatcgagtggcctagtctgcacagcccctcctgagggggtgcacggatgagaagtgaaaggcctancgccatgctgcttggtggtggtgancgancttcnaatcccncngtgncacaccnngnctttcctcccctgc

SEQ ID NO: 41258 - DNA, 346 bp, Homo sapiens
  misc_feature (1)...(346): n = a,t,c or g
gctgaggatannnnnnnnnnnnnnnnnnnnnnnnnnnnnnnnnnnnnnnnnnnnnnnnnnnnnnnnnnnnnnnnnnnnnnnnnnnnnnnnnnnnnnnnnnnnnacacacacacacaaaataataacaataataataatnnnnnnnnnnnnnnnnnnnnnnnnnnnnnnnnnnnnnnnnnnnnnnnnnnnnnnnnnnnnnnnnnnnnnnnnnnnnnnnnnnnnnnnnnnnnnnnnnnnnnnnnnnnnnnnnnnnnnnnnnnnnnnnnnnnnnnnnnattaccaagcgtggnggcacacgcctgnattcctagctacttggnannctnangnannanannnnttgaac

SEQ ID NO: 41259 - DNA, 377 bp, Homo sapiens
gcaatggccccataaagtcattctgctaccgccggctgcagtacctgagctccaagttccagatgcatgtgctactcaatgagatgaaggagctggccgcccagaagaaagtgccacaccgagatttctacaacatccgcaaggtggacacccacatccatgcctcgtcctgcatgaaccagaagcatctgctgcgcttcatcaagcgggcaatgaagcggcacctggaggagatcgtgcacgtggagcagggccgtgaacagacgctgcgggaggtctttgagagcatgaatctcacggcctacgacctgagtgtggacacgctggatgtgcacgcggacaggaacactttccatcgctttgacaagtttaatgcc

SEQ ID NO: 41260 - DNA, 372 bp, Homo sapiens
  misc_feature (1)...(372): n = a,t,c or g
ggagagctagcaccaagcttcaataccctgtctacaaataaaataaaataagataaaagataagatagaccctgtctccaaataaaataaaatagcataaattgtgaaggaaatgaaaagagtagtataataaagaattatagaggatggtatttagaaagtagaaaaagacgtcaacttttaggttgagagtgaagaatgagtgggagaccaatgtactgttgaagggtctgggagaagagtatttcagagaganngaaacaacaggcctanagtgagantgancttgcagttancngtnaggatcatanngagttnnttgnnnaanngccatcttcngnnnacnnncntctggggcnttanntnttcttt

SEQ ID NO: 41261 - DNA, 309 bp, Homo sapiens
  misc_feature (1)...(309): n = a,t,c or g
gggcgtgagccaccatacctggcctgaaattcttatctagaccctgttaaggttaaagaattccagattgttgttgctaccattatttgatttttttaatgcatccagagtgtcatgtttcctaaacctcaaactctattctaattttatacagttttattgtctcactgaaattatagattcttnnnnnnnnnnnnnnnnnnnnnnnnnnnnnnnnnnnnnnnnnnnnnnnnnnnnnnnnnnnnnnnncannnnnnnnnnnnnnnnnnnnnnnnnnnnnnnnnnnnnnnnnnnnnnnnnnnnnnnnnn

SEQ ID NO: 41262 - DNA, 371 bp, Homo sapiens
  misc_feature (1)...(371): n = a,t,c or g
gaaaataaaagtagtctgccacaaaaatgcctttgtttatgtaatttacacccgcttttagaactctatattatcattccttaacattttttaacagctaagattattaagagcatagaaatgtcatgaagggtcatatgaacctctaatgactctggacacttggaaaatttgtcccagtggccattatcatattatccattatatggccattatgtattaaagtttgtccaggtggccagctagtgctagcagcagcaacagaataatatgatattatgacaagacattccctttgtatatcaaatcaccagactgaaactgatgcatatggaaactaagattttacaaattttctttcctgngtaagc

SEQ ID NO: 41263 - DNA, 370 bp, Homo sapiens
gctgagaataaaattaggtgacaagggtttttaaagaataaccttttaaagtgtgggggcaggggttgcttttttttattttatttaaagtcaattatattttacatcttacatttctaaaagcattttataattatttttagtaagatttttcttaaaatttcatatactggtttctacaatttatatttgaaatttctcagtgttatgtaaagagtgatggaaaagcattgatttctttaaaaccgtaatgtttttagaacttaagcctatagggcctttcttacaatgttgatgtacccattatcttagaaaatctagtttaaactgttttctttcaccgcaaaagaattaaatgggaaaatcattt

SEQ ID NO: 41264 - DNA, 388 bp, Homo sapiens
gtgtagatgtcccttgtagccacttctgcaacaatttcattggtggttacttctgctcctgccccccggaatatttcctccatgatgacatgaagaattgcggagttaattgcagtggggatgtattcactgcactgattggggagattgcaagtcccaattatcccaaaccatatccagagaactcaaggtgtgaataccagatccggttggagaaagggttccaagtggtggtgaccttgcggagagaagattttgatgtggaagcagctgactcagcgggaaactgccttgacagtttagtttttgttgcaggagatcggcaatttggtccttactgtggtcatggattccctgggcctctaaatattgaaaccaagagtaatgg

SEQ ID NO: 41265 - DNA, 376 bp, Homo sapiens
  misc_feature (1)...(376): n = a,t,c or g
gnnnnnnnnnnnnnnnnnnnnnnnnnnnnnnnnnnnnnnnnnnnnnnnnnnnnnnnnnnnnnnnnnnnnnnnnnnnnnnnnnnnnnnnnnnnnnnnnngcctctggatggctgcgggcgggcctgactgattccacaagagatggtggagcagagtcttctctaactcccccagggaaagggagactccctttcccagtnnnnnnnnnnnnnnnnnnnnnnnnnnnnnnnnnnnnnnnnnnnnnnnnnnnnnnnnnnnnnnnnnnnnnnnnnnnnnnnnnnnnnnnnnnnnnngggagccctctagtggccctgtccgggcgtgacagagggctcacacacctcttccggtcactttctcaccgtgtgccttcacc

SEQ ID NO: 41266 - DNA, 385 bp, Homo sapiens
gcaacccggtgtgtctcggaaatgcttgtgattcaacacagggagaggagggagaggagccggtctcggaggaaacagcatctactgcctccctgtgtggatgagccggagctgctcttctcagaggggcccagtacttcccgctgggccgcagagctcccgttcccagcagactcctctgaccctgcctcccagctcagctactcccaggaagtgggaggaccttttaagacacccattaaggaaacgctgccatctcctccaccccgagcaaatctgtcctccccagaacccctgaatcctggaggctcacgcccccagccaaagtagggggactggatttcagcccagtacaaacctccagggtgcctctgaccccttgctg

SEQ ID NO: 41267 - DNA, 388 bp, Homo sapiens
ggaagacactagattttcatttttgtactaaatagaaaaagtaatatctttttaaaaatgtgttttgtttgtttttaactgtttgttcatgccaatgtgccaggcaccatatttattctttaatctatacagaaatgctgctggatgaatggaattatgctcactctgccaatgagggaaccaaggctcagaaaggttaagtaaccaacctaaggtcaggtagtactgaggagctgtgcttggatacaaaaccaggtcatccaacctggaatcttagctttgacccccaaccttctcccggcaactttgatgataatatggaaataccttagactcttgacttgactttactttctcttctctgttataaaatctgctacatttcttt

SEQ ID NO: 41268 - DNA, 411 bp, Homo sapiens
  misc_feature (1)...(411): n = a,t,c or g
ggctagaaataaaaatctaggtcatccaaaacctctacagttgtttcactaggattgcaaagaatcaagataaaaatgaaactctttcaatatggcaagaaagggggacagtgtgcataaaagcaagcaaaggctcacaaaacaggagaatatgtcacaaacaccacctgatcaatttcaagacctactatgtggcaagcatgctagatgaagcaattcaaagaccactaaggcaatactaagactccaaggagaggttcctgccctcaaggaattaaagatgaaaggcaaatgactaagcaattctactcctatgtatctactcagaagagatgaaaacgtgtccacacaaatgacttgcatgnnnnnnnnnnnnnnnnnnnnnnnnnnnnnnnnnnnnnnnnnnnnnnn

SEQ ID NO: 41269 - DNA, 404 bp, Homo sapiens
  misc_feature (1)...(404): n = a,t,c or g
gnnnnnnnnnnnnnnnnnnnnnnnnnnnnnnnnnnnnnnnnnnnnnnnnnnnnnnnnnnnnnnnnnnnnnnnnnnnnnnnnnnnnnnnnnnnnnnnnnnnnnnnnnnnnnnnnnnnnnnnnnnnnnnnnnnnnnnnnnnnnnnnnnnnnnnnnnnnnnnnnnnnnnnnnnnnnnnnnnnnnnnnnnnnnnnnnnnnnnnnnnnnnnnnnnnnnnccaaaatatgcccgtgggccaaaggtggcctttgattgtgagtttgcaacctcttgtgagtgacatagaatctactagaaaagagggcattttaaaaaaagtaggctgggtggagcggtcacgcctgtaatcctgaagggggccannnnnnnnnnnnnnnnnnnnnnnnnnnnnnnnnnnggacgagagg

SEQ ID NO: 41270 - DNA, 413 bp, Homo sapiens
  misc_feature (1)...(413): n = a,t,c or g
gggcannnnnnnnnnnnnnnnnnnnnnnnnnnnnnnnnnnnnnnnnnnnnnnnnnnnnnnnncnngtcaantanggattntatncntgtaaaagngncctttagttnctattaaaaanaangtacctaaaatnccaaaantancaagngttgnaaaggatntggaaaangggnaaccnttatgcnctgttgctggcantttaaaanggngcagntactatggaaaacagngtancanttcctcaaaaanttaaaattanaattnttatncaangtancanttccntatnttngnatatagctngccctntgnatccanggnnnnnnnnnnnnnnnnnnnnnnnnnnnnnnnnnnnnnnnnnnnnnnnnnnnnnnnnnnnnnnnntgcnnaatttnagntccctgaagcctcac

SEQ ID NO: 41271 - DNA, 105 bp, Homo sapiens
gtgttgatatggtaagttgaggcagtctatgtgatactgaaacaggagaggttcccttgtcccctccctggctcactgcttcttcttcttctttttttttttttt

SEQ ID NO: 41272 - DNA, 422 bp, Homo sapiens
gcatgtcaatactgttgctatataaatttgtagaaattataatgaatttatatatttgctttaagtttttcttctaagaatgtgtgtttgatgagaaagtttggaaaatacgtaaaagcataaattctacattctagatatagccagtgctgaggtgctttcggtcctgatacctgtttgtgtgtatgttaacaaaagtggaaatatattgtgtgtaaatatttaacctacttctcatttatcatatcatgagcaattcccatgttattgaatgtttttgaaaatatttttagtggttgtataataatctactatatgtacataatgtactttaccatttcccaattattagatttgcatattttcattacccattattataaatagcaaatggaagttctcaagtaaatttgtttttcttc

SEQ ID NO: 41273 - DNA, 209 bp, Homo sapiens
  misc_feature (1)...(209): n = a,t,c or g
ggtctcttccaagttctgagggaaaatgctgttcagcccaggattctgttgaaatctatacccagccgaaatagccttcaagtataaacatagaatcaagacatttccagacatgcaaggactcaaaacatttgcccctcacgcaccctttcgtttttnnttttnntacnntnanaatnnanccnttnncaccaatatnnnccnntatc

SEQ ID NO: 41274 - DNA, 367 bp, Homo sapiens
  misc_feature (1)...(367): n = a,t,c or g
gctgggcagaattttccaaactttgatactagtaacaattaacagcaacccttatggttgccaatataaaatcgagcaataaatcaatcaaatgcttgactcaatcaacttcttgttctttctgtaccataatatagtctagactagctttaatactgctttgnnnnnnnnnnnnnnnnnnnnnnnnnnnnnnnnnnnnnnnnnnnnnnnnnnnnnnnnnnnnnnnnnnnnnnnnnnnnnnnnnnnnnnnnnnnnnnnnnnnnnnnnnnnnnnnnnnnnnnnnnnnnnntttttttctaattagctgggtatggtggtgcacaccagttcttaagaggccgaggaggctgggcacagtggctcacgc

SEQ ID NO: 41275 - DNA, 386 bp, Homo sapiens
gcaagctatgtaggaccaaccagattggaactgtgaatgacaggctaatgcacaagctgagtgtggaagccccacccaaaatcctggtggagagatacctgattgaaattgcaaagaattacaacgtaccctatgaacctgactctgtggtcatggcagaagctcctcctggggtagagacagatcttattgatgttggattcacagatgatgtgaagaaaggaggccctggaagaggagggagtggtggcttcacagcaccagttggtggacctgatggaacggtgccaatgcccatgcccatgcccatgcctatgccatctgcaaatacgcctttctcatatccactgccaaagggaccatcagatttcaatggactgccaatg

SEQ ID NO: 41276 - DNA, 352 bp, Homo sapiens
  misc_feature (1)...(352): n = a,t,c or g
gaaactagagaaaatgccctttttgaggggacacaaacttggcaagttgacttgctttaaaaaatgtttctaacttactgaagtaattgctcaatttgattttttaaatttttacttttttttttttggnnaaananagtnnttttttngnancctaaaaaanaaaaccaantggccccannnaacccntnnagggnccnngncngagccccnnnttnttnannaaaggganccagaannccaantggnnacnngncnggtngaaaancaaantnnnacccccnnanccnnnttttnanttngnaaccacccaaaantggngccnttnaagggcgggtnnnaaaaaaaaacc

SEQ ID NO: 41277 - DNA, 377 bp, Homo sapiens
gcggcacgagggctcggcgtggacaacacagcagcatacggtggagggagaggtagaaagacactgatacagatgttcaatctgggaacttccaaattccctcataccccaaagccaagaagtgaggataatgaaggtcccatttaaactaagaaacttggacaaataaaaccttcttgggctctataaattaggttgggaaactatatcaacttgctctcaaactaaaataacagcagattcaacaagcatctgtaggatctatataagcaacagaggaaataaacacagcctctctgggagcaaacaatgcagcttcatgggttacaccccatccccttactctgctttatttttctgaacaagcaacattgtat

SEQ ID NO: 41278 - DNA, 374 bp, Homo sapiens
ggcctcctccacctaccattttgattctccccttttccctttggtcgttacccttcaaaccctgtgcccctctggttccttggccacctgagatcctcagatccctgatattggaaggctgacctcacttgactatgaactttaacctctgacctctaccctgcaggaactttttctcaatttgatcccctctcagtgcctgggaggcctgtggggtcacagagaccggccaggacattctcacctctgcccatctgtccgagctactgtcacacagtttaacaaggtggcaggggcagtggttagttctgtcctgggggctacttccactggagagggacctggggaggtgaccatacggccactccgtcccc

SEQ ID NO: 41279 - DNA, 375 bp, Homo sapiens
gtggccgcccccgtggatctagagctgaagaaggtaaaagagggtctttggcaggcggaggtcttctttttggaggctgaggggactatagacaagaatatcaagtgaggcacgagccttgcagaaggaaggagggtccagtggactagggaatggtttcccagagtcctaaggcctcactgggtctccataaacggggtggggggcgagcggctcttgctgggtaggagccggttggtctgggtcgggtaagtctgcgggcctgtctcgggcttgtccagtctttctgagctccagagacatttcgttgcgtttggaggcttcagggactcactttcatagtaagaactaaagagagcatttcaaaatggggtc

SEQ ID NO: 41280 - DNA, 288 bp, Homo sapiens
gttcagtccacagcaggtgttaaagttgggggtaaacaatttctgaaaaattgtgactcatttcctcaaattcatctctttacattaaagctaggtctgtcagaggaattgggataaaacaaacataaaattcacgtctactagaaagtatcaatttggcctcaagtcaaaatcgtggatggcatagcctaagactacataactattagaaagactcttataatagagactaagaattctgttttttacacattgggtttttgctttgagattagttgggtttttttg

SEQ ID NO: 41281 - DNA, 328 bp, Homo sapiens
  misc_feature (1)...(328): n = a,t,c or g
ggaaaaactggagtttttgcacaagactcctgtggaagaggtccctgctgctattgccccattccaggggagggtgttgattggtgtggggaagctgttgcgtgtctatgacctgggaaagaanaagttactccgaanatgtganaataancatattgccaattatatctctgggatccagactatcggacatanggtaattgtatctgatgnncannaaagnttnatctggnttcnctcnnncgnantgannaccanctnatcanctttgctgatgatacctaccccctatgggncantacngnnannctnntggnctatnanactg

SEQ ID NO: 41282 - DNA, 404 bp, Homo sapiens
  misc_feature (1)...(404): n = a,t,c or g
ggagaatggtttctggttttataggatagggtatctactacctagcatgctgttgtagaaatagactcagctttagatgaggcttaggcttgaatccacgtgccatccctccaaagtgagtctccttgaccatgatgtaagtattaacctttttgagtctgtttctttgtctctaaaaatgggatttcattagttaccttgggtggatttgcttttggtattaaacagagcaatctaggtgaaagcgccaggcacattacctgggacatggtgagcaagtgctcaataaatgttcatctgctcctttctttcaatcangcgaaatgccccaaaccanncaagatgtnangattaaggatatgccctcatggtcantatacnnatgtacattgcntggttagcgg

SEQ ID NO: 41283 - DNA, 406 bp, Homo sapiens
  misc_feature (1)...(406): n = a,t,c or g
nnnnnnnnnnnnnnnnnnnnnnnnnnnnnnnnnnnnnnnnnnnnnnnnnnnnnnnnnnnnnnnnnnnnnnnnnnnnnnnnnnnnnnnnnnnnnnnnnnnnnnnnnnnnnnnnnnnnnnnnnnnnnnnnnnnnnnnnnnnnnnnnnnnnnnnnnnnnnnnnnnngacatcctgacctcaacggnagattntccgtcctcggcctncngnagtgctanantnacagacatnagccanngncgngannaggcnttnacnnaaantannnangcctgctaatnactaatntgacactggantgtnnnananaaaattactanttccttgcctagatangacgactcatttatcacgnngctnntcgngnatcnacctntttaaactnggacngatnctatganccnttaa

SEQ ID NO: 41284 - DNA, 388 bp, Homo sapiens
  misc_feature (1)...(388): n = a,t,c or g
gnnnnnnnnnnnnnnnnnnnnnnnnnnnnnnnnnnnnnnnnnnnnnnnnnnnnnnnnnnnnnnnnnnnnnnnnnnnnnnnnnnnnnnnnnnnnnnnnnnnnnnnnnnnnnnnnnnnnnnnnnnnnnnnnnnnnnnnnnnnnnnnnnnnnnnnnntaagaaatgtgcaggtaggtagtctgtggctagtgtggtaactccagtgatcctcagagactcaggtttcttcccattcactgttctaccatccctaaggtatggtcctcatatantccacaatagctgntanaatgccaaccaagaananggaaattantctgtatacattaccctnttttnttcgtntntttttncnntnntntnnanttnctttntagnantntnnnttat

SEQ ID NO: 41285 - DNA, 365 bp, Homo sapiens
  misc_feature (1)...(365): n = a,t,c or g
gtttttttttttcatgaaaacttttttaattccaaaaaatccaacatacttcaaatcagtgcttggtgctttagtgaagagccatgccaaataacacagttggcctatatgaattacaatcaaatatgtaattcttctgttcaattcaggttgaaaaatccagtgaaactttaccgnttttnatatntncntntttnntannccaganangantaaatgtatnanncnancaactggnaaaanttnancccnanatttatnctgnggntnatgatcttatcatgccatgcttnanngctnnttgaatnantncatcntganttcntgatanantgnttcnggnaanactnannnnnaactttctt

SEQ ID NO: 41286 - DNA, 374 bp, Homo sapiens
  misc_feature (1)...(374): n = a,t,c or g
ggaattttatgaaattttaaaggaatactagctgtctttgaaaatggaggagggaatactaccctgttcactttatgaaaccactataactgacagcaaaacctgacaagggtaatatatcaagatttcagactagtatttctcattaacctaaatgcatatattcttaagaaaatgttggtaaatcacctccggtagaatatgagagacaattctgagacttatcgcaggattgtaaggtttgtttaacatttgaaaatgaactcagtgtaatttgtcacaatgatagaatgaagaaagaagaatttctctcagaaaactaggaagagaaggagcttttacaatgtaaataangggtatctactaagaaccca

SEQ ID NO: 41287 - DNA, 361 bp, Homo sapiens
gctggatgcggtatgtgtgagaaaaaaagaggactcccaaggtttgtgattgaatattaggaagaacagaattgctgtgaattgagatgtggaagaatgtagaagtagcaggttttgaggggcagggaaattcaagagtctggctttggtcatattaattttgagatgcctgtttgacatccaaaagacatagtaggttagtatctggagttcagagagaggtctggcctgaaaatatacagtagttgtcagcatataaatttgaagttgtcgaagtggatgagattgccaagggtgagactatagttagaaaacagaagtgttaagccaggaacgatggctcatgcctgtagtcccagca

SEQ ID NO: 41288 - DNA, 231 bp, Homo sapiens
  misc_feature (1)...(231): n = a,t,c or g
gcggcacgagggctttcaataataataattgacattgagaattttttatggatctgttggctctatgtatgtcttttgaaaaataagcattttactcatttttaatttgttttttgtgatatagtcatttgaattttaatatatttttgatattaaccctttgtcacatgtatgatttgcacatattttctcttatttcttanttgncacatcctgttgatttcntcacat

SEQ ID NO: 41289 - DNA, 456 bp, Homo sapiens
  misc_feature (1)...(456): n = a,t,c or g
gctatgacatttgtacnnnnnnnnnnnnnnnnnnnnnnnnnnnnnnnnnnnnnnnnnnnnncaattcggcggcacgagggaccttggctaaatccaaaaggaggcatggtccagatcacacacataatatatgtaattctgtgtaatcagagtcgcttactaaagagtccccaaacccctcatatgaagattaagttcccttgcaagctttcagaaagggcagttagacttaagaacataggaaatgttaagacaaaaggagacttgagcagagtcaactttagttagtatttgtgccttttacgcccttaactccctttgtaaccattttctgaattatcttcttgctgagtgtttaccctagaatgtacacaggttgtttccactagaaaaggnattttgttcatttcctctagttggcgtagttcagctcaatatatactaaggcctttttca

SEQ ID NO: 41290 - DNA, 378 bp, Homo sapiens
  misc_feature (1)...(378): n = a,t,c or g
ggctaggtggagatctgcttnnnnnnnnnnnnnnnnnnnnnnnnnnnnnnnnnnnnnnnnnnnnnnnnnnnnnnnnnnnnnnnnnnnnnnnnnnnnnnnnnnnnnnnnnnnnnnntgctgcattctttcatgtttcttaggctgttctatatttttattggctgttcttctgaaatttaatgataaactgctattgattcagcttcagacttactaatatagtttctctaataattttcgttaatccttcagtgngtattgtcgcatgaactatgatatgactatgantnantcacacccntancanncnatncaccactnaagtnttgntatatacngatnnncacctangattgtnnnacantngcnanttnctta

SEQ ID NO: 41291 - DNA, 362 bp, Homo sapiens
  misc_feature (1)...(362): n = a,t,c or g
gcggcacgagaactggaagaannnnnnnnnnnnnnnnnnnnnnnnnnnnnnnnnnnnnnnnnnnnnnnnnnnnnnnnnnnnnnnnnnnnnnnnnnnnnnnnnnnnnnnnnnnnanngntcnnagagtgcgtangcccntgncgnantacnagctgcngaacctgctgccnttatactgacttttnctgcccagggctgngccagncaggggcatgnngacangtncanctgctnaacctnatgngcnaacagctcttatngcatatnttaatncaancancttagtacnnnggattttnngacatgtnctcantgancntttgntgcanatnttnntananttnncatgtgnctnanatctg

SEQ ID NO: 41292 - DNA, 391 bp, Homo sapiens
  misc_feature (1)...(391): n = a,t,c or g
gcacaaacttaatttcacaactcaccagtggactgtcactgcaacttgaaaaattctttttccatggataaactaagaaatttggagaagggaagttttctgcctggtagcagaggaactttttaacagttggagaaggctgatgatggaatggggctgccttggaatggagtgctttcccaaggcttgaaggacccaggcaacaggctgttggaaggtgggagaagattcactgggtgggagatggactttgtgaccaccggggtatcttccaagctaaagattttatgattcccattttatgacttgctgaaattttaagatgattaaagttatttgaagatgaanaagattctgaattttgttaccacgattctacttttttgncaaa

SEQ ID NO: 41293 - DNA, 396 bp, Homo sapiens
  misc_feature (1)...(396): n = a,t,c or g
gatannnnnnnnnnnnnnnnnnnnnnnnnnnnnnnnnnnnnnnnnnnnnnnnnnnnnnnnttaattgtaggctatttattgctttgctttcaaattatttcagctatgactttttatggatttttaaagttaaattttttttttttgaaacggactctnncnctgntgcccaggctngnntncngggccangacctggnttnacnnanagcnccgcccccngggtacccnccctacccnggcttganccncccnagcngacggcccaacgggcgcccccacccngccggnccanctcctgcttnttncncanaanccncnggnnnccnngctnccgccnngnnnncngcnnnanctnnngngnccccccnnncngnnnagnccgccnngattcccc

SEQ ID NO: 41294 - DNA, 427 bp, Homo sapiens
ggtggtgaacacaggtccccaggatcaggcatctgctcctctgcatgaatgcctgcagcaggccagttctttggaagccaggagaacactggagtgcaaggaaggttcaacccccatggtcctacccatccctgtgtctccccgcctcagatcaagagggccatcctggggcagcaggagacactgcatgtgcaggagcgcttcgtggctggctccctggctggtgccacagcccaaaccatcatttaccctatggaggtgagaaggagggaccccagcggaggccccatggcagggtggggggcctgctgtacccatctcactctgcatttcacaatatccattgggattttacctttgtccctctctgatttggagtatagctcatcagagtaatgcaatttcatgtgaacctgctggggataca

SEQ ID NO: 41295 - DNA, 412 bp, Homo sapiens
  misc_feature (1)...(412): n = a,t,c or g
gaggagccttgttgtcagagagctaaaaattattttttaaaaattnnnnnnnnnnnnnnnnnnnnnnnnnnnnnnnnnnnnnnnnnnnnnnnnnnnnnnnnnnnnnnnnnnnnnnnnnnnnnnnnnnnnnnnnnnnnnnnnnnnnnnnnnnnnnnnnnnnnnnnnnnnnnnnnnnnnnnnnnnnnnnnnnnnnnnnnnnnnnnnnnnnnnnnnnnnnnnnnnnnnnnnnnnnnnnnnnnnnnnnnnnnnnnnnnnnnnnnnnnnnnnnnnnnnnnnnnnnnnnnnnnnnnnnnnnnnnnnnnnnnnnnnnnnnnnnnnnnnnnnnnnnnnnncccctncaaaagaaaaggcanaacgcanttaaatattcnataagagttanactgacactgntacacagataaatgtgaaa

SEQ ID NO: 41296 - DNA, 386 bp, Homo sapiens
  misc_feature (1)...(386): n = a,t,c or g
gtatttatatgtgttggtttattcatttactcacttacttacttgcactttggtcatttcatttggttttttagagctaaactcaaggctcaaatcaccatattgaatgagatctgtatttactttttgaacccaactacacttagggcatttaatcctattaacattcacctctgctcacagtccagcaaaatctgctgtatgctaattacataacatgttttaattatatttttatttcaccttaacattcgataaagtacactctctatatcttcatctaattacttgataatcatgttaaatattataaagggactaatatttgtgggtggatttttggtggttggttggtntgntnngntgnnnngnganacaggnctcct

SEQ ID NO: 41297 - DNA, 413 bp, Homo sapiens
  misc_feature (1)...(413): n = a,t,c or g
gccaggatggggccttaaggctcaccactgagttcgtcaagaggcctgggggtcagcacggaggggactggagctggagagtgactgtagagcctcaggtcagggcctcaggacacccttttctcagcccagaccccctccatccttcccttgctgccagcaaatgcagcatgaagtgggctctggctgcctggcttaaatcctgccttaaacccagccttatattttttaattaccagaatcctgagtaatgggcttctttacaaaagagaaaatggatggttannnnnnnnnnnnnnnnnnnnnnnnnnnnnnnnnnnnnnnnnnnnnnnnnnnnnnnnnnnnnnnnnnnnnnnnnnnnnnnnnnnnnnnnnnnnnnggcgaacctcttctctactagaaacacaaaatta

SEQ ID NO: 41298 - DNA, 375 bp, Homo sapiens
  misc_feature (1)...(375): n = a,t,c or g
gttagagggcaccacaagattgacaagaaaaaggggattgaagttagccacagctctgtctctgagcaacaaatttgtggagggtagtcataacagtactgtgagcttaaccacgaaaaatatggaanngtcngtgccaanatcccnttnnnncctgattccaactttnanaatgantttnctgcctcatcttattggnaataccaccntattcttactgtctnttcctccatgnactttntgctttnangacatggntntaagcntcantntnccntatttcattntgcaagacttngattccatgtcttacagttgnnnanttnntttaggnntgccangttttggnggctcacgcctgtatnccanctcttt

SEQ ID NO: 41299 - DNA, 250 bp, Homo sapiens
gatgagtagcatgtaattcctggtcccaggatattacagctgtaacattcacaacacagattcaatatcaaaacacatttattatgcctaaaaaaagtgccttgcaaaatgtgctttgtaccaaagcatgaaaagtttgaacatgagaataaacttgaccaacttcttttgtctttataagattcaatgcttgccaaagtgtacatctgtttattctacgcgattactaatctttctttttttttttttt

SEQ ID NO: 41300 - DNA, 431 bp, Homo sapiens
  misc_feature (1)...(431): n = a,t,c or g
cctcgaggccttgancnncgngnncgncaatctggcacgagagttgcagcatgaagaaaactataaaatattgaggaatataaaacaaatgaagaacttgggtcaggtcccataacccttatannnnnnnnnnnnnnnnnnnnnnnnnnnnnnnnnnnnnnnnnnnnnnnnnnnnnnnnnnnnnnnnnnnnntacagtatctgtaggtcaggaatccagaagcacctaactgggtagttctggctcnnnnnnnnnnnnnnnnnnnnnnnnnnnnnnnnnnnnnnnnnnnnnnnnnnnnnnnnnnnnnnnnnnnnnnnnnnnnnnnnnnnnnnnnnnnnnncttccatggctgntgctgnggcctcagccatcatcacatggacctctcatanggctgcttaagtgtntcacaacatggcanctggnctccg

SEQ ID NO: 41301 - DNA, 411 bp, Homo sapiens
  misc_feature (1)...(411): n = a,t,c or g
gccgaactcaannnnnnnnnnnnnnnnnnnnnnnnnnnnnnnnnnnnnnnnnnnnnnnnnnnnnnnnnnnnnnnnnnnnnnnttttaaatagagccgtcagcatgggcctcatttataaaatgactttaaatcggagacctgaaagagctgagggagtcagccatgcagttgtctggggaagagtgtcccaggcagaaggaacagctagctggtggaaaggcctggagacaaaagcctcgggaagtgttaaaaataatgagaaggccaggacggttggagcccgtgagcaaatgggagcctaatgaggagataagatcagagaaaggggtctcaaagtaaggagcctgtaagaatctttggctgaaacagaaccactgntgggctttgaacagaagantgataggaactga

SEQ ID NO: 41302 - DNA, 353 bp, Homo sapiens
  misc_feature (1)...(353): n = a,t,c or g
gagaacnnnnnnnnnnnnnnnnnnnnnnnnnnnnnnnnnnnnnnnnnnnnnnnnnnnnnnnnnnnnnnnnnnnnnnnnnnnnnnnnnnnnnnnnnnnnnnnnnnnnnnnnnnnnnnnnnnnnnnnnnnnnnnnnnnnnnnnnnnnattagggggacgnnnnnnnnnnnnnnnnnnnnnnnnnnnnnnnnnnnnnnnnnnnnnnnnnnnnnnnnnnnnnnnnnnnnnnnnctgcaattgagccatgatgatccactgcnctcctnctgggtgacagancaagaccttgnntnanacacacacnaacagnangagagacttttcacggcattcnnccatcctggnagaggcagga

SEQ ID NO: 41303 - DNA, 357 bp, Homo sapiens
  misc_feature (1)...(357): n = a,t,c or g
gtttttttttgaagaaaacttttaacatcataaactgatctttatatacaattttatccattatttctatagaccaattccatccaggtttatttacttatttacaaatgacataaaaaatttggacggggcatggtgggtggattgcttgagcccacgagtttgagaccnnnnnnnnnnnnnnnnnnnnnnnnnnnnnnnnnntttttaagaaaacagaaacatttaaaattttctacttaggatcttgaaagtcaaaataaaatggaaagtatctaggatagattgacaaaagaaaggaatatcaacaaaatgattttcgatttgaggaagaaagaaaccacaatcttaggctgg

SEQ ID NO: 41304 - DNA, 363 bp, Homo sapiens
gtgcctattttgcaggtttaccagatagataaattaaagcttctaacaccaaatcctgttcttcctttcattcaacctaatttgtttttctatctactagagctctagttctactctctgggacccacttccctcctgtgacagaccttcacagagggatggcctcactgcaagagctcagcagacagggactctggaaaagacaaggctgtgtttaagcctggactccatcacacctgccacctgcagtctaggttagctacccaccctgtacactcacgctcactgaccactgctcctaggtcatcaaccctcacctgttcatgtgtattgaccttgagcatcttggtccacaaggctatc

SEQ ID NO: 41305 - DNA, 354 bp, Homo sapiens
  misc_feature (1)...(354): n = a,t,c or g
gtttttttacacatctgcagcagatttttattagatggaagataacaagcattacctcataggtaagtggtacgaaatggcaagtacagccaagccacagaggagtgaggacattactggctatgggaatgggtacttatgaaatctaagggttgggtctcctgatgaactctaactacccagtaagctcttctctttggcactcaatatgaccactgctggcatgaaagggtctacagtagctacttcaacttggccaacagttcttccagttctggtcgagctttgaatcgtcccttgaagtcttcttcagtgngctccttcactgacagtctgactccttnangaaaactg

SEQ ID NO: 41306 - DNA, 360 bp, Homo sapiens
gcagcaacccagtaattttcagcccataagctttaattgtatttttgaaaaacctccaggaagaattcactgagttctaagtaacgtaagagtagctgggtctctggagtcttacacagtgtgtcagttaaattttgattaactagtaccccccagcaaatatgtgtctcaaaatagctaataacacactaagctgttagagttacagtctggcaggcagcttgggtttatgtagcagaaagtacctcggactcagaagtcccaagttcaagttcggttgtcaccactaaccagctataagtgataaagtacaagtcaaataacctttctgtttctctttttcttaactgaatatgataa

SEQ ID NO: 41307 - DNA, 383 bp, Homo sapiens
  misc_feature (1)...(383): n = a,t,c or g
gaatgctttgaaaatggtctacatgctatgcatttgcttttcttagagacttttggagcccccctttagggaaggttaacctttttgttgtcattgccactaccagcaagtacatgatggcatgtgttgagagctgtgttctctttgttttggttagacatgattcctgccctaagagctaatctcatttggagggaaatgaagggaccaagtacagtattcacagtccaccagttaggactgaacacatagcccaaggtgtttaagaagaaannnnnnnnnnnnnnnnnnnnnnnnnnnnnnnnnnnnnnnnnnnnnnnnnnnnnnnnnnnnnnnnnnnnnnnnnnnnnnnnnnnnnnnnnnnnnnnnnnnnnnnnnnnnnn

SEQ ID NO: 41308 - DNA, 391 bp, Homo sapiens
  misc_feature (1)...(391): n = a,t,c or g
gctggagtttgagaattctatttgtcctttctatattacttgagatttgggaaattctgaataatacaaagaatgattgcaactcattgagcaaataaaaactgaggccacagtgggnnnnnnnnnnnnnnnnnnnnnnnnnnnnnnnnnnnncagagagagacacatgggagagtaaaanagaaaatgtcctttttacanganggtagctancgaatatnnaagaactgacagaattannnnnnnnnnnnnnnnnnnnnnnnnnnnnnnnnnnnnnnnnnnnnnnnnnnnnnnnnnnnnnnnnnnnnnnnnnnnnnnnnnnnnnnnnnnnnnnnnnnnnnnnnnnnnnnnnnnnngctaancaataccaanantntncgggcntgggggc

SEQ ID NO: 41309 - DNA, 376 bp, Homo sapiens
gttgtaaattagaaaaggattatatctgcttataacaaaaattcagataaaaacttagtccctgctccttgccatcaaatatttgtaacacagagagaaacactagaagcagcttagagtttatctttctagatcattttctgtatatattcaaaggaatttttaaaacatagcgatgtattacttgtatcaattttagttttctacaacaaatggaccatatgaatggtttgcagtttgctttatttctgatgaacatcttccatattggtatttaatatctgtgtgattctttttaaagctaagtaaaatttcttctggacatagtatagtttacttaaccattccctacgttgtaagtccatttaggtatttt

SEQ ID NO: 41310 - DNA, 380 bp, Homo sapiens
  misc_feature (1)...(380): n = a,t,c or g
gagaaaatttagaaaacccagaacattaatattttggttcctctcattaggtaaccatctttgggtggacatgtgtacatacatacatacttttttttttttctttngancaaaaaagnncntactttttctttttttctnttcngacacccagnctgnagngcangggcccnancncggttaanngaatcctccacntccnggtnncangcgatnctccngcntaancctccngagnagcngggactacnggggctngnngccacaccnngntaatttttngaatttttnaccaaaaatgnagnntcaccgggtcncncngncnggggtcaaantnntgagctnaggcnanncgccnggctagattccaaaagggtggg

SEQ ID NO: 41311 - DNA, 390 bp, Homo sapiens
  misc_feature (1)...(390): n = a,t,c or g
gggggaaaatagtatcgaagcagaaattagagctgaagacaacnggggcaggcccaagattgatgtctggaaagcaggctgcagccataatcaaagcagttgattcaaagtacacggccattcccattgtggggcaggtcttccagagccactgtaaaggatgtccttctctctcggagctctggcggtccaccaggaaatacctgcagcctgacaacctttccaaggctgaggctgtcagaaacttcctggccttcattcagcacctcaggactgcgaagaaagaagagatccttcaaatactaaagatggaaaataaggaagtattacctcagctggtggatgctgcacctctgctcagacctcagactcattanaagccattttgga

SEQ ID NO: 41312 - DNA, 372 bp, Homo sapiens
  misc_feature (1)...(372): n = a,t,c or g
ggagagcattagaaggttattcattataactttgcacttatggtttaattattatttcacagttgtttaattcacatgctgcattttttcacttggtttctatcttctcattttctaagccctaaattgtctactttattttgaaggaggctgtctgcgttagtttgggaagtcagatatatagaacataatgccagaacatttaacgaacctgagagtgtaattgcaagatcagctaaaaagataactgaccaacttttaaaatttatcaagtaagtaatttcatagatgttgtgtaaaagtgactgcatattgtgctattaacaatcatctagttttgccgggcgtggtggctcatgcctgntaatcccg

SEQ ID NO: 41313 - DNA, 372 bp, Homo sapiens
  misc_feature (1)...(372): n = a,t,c or g
gaactgggcatagtnnnnnnnnnnnnnnnnnnnnnnnnnnnnnnnnnnnnnnnnnnnnnnnnnnnnnnnnnnnnnnnnnnnnnnnnnnnnnnnnnnnnnnnnnnnnnnnnnnnnnnnnnnnnnnnnnnnnnnnnnnnnnnnnnnnnnnnnnnnnnnnnnnnnnnnnnnntttaaaaatagagaatacctcactttcaccaaaactgtaaacccctagagtgattgtactcatnnnnnnnnnnnnnnnnnnnnnnnnnnnnnnnnnnnnnnnnnnnnnnnnnnnnnnnnnnnnnnnnnnnnnnnnnnnngctggtctccagctnctcagcatggtgaaaccctgtctgtactaaagtaacntaaaaattaccc

SEQ ID NO: 41314 - DNA, 414 bp, Homo sapiens
  misc_feature (1)...(414): n = a,t,c or g
gagttgctagactgcagctgttgtcagccacctgtacttctcaggctctatctgagatatcatcctttctttccaactgtgggcttcttatatctacttctcagacgttcattttcaagggccaaaatgttcccactccaactcacaatctgtgggaaagtagcagctctggtttctagaaaaattcagaaccttccctttccttctttctggaggcaaagggtgaaactttaaagcctgacagaacagaaggcagtttatctcagcagtgaagggatggcagtaatgggaatgcagtcagggtggaccagcagaatgggtgaanagatgtattggatttgctgacttgctaatcggagctattcttttttccccttttgaaatcaggngnggaggnacagccaaaaatatctg

SEQ ID NO: 41315 - DNA, 430 bp, Homo sapiens
gtgtttgaaggggcttgcactgccaaatttggggcagttcaagaatcaagaaaaagactgtggttgtcagccttgaataaatacaaatgaaaccttcctcagttgccaccactggaggagactcttacagcaaattactctaaaaattgataaagaaatttagcttgcctttttaaaggaggaactaattcttccccagttggtgagagaaagctctttgcagaagagtgctggctaatatatgtagaagaaataatagaattagatgatcaccattttgtgaccctcaatgaaataattccagcaaggatcagcaggtgaaaggtttttggggaacaggatatttcttaggtgtctaagtagcatccttagattaattctcattgtaaaaggagaaccactttaaccatgagtgcctttagtctccacc

SEQ ID NO: 41316 - DNA, 396 bp, Homo sapiens
gattaatttgcattaatgtgggtttcatgtgtccttccctgggtatgccattgtgattcaggcttaataaaactgacacgacaacaacatagtgccttttatttcactttccaaaacaaaccaacccacccaaagacccacacaaatcctctcaattttttaagcattttactaatatattttagtacatcataattggcccagcacgaaggaatctagttatcttctcagtaaatatttatagcgtcactctttcccattcattctgcattttcttagagaatctcactgtagcctacatctgcaattcattgactttacaatttaccacatgttgggatgggagaggtcttagctccatttgaatcactacacaaatatgcaagtgatttatcg

SEQ ID NO: 41317 - DNA, 184 bp, Homo sapiens
  misc_feature (1)...(184): n = a,t,c or g
gaccctctgtcccagttttatgaatcccaacagtctaacctgactgccttctgcttaaatcctcttgatgctattctatcttcaaatcacttttatttctnaccnccttcagnagttnannaccngcctgnccancatggtgaancccgatctctactannaatacaaanattanccntatgtg

SEQ ID NO: 41318 - DNA, 236 bp, Homo sapiens
  misc_feature (1)...(236): n = a,t,c or g
gaaaaaaaagagaagcaagccccagaatgggaaaagattcttgttacacatacagctgacaaaaggttcctataaaacgttgaggacnnnnnnnnnnnnnnnnnnnnnnnnnnnnnnnnnnnnnnnnnnnnnnnnnnnnnnnnnnnnnnnnnnnnnnnnnnnnnnnnnnnnnnnnnnnnnnnnnnnnnnnnnnnnnnnnnnnnnnnnnnnnnnnnnnnnnnnnnctaggngngtgg

SEQ ID NO: 41319 - DNA, 151 bp, Homo sapiens
  misc_feature (1)...(151): n = a,t,c or g
gcatatatagatccagaggacagaatgagtgtccaaaaataaacccatacatctattnnnnnnnnnnnnnnnnnnnnnnnnnnnnnnnnnnnnnnnnnnnnnnnnnnnnnnnnnnnnnnnnnnnnnnnnnnnnnnnnnnnnnnnnnnnnnn

SEQ ID NO: 41320 - DNA, 264 bp, Homo sapiens
  misc_feature (1)...(264): n = a,t,c or g
gaaactacataaagcaaaatctgacagatgaaagggagaaatagacaaattcacagttatagttagagattttaatacccttttctcagtaatgatagaacaatttggcagaaaatcaataaagacatagatgatctgaataatgtcataaccttgactttgttgacggttatagaacactataatcaacaacatggaacaagaatgtattgatgggttgtgnnnnnnnnnnnnnnnnnnnnnnnnnnnnnnnnnnnnnnnntg

SEQ ID NO: 41321 - DNA, 369 bp, Homo sapiens
  misc_feature (1)...(369): n = a,t,c or g
ggacaaaactataatccagcatcttttattgcattggaaagactggcaaagtcttttggatgggttgggagatgtggctggaaagtactttggaaaatatacaatcaagatatctcatggcatattaaaagaaaaatcttaatagcagtgttggcttttatttggattttttcatctcagttttttctgtggaatctccttcattggcattggtatttaatcataaacggggcggatgtctacttagtcagtatttcaagtctgttttcctgantataaatnagagtatttaaaganataatntggattgctnttgnacncgtnncnttaccttcanccanntgctnctactatcataatctgngcaga

SEQ ID NO: 41322 - DNA, 376 bp, Homo sapiens
  misc_feature (1)...(376): n = a,t,c or g
ggtgccatattnnnnnnnnnnnnnnnnnnnnnnnnnnnnnnnnnnnnnnaaaggaggtttgttgaaagccaaaatgggctannnnnnnnnnnnnnnnnnnnnnnnnnnnnnnnnnnnnnnnnnnnnnnnnnnnnnnnnnnnnnnnnnnnnnnnnnnnnnagcagaacagccttattgcctgagacgcaggnnnnnnnnnnnnnnnnnnnnnnnnnnnnnnnnnnnnnnnnnnnnnnnnnnnnnnnnnnnnnnnnnnnnnnnnnnnnnnnnnnnnnnnnnnnnnnnccnaaagctganangcgangaanctncnnaatnaatttgcncctntnnaagatnnggntcatttggctnacnanngnnannccatttctgc

SEQ ID NO: 41323 - DNA, 385 bp, Homo sapiens
gcgtggggttcgtcagctggaaactttttacttttgccagagcagtttcattggagcaatgggtgtaggagacagactctgagtcaggcaagaagaggacaaagagagaaggcacaaatgtacttaaggctgcaggccaagggcactagaagctgctaagtgtgtgcaagccagccacctctactgtcagtgaccgtggctacgctcaaacacgtcctggtcctcctccacttctctcaatacctgccatgtctccaccttcacacttctcagggacttccaggttgtctgactcgctttggataaagaactgaatccaaaacgctcttccctcgtaggcaagtgtatgtttcatttatattaagaaatatgaggccaggtgcgg

SEQ ID NO: 41324 - DNA, 366 bp, Homo sapiens
  misc_feature (1)...(366): n = a,t,c or g
gaagcgtcccgttggccagtgcaacgaagaacggaggaagcgacaagatttcagtttgtaagtagtgagagcaatgatcttggctttgcatggtgctcaggaagccttccccgctcccaaaccagaaaggaatccatccagattttcctccactgtctggatggccgctctgtggatgcttccatctgtatccattgccggcacctggtgagattccgtctctagagcctttgaggtcactcctgacgctgacatggctgtgaagagctgggtgccaggcattactggctncnaggntgctttgcnnggaatnngtgggncatctgaataaccanttnnannnnnnngctntgtnnangctgattt

SEQ ID NO: 41325 - DNA, 366 bp, Homo sapiens
  misc_feature (1)...(366): n = a,t,c or g
ggaaaggttggacaagggatcaatggaaagggaaataaagtaagggaaaagtgcggtcgggtattctggggttcagatccaatgtgagtcatttggagttggatgtgggtgactgggagaggagggaccaggcgtcccaaatagagcaagacttggggctgtgatagatttggctgcagcttagggatagcatagaatcagtaatagttgaaaaatttgcaacacttcaaatgtaaggttgagaagttgctacgcaagaacaaagttttgttttgaacttagttttgaacaaagaacattgagatagtagatgtgttcaagcttnanagngatctggcagcnnaatangtttanactgctanggga

SEQ ID NO: 41326 - DNA, 372 bp, Homo sapiens
  misc_feature (1)...(372): n = a,t,c or g
gccgaggccggtgttctcgtcccaccatgggactcagcctgaagaagacaaggtgaatgaacgaccatttctctctaactcagttggctaagaggactgagcttgcgccgaggctctggacacaaatgggccagttgaccctgaggtttctttctggtagtggaggtggggcttcctctggctgaccctgcttaggtctctgatggaggtagcaggggctctggttcccccaaactggccaagtcctccaccatagcacccaaggggtctgggcagagtgcagcttccctnccctncccancttggcttggtgggcacctgcttccctgcctnctgaccttgatggctaatgcaccagccncancaggcaca

SEQ ID NO: 41327 - DNA, 371 bp, Homo sapiens
  misc_feature (1)...(371): n = a,t,c or g
gggaagaatatgtttaggttcttgaaacttctgtgagtgaagggaactactaagtggaaagtgtaatatgttgataaaatatttcaccagatgaagccaaccttactcctcccaggaaaacttcttcatttatgtattagctctggccaaaagaagcctataaaggcagcaaagtcaaaatagaattttactttaagtccctacttctaataattgtgctagtttttagccaagctaatttctgtggcagttttcataacaagtgtgtctaaaggtgtttgatcagaatttataaattaaaatatttctctcattttttggaggggcgatgcagggagagggatagactgntgctgcttcctcctgcttgg

SEQ ID NO: 41328 - DNA, 332 bp, Homo sapiens
  misc_feature (1)...(332): n = a,t,c or g
ggacacgctcgcctctccacacttgtcccctagccctttgggccttaacacatctgtgctgctgaggctggtgcagggcccagcctctgggtatatcctgggatgctgtagaccccacacgggccactgcccatattgctacccactcaagtctccccgtcaggaaactgtccccacaggtccaagtgacacaccccagagatcagtggctgagtctgaagatggagctatggggtggaaggcattcttttttttnananantnatggtatagcnntaaagntnggantagnnncctttanntnnngaggnccagatgnncccnnggngcct

SEQ ID NO: 41329 - DNA, 366 bp, Homo sapiens
  misc_feature (1)...(366): n = a,t,c or g
gcctctggccgacacctccttccagctcacttgctttagtgcggccagtaccgaccctgcctaggcatgtcgacctgcagggacccttttctggctcttcgaggcctctgcccaccatcccctctttggtctccatagtcccttccccctgttctctctcgtttcatcttactggtctggcaaagtccccggccttgggcgagcccagacctcctcagtgcctgcacacagctgcccacagccagagaaatccatttaagcagactgcctgcatccttcttaacagggcaaggcaggcactccctgncacaagagaccctgttccctagtagggcagcttttctcctcccagaaactnctgggtat

SEQ ID NO: 41330 - DNA, 373 bp, Homo sapiens
ggatattaaaagcaaacaaggattattaccagaaataagagggacattaaataataataaagaggtaatttcaccaaaaagacataaaattaaatgtgtatgcacaaaacaacagagcttcaaaatatacaaagccaaaactgataaagacaaagactaaacaacccacaattaacagctggagacttcattctcattaatcaataaaacaaatagaaaaccagtaagtcatgatgaactcttgccgtgatggaaaaaagaaaagaaaaccagtaaggatatagaagacctcaacaacattattaatcaacatcattaaaacatacaccaagatggatcatactctgggccatgtaattcactggccaattta

SEQ ID NO: 41331 - DNA, 384 bp, Homo sapiens
gaccatggcttcaatccctggaaaaagaaaaagtaactgaataaataagccctcgtgcctctctcctcagtcacctggtgatacagttacactcaagttaacatgatttttacatccacagttttcatgctaagcaattgtggtcagagtcagctttcacaccttacccatttagcatctctactacggaatacaactgtgcctccctcctgaagaaggaaaattaatctggtgataaaaatgcccagacaaagcaggataagcataatatgagtaggaaaacaaggcacccacaagagaaatgtccatttgctcatggaagacaatcaaattgtggcccaaaagtcaataaactctatgcatctaatgaatacatctccaatc

SEQ ID NO: 41332 - DNA, 353 bp, Homo sapiens
  misc_feature (1)...(353): n = a,t,c or g
gtgcatagggctcggcnnnnnnnnnnnnnnnnnnnnnnnnnnnnnnnnnnnnnnnnnnnnnnnnnnnnnnnnnnnnnnnnnnnnnnnnnnnnnnnnnnnnnnnnnnnnnnnnnnnnnnnnnnnnnnnnnnnnnnnnnnnnnnnnnnnnnnnnnnnnnnnnnnnnnnnnnnnnnnnnnnnnnnnnnnnnnnnnnnnnnnnnnnnnnnnnnnnnnnnnnnnnnnnnnnnnnnnnnnnnnnnnnnnnnnnnnnnnnnnnnnnnnnnnnnnnnnnnnnnnnnnnnnnnnnnnnnnngnctgctggcccaaattggtngaataangangnttatatatgncctannanncnncttatc

SEQ ID NO: 41333 - DNA, 144 bp, Homo sapiens
ggacatttttaagccatgtaggatgcaagccaatcacaacaaccaaaaatctgcttctcagatgtccagaatactctagggagtcatatggatgcactggggaaccttagaatgatagaagaagtaggctaaaaaaaaaaaaaa

SEQ ID NO: 41334 - DNA, 343 bp, Homo sapiens
  misc_feature (1)...(343): n = a,t,c or g
gaaggtaccatgtgtagtgtgataagtgtcatcaacagtaagtgccaccaaccttctcccccctcttgctcttccccacccctgtgggccagtcctgcaggggacatgaccagatgtcccactggtacagtttggatatttgttcccttccacatctcatgttggaatgtaatcccccnnnnnnnnnnnnnnnnnnnnnnnnnnnnnnnnnnnnnnnnnnnnnnnnnnnnnnnnnnnnnnnnnnnnnnnnnnnnnnnnnnnnnnnnnnnnnnnnnnnnnnnnnnnnnnnnnnnnnnnnnnnnnnnnnnnnnnnnnnnnnnnnnnnnnnnnnnnnnnnnnnnnn

SEQ ID NO: 41335 - DNA, 395 bp, Homo sapiens
  misc_feature (1)...(395): n = a,t,c or g
ggtttgttgaacctgaacccaatctactgaacctggaatggggaacaggtaaagtctgtccctgcatttctccagaagatggctgaggtcctttctggcactaaatctcctaattctataggtttttttcttttcctatttttttttttaatggacnnnnnnnnnnnnnnnnnnnnnnnnnnnnnnnnnnnnnnnnnnnnnnnnnnnnnnnnnnnnnnnnnnnnnnnnnnnnnnnnnnnnnnnnnnnnnnnnnnnnnnnnnnnnnnnnnnnnnnnnnnnnnnnnnnnnnnnnnnnnnnnnnnnnnnnnnnnnnnnnnnnnnnnnnnnnnnnnnnnnnnnnnnnnnnnnnnnnnnnnnnnnnnnnnnnnnnnnnnnnnantgagccnaaattgccc

SEQ ID NO: 41336 - DNA, 403 bp, Homo sapiens
  misc_feature (1)...(403): n = a,t,c or g
gctgggctggactagagatttaaactttggagttgccaactttcaggtggtaattaaagccatggggctgggttacctaaagggaagcatgtagaaggctcgggattcctgtgagaattccaacatatgtagatatacatatannnnnnnnnnnnnnnnnnnnnnnnnnnnnnnnnnnnnnnnnnnnnnnnnnnnnnnnnnnnnnnnnnnnnnnnnnnnnnnnnnnnnnnnnnnnnnnnnnnnnnnnnnnnnnnnnnnnnnnnnnnnnnnnnnnnnnnnnnnnnnnnnnnnnnnnnnnnnnnnnnnnnnnnnnnnnnnnnnnnnnnnnnnnnnnnnnnnnnnnnnnnnnnnnnnnnnnnnnnnnnnnnnnnnnnnnnnnnnnnnnnnnnnnnnnnnnnnnnnn

SEQ ID NO: 41337 - DNA, 392 bp, Homo sapiens
ggccatgtcctagggaattcataatatgaagtctttaggtctttttctcttagactagttggcttccagagaaaagagttccaatctcttgactggagggtggtaagagaatggtttccagtgttctaggatctagttgaagaacagagagtggggtggaggattcttagtggttagatatgttcatgaatccccctaatttcagcatcgcatctgtacctgtgccttcaacagttgttagcatctcccaggctaggagccctctcctactgtcttcagagaataaagctctagaagggcagtcaccttccaacctgaagtgaggtggggatctaggcatctaagtaatttttagtcttcacccagtgctccttgtatgaggctccccactg

SEQ ID NO: 41338 - DNA, 392 bp, Homo sapiens
  misc_feature (1)...(392): n = a,t,c or g
gtttttttttttaacaagtctgtttcttcatgaatattaccataaaaagagatactcatgaattaaggaaagataacatgttccaaatccatacaggaacatcatatattatttaactctatgcaatggaaagatttaaagaaatttaaaactaaaaactctttaaatttaaaaaagttcaaaaccattaaaattgcgatcataaggaagagactgcccccgtttttttattttctcttaaaagcacacagtgnnnnnnnnnnnnnnnnnnnnnnnnnnnnnnnnnnnnnnnnnnnnnnnnnnnnnnnnnnnnnnnnnnnnnnnnnnnnnnnnnnnnnnnnnnnnnnnnnnnnnnnnnnnnnnnnnnnnnnnnnnnnnnnnnnnnnnnnnnn

SEQ ID NO: 41339 - DNA, 379 bp, Homo sapiens
  misc_feature (1)...(379): n = a,t,c or g
ggatttataaatttacattagtaaagcttttatagtgaaacagtgctggttctttttcattgttttcatacaatcaatataaagcatcacagtctcaatatgttttgtaaagatattttgaaggaatatcatctttgtatgttttttaaaaaccaagaatctaaaattcttcgtatttattatgttggtacttaattctgttggggggnnnnnnnnnnnnnnnnnnnnnnnnnnnnnnnnnnnnnnnnnnnnnnnnnnnnnnnnnnnnnnnnnnnnnnnnnnnnnnnnnnnnnnnnnnnnnnnnnnnnnnnnnnnnnnnnnnnnnnnnnnnnnnnnnnnnnnnnnnnnnnnnnnnnnnnnnnnnnnnnnnnnnnnnnnn

SEQ ID NO: 41340 - DNA, 397 bp, Homo sapiens
  misc_feature (1)...(397): n = a,t,c or g
gctcnnnnnnnnnnnnnnnnnnnnnnnnnnnnnnnnnnnnnnnnnnnnnnnnnnnnnnnnnnnnnnnnnnnnnnnnnnnnnnnnnnnnnnnnnnnnnnnnnnnnnnnnnnnnnnnnnnnnnnnnnnnnnnnnnnnnnnnnnnnnnnnnnnnnnnnnnnnnnnnggtgaatattttgactacacggaaactgagacttctgttcatcaggacatcatacagaaaatgaaaagatatgccagaaactggaataaatttgcgaaacaaaaaactaattaaagattagtatttaaactacatatataagaatacttacaaaaaaaaaaaggataccccnttaggcaaataggcaaanggcttacctgtaattatccanaaaaggagatttntaaggcccca

SEQ ID NO: 41341 - DNA, 383 bp, Homo sapiens
ggggaaggatcagggggccaggccagcagctcgggggccacaaggagatggataatgtgcctgttttttaacacaacaaaaaagcctacctccaaaatcccctttttgttcttcctggacctgggcattcagcctcctgctcttaactgaattgggagcctctgccacctgccccgtgtatcctggctctcagctcatggggaagccacatagacatccctttcttcccttgcacgctcgctagcagctggtaaggtcttcacaccctgattcctcaagttttctgcttagtggcactgacattaagtagtggggggacagtccatgccaggacaccctgagtagccttccccctttgccgtgggcaggccctaactactgtc

SEQ ID NO: 41342 - DNA, 386 bp, Homo sapiens
gggcgtggggaaaaagactcgggccaaatggcttgcccaagatgtcccagagctagcacctggcagagtcagggcttctgggggtccagctgcacacctcatgttttttctgtggcaccatgccactgtcatttggaacgcagccggcagggtgaggtccacactgctggtgggctgaccccatgcctgagttttgtatgattgtcttagctccatgtgagtaactaaaatggtgttggcttcagtttccccagctgcatgcaggaggggactgactccaactcacaccttcccagaaggaagcataactatgtggcacacaggagaaatcaggaggaaccagactgcatggcttctgtgacttctgtcccttagaggatgggggt

SEQ ID NO: 41343 - DNA, 398 bp, Homo sapiens
  misc_feature (1)...(398): n = a,t,c or g
gtctgcattagaaatcnnnnnnnnnnnnnnnnnnnnnnnnnnnnnnnatctagaagatcaattctagatagatcattgttgaaggtcgatcagattttctagatagatcatcagatgaaggcgatgaaggaagatctagatagatcagctagatcttctagatagatcacctagatcttctagatagatcagctagatcttctagataactggctgcannnnnnnnnnnnnnnnnnnnnnnnnnnnnnnnnnnnnnnnnnnnnnnnnnnnnnnnnnnnnnnnnnnnnnnnnnnnnnnnnnnnnnnnnnnnnnnnnnnnnnnnnnnnnnnnnnnnnnnnnnnnnnnnnnnnnnnnnnnnnnnnnnnnnnnnnnnnnnnnnnnnnnnnnnnnnnnnnttt

SEQ ID NO: 41344 - DNA, 433 bp, Homo sapiens
  misc_feature (1)...(433): n = a,t,c or g
gnnnnnnnnnnnnnnnnnnnnnnnnnnnnnnnnnnnnnnnnnnnnnnnnnnnnnnnnnnnnnnnnnnnnnnnnnnnnnnnnnnnnnnnnnaaaaactttaaaacaagattttaaaaaatccaagtagaagaaaaaggcaaagcaaaaaagattatatgtgttgataatttccctcaaaaatactgcttataacatacagcattgattcttatcantttatctttttttcntttnttntacntttnattanntatctcananangactnatngnttacnctnanganacnttntnatcngnttnntttttcntanttttgatnantntnanannnttattntantngtattaacgannatntnttnttgtntgttaattnttattcctnttatngcntnntntttntnnnntntcnacttannncccntttttt

SEQ ID NO: 41345 - DNA, 442 bp, Homo sapiens
  misc_feature (1)...(442): n = a,t,c or g
gaactgggcaggtgagaaaatagagtaaaatctgtaaatttgtatgtaattagtgtctatacatgatatttaaactcatgtatccagaggcagaagcataatacaaaagagggctcaacactgagccctgggatattccaatatttagaagttgaatagaaaaggaggagtgaaaaaacaagagtgaaaaggaacatacagtgaggtaagaagaaaaccaagagagcaccgtaaattcaaagtcaagtaaagaagctgtttcaaggaagtgactgtaatcagctgtgtcaactgctactgagagttcagtattaccagagctgagaactgaccatcaaagtgccatgaaattattttcataagcaaatgaatagagtgccatgaatangagagtaaaattcatctcaattttgtgcaaccagccgggtgcagtggctcacgc

SEQ ID NO: 41346 - DNA, 422 bp, Homo sapiens
gaatcattcttattaaccttctttcttttctatatctccagtatgtttttagggaactgtggaacctaacaaatacttattttaaatcttttttgattaacatttatagaaccgagagtttgaaatcacacaacaaacacatgttcacatgcatactagtacaaattgagttccttcagtcaacgaagtgagttacacctgagggcacttgaagcccagtgtgaagtgacttgatcaagattacccaaccagctggtgtcatacctgcaatccaggtcttttgattccagtcagtactcttttcacaataaaacactgctttctctgaatgttatgttaaacttatgtgtcagtgagaaaaatgaatcaagattcatctcctaaaggatagctaatgggaaagaaagcttaggaattctggg

SEQ ID NO: 41347 - DNA, 388 bp, Homo sapiens
  misc_feature (1)...(388): n = a,t,c or g
gggcattggatgttttaaaatgtggtcttttataaccactttctgtctttggctgtgcaagaatgattataattatttatgcccttgctccttaggggatttgaataaaaaataatttttcatattattttaaatagggattgtgatctaatcccttaaaaattagtttgatgnctnttaattatcggncgacnanactgtctttaaacttnttattangatctcctanaatangnnntagnnnnngttaacaaanattnnntgtnccagantnnngncngcttananatcntgaatcgngtcnatgtnnnnncatncnatnnnntnatngnangcnnannntttantnnnngancgnnccatnnntgnnnnnntattcntnnccata

SEQ ID NO: 41348 - DNA, 455 bp, Homo sapiens
  misc_feature (1)...(455): n = a,t,c or g
gtgaaaaatctgttcagatgcacttcggaccctaaacggtttaatgcttctaagtaaatttttgttttttttgagaggaatctcactctgttgcccagcancttanaagtcnntntnaatcgtgatctcnaatttnntgaccatntgcttacctccctantgcctttatcatnatncncgnnagncnctttggtgcnagctcccnatttgtnttgttcctanaatcggnttagctctgtaannatanttncctnanaccnattnnanttatccctnannnccnattnctgntcgctgaatncttcanntnnnnctanatatttnngntctctnctcgatctannntcatnntntttntgtnactnctntngctnncaatggnnnttagntntggcngtnttntannacgagtctcnanttananngcatnncnctttnttcnttntcangntttc

SEQ ID NO: 41349 - DNA, 531 bp, Homo sapiens
  misc_feature (1)...(531): n = a,t,c or g
nnnnnnnnnnnnnnnnnnnnnnnnnnnnnnnnnnnnnnnnnnnnnnnnnnnnnnnnnnnnnnnnnnnngtttacatnnnnnnnnnnnnnnnnnnnnnnnnnnnnnnnnnnnnnnnnacaccccgagcagaaatatagcattgataaatttaattatagtaaactttaaacttttttattaaaatcattaaaacatacaaagctaatccacagtggtgttggggaagacattttcaacaactaaccaaacaagggctcttaccaagaatatagaaagaacgcctacaaatcagtcagaggtggaaaaaatagaaaagaacatgcaatatataaatgggaagaaagattccattcacatttcactaaatgacgaataaacacatgaagaggcctcaacctcattacaccagaaaatgcaaatggaaaccacagtgagatgcccctgcacctacctaccagatggttcacacaacactgacgatccagaatgnggcaatctagagcagcaggaaatctacagtggggntggggg

SEQ ID NO: 41350 - DNA, 169 bp, Homo sapiens
gactgcctctaaataaataaataaataagagagcaaatgatatcctctctgagtacagagacctttttttctttttcagtactttcattttcactatttcctgtggtcctgggtctcctttaaggaaatgacttgaacgtctctccattaagtataatgcttctgggtt

SEQ ID NO: 41351 - DNA, 369 bp, Homo sapiens
  misc_feature (1)...(369): n = a,t,c or g
gacctgtctttcatcagattactgtagaaatgagaggatgtaagacaaaaagggaaaaatcctaaaaggacagaaatttannnnnnnnnnnnnnnnnnnnnnnnnnnnnnnnnnnnnnnnnnnnnnnnnnnnnnnnnnnnnnnnnnnnnnnnnnnnnnnnnnnnnnnnnnnnnnnnnnnnnnnnnnnnnnnnnnnnnnnnnnnnnnnnnnnnnnnnnnnnnnnnnnnnnnnnnnnnnnnnnnnnnnnnnnnnnnnnnnnnnnnnnnnnnnnnnnnnnnnnnnnnnnntnnnnnnnnnnnnnnnnnnnnnnnnnnnnnnnnnnnnnnnnnnnnnnnnnnnnnnnnnnnnnnnnnnnnnngggtgggggta

SEQ ID NO: 41352 - DNA, 353 bp, Homo sapiens
  misc_feature (1)...(353): n = a,t,c or g
gctgtcacaagctctatttcaggggtatcctataactcctccatcagtaacggatcccactctgattgcggatgctctggacaaaaaaattgcagaatttgatacagcggaagatctgctcaagtacttcaatccacagtnnnggnaanaanatcntgagatacnnnatctggacacccctcccttagaggctnancannccatnntnnggagngngantatccntgccngangnctaaggcncttttaancnncacnatctanngacccngnaganatgcnggngtcanaanatgannngagcnaatgncnccagctntnctctccccnntctnanaacttcncttaggcct

SEQ ID NO: 41353 - DNA, 347 bp, Homo sapiens
  misc_feature (1)...(347): n = a,t,c or g
gaaatttttatttgataaggctaccattcatcccaaaatggacaatgtgtatttagtcattcaattcaaatttgtgtggctcattcctcagctacttagttatttttcattacatggnannanngggnncactgnnntcccatacctacngtncttacanggnannngcnnatcaacttgccannctnngggnctaaccgtggggaccannnccngcgccntntncnncnnnggttncctntctgnanttgcgancttcagngctgnctnagccanatccnnngtgnctnctnccaggagcntnannttnancctnttngncgggncatgacnctnnanncnnatac

SEQ ID NO: 41354 - DNA, 334 bp, Homo sapiens
  misc_feature (1)...(334): n = a,t,c or g
ggaaaggcttttcctgctgactccaccagcagcattctgggatatttcttccttcaaggagtcacagtgcttcacatgggtcaaggcaaagacaggtctcctgccaaggcacccaagatgaaatcttgaaaatgagaaacacatttgctgaactgaagaattcattagaggctctcagcagtagaatggaccaggcagaggaaagaattgggnnnnnnnnnnnnnnnnnnnnnnnnnnnnnnnnnnnnnnnnnnnnnaaccnnctgaantaangcaangctttcacctnannctttnaagnanctgnnactannnncnngcctttnttaaaaaa

SEQ ID NO: 41355 - DNA, 393 bp, Homo sapiens
  misc_feature (1)...(393): n = a,t,c or g
gcctcttgctactttctgcatgactgatcttttacaataagagttcattcatgtgccagagaaggtaggacagtgatagaagactgaagtgagaaaccgagaatcattctgggccggagaatgtcagcgagccctctgtctgcttgcccaggtctgccttccaggtcctagccctcagtgacctttttggtactagaactgtcacccactccacccccttttttctatttaagaattgagagtagatttgcaaataaagcagtgtataagccggaaatgaccacaccaagcaactagaaagagaccattttatgcctgtttttctttcccacctggggtgaactcaaggccattggacagaatctgagcanagaacctgagngacctgggaag

SEQ ID NO: 41356 - DNA, 247 bp, Homo sapiens
  misc_feature (1)...(247): n = a,t,c or g
gcagaatacatttcttgcacaaaactgttggttttgaagaaggtgctgtaaaggcatcagtacttcatgtcactgtattatcactaatgannnnnnnnnnnnnnnnnnnnnnnnnnnnnnnnnnnnnnnnnnnnnnnnnnnnnnnnnnnnnnnnnnnnnnnnnnnnnnnnnnnnnnnnnnnnnnnnnnnnnnnnnnnnnnngtnctnnctgtncctccgnananntnnacnacatgtgnnngaactg

SEQ ID NO: 41357 - DNA, 364 bp, Homo sapiens
  misc_feature (1)...(364): n = a,t,c or g
gtcactactcatgctgtgggtaacttcacacaagtggctgaaaccctctaggcttcaattttctcctctcttgagaatgtattataaggataatatgagacggaatgtgtaaaacacattataagtactcaataaaagagaacgataattatttaacagtgttagctacagggacagaaatcatggagagttcaatagtactttgttaagactggaaagattctgcaccctcacaatagagttcgtcagaggcccatgactgcctaatggcactttgcaaagaaagctgataagctggaggcaggttccagcagngcccagaactcaccaggttaaacagcantgctgngntanngncnnacct

SEQ ID NO: 41358 - DNA, 401 bp, Homo sapiens
gagtggaccaccggaaaattatgatttccctgttgttatagtgaagcaagaatcagatgaagaatctaggcctcaaaatgccaattatccaagaagcatactcacctccctgctcttaaatagcagtcagagctctacttctgaggagactgtgctaagatcagatgcccctgatagtacaggagatcaacctggacttcaccaggacaattcctcaaatggaaagtctgaatggttggatccttcccagaagtcacctcttcatgttggagagacaaggaaagaggatgaccccaatgaggactggtgtcagtttgtcaaaacggaggggaactcctctgctgtgaaaagtgccccaaagtattccatctttcttgcatgtgccccattgacaaattttc

SEQ ID NO: 41359 - DNA, 371 bp, Homo sapiens
  misc_feature (1)...(371): n = a,t,c or g
ggtggtgtactagtcactgaaaaagagaagagagnnnnnnnnnnnnnnnnnnnnnnnnnnnnnnnnnnnnnnnnnnnnnnnnnnnnnnnnnnnnnnnnnnnnnnnnnnnnnnnnnnnnnnnnnnnnnnnnnnnnnnnnnnnnnnnnnnnnnnnnnnnnnnnnnnnnnnnnnnnnnnnnnnnnnnnnnnnnnnnnnnnnnnnnnnnnnnnnnnnnntnnnnnnnnnnnnnnnnnnnnnnnnnnnnnnnnnnnnnnnnnnnnnnnnnnnnnnnnnnnnnnnnnnnnnnnnnnnnnnnnnnnnnnnnnnnnnnnnnnnnnntaanangagaatataggaagaaannaatgggccattttnaatgcgnngaattt

SEQ ID NO: 41360 - DNA, 301 bp, Homo sapiens
  misc_feature (1)...(301): n = a,t,c or g
gcaaacaaatggaaaaaattccatcttcatggataggaataatcagtatcacannnnnnnnnnnnnnnnnnnnnnnnnnnnnnnnnnnnnnnnnnnnnnnnnnnnnnnnnnnnnnnnnnnnnnnnnnnnnnnnnnnnnnnnnnnnnnnnnnnnnnnnnnnnnnnnnnnnnnnnnnnnnnnnnnnnnnnnnnnnnnnnnnnnnnnnnnnnnnnnnnnnnnnnnnnnnnnnnnnnnnnnnnnnnnnnnnnnnnnnnnnnnnnnnnnnnnnnnnnnnnnnnnnnnnnnnnnantacnnnnatta

SEQ ID NO: 41361 - DNA, 257 bp, Homo sapiens
  misc_feature (1)...(257): n = a,t,c or g
gccccaagttaaaatcatccattatcccaccacccaaagatggtaactattaacagtacggtatgtgttcttatagactttatttctatgtaaatgtgtgtttatgtntgaggnnttngaaaaccctganacctttaaaaancngnttttgaannacnnantttananttaattnacnnnttgnnaaatnctatntntncnntntatantntgnngncttanttgnnnnnnnttattttaannnnnnngnnatttgt

SEQ ID NO: 41362 - DNA, 244 bp, Homo sapiens
  misc_feature (1)...(244): n = a,t,c or g
gnnnnnnnnnnnnnnnnnnnnnnnnnnnnnnnnnnnnnnnnnnnnnnnnnnnnnnnnnnnnnnnnnnnnnnnnnnnnnnnnnnnnnnnnnnnnnnnnnnnnnnnnnnnnnnnnnnnttagactttcaagatactttctgaaaaaaaaagggttccaatatcaaatatgttggggaaacagcatatctggttttttgtttgttntttgagacagagnntngntctgncgctcangctgnantgca

SEQ ID NO: 41363 - DNA, 222 bp, Homo sapiens
  misc_feature (1)...(222): n = a,t,c or g
gactttctcctcataactgtcatgaaccaccaatcaccttctaaggaccttgatcaactgattatcccccacatctttaagctcnnnnnnnnnnnnnnnnnnnnnnnnnnnnnnnnnnnnnnnnnnnnnnnnnnnnnnnnnnnnnnnnnnnnnnnnnnnnnnnnnnnnnnnnnnnnnnnnnnnnnnnnnnnnnnnnnnnnnnnnnnnnnnnnnnnnnnnnnn

SEQ ID NO: 41364 - DNA, 358 bp, Homo sapiens
gcggcacgagcaattcacctcagcaaatcacactgtaggttcttgaactaaagaaaatattttcaccaatttctaaatatttactatttaaacatacagttcttacttggacaaaagaaattttttaatgagaagaagatttataaattatatctgactgagagtgttatatagaggacttactatttcatctgccaaataaactgttgagtagtcaaaatatgtgtgatttaaataccatagtatcaaacctaataccataagtattttgagaaaaataattgagacatggtacttatcatgagcttctcctgttttcccattttataaactagaacattgggtgacctcatgtttt

SEQ ID NO: 41365 - DNA, 338 bp, Homo sapiens
  misc_feature (1)...(338): n = a,t,c or g
ggcaccatgagcttcaaaccctgagtctgtgtggccccagagcttctgcctgtgaagtagatggctctccagaatggtcactcatgacagggcccggccagactgccaacactgaccgtgaacagcatttcctaaagcagggctcttaatcttttctgtgcctcacacccctttgcagttgagctcttgtcaggataatatttcaaatggatattactaaaatnnnnnnnnnnnnnnnnnnnnnnnnnnnnnnnnnnnnnnnnnnnnnnnnnnnnnnnnnnnnnnnnnnnnnnnnnnnnnnnnnnnnnnnnnnnnnnnnnnnnnnnnnnnnnnnnnnn

SEQ ID NO: 41366 - DNA, 159 bp, Homo sapiens
  misc_feature (1)...(159): n = a,t,c or g
gctcatataacatgctgctatctctattcttgaaaactgactatctatattcttggaaggctatctatattcttggaaaataaaggagcatagagtttccggcagcttcccgttttcatcgttactggaggtgaangcntnaatnttnattnnnngctt

SEQ ID NO: 41367 - DNA, 385 bp, Homo sapiens
  misc_feature (1)...(385): n = a,t,c or g
gcaagacagggtggcttaaccaacaggactgtgtttcttcacaattctgtaatgccggagtcaaggtgttttggtnnnnnnnnnnnnnnnnnnnnnnnnnnnnnnnnnnnnnnnnnnnnnnnnnnnnnnnnncttcatagggtcttccttcggtgtgtgtcagtgtcctcatttcctcttcttacaaggccactnnnnnnnnnnnnnnnnnnnnnnnnnnnnnnnnnnnnnnnnnnnnnnnnnnnnnnnnnnnnnnnnnnnnnnnnnnnnnnnnnnnnnnnnnnnnnnnnnnnnnnnnnnnnnnnnnnnnnnnnnnnnnnnnnnnnnnnnnnnnnnnnnnnnnnnnnnnnnnnnnnnnnnnnnnnnnnnnnnnnnnnnnnnnnng

SEQ ID NO: 41368 - DNA, 157 bp, Homo sapiens
gagaccatattacaggaaagaaaaattgatttagaaaggttgaaaaaattgctcacaatcttagggctagaggccacgcgtcatgcttaaaaagaactacatgcttcttttcattatacatgctgccttaattgggaactgatatataaatgactgt

SEQ ID NO: 41369 - DNA, 279 bp, Homo sapiens
gaagtcttggatttttccaagtaaggtcaattttagttcattatttcagtaacttagccaggttcctgttctcccccaaacatccgatttttgaccataaactctgatcagatgggttgtttaattttttaatgacatcaaccttcacagggcacctcctatgtcctaaggcacttgggtattccagaaactggtaaatatgaagactggttggataactccgtgttgggaattagtgagatggtcaaatggccctgtcacacgacaacagggaaaaga

SEQ ID NO: 41370 - DNA, 279 bp, Homo sapiens
gccttattgaagcatcctcctttccccagtggtcccagggcccctgcagatagaacatgagtggctggtcttgaaaacatggaggtttcaccccaggttggaggctggaggccccatggggaggagaggtttctcactgcgaatcccaggctgaagaatgtgggcttagttcctccagcaaagctgctcttttccagcctaagactcaatacaggaggaggagaggaggatgcatctgcttttcagagatctctgtccatctgaggggcatggggagac

SEQ ID NO: 41371 - DNA, 346 bp, Homo sapiens
  misc_feature (1)...(346): n = a,t,c or g
ggctcgggcttatggtgtcacctgtgggcatctcctttccaggcctggagtcccgggcacttgccctgtcccgtgtgggccctcgtccttccctcaggagcccccgcttaaatcctcaagcgagtgtccagcctctctcgggcctcgttttctgtagaaaacagacccacctggaccctatcactcctgtcctggggttcctgggtgcagccctttggccttctctcaccccacccttctgtccatgcggccctcgggggctgggggttttttntgcangccgtctaaagngngntcatcanacacnagcncnggtctttgcaaggggnnntctncntgnntggct

SEQ ID NO: 41372 - DNA, 386 bp, Homo sapiens
  misc_feature (1)...(386): n = a,t,c or g
gaggatctgctgacctgctgggatccagaggagaataagatggccccttgcgaatttggggtgctgaatagcttggcgaatgtcctctcacagcacctcaaccaaaaagacaccctgatgcagcgcttgcgcaatgggcttcagaattgtgccacacacacccagcccttctggggatcactgaccaacaggacacggccaccatctgtgcaagtagccaaaaccactccttttaacacgagggagcctgtgatgctggcctgctatgtgtggggcttctatccagcagaagtgactatcacgtggaggaagaacgggaagcttgcatgcctcacaagcagtgcgcacaagactgccancccaatggagactggcataccaaccct

SEQ ID NO: 41373 - DNA, 356 bp, Homo sapiens
  misc_feature (1)...(356): n = a,t,c or g
gttaccatgttcagtaaccagggccctgggaatataataggagaaggcagatgagatccttgccttcaccaagcttatgtttttctattttaagtaaaatttgccatgacaaaatttctatcagcggaagagccagtaactcttattgtaataggttttactcagttttagaaaaggaaagtagctaaactcttggatccttggtgtgtgtttttgctagttcatttctagtactagctatgtntttggggatncanncngtttnaaactgnnangngattntannagannnggccnccctntccagntctaagngncntcntntattangannacnctactatcttgnntttatg

SEQ ID NO: 41374 - DNA, 368 bp, Homo sapiens
  misc_feature (1)...(368): n = a,t,c or g
gatctcccaatactaggtgtatttatttagaagccaaatctattgatgggccaaatagaatatgattgccaataaatgtctatttccttacagtgtaatggagttaagtgcctcacagaggtcaagtaagatgtgcagtttaaggataatcttacaaaagtactataatgaattgttagaattacagcctcttttatatactatcacctaaagtgaatgagtataatagaagaataattgaagaatggtgaagatgtctctatgattcattatgttagttatgtanaaatcatannaaaaaatctgaccaggngnggnggctcatgcctgnntncnannactttgnnagntnangcnnnnggnnactt

SEQ ID NO: 41375 - DNA, 382 bp, Homo sapiens
  misc_feature (1)...(382): n = a,t,c or g
ggagagatggaagtttctgaagactggcttgctagataggaaaaataaccaatgctccagcagtgttcttgggattggaatttgctgattcatgttttttaaaatgcatgatcacatcaaatttgctgagctgttgactatcaacccagcctaaacccaccggctcttaccctttaactttcataaaagagaagcctgattttgttcaggtatctagccttctcccaaagaccctgtgtggcttgaaggatacctttgctggagccatggataggataaatcttgatcagtaaaacaattaggaaatcctgtacttttgcaattggttcggaatgattcgtacatgacanaggacncaccgaggcaatttggaggggctctc

SEQ ID NO: 41376 - DNA, 248 bp, Homo sapiens
  misc_feature (1)...(248): n = a,t,c or g
gcgagtatttacaaaaactgaagctgtccctgtcaggttttgacagagcttagctatataggtagtaagtgacgcagtgccaaaaccagtcttaaattacctatgttgtcaatatgcagattttctctatttagtatttaagctatgaatttaccaatctgagtaacttgaaatgcagtatcataaaaagaatcagatctaccaaactgaaaatgtgtgcgtatctaaagtagnttcttttcttgatt

SEQ ID NO: 41377 - DNA, 206 bp, Homo sapiens
  misc_feature (1)...(206): n = a,t,c or g
gtccagatcagccgatggaccataggtcaggaggaatttctccctgtcaagcagtggaaaactgcatgggaggcaaaatgctctgttctccaagaggacccggaagtaatcacataggaaatgataaggaagaccaggaggagctcttcgtagtccagaaaggaggaagtgggagttgnnnacttantnntantgcntancntgct

SEQ ID NO: 41378 - DNA, 406 bp, Homo sapiens
  misc_feature (1)...(406): n = a,t,c or g
gaaaaagtaaataannnnnnnnnnnnnnnnnnnnnnnnnnnnnnnnnnnnnnnnnnnnnnnnnnnnnnnnnnnnnnnnnnnnnnnnnnnnnnnnnnnnnnnnnnnnnnnnnnnnnnnnnnnnnnnnnnnnnnnnnnnnnnnnnnnnnnnnnnnnnnnnnnnnnnnnnnnnnnnnnnnnnnnnnnnnnnnnnnnnnnnnnnnnnnnnnnnnnnnnnnnnnnnnnnnnnnnnnnnnnnnnnnnnnnnnnnnnnnnnnnnnnnnnnnnnnnnnnnnnnnnnnnnnnnnnnnnnnnnnnnnnnnnnnnnnnnnnnnnnnnnnnaagccacacatggaagatcgatggagtgtgtatacctaagtgaatgtcacagagtaganagatgattttttttatctgnnntttcct

SEQ ID NO: 41379 - DNA, 392 bp, Homo sapiens
  misc_feature (1)...(392): n = a,t,c or g
ggcggagggcactcacatctccagttctcctgcgtctatctttgttcgttctggtccttttccttttcctttcctttcctnnnnnnnnnnnnnnnnnnnnnnnnnnnnnnnnnnnnnnnnnnnnnnnnnnnnnnnnnnnnnnnnnnnnnnnnnnnnnnnnnnnnnnnnnnnnnnnnnnnnnnnnnnnnnnnnnnnnnnnnnnnnnnnnnnnnnnnnnnnnnnnnnnaannnnnnnnnnnnnnnnnnnnnnnnnnnnnnnnnnnnnnnnnnnnnnnnnnnnnnnnnnnnnnnnnnnnnnnnnnnnnnnnnnnnnnnnnnnnnnnnnnnnnnnnnnnnnnnnnnnntttttttttgnttttgagacaaggcttgctgngncacccangctgggg

SEQ ID NO: 41380 - DNA, 218 bp, Homo sapiens
  misc_feature (1)...(218): n = a,t,c or g
ggcactcctggccctgccgctgctgctgcttctctccacgcccccgtgtgccccccaggtctccgggatccgaggagatgctctggagaggttttgccttcagcaacccctggactgtgacgacatctatgcccagggctaccagtcagacggcgtgtacctcatctacccctcgggccccagtgtgcctgtgcccgtcttntgngacangancaccg

SEQ ID NO: 41381 - DNA, 182 bp, Homo sapiens
ggcatgtgcaaaggccatggggcagaagtgagtttggttttgtcaaagattagacacaaggtcatgatgccatggtaccttagcaaacaagtggaaggatgggaaaagatgaggccagacatgtaggaggggccagatcatctgggtcttatggccattttatggaattgggtgtgacacgg

SEQ ID NO: 41382 - DNA, 392 bp, Homo sapiens
  misc_feature (1)...(392): n = a,t,c or g
nnnnnnnnnnnnnnnnnnnnnnnnnnnnnnnnnnnnnnnnnnnnnnnnnnnnnnnnnnnnnnnnnnnnnnnnnnnnnnnnnnnnnnnnnnnnnnnnnnnnnnnnnnnnnnnnnnnnnnnnnnnnnnnnnnnnnnnnnnnnnnnnnnatantanttncaccaccttttaanctaacggncaggattctngattaattanattggggnctaaaaggtaccagtngggatcatttttnaaagttgggggatnatgccntttnggaaaacnccctntntaaaaagcncttggtngttttggacatgaaaattggggggcaggntggncacagnggctcacncntgaaatctannnctttgggaggctnaggtggcaaatnacttgaggcccggagt

SEQ ID NO: 41383 - DNA, 382 bp, Homo sapiens
  misc_feature (1)...(382): n = a,t,c or g
gctaaaattagagcatggtcatattattactatgttgaatcttgaggattttgagttttgagcaaaggtttaagtcattattttctgtcttattttttgactaatccttttggttggatgaaacaactgttgttcagtgctgtggtattgaaatgaagtgtgacttttgtagagtagaggaaaccagatttgggctatttacttattataaactttcaagttnnnnnnnnnnnnnnnnnnnnnnnnnnnnnnnnnnnnnnnnnnnnnnnnnnnnnnnnnnnnnnnnnnnnnnnnngggatcaagactatcctagctacacggtgaaaccctgctctactaaaaatagaaaaagttatctcggattggnggcagtgcctgtaa

SEQ ID NO: 41384 - DNA, 386 bp, Homo sapiens
gctggagtatcaaaatatataatgatagtaatgaattataacccattgaataacaaagaaaatattgagtccatgttactacaaataaatcaattacataaagtttgataaggactgggatatttacaaagtttcaaagaacttccccacaaagtactttttatttacaaaggaggaaagagttattttacaatagaaatgccagatactcccttaatcaagtgatcaaagtgatcatcaccataaagggataaatagaaatcacgtgtcacctgacaggatgcaatgagaatgcagcattgcttcacgacactcctgcataacctgaatctaatcacaaagaaacatcaaacaaatgtcattgacatacactctacaacataact

SEQ ID NO: 41385 - DNA, 406 bp, Homo sapiens
  misc_feature (1)...(406): n = a,t,c or g
gggcagaacaggcaggtgagagtctaagagggctcagtaatctgaagcttggtggtaagaagggattctgggctagaaagggtgcagaagcctgaagtagaaagagacgggattttggtccggtgtggagagcgaatgcattgaaaagggccaaggcccacgataaggtagacatttaaaggggtacggatgcccaaggtagagcagacacttgaggagaccagctcagcaaacggaagacacttaaagtggtaggttctcaagatagaacaagtttttaagactagagcttacaagacatttataaggtcatgggttgggatttgggaacnngttnattctataggnaatgaanatnngantngttngntangancngnttggngnggngnaggngtntttctca

SEQ ID NO: 41386 - DNA, 413 bp, Homo sapiens
  misc_feature (1)...(413): n = a,t,c or g
gttcacccacctctgagcaaaccgagagatgtgctagatcctggtgcttagttcatcattgttttccctcacagacatttctctttcatgcctgcttgactgataagccattagctagaccctgactatgtaacgctaaagattttaccatgcctggaaattttacaggggaagaaaacacgctagttatttaactgcaagctactaaaagcataggtgtggtganatttctgggncnccnctnttccactgnnatctagngnaagcatnaggnctggnacatnnncttnncgagcnnggagganncnnnnnttggacngnnaactgtatgnnnnggtnnnnnntggtggntgagcanagantnntnngngggngntgnngggagannangggngtggganatngagnncgcg

SEQ ID NO: 41387 - DNA, 422 bp, Homo sapiens
  misc_feature (1)...(422): n = a,t,c or g
ggaaatgtccatagctgagggcagtaaaaactaaatatttattcccttattcatttataattataaatatttatttgtgaaatacttatggatgtgaactattatcattaggcaatatctcaaggtatacagtattcccttatggtaaggtttgttgttattggatttgaatctatatttaatttaatttatttannnnnnnnnnnnnnnnnnnnnnnnnnnnnnnnnnnnnnnnnnnnnnnnnnnnnnnnnnnnnnnnnnnnnnnnnnnnnnnnnnnnnnnnnnnnnnnnnnnnnnnnnnnnnnnnnnnnnnnnnnnnnnnnnnnnnnnnnntctatattctaaataatcttttagtaatttcttatattttggctgacttgtaaggnctgatttggttgcataatttctacccgnagatg

SEQ ID NO: 41388 - DNA, 348 bp, Homo sapiens
gctgtgctccagcttctctggtgttctctttgctccttgattggaggaggtggggagaatagattcaaggaaacctgtttgtaagcaaacatacatttcaggtaatgaaaacaaggcttaatactatattgaaatatgtgggtcaggggacattttcatagtagtcaggaagccatccatccctttgtcacttttcaactcctcagactgaatctagggataaatgcacacctgagtacagattcggtgtgtggggaaagttatgttctaatagaaaaggaaatttagaactcgacagtgattacctgtaatactgttagttgtggataatcctttatatttggtagc

SEQ ID NO: 41389 - DNA, 342 bp, Homo sapiens
gatgaggacaggggcctcttctggctgtcaggagcaaagcctgaagacttggagctgcaggactggaagaacagtggagccccgtgggtctcaccctttaaggatgctgaggcctagagatgggaagtgacttgctcaaggtcacacaattggatagtgacatagctagagcgcagagttcctgattccaagtcacctgtgctttctgggaccaaagaatgggcacctgctggagtccgggcagagctttctcagttgtattgctactccagacctcaccataggttggggtcccagtaggaaggctcagggtctgtgccagccctgtcggtgctgctcaga

SEQ ID NO: 41390 - DNA, 400 bp, Homo sapiens
gaactggaagaattccattttcttcccctcacctcccaccactgccctttctttggtaatacctgcgtagtccactgagagtggggagggaaaagaacatgtttgtagacagtctgattctcttactgtaattctgccaaatgagataaagagcatttcctgtatatttgctttagtagaaatagagatttacaagccccccctttcaaaattgttatataattgaagataatttttaactgtcatggatatgcaggtgtaataaggtactatgattttttaatgtagtctgaggcagtatctacataatgccataatactcaggtgaaaaatgaaaaaagtataccaatataatggattttttttgtactcatgatagcatagggacagaactacatat

SEQ ID NO: 41391 - DNA, 284 bp, Homo sapiens
gaggaaacagacgcagaaaagtcacacagttgctgttctttttttcaccccagtcttttagaccccaaatcagtgcttctttctgaaaaatatgaattgagcagtgttcctggccttctgggattttaagtgaataaggaaataaagtgatacattaaacagtgtatgtgctgcttttatgagggttaaggaacatgaaagtaccacttaagtatttgggagcttaaggagggtttcatagagcagttcatgtttgaggtgagcgctgaatttttttttttttt

SEQ ID NO: 41392 - DNA, 296 bp, Homo sapiens
  misc_feature (1)...(296): n = a,t,c or g
ggatgacatcatcacaaatcgatgtttctttctcagcaaaatagaggagaagcttacccctcttccagaagataatagtatgaatgtggatcaagatggagaccccagtgacaggatggaagtgcaagagcaggaagaagatntcngctccctgatcaggagnngcannttntccatgannatgnanatgntntncagngcccgnnnananacnntnncnnttnntntnagactactgntagangctgcgtnanagagttatnnncagagactcntnncctnatgannagnnacta

SEQ ID NO: 41393 - DNA, 306 bp, Homo sapiens
  misc_feature (1)...(306): n = a,t,c or g
gatatatttactattaaaaaaaaaccttttttttaagagacaggatcttnnnnnnnnnnnnnnnnnnnnnnnnnnnnnnnnnnnnnnnnnnnnnnnnnnnnnnnnnnnnnnnnnnnnnnnnnnnnnnnnnnnnnnnnnnnnnnnnnnnnnnnnnnnnnnnnnnnnnnnnnnnnnnnnnnnnnnnnnnnnnnnnnnnnnnnnnnnnnnnnnaancttgccgcantgnccntgctggtcttgaactnntnntctnaaacgatcntntannnnnnnctnnntnagtgcngacnntatatnannagcctg

SEQ ID NO: 41394 - DNA, 333 bp, Homo sapiens
gaccaaaccagtgagcagcacgcgtgcagcgaagcgagcaaggcataagcaaaggaagctggaggagaaagctcgcctagaagcagaggccagggcccgggagcacctgcacctccaggaggagcagaggcggcgggaggaggaggaggatgaggaagaagaggaggatcgtttcaaggaggaatttcagcggcttcaggagcttcagaagctaagagctgtaaaatagaagaagaaggagaggccaagtaaagactgccccaagttggacatgctcactagaaatttccaggcagcaacagagtctgttcctaactctggaaacatccacaa

SEQ ID NO: 41395 - DNA, 427 bp, Homo sapiens
  misc_feature (1)...(427): n = a,t,c or g
gataagagttaattgccaatggaaaaaaggttgcttgcacttagctagaatttttttaagactttgttagcagattcctccaaaggtatcaaagaattgtcatgtttccagttattaaaattctactctcactttcaaaattccgataggaccattaaaactgatttgaagagcatctgctaatccattttcacctataccgatccttctgaggaactcctctgtattggtctggataaagagcaaatatcagtaaggattaaaaattggcaaaggttgttcannnnnnnnnnnnnnnnnnnnnnnnnnnnnnnnnnnnnnnnnnnnnnnnnnnnnnnnnnnnnnnnnnnnnnnnnnnnnnnnnnnnnnnnnnnnnnnnnnnnnnnctacaaaaaaaaaaantaaaaattagccaggcntggccctg

SEQ ID NO: 41396 - DNA, 398 bp, Homo sapiens
  misc_feature (1)...(398): n = a,t,c or g
gaacacatctcaagaactcttgatattgtctgccactctgggggtaaaaagtagtatctccttgtggttttaatttgcacttttgtgataactgatgaagtgaagcatcttttcgtgtttcttcctttgttcattttggcttattttggtgttttctttccttattgacttgttggtgatggtctttatatattctggacatgaattcttggtcagttctgtgttgcagtgacattttcccagttggtggtgtgtcttttcactctttgcagtacctttcgatgaaaggcgttcttaatttcagcatannnnnnnnnnnnnnnnnnnnnnnnnnnnnnnnnnnnnnnnnnnnnnnnnnnnnnnnnnnnnnnnntacattaatgttgntttattataag

SEQ ID NO: 41397 - DNA, 348 bp, Homo sapiens
gttattgatgatgctaatgagcgctactggggctcccatttccccatttctgcttttctcttaatactaaggacaactgtagcttctcaaaaatctgcacagggcaaaaggaaagtcctctttatggttcgcaaagtctgaacatcaagtcctgaacatcgagtgctgatcccccagatatctgtgccgtgcaactgaggcaaacccaaaccccctgaccattaagatgagagtcctggtataaacctggccctgctctgggtggagcatacacaccatttctgaaagtgtaaaacattggaaattcctcctgaggaggagcatttttactgataggactaagcttgg

SEQ ID NO: 41398 - DNA, 252 bp, Homo sapiens
  misc_feature (1)...(252): n = a,t,c or g
ggtagacctcagtgtccaggggtctggtgattgtgactgtgtaagagaagcctgaggcttttggtcaccctagtcctgacaaaaagaaagggaaaatgttaacaaatgaggaaacatggagactttcattggagttttagcctggagcttcagccatccactgcctgacaaaggccagcatgacgtatgtaggggttcgtgnaagaatttgctgngcncctttnattccttnnnnnananctnannttcttg

SEQ ID NO: 41399 - DNA, 272 bp, Homo sapiens
  misc_feature (1)...(272): n = a,t,c or g
gagagttcataaccctgccacctatgggacaactttcatttttacctgttaaaagatttggttctggtttttgtccagcatttattttgaatcatatgannnnnnnnnnnnnnnnnnnnnnnnnnnnnnnnnnnnnnnnnnnnnnnnnnnnnnnnnnnnnnnnnnnnnnnnnnnnngataaataaaggtttgttnttctaaccttaaagtgntanaaangctanatttgtagggtanctcacagttgangccgnntnttgaanntnatggag

SEQ ID NO: 41400 - DNA, 279 bp, Homo sapiens
  misc_feature (1)...(279): n = a,t,c or g
gccagactcatccttgatctattccttgaggttatagtatgaatcacccactattcaaatgtcaatttttcttagaatgctgttagtgatgagaagtgactgttttcagacctaaccttggcaaggtcagtcctactttgatgntcttgttncatcacacttcttggcattngtagatttggaagaattgggcctttggcacctctgatctcttcgattatgcaacttactgngcacccatatgcttagcttttgctgctttanctttttttttttttt

SEQ ID NO: 41401 - DNA, 384 bp, Homo sapiens
  misc_feature (1)...(384): n = a,t,c or g
ggcttcaccctcatgaatgtattattgcccttataaaaagtgcttacaaaagtagattagctctctttctgccatgtgagattacactgttgcttcggaggatgttgcattcaaggtgccatcttggaggtggagatagggcccttacctgacaccaaacctgttggtgtnnnnnnnnnnnnnnnnnnnnnnnnnnnnnnnnnnnnnnnnnnnnnattaatattctttctaaattacccagtttcagatcttctgtaatagcacaaaatggactacaacagttgactttagactcagcattatgaaacaagtcagtccatgaacattcatttgtttgtaacttggatcagtaaattacaaattattttttaaaataggaaataa

SEQ ID NO: 41402 - DNA, 394 bp, Homo sapiens
  misc_feature (1)...(394): n = a,t,c or g
gccagggcaagaaatatgacgggccagaagtggatgtgtggagtctgggggtcattttatacacactagtcagtggctcacttccctttgatgggcaaaacctaaaggaactgagagagagagtattaagagggaaatacagaattcccttctacatgtctacagactgtgaaaaccttctcaaacgtttcctggtgctaaatccaattaaacgcggcactctagaggtaatcatgtaggtggaaacaagcagtaactttggagagtctttagagtgaccttagatctttgcttgatttgtatgccatactggatatatcctgcggctttttaagcnngaattgaaacattannaaatattttttgagtnnatgctttgaccatnntcnntgaa

SEQ ID NO: 41403 - DNA, 388 bp, Homo sapiens
  misc_feature (1)...(388): n = a,t,c or g
gagctaatactattaataggtgctaagagacaccgaataagaaatttgatccccgtttttgaggagcatataagtaagttggatccatctgttaaataactagggagtatttgaggatgtctgtagggaggtagcatggtatggaccatgggctgtcaagttacacagatcagggtcagatttgtgacttgtccacttatttgtctgtaggccatttacttgccttcactgaaatgcttttttcctcatcttgaaaaaataggattaatgccatcccagtcacagtttttcaagggatgaanttttccgncnttaccaaagggnccngcttacntntnggaccncaaaatttgggaaacantnnggggagccccnttttnacaaaatg

SEQ ID NO: 41404 - DNA, 395 bp, Homo sapiens
  misc_feature (1)...(395): n = a,t,c or g
gaacatggtgaggaacagaaccaagcctccccagcagccgtcccactgccctcagtcctaaagttgaaactgttctgtgttatgtatgtaggggagtgagtgtgtctatgcatatgtacacacacatgcatgggcgactagagtccaggcaagaaggtcaaccctccttaccttttttggttccttgtcagcctcactcacaagtctgtctccccannnnnnnnnnnnnnnnnnnnnnnnnnnnnnnnnnnnnnnnnnnnnnnnnnnnnnnnnnnnnnnnnnnnnnnnnnnnnnnnnnnnnnnnnnnnnnnnnnnnnnnnnnnnnnnnnnnnnnnnnnnnnnnnnnnnnnnnnnnnnnnnccttgctngaggctggatnctacactggggggatc

SEQ ID NO: 41405 - DNA, 397 bp, Homo sapiens
  misc_feature (1)...(397): n = a,t,c or g
ggttatcagaatttctttggaatgctaaatattatttattgacttggatcattcttactaatgctaagattcactaggtaatggtaatataacttagaatttggcccttggccattgacaattatgaaatattattgtgtgttctttgtcttcatatatgttcaatctaaagttattaaccctgtgggctaataacatgaaaacaattctagatagcttgatggggaggcaataataaaacatttataannnnnnnnnnnnnnnnnnnnnnnnnnnnnnnnnnnnnnnnnnnnnnnnnnnnnnnnnnnnnnnnnnnnnnnnnnnnnnnnnnnnnnnnnnnnnnnnnnnnnnnnnnnnnnnnnnnnnnnnnnnnnnnnnnnnnnnnnnnnnnntgggg

SEQ ID NO: 41406 - DNA, 396 bp, Homo sapiens
  misc_feature (1)...(396): n = a,t,c or g
gnnnnnnnnnnnnnnnnnnnnnnnnnnnnnnnnnnnnnnnnnnnnnnnnnnnnnnnnnnnnnnnnnnnnnnnnnnnnnnnnnnnnnnnnnnnnnnnnnnnnnnnnnnnnnnnnnnnnnnnnnnnnnnnnnnnnnnnnnnnnnnnnnnnnnnnnnnnnnnnnnnnnnnnnnnnnnnnnnnnnnnnnnnnnnnnnnnnnnnnnnnnnnnnnnnnnnnnnnnnnnnnnnnnnnnnnnnnnnnnnnnnnnnnnnnnnnnnnnnnnnnnnnnnnnnnnnnnnnnnnnnnnnnnnnnnnnnnnnnnnnnnnnnnnnnnnnnnnnnnnnnnnnnnnnnnnnnnnnncttancctagctaatagaaaaccacccggaacccaataattnaagccnggttattca

SEQ ID NO: 41407 - DNA, 397 bp, Homo sapiens
  misc_feature (1)...(397): n = a,t,c or g
gcagcctgcctcttctcacttcttcccccttcaggaaaaacaacctgtgcccagttttacaactcggcatttaagtgtgtgccttaatatggtcaccaggttgagttttgatttcttcccgggtggacatgtgactacaaagggttatggagacatttgccctttttcagaacacatactgagctgcttccctgctagaagctggagtgggcctgtgccctcaaagaacccacagcctaggagcaaacacaaatgtaaaccannnnnnnnnnnnnnnnnnnnnnnnnnnnnnnnnnnnnnnnnnnnnnnnnnnnnnnnnnnnnnnnnnnnnnnnnnnnnnnnnnnnnnnnnnnnnnnnnnnnnnnnnnnnnnnnnnnnnnnnnnnnnnnnnnnnnng

SEQ ID NO: 41408 - DNA, 379 bp, Homo sapiens
  misc_feature (1)...(379): n = a,t,c or g
gaaagtttaaagacagttcaatttaatcatcagaatgcattcnnnnnnnnnnnnnnnnnnnnnnnnnnnnnnnnnnnnnnnnnnnnnnnnnnnnnnnnnnnnnnnnnnnnnnnnnnnnnnnnnnnnnnnnnnnnnnnnnnnnnnnnnnnnnnnnnnnnnnnnnnnnnnnnnnnnnnnnnnnnnnnnnnnnnnnnnnnnnnnnnnnnnnnnnnnnnnnnnnnnnnnnnnaacnaanagggggttccnccnngttggcnacnatngacaggtaaactngcngnctctggtggnatgcacanctcatcccctnnngnggccttgancggaaananntgncctgggaanncanagcacnnnttggctnaacctcnngattata

SEQ ID NO: 41409 - DNA, 401 bp, Homo sapiens
gtcggaatgcaccttcaggcagctactccaaagggttatgagccggatgctagtgtaaccaagttggcagagcagtatgccaaagagaatggtaccaagctgttgctgacaaatgatccattggaagcagcgcatggaggcaatgtattaattacagacacttggataagcatgggacaagaagaggagaagaaaaagcggctccaggctttccaaggttaccaggttacaatgaagactgctaaagttgctgcctctgactggacatttttacactgcttgcccagaaagccagaagaagtggatgatgaagtcttttattctcctcgatcactagtgttccagaggcagaaaacagaaagtgggcaatcattggtggcatgggggcccttgttgcagat

SEQ ID NO: 41410 - DNA, 397 bp, Homo sapiens
  misc_feature (1)...(397): n = a,t,c or g
gctgtccctcttactcttgtcttctagaagagcggtgttccataaatccttaggattctgaggttatgccccagagactgtcttagagaataaaggggagaccaagccgttaaaatttccccactacttttgtaccattgcagtttggcttttagatgtttactatatgggagttctgcttaaagtttgaaaacactgctctagatagacccttccactctggatgcctcttccatcctatttgggccctggatattaagtgtctgggccaagaggtcttaatttgtggtaatgagatgggtgaaccattagtgaaggtcatgattatacctgggccatgttacaggattttagattgcctgctcccctttattcagttcctgnaagagcctttggg

SEQ ID NO: 41411 - DNA, 402 bp, Homo sapiens
  misc_feature (1)...(402): n = a,t,c or g
gagagagcgaaaccctgtccctacgnnnnnnnnnnnnnnnnnnnnnnnnnnnnnnnnnnnnnnnnnnnnnnnnnnnnnnnnnnnnnnnnnnnnnnnnnnnnnnnnnnnnnnnnnnnnnnnnnnnnnnnnnnnnnnnnnnnnnnnnnnnnnnnnnnnnnnnnnnnnnnnnnnnnnnnnnnnnnnnnnnnnnnnnnnnnnnnnnnnnnntntngnanggnccnggngcaggggntntaatcngnaatcccagcnntttggnaggnnaaagnggnagnattccttgagnccaggagttancgaccagccngggcaacanggtaaaaccntgtntttacaaaacagccaannnnnnnnnnnnnnnnnnnnnnnnnnnnnnnnnnnnnnnnnnnnnnnnnnnnnnnn

SEQ ID NO: 41412 - DNA, 392 bp, Homo sapiens
  misc_feature (1)...(392): n = a,t,c or g
ggtgagatgggctgcaatagtagctgagggcttggccagtaaacgatccgcccctaaacttactcagctggcagggtttagttcctcttgaggtgattgactgttggccaaaggcttcccttggttgcttctcacacgggcctctcacatgtcacaacatggcagcttgctttatcagagccagcaagtgagaaggtgagagggagtgctagcaccatggaagncagttttttgngacctaatcaaggncgtgacagctnatcacttnggtcatncnntgcnngtgnacanactggtatncnncaacccntaggcctaggttcatactaccntncccttatatgaggannagttgataatgcntcangaacctnnaaagttcagggggaagg

SEQ ID NO: 41413 - DNA, 401 bp, Homo sapiens
  misc_feature (1)...(401): n = a,t,c or g
gagttaaactcggagtatattttatataacaatgtcatgataatgctcagctctttgttcttttgtggttttttgatgtgctagaatgcattgcacctgaaattttggctataatgttagactaatttgaggcctcataatttatataacataatgtgaatccattgagataggatcatgttacctggtgcttatgactttattagtgttaataaatgttcnnnnnnnnnnnnnnnnnnnnnnnnnnnnnnnnnnnnnnnnnnnnnnnnnnnnnnnnnnnnnnnnnnnnnnnnnnnnnnnnnnnnnnnnnnnnnnnnnnnnnnnnnnnnnntgctctacaaagatatacagattagctgagcatggtgacatgtgcctgtgggcctcagctgctanggagg

SEQ ID NO: 41414 - DNA, 402 bp, Homo sapiens
gaaggtgagggctccttccgctccgcgactgcgttaactggagccaggctgagcgtcggcgccggggttcggtggcctctagtgagatctggaggatccaaggattctgtagctacaatgttgtcaagactttttcgaatgcatggcctctttgtggcctcccatccctgggaagtcatagtggggacagtgacactgaccatctgcatgatgtccatgaacatgtttactggtaacaataagatctgtggttggaattatgaatgtccaaagtttgaagaggttagtgaagttaatttgatactgactaaagtaaattacattttcaatttttgaagagcccttaagcccctatagggagcacataatttttaaaagttagagtaaaatatttattttagt

SEQ ID NO: 41415 - DNA, 389 bp, Homo sapiens
  misc_feature (1)...(389): n = a,t,c or g
gaataagaggaagaagtggagatgagaggaacaggtcacctcttccaactatgaagggaaagaggtggatgagtggaagtgacccgtttgtactggncttttnnttatgnngnctntanntcngnctgtgcctntctgttcngatccntgcnnngcctntncgtttntttttctgcctgatttttcnnttntntttntntnnctntcgtccttnnntctctgctnntttttntcgggccncgcntntntnncttttctttgccttntcctnntatnatctnnantntctctttccnccnnatcctnanctctntttttnttcnnnnanttncntgtcnnttnccttcntnccgnnanccncctctntccttncttnttntttntttctt

SEQ ID NO: 41416 - DNA, 403 bp, Homo sapiens
  misc_feature (1)...(403): n = a,t,c or g
ggatcacatgactcctaggagtcctaaagcatcatctcctccccatggtagaggatctaacttgtgaacattgaaagtggctagaaagttgggacgctttgctccgtgtggtatgatggaggctgagcttccctctggggcttttcgatgataaaggggatatgcagcatggtttacaatcttattaatggtctggtctgtggtgctggctttcttaacttgacagtcattttcacaccagtgtgaggaatggtttgagtgttatccaagtaattacggtgctaacattttagagaaatatacattaaggtggatatttctttattttggtttagaattatatatcaatatttaactggaaatgattatttggaacctgcaatacagattgntcttnattttc

SEQ ID NO: 41417 - DNA, 403 bp, Homo sapiens
  misc_feature (1)...(403): n = a,t,c or g
gcggcacgagggccgagggaagtgataatggctgtgcttatggagcacttatattttaaaatgcacagcaaacacacacatggacatcagcctgcaaacacgctgccctcctccccaggcaaatggctgctgcccagtaaactctgagccaagtagaatccaagcagcctattgccacccaagagcctctagccttgtctctggtcttcccccactggctgctggtccccttctgcccttcatttccttctctcccaaaagaagtcaggggacactgggtctcattctgattggtcgtcatctctgtgtgcagcatttagtgagggaagaatagactggattccttgccagcatttgtgcatgttctttgatccttaatagacagacaggtgtnaagtcaacc

SEQ ID NO: 41418 - DNA, 399 bp, Homo sapiens
  misc_feature (1)...(399): n = a,t,c or g
gcttnnnnnnnnnnnnnnnnnnnnnnnnnnnnnnnnnnnnnnnnnnnnnnnnnnnnnnnnnnnnnnnntttttnnnnnnnnnnnnnnnnnnnnnnnnnnnnnnnnnnnnnnnnnnnnnnnnnnnnnnnnnnnnnnnnnnnnnnnnnnnnnnnnnnnnnnnnnnnnnnnnnnnnnnnnnnnnnnnnnnnnnnnnnnnnnnnnnnnnnnnnnnnnnnnnnnnnnnnnnnnnnnnnnnnnnnnnnnnnnnnnnnnnnnnnnnnnnnnnnnnnnnnnnnnnnnnnnnnnnnnnntcctagaatgtggacaactatatggcaaatggacatgaggaacttgntggatctggancaaangtgactnttgnaatgntttancnaananactgggnncattttgccc

SEQ ID NO: 41419 - DNA, 403 bp, Homo sapiens
  misc_feature (1)...(403): n = a,t,c or g
gcaacagaaacttattttctcaaacctctagaggctagaagttcaagatcaagctgttgtccaggtagattttattctgaggcctcttttcttggcttgtaggtggctgccatcttgctgtatgctcacttgaccttttcactgtgcttgagtggggagaggtgagagcaagctctctggaatctcttctcataagaccaccagttccatcttgagggcctcacccgnnnnnnnnnnnnnnnnnnnnnnnnnnnnnnnnnnnnnnnnnnnnnnnnnnnnnnnnnnnnnnnnnnnnnnnnnnnnnnnnnnnnnnnnnnnnnnnnnnnnnnnnnnnnnnnnnnnnacatcatcagaaaacaaaaccagaaatgagtttccttaatgccatgganaatggcataca

SEQ ID NO: 41420 - DNA, 178 bp, Homo sapiens
gattgggattgaggttcagcagtatttacatgttatgaaggttagtaccgatgttacaaagatgggaacacggaaaaacaataatagaacccagtgaatccatggaacaacgtaaactagaactctgtaaaatataaaacattttttgtgctactgcctctcagtttttttttttttt

SEQ ID NO: 41421 - DNA, 408 bp, Homo sapiens
  misc_feature (1)...(408): n = a,t,c or g
gcaataaaaacataaactgttccctctgggccaaggcggagggcaggccatcagatcagcaggaagttgatctggttttgaattgggttgtgtgtgcactggagtcaaacattattttacagaatatatttcatatatattttacacatatttgcttttttgtttcagatatttcacaagtttttaaaaatgtaagcaggtcatgaggcccgctgtccaggacagcagcatgcccgtttctggtgatacttggtgcagagggtaactccagcagctgtgcgtgctgacccctccagccagctctgggcaagggggttgtttcctcccagctcagtggctgagcagagcttcagctggcgaaggacccaggctctggcaacattgnggacatnccctccacaggcctgg

SEQ ID NO: 41422 - DNA, 401 bp, Homo sapiens
gctagcaccatgagcttcaataccctgcatgatattatactaggctttgcggtaattatcatcatcaccatcattatctcaattatttagtatgttacagttcccaaagagctgtcatgtgcataaacaaacttgaaagattgataaagcaggtactgttatcaacccttgaccaaaacagaaaatgagacccagagaagttaagcaccttggatcacgacacgtagcttataaatgacagaacccagcctcttaacttttatcttagtgtgctattcaatatatcatactgactcccatgtgaatggtggtggtactgagtttcctcatttccaaactgttcaatcttctctgctacccatgttagttgtccatttcccacagacaggatgatatagtga

SEQ ID NO: 41423 - DNA, 408 bp, Homo sapiens
  misc_feature (1)...(408): n = a,t,c or g
gctgttatcatggtannnnnnnnnnnnnnnnnnnnnnnnnnnnnnnnnnnnnnnnnnnnnnnnnnnnnnnnnnnnnggtggaaatcaaaatgttggctaggattgtggcctcatctgaaagcttgactgaagggtatctacttcccagctcactctagtgagcttgtgtcaggattcacttccttgcaggctgtggccaaagacttcctcagttcctgccacatgggcctctccccagctgacagcatggcagctggctttcatcagagtgagcaagaggtgagcctagatggaagtctgagtgtgtttataacctaaacttagaagtgacatcctgttgcttttgttggcttctgtctgtcagaagtgagtggctaggcccagctcacggggcaggagatcacacgt

SEQ ID NO: 41424 - DNA, 281 bp, Homo sapiens
  misc_feature (1)...(281): n = a,t,c or g
gtcagtttatgaaaaaactgcttacatgtaatggcgtttacttaaaccctcctcccgggcaagatcacctgttgcctgaagcagaagaaatcactatgatcagtattcaacttgctgctaggttcctctttactacaggatttcacacaaagaaagtagtccgtggctctgcagtgattggtatgatgcattgngattctccttcnccagcaagaatgncgntntggnnnntctaacgncttttaaagttanatcntctcgaacctttgntnnccangcta

SEQ ID NO: 41425 - DNA, 358 bp, Homo sapiens
  misc_feature (1)...(358): n = a,t,c or g
gagggtctaaattctccattgtaaggtaaggattctccagggtggtggtgaggtgggttgagattgcatttgtatcatttgtgtttttatgaactctgaagatccatgtnnggtgaaggaaaggatgggaggagaaaaggaaatactttgaaaganggataacttggactgtttatttccttatgtgctgngtaanaangtcnangngacatctatangantaaatcacntttntanctgtngacccactgaaactttnatttactnanctntttatnncgnanaatanntactcnnncntnctnnncncnctnctannacttcnttnatanancntcnnnncttncntnnantattt

SEQ ID NO: 41426 - DNA, 378 bp, Homo sapiens
  misc_feature (1)...(378): n = a,t,c or g
ggcacatttcacagtgaaccttctgagagtgttgacagatcacagcttttctttttgtctaatgaaaagggcttgctggccattgggtgttgtaatctcttaggagagtaaactcttagtaactatctaaatcattcttaatgattcnnnnnnnnnnnnnnnnnnnnnnnnnnnnnnnnnnnnnnnnnnnnnnnnnnnnccggcatggtgcggcccctgtggcccggtccttgggaggctgnngcccnnatggtgacccggaggggnttgcngnngccnnnntccnnnntcnncggcgnnnnngantnnttctnccncnnnnntnnnnnccntttcncnnnnnnnttngntncttanannnnccnccnncnncggctt

SEQ ID NO: 41427 - DNA, 386 bp, Homo sapiens
  misc_feature (1)...(386): n = a,t,c or g
gnnnnnnnnnnnnnnnnnnnnnnnnnnnnnnnnnnnnnnnnnnnnnnnnnnnnnnnnnnnnnnnnnnnnnnnnnnnnnnnnnnnnnnnnnnnnnnnnnnnnnnnnnnnnnnnnnnnnnnnnnnnnnnnnnnnnnnnnnnnnnnnnnnnnnnnnnnnnnnnnnnnnnnnnnnnnnnnnnnnnnnnnnnnnnnnnnnnnnnnnnnnnnnnnnnnnnnnnnnnnnnnnnnnnnnnnnnnnnnnnnnnnnnnnnnnnnnncaataaatcagacacgccatcagcatttggggtttgctgcctcagatccaacgtgcannccacactgggaaatacncncntatcaagccacctatactgaagacagagctcatgacattccctcccactt

SEQ ID NO: 41428 - DNA, 391 bp, Homo sapiens
  misc_feature (1)...(391): n = a,t,c or g
gnnnnnnnnnnnnnnnnnnnnnnnnnnnnnnnnnnnnnnnnnnnnnnnnnnnnnnnnnnnnnnnnnnnnnnnnnnnnnnnnnnnnnnnnnnnnnnnnnnnnnnnnnnnnnnnnnnnnnnnnnnnnnnnnnnnnnnnnnnnnnnnnnnnnnnnnnnnnnnnnnnnnnnnnnnnnnnnnnnnnnnnnnnnnnnnnnnnnnnnnnnnnnnnnnnnnnnnnnnnnnnnnnnnnnnnnnnnnactcacctcaaaaataaaaaaaatcagacaccctcacatttgggttgtgctnagnccacggcagcncctggaatccccatnagcacttctgaacgantatgcttctccctaatactgagctttntaaaactgnagngcttgaaaacagcgctgg

SEQ ID NO: 41429 - DNA, 400 bp, Homo sapiens
  misc_feature (1)...(400): n = a,t,c or g
gagcaggaatgaaatgggagagatggctggtaggattaattaggaaaccccatgactttcctgtttctttttcccattttccactttataaaacacattctgatttaagtggaaattgcagtttcagccattaccagcaaatcctgccattgatgttatgtttcagatgtgttcgncnaantcatcagaanaccanggtacagtggaacgaggctcttttcccttcctcacttcgcttgacctcgagtccttttagacagtcanannaatgccanacggtgagtccattnattcagcacggtnaaanatgcggggcatntgcacatagggtgagaaagaanntggctctgaaccnagctaccagtacgtgnacgtggtggggtgtggattgactgnacga

SEQ ID NO: 41430 - DNA, 331 bp, Homo sapiens
  misc_feature (1)...(331): n = a,t,c or g
gctggcatgtttgattatgactttgagtaagtttgatttgaattaagtatttgtgctgtgtttagtgtgtagacaccagtatgcctttttgagacctttctaacccataagtttatctgtttaattgtaggtatggtatattaagggttaggctgggaaagtttttttaaaaaccagaaaaaccgtgatggangattganctgaagntaaacannnaaacncgaacctggctattnaaagaccctttatgcaaancttnccagnttganaaccctgctccttcttgactnncaagataacntccttacctgagtcgggccntcacnttggt

SEQ ID NO: 41431 - DNA, 278 bp, Homo sapiens
  misc_feature (1)...(278): n = a,t,c or g
ggtctggagcacccgcctggtggggaggctcagggtggcttcatcacagggtgacatcctcatcacatacccctttgatgtgtctcacaaaagcctggaatgaccagttcctgtgcctccgggtcttcgtgaatctgaaaatgccgacgggccctgttcaggcaccagcattgaggctgtgccctgtgaaattgcagtggnccctggctgncaggggtcatcacaggccatnctntnaanggactgccnanaccctgannacatganaggggccctgt

SEQ ID NO: 41432 - DNA, 340 bp, Homo sapiens
  misc_feature (1)...(340): n = a,t,c or g
gggatttctgaagcttaaccaaaatatgtctcagtattatgcatttcctgaaacatggagtgttctttcagtctgcgtatcagtttgttctacctcagggaatttttttttaaaaaagannnnnnnnnnnnnnnnnnnnnnnnnnnnnnnnnnnnnnnnnnnnnnnnnnnnnnnnnnnnnnnnnnnnnnnnnnnnnnnnnnnnnnnnnnnnnnnnnnnnnnnnnnnnnnnnnnnnnnnnnnnnnnnnnnnnnnnnnnnnnnnnnnnnnnnnnnnnnnnnnnnnnnnnnnnnnnnnnnnnnnnnnnnnnnnnnnnnnnnnnnnnnnnnnnnnnnnnnnnnn

SEQ ID NO: 41433 - DNA, 332 bp, Homo sapiens
  misc_feature (1)...(332): n = a,t,c or g
gccaaaaacattatgtatcaaacaaagattatcattggcttactccatatagagttttatttaatcagttaaaataaaacatggtcttcagagtatgatctttctctctttgctgggttttagggaatttggtgtgtaattttctgacatacagcatcacatccagtatatacagaatgagggtcttcttttaaggatgcttgtcatttaaaactgctcaagccnnnnnnnnnnnnnnnnnnnnnnnnnnnnnnnnnnnnnnnnnnnnnnnnnnnnnnnnnnnnnnnnnnnnnnnnnnnnnnnnnnnnnnnnnnnnnnnnnnnnnnnnnnnn

SEQ ID NO: 41434 - DNA, 340 bp, Homo sapiens
gaaagactttcattgctgtgaaaaactggaaacagactagatatcaactgacagacaactgacacagatggcaagacatcacaatctggaatagttcacagccatgaaaggtgtgcacgtgttgatatggaacaaatacctcaatacagaattaagtgaaaacaattcaaggtgcagagctgtgtgtaatgtatgatttcttttgtgaaaaaaggaaaacaatacacaccacacacatatgtttgtgtttatttatagttatatactaggaactgcctagaaatacttggaagaagactcagaaattgagaagaatagttgtttctgagaggggaactgt

SEQ ID NO: 41435 - DNA, 281 bp, Homo sapiens
  misc_feature (1)...(281): n = a,t,c or g
ggaggattgaagggccactttggggacccttgctgaagatgatgggctctgctctggggatgcccagcctaggtggtcacagaacccagcttgctataaatacttgccgaatggtggggacttcctgatgtgccttcatcctaacatgctctgcagggcccatgacttagccacagactccatccatattgtcctgggggaaaccccaggcctggagtcagggacagtggagggcaaggatttgggntntcttanatcccagatnggctgangnntnccat

SEQ ID NO: 41436 - DNA, 338 bp, Homo sapiens
  misc_feature (1)...(338): n = a,t,c or g
gnnnnnnnnnnnnnnnnnnnnnnnnnnnnnnnnnnnnnnnnnnnnnnnnnnnnnnnnnnnnnnnnnnnnnnnnnnnnnnnnnnnnnnnnnnnnnnnnnnnnnnnnnnnnnnnaacaatgttttagtccattatatgaaacaaaatgaaaactaataactctttttttctaattagaacatgctatatagtattttatgaatttctgctatctttgtgatacacatannnnnnnnnnnnnnnnnnnnnnnnnnnnnnnnnnnnnnnnnnnnnnnnnnnnnnnnnnnnnnnnnnnnnnnnnnnnnnnnnnnnnnnnnnnnnnnnnnnnnnnnnnnnnnnn

SEQ ID NO: 41437 - DNA, 339 bp, Homo sapiens
  misc_feature (1)...(339): n = a,t,c or g
ggaaatagttttagttgaagtgcagtgggaggagtttagttttgggatgatgggagaaaactttgtggacttgatataatttaagttggtctacgtggtatatatgcatataagtttttgagatgnnnnnnnnnnnnnnnnnnnnnnnnnnnnnnnnnnnnnnnnnnnnnnnnnnnnnnnnntgactcagattcatgttacctgggattacaggcacacaccactgcacctggctatctttgagtgattgaaaaacaaaaacaaaaaaannnnnnnnnnnnnnnnnnnnnnnnnnnnnnnnnnnnnnnnnnnnnnnnnnnnnnnnnnnnnnnnnnnnnn

SEQ ID NO: 41438 - DNA, 335 bp, Homo sapiens
  misc_feature (1)...(335): n = a,t,c or g
gccacccgccctgcctnnnnnnnnnnnnnnnnnnnnnnnnnnnnnnnnnnnnnnnnnnnnnnnnnnnnnnnnnnnnnnnnnnnnnnnnnnnnnnnnnnnnnnnnnnnnnnnnnnttaaaaaatttaaaaaaattagccaggtgcatgcttatagtcccagccactcaggagatttagcggggaggatcgcttgagcctgagcctgagccnnnnnnnnnnnnnnnnnnnnnnnnnnnnnnnnnnnnnnnnnnnnnnnnnnnnnnnnnnnnnnnnnnnnnnnnnnnnnnnnnnnnnnnnnnnnnnnggaaattgtatttatttcatgttagttgttc

SEQ ID NO: 41439 - DNA, 336 bp, Homo sapiens
  misc_feature (1)...(336): n = a,t,c or g
gggagacgtggatgtataatattgtaagattattatcctatatatgaagaggtataatattatatgaaggtagactgtgtgtgacaaggcaaagaatgtgcaccctacagccaccacttcaacatacaacaaggagttagaggtaataatccaaaagaatagataaaaagaaaaaataannnnnnnnnnnnnnnnnnnnnnnnnnnnnnnnnnnnnnnnnnnnnnnnnnnnnnnnnnnnnnnnnnnnnnnnnnnnnnnnnnnnnnnnnnnnnnnnnnnnnnnnnnnnnnnnnnnnnnnnnnnnnnnnnnnnnnnnnnnnnnnnnnnnnnnnnnnnn

SEQ ID NO: 41440 - DNA, 336 bp, Homo sapiens
gtgttgttggcagctgtggctaaggaggggagaacctctgctccccgcccgtcttctcttctgcgtttcccgggctagggggcgtggggagtggttttaggcggcgaagccgctcggcagcaccttccttctttgccaggcagacgcccgttgtagccgttggggaaccgttgagaatccggtaaccgatgcggacggtaaagccgtttgggttagagcggcgcgggtgtccagtccgcggaacggggagatcgttggcaccttcgcttttttaggggaacggggataagttcggtaaactgaattgagaagcggatccgagggaggttgaaagct

SEQ ID NO: 41441 - DNA, 361 bp, Homo sapiens
  misc_feature (1)...(361): n = a,t,c or g
ggaaccacaggggtgtgcaactgtnnnnnnnnnnnnnnnnnnnnnnnnnnnnnnnnnnnnnnnnnnnnnnnnnnnnnnnnnnnnnnnnnnnnnnnnnnnnnnnnnnnnnnnnnnnnnnnnnnnnnnnnnnnnnnnnnnnnnnnnnnnnnnnnnnnnnnnnnnnnnnnngtattgccatcttaaccatattaagccttccaatgctgaatatgatatgtgtttccatttattgaggcttttgatttctttcaatgatgtttgggncatgtcattgnacaantcttacnnaaaanacttcctctgacnnntagnatgctngnntgntantnttnagnnnnacgnttnncgccgannaangact

SEQ ID NO: 41442 - DNA, 378 bp, Homo sapiens
  misc_feature (1)...(378): n = a,t,c or g
gcnnnnnnnnnnnnnnnnnnnnnnnnnnnnnnnnnnnnnnnnnnnnnnnnnnnnnnnnnnnnnnnnnnnnnnnnnnnnnnnnnnnnnnntcagccctctgtatgacttgtagcatatatttggaaatcagaaaaatatatccatctcacaaataaaggatgtagaatgccttacccaaggttgctacctcatctacgtgannnnnnnnnnnnnnnnnnnnnnnnnnnnnnnnnnnnnnnnnnnnnnnnnnnnnnnnnnnnnnnnnnnnnnnnnnnnnnnnnnnnnnnnnnnnnnnnnnnnnnnnnnnnnnnnnnnnnnnnnnnnnnnnnnnnnnnnnnnnnnnnnnnnnnnnnnnnnnnnnnnnnnnnnttngaattt

SEQ ID NO: 41443 - DNA, 354 bp, Homo sapiens
  misc_feature (1)...(354): n = a,t,c or g
gcggcacgagctggaagaannnnnnnnnnnnnnnnnnnnnnnnnnnnnnnnnnnnnnnnnnnnnnnnnnnnnnnnnnnnnnnnnnnnnnnnnnnnnnnnnnnnnnnnnnnnaaatcangggccttaatnactgatggatctctntaccnaaatgtgacccttaacnatttnagaatattacccatantnggagagaacctctanaacnnnccgtggangtaacacancattttgaaggtctattctantttccagaccatttnngacactntnancntttnanatgnntggtcctncattnatggacccnaagaggccccnnanccttnangtcttaactctncacantgttac

SEQ ID NO: 41444 - DNA, 377 bp, Homo sapiens
  misc_feature (1)...(377): n = a,t,c or g
gtgtgnnnnnnnnnnnnnnnnnnnnnnnnnnnnnnnnnnnnnnnnnnnnctcatgctatcttcatgctgagtagtaggctgaggaggaggaggagggttggtcttgctgttgcgggggtggaagaagatgtgcattattagtgggcccacacagctgaaaaccatgctgttcaagggtcaactgtgtgtggtatcggtgagactgaatgattatcgttggtgttcttaaattattttcaggtcctctagaaaatatgataattatagcaaaaaataaaattgttttgaaattctgataaatatataaatgtatacaacctatttttttcaatgaaagaaaatgggaaacattttttaacattgctagattggcagtg

SEQ ID NO: 41445 - DNA, 351 bp, Homo sapiens
  misc_feature (1)...(351): n = a,t,c or g
gttaaagctttctgcccattaaaaaatggattatctttttactattgatatgcaggaattcttaatgtactcacgatacaaattctatgtcagatcagagtattaagagtattttctcctgttttgtagcttgccttatcttttttttaacagtattttgatgagtggaagttttaaaatttgatgaagtccactcaatcaactttttgttacatggancgggctncnngcannnngnannttgtacnanattngattccgancangngnannacgnnngnngaaactgangcccnnngnantcnangccnnnngangnnnaannnanannccnctnantannnnctgctg

SEQ ID NO: 41446 - DNA, 370 bp, Homo sapiens
gcggcacgagctggatattcttgcattcctataaatcttcttgggctttgttcctcgatgcagttaagttatttgtgaagtagtttgatcttcttgagttttacctttatgatttgtcaggctggactgaagcaatactcaggctaaggttaattattttccaatatgagcaacaccttcctgagtatcatacccagtgcccaatcaattatgagatgttctagtctagctggtgagatcaggaactattctcagccctgtgtgagtgccaggttctattcctttgaatcctttcagatagttttttcctttggccttaggtagttttctcatatgcatttataaaatggtagtcttttcctggaccctc

SEQ ID NO: 41447 - DNA, 378 bp, Homo sapiens
gtgcttttggttactaattattttatagaacatataaaagaaaattttagaatacctaatttgttcacaaaaatgttatattgtctcccctgatacttggtattcctgtgtcaggctgagcactaaggttatacattttttgttaagcatgtaattactgttatttctcatgtactttattttgtgtattgatttcagtagttgtagctgagggtaatccttaagagcatgcagattttaaaaattacatagattgccttgccaagccgtctgaaagtcatactagaaaatttgataagagcctgctgttaacaacacattgagttatttttatcttaatgctaagtggagaattacttgaatttattttttttgctg

SEQ ID NO: 41448 - DNA, 397 bp, Homo sapiens
  misc_feature (1)...(397): n = a,t,c or g
gcggcacgagctctctctctctgtcactctccctcagtaatgtaattgttgtttggtggaaatcaaggagcaaaggaataaattaaacagggtctagccatttattttcccactggctttatcaccaaaagtaagtaagattgttttgaagtctatccccattaccccaactcagcccacccatgtccaggaatacatttgctttgaatcttcctaattctcctctctaacccattgtcaaagatgtcagataaaagaatttagaattttnnnnnnnnnnnnnnnnnnnnnnnnnnnnnnnnnnnnnnnnnnnnnnnnnnnnnnnnnnnnnnnnnnnnnnnnnnnnnnnnnnnnnnnnnnnnnnnnnnnnnnnnnnnnnnnnnnnnnnnnnnnnnnn

SEQ ID NO: 41449 - DNA, 396 bp, Homo sapiens
gaaaggctgtatatagcttcatatcagttcaggccaaattttactgtcctgcaagttttgacataaaacatatgaaaaattcttggtttttagagctgtttggatattagaattgtacataatggattgtagacctatttggaggtttggtttctcatcctaaaagtattagcaagcttcaaattaaatggagcttcatatgttcatggtagggaatgtaatttattttgatttaaataaaccaccatgtgctgtgattggtttgtgttttccttccaaagacctcagtacttttgttgaatagcatttttcttcagcatggttctccgaaccccatttttaatatttgagatcaaatcagagttttctattatagcctttctggacctaaagtgg

SEQ ID NO: 41450 - DNA, 404 bp, Homo sapiens
  misc_feature (1)...(404): n = a,t,c or g
gcggcacgagcggcacgagttgatgatgaaaacacattcacnnnnnnnnnnnnnnnnnnnnnnnnnnnnnnnnnnnnnnnnnnnngccaaaaaacaacccaaatgcccactaactgaagaatgaacaaaatgtgacaannnnnnnnnnnnnnnnnnnnnnnnnnnnnnnnnnnnnnnnnnnnnnnnnnnnnnnnnnnnnnnnnnnnnnnnnnnnnnnnnnnnnatgttttnnnnnnnnnnnnnnnnnnnnnnnnnnnnnnnnnnnnnnnnnnnnnnnnnnnnnnnnnnnnnnnnnnnnnnnnnnnnnnnnnnnnnnnnnnnnnnnnnnnnnnnnnnnnnnnnnnnaaaggagaatggagagtgactacttatggacacaaaggttgctttttggcatgataaag

SEQ ID NO: 41451 - DNA, 395 bp, Homo sapiens
gttcctgtgtggctttcccttaaggaattgagcctaataatggatgtttagtatatcaagaggtgttcaaagaaagaccaagaacattttgacagtgtctaccagccccatatgcagacccatagattttactaccatgcctcggctaggcaattatctggtaggtgcactagtgtacgtgcacagtgatgtgttaagcaaggaatggcccctgctccattatccctgcgagcaaaaggctagaaacaacctatgtccaattacaggggacaggataaagaacaataactagctgaccatatgctggaattctcaacagtggatacaagaaatgatatagatctatagatatttacatgaaaaatgtgccagaatatattggaaagtgaaaaaga

SEQ ID NO: 41452 - DNA, 393 bp, Homo sapiens
  misc_feature (1)...(393): n = a,t,c or g
gagactgcatagggctcggcgtggggcgcttgtaattgcagctactcgggaggctggggcagagagttgcttgaatctgggaggtggattcaagccaagatnnnnnnnnnnnnnnnnnnnnnnnnnnnnnnnnnnnnnnnnnnnnnnnnnnnnnnnnnnnnnnnnnnnnnnnnnnnnnnnnnnnnnnantntttntnaaccctcccgaaanttnnnccnttttnanngggaaagttttangtngggccnngccnnttnttnnaatncatttnngtggggnaatttnccaaanttnttnggntntngannccccantttannggnttaaanccngancntttnnntcaaacctatggtnncntagncccntaaantntgnggaaacccccggat

SEQ ID NO: 41453 - DNA, 403 bp, Homo sapiens
  misc_feature (1)...(403): n = a,t,c or g
nnnnnnnnnnnnnnnnnnnnnnnnnnnnnnnnnnnnnnnnnnnnnnnnnnnnnnnnnnnnnnnnnnnnnnnnnnnnnnnnnnnnnnnnnnnnnnnnnnnnnnnnnnnnnnnnnnnnnnnnnnnnnnnnnnnnnnnnnnnnnnnnnnnnnnnnnnnnnnnnnnnnnnnnnnnnnnnnnnnnnnnnnnnnnnnnnnnnnnnnnnnnnnnnnnnnnnnnnnnnnnnnnnnnnnnnnnnnnnnnnntgttcatgcaactaacctagtttgagaattacatgtattatgtactgctcacattacatgttatctgtatctctttataggagaatgccttcctgttagccacctgccagacatctttaggaaagtatgatccctctgtccaatcaagagtattctgcttt

SEQ ID NO: 41454 - DNA, 394 bp, Homo sapiens
gagtgattggaccagtggcccaccagcatcttgcccctcagatcgaaaagtggagggttgctatgcgaaagcaagactgtggtttcattccaatttcctgtatatcggaatcatcaccatctgtgtatgtgtgattgaggtgttggggatgtcctttgcactgaccctgaactgccagattgacaaaaccagccagaccatagggctatgatctgcagtagtcctgtggtgaagagacttgtttcatctccggaaatgcaaaaccatttatagcatgaagccctacatgatcactgcaggatgatcctcctcccatcctttccctttttaggtccctgtcttatacaaccagagaagtgggtgttggccaggcacatccatctcaggcagcaag

SEQ ID NO: 41455 - DNA, 393 bp, Homo sapiens
  misc_feature (1)...(393): n = a,t,c or g
gcattagtccggtaattccatatataaatacatttaaatatggaattctatatatataaatatggaattcctgctctgataaatgccatggcattgatggcccggccacaactggtagttttaagccacctgagtcagatctccctcacagccagagcagagagctgggaaagcccagcagctgcttgctttgctgcctccacccctgccccaggctatataggctggccccagcgccctgtgcactctgaagtggcagaaggtcctctgggcaccaccctctgccaacgggctcccttgcttgctctcagccttattgtcagccagaaaagaattctcctggctgctgantgagncttcaagaaggggacagatgaaagcgcagaaggaaag

SEQ ID NO: 41456 - DNA, 405 bp, Homo sapiens
  misc_feature (1)...(405): n = a,t,c or g
gaggttttgttttgccattttgatttaaaatagaaatgcttttctcaccagtgtcacttcttattggtttgaatttcccttcaagttgaatggaatggagcaagtattgtcatggctcttaaagtaatttgtgcatagtgtcatgtacaattaacttcttaatacagtgcagaatggaaaatagacttggggatagaggtattttgggttggtaagatgacatataaacagtgatttttttggtttgtttttaaannnnnnnnnnnnnnnnnnnnnnnnnnnnnnnnnncgtccaagctggagtgnatgaantgtgatcacagnccactgcaccttnacccncctggnctnaannganacttctgcctcanccttccnagnanctgcgccatnngnncntccact

SEQ ID NO: 41457 - DNA, 192 bp, Homo sapiens
gaaaaaatactagtagtggcttctctgcatagtgcagaaagttgatttgaagcatatattgatcatctttagaggactttgtggagacaggccaacaagattgttgctggaaggtcataggttccctgaggtgaagtatgtatttggtcctgtgcaatattatcatgtgtgtagattctttttttttttttt

SEQ ID NO: 41458 - DNA, 359 bp, Homo sapiens
  misc_feature (1)...(359): n = a,t,c or g
ggccgcttgatatttttctcattatggatcaaaatttggctttctggtgtagttcattctgttgtcaacccattattggctattgtgtaactganatcaatagtagtagaagtggtggtaatggataacattgatccatccaacgaatattttattgaatgtttattttgtgccaggtattgccctgtgctctgggaattcaccatgaacaaaacaggcaaaagtttctacctttgaggancgtatattctaatggggaagaccnccnataaatgangaancatacnaaacatgnnttttattagntggtaatanatgcnattnanaaanngaanatagatatggaagataggaaatgg

SEQ ID NO: 41459 - DNA, 424 bp, Homo sapiens
  misc_feature (1)...(424): n = a,t,c or g
gcaactactgtgggactgtgagctgaatgaagatttcagaagttggaaacttctcagcagtgttggagctcagaccagccagtgtggggaaagcttgctgaacatactgtgctttcagctgtgacctcagaaaggtcacaccttatgagtagggctattctaggagtagaagacaggctactatagatctcatacagcaaagccccaaaccaagcctctattttatcatcttgatccacctgtaaatttattgtctgatagaacaaaactctctctaaagtaagacaacataattcagtttctcaataacaaagcacctgcaatgtctagcatagaattattatgcttggtaaaaagcaggaaaatgtgactcttaccngaatgaaaaagttgatagaaattaatatcttaaatgaaaaatccc

SEQ ID NO: 41460 - DNA, 346 bp, Homo sapiens
  misc_feature (1)...(346): n = a,t,c or g
ggagaaatgcaaattgaaacaaggtgccatttttggactctagttagtgatggtagtgaaaaccagaatggtcctttctaaaacagcctgtgtgtcaaaaccataaaaatgcttctacctctttttaccctgttaattctacttctgagagtttttcctaaagaaataattcaaaataggaaaaagctaaaagcagaaaaatgttgaacatgacattatttatagctgtggaaagattggannnnnnnnnnnnnnnnnnnnnnnnnnnnnnnnnnnnnnnnnnnnnnnnnnnnnnnnnnnnnnnnnnnncccnnnancttgnnaccnnctgnnaaacnnnngagac

SEQ ID NO: 41461 - DNA, 312 bp, Homo sapiens
  misc_feature (1)...(312): n = a,t,c or g
gccctcattccacttgtcccctactcacctgatagccagtacaattttatgaatttgaagttactaattcccatgtaactgtttatacttttagtaaatgtgtttatgtccctcatcaacacatgacactgattcaacacatgtatatgcgtttaagctgcatgtaaatggcatcatgtnnnnnnnnnnnnnnnnnnnnnnnnnnnnnnnnnnnnnnnnnnnnnnnnnnnnnnnnnnnnnnnnnnnnnnnnnnnnnnnnnnnnnnnnnnnnnnnnnnnnnnnnnnnnnnnnnnnnnnnnnnnnnnnnnnnng

SEQ ID NO: 41462 - DNA, 387 bp, Homo sapiens
  misc_feature (1)...(387): n = a,t,c or g
gggctcacagactgcacctggcttgcagatgtgttttatttggcttggatggtattttgttttttaaattttgaattggttgctagcacttaaaatttaagaaannnnnnnnnnnnnnnnnnnnnnnnnnnnnnnnnnnnnnnnnnnnnnnnnnnnnnnnnnnnnnnnnnnnnnnnnnnnnnnnnnnnnnnnnnnnnnnnnnnnnnnnnnnnnnnnnnnnnnnnnnnnnnnnnnnnnnnnnnnnnnnnnnnnnnnnnnnnnnnnnnnnnnnnnnnnnnnnnnnnnnnnnnnnnnnnnnnnnnnnnnnnnnnnnnnnnnnnnnnnnnnnnnnnnnnnnnnnnnnnnnnnnnnnnnnnnnnnnnnnnnnnnnnnnnnnnnnnnnnnnnn

SEQ ID NO: 41463 - DNA, 402 bp, Homo sapiens
gacggggagtctctgcagtcgccagacaaatcatactcagccccttcccccgtagagcaacaagtggttcttttagagttgactggcagcatttcctgtcgggggaggtggggtttgatggagttagaaagctcgcctctgtgtacattctctcctgggctgttactttctgtagacgcacaaaatcagccccaatgtttttaagggcatcttagccaaggaagctggcttttgtgtcgccacttccaggcctgcattaagagagagcccaggcaccagggctaccactggaacctgcctcagcgtcaactgctgctggtctgtagccaggcccagcctttgagacgggtttactgtcaccaagtagcttttagtgccagccctgagcttgttcctggctca

SEQ ID NO: 41464 - DNA, 391 bp, Homo sapiens
  misc_feature (1)...(391): n = a,t,c or g
gttataagtaagcatgtgtgttttggattttgaaaatttagtatgaaaaagaaaagcatttgttttcaaaaaattggattacatattgaaatgatgatgtttagatatatttgttaaatatattaatctgtttctttttacatttttaatgtgactactagaaaattaaatttcatttagctcacattatgtttctggtaaccatcgctaatttagactattctattaaaatgctgtgaaagttgatgctacagcaaattgactacttccttttaacnaatatcttaataccttccttnctgnggnntncttgnantnncatcctctacnggccataacactttgcttgngcagnnnnccnactntngnccctatnnncccnttggactcg

SEQ ID NO: 41465 - DNA, 414 bp, Homo sapiens
gcttaaatgtctaacattgagatgttgattccataaatcagagcagttacaataccttatataatctagtattctggcatttttattttgagaatgctacctatctgtgcatataggcatgtacatgcaatgcttttattttgcaaatgtccaattatcaggtcacatttttataacacttgtgtatgttgtatgtgctgcttcagaacccaagcatatttctcttagttaggggccgcccttgttgcccaaatgaagaaaattagcagggaagtgcagtatgttgtccattgaatgtttacatacatgtaatgtctcaaatacattataattggaagttgtaatctgagtgagcactttgagcatgtaaataaatatcttttagaacatttttagtaatcattttaaatggga

SEQ ID NO: 41466 - DNA, 69 bp, Homo sapiens
gctttttgaatcaagctacaattaaggttcacactatgtgtttggttgataatcctttttttttttttt

SEQ ID NO: 41467 - DNA, 405 bp, Homo sapiens
  misc_feature (1)...(405): n = a,t,c or g
ggtatggagaaaagtgacgagagacccctgaagagcaggtcatgtctctttagccttctgattagtgtgcagtgtagtgcttccacaaagagatgcttaatgaatacttttcatgattatgtagagattaatggtagggagtgaggtagtcctagttcctcatgtaagtgtagaggccatgtaagaatagaggccatttctnnnnnnnnnnnnnnnnnnnnnnnnnnnnnnnnnnnnnnnnnnnnnnnnnnnnnnnnnnnnnnnnnnnnnnnnnnnnnnnnnnnnnnnnnnnnnnnnnnnnnnnnnnnnnnnnnnnnnnnnnnnnnnnnnnnnnnnnnnnnnnnnnnnnnnnnnnnnnnnnnnnnnnnnnnnnnnnnnnnnnnnnnnnnnnnnnnnnnnnnnnnn

SEQ ID NO: 41468 - DNA, 408 bp, Homo sapiens
  misc_feature (1)...(408): n = a,t,c or g
gcatgtcaataccctggatatagaatgaaagtcttcattgtctcaataaggaactccagcttgcctttgcatgtcactgaggtgtgacatcccagaaatcacacaggtagtgatctgaccccagagatggtcccctgctctctggggatacggacatcaagttcctctgccttttacttctcccaagatcaaaactcaagtccttacaatggcctataaaacccttaggtgacctcgtcccttttctagtgcctctttgacctcatatccttccgctcagccctcctcagtccactctgaccacatgacctcaaacgtgccatgcaccctncactttgcggctgtgcactggctgccctcangccagcatgtcttctctggacaggctggctcatgcttcacctcttt

SEQ ID NO: 41469 - DNA, 161 bp, Homo sapiens
ggttggattgacaaaatatttgatgacttatccattcagtggaatacagagtgaaatgagaggaggtacatttataattattgacgttggtagttactgagaatatgtttaggaaagtgggcagagacaggattttgtatgagtgtgtatatatgtgtatg

SEQ ID NO: 41470 - DNA, 404 bp, Homo sapiens
  misc_feature (1)...(404): n = a,t,c or g
gagtgccaggccctgtactaggtgacttaaatgaattatcatatttcatcctcacaagaaccctatgagactgaatctattattatcccaattttatagatagagacactgaggcacagaggttttttttgtttgcttgtttgnttttttttttttnnanncgggntnttgncctcnacccnggngacaaaccgananngntttgnaaancaanncaaancaaancanaccaaagcaaaccaaacnaaaccaaaaccantttntccagggncnnaaanctataaggggntaaaccccnggnntgaancgggtttccnnnanttnganncnggngntcaaanccgnttgaaaanttnanatccccagtnnaagantttngggggccaaanncntnaaaatnccaa

SEQ ID NO: 41471 - DNA, 120 bp, Homo sapiens
ggatttaagaggaactctgacaggctgtccagtctagtggaacagggcaacctaaaccatcctgatagtttgacccaattttaaaggccattaatatagctcagagtttttttttttttt

SEQ ID NO: 41472 - DNA, 415 bp, Homo sapiens
  misc_feature (1)...(415): n = a,t,c or g
gcggcacgagaaaataataataataataaagatcagtaactacccaggccaaaacgcagtggctcaattnnnnnnnnnnnnnnnnnnnnnnnnnnnnnnnnnnnnnnnnnnnnnnnnnccaagattagtaattttaaaattaaaagtaaattttaagcctcaagactgccagagaaagaaatgaactccttattgtcacagtgagctgaggagggacacttacagcctgagctggtgagttctcagcagccagcagtgcaagcgataggccgtgtgggccaaacaaaagtgaatcatggtgacactgggcccagagcacctggagcaagacaaggaggacccagggcagtcccgttagagtttccaaactgctgcacccattcatcaatcggccacagccccctatacgcatgcg

SEQ ID NO: 41473 - DNA, 409 bp, Homo sapiens
  misc_feature (1)...(409): n = a,t,c or g
ggagagnnnnnnnnnnnnnnnnnnnnnnnnnnnnnnnnnnnnnnnnnnnnnnnnnnnnnnnnnnnnnnnnnnnnnnnnnnnnnnnnnnnnnnnnnnnnnnnnnnnnnnnnnnnnnnnnnnnnnnnnnnnnnnnnnnnnnnnnnnnnnnnnnnnnnnnnnnnnnnnnnnnnnnnnnnnnnnnnnnnnnnnnnnnnnnnnnnnnnnnnnnnnnnnnnnnnnnnnnnnnnnnactggaaaaaagtatgtcccattagttatatatcctgacaagttgattaaaaactgactaatgtactgtgagctctacagtcagcttaaggaggagacaataagggcaaatgtgtcatccaaccacccagcaataagcttttcatcaaaagtacttcagtgcctaactattaaaactact

SEQ ID NO: 41474 - DNA, 415 bp, Homo sapiens
gccatgagcttcaataccctgccctgaaattctagaattctttccacgtagggcacagaatcatgaagttcaatttctctagttgttttttatatgatagtctcatcttttcatctggattaaaagtccacatcttagagtcccttgccatgccctccatctcaattagggcacttaaagccaaacagctgccagcattttccacaattacatgtattacattacagacacacatacacacatacacatatacacatggatacatacttataaatctatacatgatatgtaggcatgatatgtatttacacacacatcatgggatatatatgtacataaaaaatacggtgtatgtgtatatatctaagacatatatgtatgtataaaacatgagatacatatgccttcatttatt

SEQ ID NO: 41475 - DNA, 409 bp, Homo sapiens
  misc_feature (1)...(409): n = a,t,c or g
gcgtggggacagcttgaaggagccaacctcaattgcagagagcagccgtcaccccagctaccgctcagagcccagcttggaaccagagagcttccgttctcctacctttggcaaaagttttcacttcgatccactatccagtggctcacgctcctccagcctcaagtcagcccagggcacaggctttgagctgggccagttgcaatccattcgttcagagggcaccacctccacctcctataagagcctggccaaccagacacgcaatggaagcctatcttatgacagcttgctcacaccttcagacagccctgattttgagtcagtgcaggcagggcctgagccagacccacctttaggctatacctctccttcctgtcanccangctggccagcaacgggaagctga

SEQ ID NO: 41476 - DNA, 400 bp, Homo sapiens
  misc_feature (1)...(400): n = a,t,c or g
gccccgtctgtacaaaaagtaaaaaaattaaccaagcatggtagctggcacctgtcccaactacccagaaggtggaggttgcagtcagtgagctgagatcgcacaactgcaacagagctgagaccctatctcagaaaaacatttcttaggttacaagttactgtaattaaacttaccttgttttaaaaataattnnnnnnnnnnnnnnnnnnnnnnnnnnnnnnnnnnnnnnnnnnnnnnnnnnnnnnnnnnnnnnnnnnnnnnnnnnnnnnnnnnnnnnnnnnnnnnnnnnnnnnnnnnnnnnnnnnnnnnnnnnnnnnnnnnnnnnnnnnnnnnnnnnnnnnnnnnnnnnnnnnnnnnnnnnnnnnnnnnnnnnnnnnnnnnnnnnnnnnnnnnnnnn

SEQ ID NO: 41477 - DNA, 414 bp, Homo sapiens
  misc_feature (1)...(414): n = a,t,c or g
ggttgtttatgaactgcttatcccttaaaggagcacaagaacccctccctgccctccttgggcaccctgcctccaggagatggaggcacgtgataagacaaaagactgcaccaactcaccctgacacagttacatagtcactgagagtggggaagatgggacagcccacatgctgcataagatgggccttatgcagcaggcccaggtcgtcattaaggagtgacccctttcctgtaacctgcactttgggatggtagaagtttctttacctgctgacaggtttggtggcactgctggttacccctgggccctgaatggagctaaaatcacatttggtaccagcagcacctatcccaagtgtgatccttcatcccaacacttcctcttggagctgtncctgggtagagctaacat

SEQ ID NO: 41478 - DNA, 413 bp, Homo sapiens
  misc_feature (1)...(413): n = a,t,c or g
gggagtttcagagacagacactttatttcctctgcctacgagtgtgtagaaagagacagaaatctcagccatggcaaaaaagcaccgggccactgtttatcttcagatctggccttgggagacatctttagtggcccccagcagcagagaagtcaagaccagcctctggggagaggcttgggtcaacctgtccttgtctttcccctgaaagagggaaactctttgatggcagtttcaatgcaaagttgtgcccttcccgatcccattctcctataaaataacctattattggtggcatccatatatgaacataaatcccctttgacaatttttgnttgatattttgggttagcacattctgctacctattgggtaangtagtcatgntttctttactctgatgttgacctctt

SEQ ID NO: 41479 - DNA, 390 bp, Homo sapiens
  misc_feature (1)...(390): n = a,t,c or g
nnnnnnnnnnnnnnnnnnnnnnnnnnnnnnnnnnnnnnnnnnnnnnnnnnnnnnnnnnnnnnnnnnnnnnnnnnnnnnnnnnnnnnnnnnnnnnnnnnnnnnnnnnaaacgttgtttttttttgtttgattttgttnnntaatnatctggncntggcngcatggnctannnnnnnnnnnnnnnnnnnnnnnnnnnnnnnnnnnnnnnnnnnnnnnnnnnnnnnnnnnnnnnnnnnnnnnnnnngncgnncnaatgaactcnancctatgtaacctagtgagacccggtcacactcaaaaagtacattctatatattgccacttcatcattcttacttatcaataatcgtttctgtttcctcctgncttactccattttaacactgctata

SEQ ID NO: 41480 - DNA, 404 bp, Homo sapiens
gctccaggcaggctgtaacctgaccatccgtctaatctcctatcaaagatgtctgtcttccagaacacttagcaattatacagctcacatggctttaggcaccttgattatgtatttccaggtgtgtgtttgtcttggaactcctggagagatggggttctgactcatttgtttccaaatagtactagtcatgtctgctttgggcctttttccaatcccacaactgacaaatcatacagctttcaaagctttcaattaactgggaccatttttcttgtcctactgtagtgacaggtgctcttcaaatggtaatcttgattatcagtaagaaaaggatcttaggacttggaaatgtttggttaaaataaacataaaacaggtttctttaaacgttctaaggcttt

SEQ ID NO: 41481 - DNA, 391 bp, Homo sapiens
  misc_feature (1)...(391): n = a,t,c or g
gnnnnnnnnnnnnnnnnnnnnnnnnnnnnnnnnnnnnnnnnnnnnnnnnnnnncttgtctgtttgtgtctgggaggtttttttttttctattttaattttttcatgaaaattattggtgggccactgaaagtccccacacacaaagcctttattctatataattttataaacacaaattcatgattatctgttttgaaagttttaagttttgttttaatgtttaacttttatgtgcatatgatgcttccatgtgttggttactaaagtagtaggttaactacagacatactgttttgtttgtacatatttataaatctgtaccacctaacattgaacatcattttatatgaanaacatacatgttgcaaaatgactgctttcagcatctac

SEQ ID NO: 41482 - DNA, 384 bp, Homo sapiens
gcaattacataaaaacagtttagtttcttcattaaataatcattccttgaggttcattaggatgcagtcaagatcatgagaatttttatttagaaaatggcactcaaagtccctttagtgtttgagaacacacgagagggcaggaattaggagtaaagagaaatcagactgggggtaggggtagggcaaatggattcatttgatccatgtttagttatttctcatatttgccaaagcattttagagttggaacctcccacgagcaatctgcttaagtaagaggagtgagggttcctgaacacagacttaagtcttttccacatgtaacctgtctgatatttcgctggtgaagatctgccatgtattttcctttttgagtatttt

SEQ ID NO: 41483 - DNA, 397 bp, Homo sapiens
  misc_feature (1)...(397): n = a,t,c or g
ggttgatgttctcatttattgcagcaaaaaaattcttcaaatttctgtaaacaactaaccattgctcagttttatgttggagccaaataattcatcttggaataaattattcctttaaaatgtattgtgcagatattctaaaaatgaaacctatttctgaatattaaagaatgtnnnnnnnnnnnnnnnnnnnnnnnnnnnnnnnnnnnnnnnnnnnnnnnnnnnnnnnnnnnnnnnnnnnnnnnnnnnnnnnnnnnnnnnnnnnnnnnnnnnnnnnnnnnnnnnnnnnnnnnnnnnnnnnnnnnnnnnnnnnnnnnnnnnnnnnnnnnnnnnnnnnnnnnnnnnnnnnnnnnnnnnnnnnnnnnnnnnnnnnnnnnnnnnnnnnnnnnnnnnnnnn

SEQ ID NO: 41484 - DNA, 402 bp, Homo sapiens
  misc_feature (1)...(402): n = a,t,c or g
ggggctaggggctnnnnnnnnnnnnnnnnnnnnnnnnnnnnnnnnnnnnnnnnnnnnnnnnnnnnnnnnnnnnnnnnnnnnnnnnnnnnnnnnnnnnnnnnnnnnnnnnnnnnnnnnnnnnnnnnnnnnnnnnnnnnnnnnnnnnnnnnnnnnnnnnnnnnctccttcttctaagtggttaaattatttattttgtatataggtgagaaggaggattcataataaattagatatgcacatccaaagttgtcaaacaagtcatattgcccaatttccacaagccattcagagtccaaaaaacactggaacaaaaggacaaatccaaattacagcacagatttgcaaccaactcaaagatacacttaaaaactttctacagaaacgttttttaggatagccata

SEQ ID NO: 41485 - DNA, 407 bp, Homo sapiens
  misc_feature (1)...(407): n = a,t,c or g
ggaaatatgggagacgacagaccgtttgtgtgcaatgccccgggctgtggacaggtacgtttacaatatactttattgtgaatgtctcgttgtgaatcaaagtggctgttttatcactaaggcaaagagtttaaagccagtattttacgtgatcactggaggtaatcagatcagaggatttgcagtgtgtaaatccaagttatgaggaagtgtaggcactctaccgtaatgaaatctgccttgctgtcttccatattggtattctactggtgtttgtttcccaccacacagtatggaaaaatacatgttgctgtctcctcctttctaaagctgccatctaaatacnnagcaagtttanaaatgttntctcttcatgccgncgcngnggctcacgcctgtgatccaca

SEQ ID NO: 41486 - DNA, 401 bp, Homo sapiens
gggaactgaaataatttttatctcagaagcaagtactcctattaaggcttggtgtgttttcatcattttaattttgactagaatagagaactcattagagtaggaaacgcacttctgccccagattcaggagaatgaggacttatttcagtgtctcaaacacaaactttcgaatgtagcctgcagaactctggtacttatgagccacattttgcctggctgttagttctcttgataacctaggaaatatgccttaccttagcttttcctaactgaatctctcttctctgcactaagacttttcccctagcttaatcatagtgtgtcttcctacaggaagccttttcaggttgacctgtacccatctaccagtcctcaagtagtttctcaaactggagtctc

SEQ ID NO: 41487 - DNA, 399 bp, Homo sapiens
  misc_feature (1)...(399): n = a,t,c or g
ggaactggaaggcagcctcccaggccctgtgtgaaggttcataacggttcatggacttagagcagacagacactcagtgggcctgaagcgggcaagcagcaggtgacaagtcagattttaacatgtgaggaaggccatgacttctaccccagcccagcaggaacgttgtagtatgtccaacaattggtgtcaaccgtgaatgagactctgcgtgggcacagcgggtggggggtagggggcacgcaggagaggagaggaggatgaatcacatgtggtcaccagcctataaaggcttttgaagactccaggaggagtagagaaggtaaccatctgttataacccagctgagcccangcaaagtcatanataagctcaacttgctagttcttcccccaggat

SEQ ID NO: 41488 - DNA, 293 bp, Homo sapiens
  misc_feature (1)...(293): n = a,t,c or g
gcacccctctgacgctctgaccaggaaaaaaccggccaaggcggaatctaagtcctttgctgtgggaatgttcaaaggccagctcaccacagatcaggtgttcccatacccgtccgtgctcaacgaagagcagacacagtttcttaaagagctggtggagcctgtgtcccgtttcttcgaggaagtgaacgatcccgccaagaatgacgctctggagatggtggaggagaccacttggcagggcctcaaggagctgngggcctttggtntgcaantncccaangagctggtgg

SEQ ID NO: 41489 - DNA, 187 bp, Homo sapiens
  misc_feature (1)...(187): n = a,t,c or g
gggaaatgttaggtaggagactgttttagtttggttctttgtttccattaatagtcacacttnnnnnnnnnnnnnnnnnnnnnnnnnnnnnnnnnnnnnnnnnnnnnnnnnnnnnnnnnnnnnnnnnnnnnnnnnnnnnnnnnnnnnnnnnnnnnnnngttggaagtcccgnctctattannggacc

SEQ ID NO: 41490 - DNA, 87 bp, Homo sapiens
ggccatgtggctacgagagggaaatggcaaagggtcctgggtcacacctgtaatcgcagcattttaggaggtcgagatggaaggatc

SEQ ID NO: 41491 - DNA, 86 bp, Homo sapiens
gaaccacctcctttgcggagagctgcaagccggtgcagcagccttcagcttttggcagcatgaaagttagcagagacaaggacggc

SEQ ID NO: 41492 - DNA, 86 bp, Homo sapiens
ggagaaaacctgaaaacactgctgagcttgagatcttccaagaaggcataaaggtcttagaaacactggttactgttgctgaagaa

SEQ ID NO: 41493 - DNA, 439 bp, Homo sapiens
  misc_feature (1)...(439): n = a,t,c or g
gnnnnnnnnnnnnnnnnnnnnnnnnnnnnnnnnnnnnnnnnnnnnnnnnnnnnnnnnnnnnnnnnnnnnnnnnnnnntaaaggctgaaggaaagcataattgggggatgactattaatggttcaggtgtttctctctagatgacagnnnnnnnnnnnnnnnnnnnnnnnnnnnnnnnnnnnnnnnnnnnnnnnnnnnnnnnnnnnnnnnnnnnnnnnnnnnnnnnnnnnnnnnnnnnnnnnnnnnacaaattatcagtaaaagaaaatggaatatctgtagagcaagatggaaagatagtaaaacatgtgctaaagaaacataaagtccaaccaagcagtggaagaaattatctagaatcttaggtgggagtatccatctgtgtgagtagacagtgaagtaggtaatgataactacctcctaatccaggagcaaacaac

SEQ ID NO: 41494 - DNA, 435 bp, Homo sapiens
  misc_feature (1)...(435): n = a,t,c or g
gtgacaacaaacccaagagggagagatgtgatccacacaaccagcatattcagaaccccaaggggctgttagacagaatggaggtggggtcatactggccacacagaagcacaaatgctactcagagacttgggcttttaaatttgctgattacaaaggtttagtgggagcataagcagggtataatcaagaaaattttactccacaatagatagaaatataccttccagtgtgtgtagtcataatataattggaacacacaattttaaacttctagacattactgtagagtcctatgttgattaagaatcatcacagatatttctagaaagaagaaagcaaaatattactgataagtgaagatgaaatatgcctatataaccttgctgtcatgcaaggnaacnattaggtattgagattctttacatccctgat

SEQ ID NO: 41495 - DNA, 380 bp, Homo sapiens
ggtttggtgaatgaggtatatgagaaatatcatttcaggggccctagaggatgctggttgctggtgtgatgatttaagcacatcatttgtaattcccctctgtggtcagcctagtctgagaatgtgctgttgggagactagggtgcttattaggatctcttttctgtgccctgccatgactctggcaactcagatggctcagagaggggtttactttattactgattattaaattacattcacagtttattattgttacaggggcttgacagtagtgagtcagcttttggagcgaagtgtgggctcttagcaagatggcatttcgagcactcttggatgcccttgtcaggctttccccttggaactcactgccttcatta

SEQ ID NO: 41496 - DNA, 380 bp, Homo sapiens
  misc_feature (1)...(380): n = a,t,c or g
gcggcacgaggctattaaaaaaaaaannnnnnnnnnnnnnnnnnnnnnnnnnnnnnnnnnnnnnnnnnnnnnnnnnnnnnnnnnnnnnnnnnnnnnnnnnnnnnnnnnnnnnnnnnnnnnnnnnnnnnnnnnnnnnnnnnnnnnnnnnnnnnnnnnnnnnnnnnnnnnnnnnnnnnnnnnnnnnnnnnnnnnnnnnnnnnnnnnnnnnnnnnnnnnnnnnnnnnnnnnnnnnnnnnnnnnnnnnnnnnnnnnnnnnnnnnnnnnnnnnnnnnnnnnnnnnnnnnnnnnnnnnnnnnnnnnnnnnnncctcngatataaanatttnacgangaccncannaggatgncnngatnntactnnttaaccngancaanntgatg

SEQ ID NO: 41497 - DNA, 363 bp, Homo sapiens
  misc_feature (1)...(363): n = a,t,c or g
ggtttgattggcggttgggcctccatcctccgtatggcttttccatggttaaatagacttaaaatggagccatctaaaatgcagagtaaggcatatattagtatagcttggctttgaaattttttaatgacccataaatagaggaggatcaggtcactcttgtaaaggtaaggaggctgggcatagtggccannnnnnnnnnnnnnnnnnnnnnnnnnnnnnnnnnnnnnnnnnnnnnnnnnnnnnnntagctgtcgtgctatgcccgcggagactacactatgcccacatcagaatatggancctacctnancctangaccantacnntgnctactannnaatgnaanntacngncngactg

SEQ ID NO: 41498 - DNA, 406 bp, Homo sapiens
ggaagcactcaataaatgtaagccgttacctccatacaaataattattataatgtgggtttatttctttccagtcttttaaaataagcatgtaaaaatagttttaatcatattgcactaggaagatttgtttttgtttcttaaatatatacagaatttccctttttctgcttctttatatttaataacaagacattctaggatagactaagccttttcatggctaattgtcctgtggaattcttttagtttttctcttccatgtttatatatttgatatgattttctggtagaattcttgaaaaaataactgcatcacacagtagctctcctctcccattttatttttttttacttgctgaggctggatattatattcttttggctgaagtcaccatagtggattc

SEQ ID NO: 41499 - DNA, 402 bp, Homo sapiens
  misc_feature (1)...(402): n = a,t,c or g
gtgacaagaatatcttagtgagggaaacagtttatataggcagaagaatagttgacatgatttcaaaataacagtagagaaacgtgccggtttgagcagagagaaaggtagggagcatttaatggaatggcaaagtataggagaatttccnaaataatanaggnacnaaacagaattcnagaagcttatagatcancnngaacanggacaaggaaataggagannatgaccnggngnatnntangctaggccgngcgcgntcgnncnngcctntnnttnanganctntcnnngnntcgantnggngnnngcgnnncnncnnggtcnttgtngnccnannantgtnncnntgntttcncccnntanancnnntanatntgtcccnttnngnngtnnngtctgg

SEQ ID NO: 41500 - DNA, 405 bp, Homo sapiens
gcttccataacttgtatgtatgtaattgagtttcagagtgcatatgcaggatcatactttgttaaaatacttatctctaaaacctctgaaataataaagagggaagatgtgggctttaatgtcaggtcaaaatcgaggttaattttgttgaaggcagagttctacagaagcataagcaggtgataactgagtaaatccgggaagactctgatgaggaggtgaattaggcttttgaagagtaaacaagttttcactgagtcatatttattgaatgcctactgtgtagtagacactggagatatagcagtgaatcacaaaaaccaaatccctgcccatgtggaattcataccttaaagaggaagacagatgttgaacaaagaagcaaaaaattagtatcttcaattg

SEQ ID NO: 41501 - DNA, 401 bp, Homo sapiens
ggctgcccacccgaccaacttaccctggagtgctgcccacaaccatgactggcgtcatgggtttagaaccctcctcttataagacctctgtgtaccggcagcagcaacctgcggtgccccaaggacagcgccttcgccaacagctccaggcaaagatacagagtcagggcatgttgggacagtcatctgtccatcagatgactcccagctcttcctacggtttgcagacttcccagggctatactccttatgtttctcatgtgggattgcagcaacacacaggccctgcaggtaccatggtgccccccagctactccagccagccttaccagagcacccacccttctaccaatcctactcttgtagatcctacccgcacctgcaacagcggccagtggcta

SEQ ID NO: 41502 - DNA, 387 bp, Homo sapiens
  misc_feature (1)...(387): n = a,t,c or g
gatgtaatgttgtgatactgtattgttagggaataatgacaagaaaaaaaagtctgtgcctgttcagtacagacacaactaaccattttgttcccaaatattttttatctactgctagttgaatccagagatgtagaactcatggatatagagggctgactgcatgtagtgaatgtcttgtagacagcataagatttttttgaaaaaatgtagtctgnnnnnnnnnnnnnnnnnnnnnnnnnnnnnnnnnnnnnnnnnnnnnnnnnnnnnnnnnnnnnnnnnnnnnnnnnnnnnnnnnnnnnnnnnnnnnnnnnnnnnnnnnnnnnnnnnnnnnnnnnnnnnnnnnnnnnnnnnnnnnnnnnnggnccntcctgngncccactctca

SEQ ID NO: 41503 - DNA, 398 bp, Homo sapiens
gcagtgaaggatggaaaatttcagttgttttattaatcctatatgtgaagtagtacactatttataaaatagcagatattgaaggagcacgagagctcaatagttgatatgttttttaaaaattgtttcaagcatttttcttgcctgttgcctgttgtcattttgccttgcattcctcccttacttttctaatatattttagattagcaacatccattagtattataatacctcagtgaaaaatgtactttacgtatgtaagcgatagctgtgcatgtagcactctggtggacacttggtgcctgacttctgatatttatttgtatagatgaatggcaacaaagtcaatcatccagtcaaactgaatgagaccctgcactttgggaggctgaggcagg

SEQ ID NO: 41504 - DNA, 399 bp, Homo sapiens
gaaaacattattttttggtagcaaaacctggcaaatatttttgtccaaaaaggggtaatcatactgctctttttgaacacatttgttttcttcttcccctctgacctgcttggctaggaatcctgactgatttgcagatttgcagaggacattgtcattggaatgagtttaaggaaagtggccactctttgttgccaaagacaaaacttggctaaatattttgatgaatcggcatctttttttcctataatcattggcatggaattcctataagtggaaatagtgaaaaccaacacaaatactatataaaaagtaggatttctcagaatgtatttgtaattaaatttcagtactgatatgaagatacataaatatatgtacatactctacatatactat

SEQ ID NO: 41505 - DNA, 399 bp, Homo sapiens
  misc_feature (1)...(399): n = a,t,c or g
gcggcacgagccctgtgataaatctaaatgtgtttaccaagcaagcactcagtttgaactgtgttgctactcttatcctgtcatgagtttgtggaagatactaaattcaatgattcacacggactctgataatcacagaaaattgctttcaaaataactcaacacagagtctgaaagcacctgccatcacagtctatgctatctaacagagcattttcccttaatggacagaaaatgccctaaactaattttccatttgacattcttagcaatgtgatcacctcatctttgtcaaatgtataacnnnnnnnnnnnnnnnnnnnnnnnnnnnnnnnnnnnnnnnnnnnnnnnnnnnnnnnnnnnnnnnnnnctgaggncagtagttcaagaccagcctgg

SEQ ID NO: 41506 - DNA, 398 bp, Homo sapiens
ggcaatattttaaaataagaaataagtagtaaggaagtatatgaataatgatgttgtgtcagttcatcatttagctctgcagccagaggcatgaaaactttttaaaaagtatcttcttttcagtttcactcagttggctgtaaattagagaaagctcccctagctagaagggcattcgcttttcagtgatagtggaatatattttctgttttcatggacctggaagttaattgttcataatattcagttctttcttttcaaaactgtaaatattttccaaaaatacatcacatatagagaaatatgttccacatcatattaataccatgcattgtattgttttatgtaaacgatgaaaatggagatattagctttaaaaacccaggcttaatctgtaa

SEQ ID NO: 41507 - DNA, 432 bp, Homo sapiens
  misc_feature (1)...(432): n = a,t,c or g
ggtttcaaatatgcatatattatgagtagtgttctgagcaagacagaaaaattaccaaaaataaatgcatgtaagcttagccttttattagtagggctgattgtttaagaaaccactttgttagcaccaggcacagtgacttgagcctgtaatcccagctcctcagggggctgggcagaaagattggcnnnnnnnnnnnnnnnnnnnnnnnnnnnnnnnnnnnnnnnnnnnnnnnnnnnnnnnnnntaaagtatatatattttttaattagcaggatggtngggtgcacacctnnnnnnnnnnnnnnnnnnnnnnnnnnnnnnnnnnnnnnnnnnnnnnnnnnnnnnnnnnnnnnnnnnnnnnnnnnnnnnnnnnnnnnnnnnnnnnnnnnnnnnnnnnctgctttgctaaatgaaagctgnnntgattcca

SEQ ID NO: 41508 - DNA, 524 bp, Homo sapiens
  misc_feature (1)...(524): n = a,t,c or g
tttggacagcnattcatgattacgacttnnnnnnnnnnnnnnnnnnnnnnnnnnnnnnnnnnnnnnnnnnnnnnnngcacgagatctttatttgatggcaaacaccttgaggaaaatgttgtctccttcaaggttttattttccaacagtggctagaacagtaactaatacatgactgacatgtaacaataacaacaaagatttgtaaaattaatgaagaagacaagcaaaaacaaacaaaaatgccataaattctaaggaagctcagagagaatccaaggataagagaagtgtcagaaaaggttgggggggtcccagatatatggtaaacagaacttacattgtaggcattataaattatacttgcatattgttgtaattttctaaagcacttttacatgagacagcctagcatactcactaaaatccagatgaggtaggtgagacagatagagggaccttctttataaatgaaaacaattaaagcgaggaaatgttaaattattcctttaatattataaagg

SEQ ID NO: 41509 - DNA, 436 bp, Homo sapiens
  misc_feature (1)...(436): n = a,t,c or g
gnnnnnnnnnnnnnnnnnnnnnnnnnnnnnnnnnnnnnnnnnnnnnnnnnnnnnnnnnnnnnnnnnnnnnnnnnnnnnnnnnnnnnnnnnnnnnnnnnnnnnnnnnnnnnnnnnnnnnnnnnnnnnnnnnnnnnnnnnnnnnnnnnnnnnnnnnnnnnnnnnnnnnnnnnnnnnnnnnnnnnnnnnnnnnnnnnnnnnnnnnnnnnnnnnnnnnnnnnacagaaaccatacaccaccctacgatcctaggctactgtgcactgagcaactgagtcccgaggaatgatgggtgtggggccggccaggggtttacctccgcccacgacactgctctgagcccagtttttctggagcaagaggcttcatgcaggcccttaagaagaagaagaaaaggaacacaccttacctgagtcacacccatcttcaagggaccctg

SEQ ID NO: 41510 - DNA, 437 bp, Homo sapiens
gcatacatgacacttaccgcaccctcactccccccagttatgctttctaaaaacttctgtcaaggtaaagattgaaaacatgttcatcttttgtgtgcactgtttatgaatagtagctgaatagcccctccgcaaggaggatgcagccccttccataaaggatgctgttgtggctccatgtctgcttagcccgagtgtgggcgcccagctgtgtgcccagctctgtgccagctgcccggggcaggcctctagagcagttgcggttagctcccacagtgattgagcacaggctgggtgagttagtacagatgtcattttctgtattagaaaattaatgtcaaatctgctaagaaaataggctgttttggctctatccagatttacaacataaagagggtataattttccatcttcagaggggcttgatgtattttgct

SEQ ID NO: 41511 - DNA, 376 bp, Homo sapiens
  misc_feature (1)...(376): n = a,t,c or g
gcagtacagtactcgaatctactatttcagctttgttccctttctccagtcgtatgatagatgggtttattacctcttacttcaacataccaccacttttattcttctatgcctctgatcctactgttcgcctttgcctggagcataccttttaccttataaagttttgttcatgttcaagacccgtcttaaatattgtctcttctgtcaagccttccatgaaatcttcagattacttttctttcctcttcttccagaggctttattcgtttattgtagtatttctactgtttaactatagtaatttatattgcttttttggtaaatttttaattcctaagggcnnganctatgcttgntcattttgataggccta

SEQ ID NO: 41512 - DNA, 432 bp, Homo sapiens
  misc_feature (1)...(432): n = a,t,c or g
gcgacaaggagcaatttgctgtatgtttattttttttggaatcatctctccttcatggaagcagggttatttatcaacctgtgatggagctcttcctggtttggttagggcatgctgcatactgctcctgtaataatgctttctttggccaggacacaaaccacagtcaaaaaaggtcttcctgagttctgaaggtcaagcaattagaattttctcaggcttgtagaagagtggaattctggaaaccagtcttcgcctcaggggagcatctgnttnnagttcttaaagtaagtactggacttaaaattgggngaantgnaanntnagntctcgctctgctacttcctgcaggtagctgccacgctagtnaccttacctctctgagcctcaatatcctcatctatcacatgggngncaggancattattctga

SEQ ID NO: 41513 - DNA, 352 bp, Homo sapiens
  misc_feature (1)...(352): n = a,t,c or g
ggggtcagaatacagcatgctgtcaagccttttggtaatccttaatctttttttcctgttgtaggaaatgattgaatttcttcaagtaataagcaaataccacatcaaaatcaaatatgcaataacttgtctggttggagtggaaatgaaagaaatactgcagtgggaaacctaagaaaatctaatttaaaagaagtaacccttaacattaaaatagtctcaggcatttgatgttatttgcagaataaaagtttttgcagattatgcangnntgcaattggcttacnggnnatacccngntcantatnannccantantatgtannnnanttttntnnanaangnnnngtta

SEQ ID NO: 41514 - DNA, 438 bp, Homo sapiens
gttgatggctactggaagacagcacattgcaatgaaagtttttactttctctgtaaaagatcagatgaaatccctgctactgaacccccacaactgcctggcagatgcccggagtcagatcacacagcatggattcctttccatggtcactgttactatattgagtcctcatatacaagaaactggggccaagcttctctggaatgtcttcgaatgggttcctctctggtttccattgaaagtgctgcagaatccagttttctgtcatatcgggttgagccacttaaaagtaaaaccaatttttggataggattgttcagaaatgttgaagggacgtggctgtggataaataacagtccggtctcctttgcaactggaacacaggagatccctctggtgaacggaatgattgtgtagctttacatgcgtcttctgggt

SEQ ID NO: 41515 - DNA, 366 bp, Homo sapiens
  misc_feature (1)...(366): n = a,t,c or g
gattccattgcatggctataccagttttatttatcagttaatggaaatttgtttgttgttgttgttttttctgtgatgnnnnnnnnnnnnnnnnnnnnnnnnnnnnnnnnnnnnnnnnnnnnnnnnnnnnnnnnnnnnnnnnnnnnnnnnnnnnnnnnnnnnnnnnnnnnnnnnnnnnnnnnnnnnnnnnnnnnnnnnnnnnnnnnnnnnnnnnnnnnnnnnnnnnnnnnnnnnnnnnnncattacctagcctggacttgaactcctgagctcaagngatccacctacccaaantgctgggattacatgngtcanccaccacacctggccctgtgatgganntnnggnnnnnnnncnnnttnggct

SEQ ID NO: 41516 - DNA, 431 bp, Homo sapiens
  misc_feature (1)...(431): n = a,t,c or g
gggcttttctttcctacttaacatcctgccctctcagcactggtgctatagccaccagcctgcccaatgctgagttcttcttactgcacatgccacctcttggatatctttcaaatcatgtatcccattttatttccaagggcttaatcattttggaatttgcagttgcactctaacttattttttcccaatcctttattgaaaagcacatttgnnnnnnnnnnnnnnnnnnnnnnnnnnnnnnnnnnnnnnnnnnnnnnnnnnnnnnnnnnnnnnnnnnnnnnnnnnnnnnnnnnnnnnnnnnnnnnnnnnnnnnnnnnnnnnnnnnnnnnnnnnnnnnnnnnnnnnnnnnnnnnnnnnnnnnnnnnnnnnnnnnnnnnnnnnnnnnnnnnnnnnnnnnnnnnnnnnnnnnnnnnnnccccgaggggggg

SEQ ID NO: 41517 - DNA, 431 bp, Homo sapiens
  misc_feature (1)...(431): n = a,t,c or g
gaaaaaactcaaattactgaaatactaaagataaaaatgaaagtgggaatattaccctcaattccacagaaatggaaagggtaggctgggcatggcagctcacatgtgtaatctctatgcttttgaaggctgaaatgggagtatcacttgagcccacgagctcaaannnnnnnnnnnnnnnnnnnnnnnnnnnnnnnnnnnnnnnnnnnnnnnnnnnnnnnnnnnnnnnnnnnnnnnnnnnnnnnnnnnnnnnnnnnnnnnnnnnnnnnnnnnnnnnnnnnnnnnnnnnnnnnnnnnnnnnnnnnnnnnnnnnnnnnnnnnnnnnnnnnnctgtctcttaaaaagagagatcatnnnnnnnnnnnnnnnnnnnnnnnnnnnnnnnnnnnnnnnnnnnnnnnnnnnnnnnnnnnnnnnnnnnnnnnnnnnnn

SEQ ID NO: 41518 - DNA, 425 bp, Homo sapiens
  misc_feature (1)...(425): n = a,t,c or g
gaccaaatgggccagcacctagatattggacttcctaacttttagactcacgggcaatgaattcctgctgtttcagccacccagtctatggcagcctgagctgatcagtacagtcggagttctcaacctccattggagtgagtgcctgggctccactgtactaaaagcaagtagtcctcctctggaagggcgtatgcatatttccaggcattttggagcctccagggaaaccctgggccctgcaggttcttgtccagaaccactggccacacgccctctcagccgcactcaatgccaggagacctctatggctgctcaggnangggtccctgcctggggctaagtccgggccctgggatctgccgtgggtcctgctgtcatggactgagctggctggntccctctttggccccactacnnnaggg

SEQ ID NO: 41519 - DNA, 387 bp, Homo sapiens
  misc_feature (1)...(387): n = a,t,c or g
gggccgggcatgtnnnnnnnnnnnnnnnnnnnnnnnnnnnnnnnnnnnnnnnnnnnnnnnnnnnnnnnnnnnnnnnnnnnnnnnnnnnnnnnnnnnnnnnnnnnnnnnnnnnnnnnnnnnnnnnnnnnnnnnnnnnnnnnnnnnnnnnnnnnnnnnnnnnnnnnnnnnnnnnnnnnnnnnnnnnnnnnnnnnnnnnnnnnnnnnnnnnnnnnnnnnnnnnnnnnnnnnnnncnatcgtgccattgcactccagcctgantncatgagtgaaactctgctnaaanannaaacacnacntcnntaactgagaantnnntaacnttttacnattatctttacanatcnnnanggtnnnaatgcntacntnatnanaatanatataaatta

SEQ ID NO: 41520 - DNA, 401 bp, Homo sapiens
  misc_feature (1)...(401): n = a,t,c or g
gccctgtggctatgtcctgactccccagcccagcacttgagtaatacataaacccaccttcattaaatgactatcatcatattcctccagattccttggtcccccaagtctagggacgtggtttttgtcggtagcatggcagtgtcaaaccacagagccacgaggctgatgatgggctcttggtttccatttccccccccctcaaaaaaagagcagagaataattgcagagtgcccctcacccccattccagcaccctggtcnnnnnnnnnnnnnnnnnnnnnnnnnnnnnnnnnnnnnnnnnnnnnnnnnnnnnnnnnnnnnnnnnnnnnnnnccntgcctcgagggcggnctnntggcatgnaatggnngganngcanggatgctgtagnncctnagtg

SEQ ID NO: 41521 - DNA, 402 bp, Homo sapiens
  misc_feature (1)...(402): n = a,t,c or g
gaaacaaaactgcttccaaatgaagatacaatgcccccacttcaagtgacctacagcctaatggggactaccaacaagtaagctggcatgttgctacactgtacttacactacagaaacaactgtcatgtaatggtcaacaaacatctggcaactgccaaataagtgctggtaaaccaacaattaagctattccattatgtgaaatgtggcacatagttctgtaaacatgagttatgcccgtattaatagaagtgcngtatnactgttanagttgnaatantatctatatntatgannttnnccnaagtnannatatntttngatngtttgttttatcgnnnnntttananttatngaantntnnctgntangaanttttngtantnanatngtttnntgat

SEQ ID NO: 41522 - DNA, 402 bp, Homo sapiens
  misc_feature (1)...(402): n = a,t,c or g
nnnnnnnnnnnnnnnnnnnnnnnnnnnnnnnnnnnnnnnnnnnnnnnnnnnnnnnnnnnnnnnnnnnnnnnnnnnnnnnnnnnnnnnnnnnnnnnnnnnnnnnnnnnnnnnnnnnnnnnnnnnnnnnnnnnnnnnnnnnnnnnnnnnnnnnnnngctctgagcnnnnnnnnnnnnnnnnnnnnnnnnnnnnnnnnnnnnnnnnnnnnnnnnnnnnnnnnnnnnnnnnnnnnnnnnnnnnnnnnnnnnnnnnnnnnnnnnnnnnnnnnnnnnnnnnnnnnntaaataattagtaaatttgcagtgatgagggattaccccaggccttttttcctgtggtttgtttttatttttactttaatatttacttttattgagacagagtcttactttgttacccaggc

SEQ ID NO: 41523 - DNA, 440 bp, Homo sapiens
gcaaagaaaatggggtatgtctttagggtataagagtgttcccttcttgttttattgttgctaaaacttaaatgcattctattttccacaagaaacaaagtggtgagtctgtgaaaactggtcttattttaagaaggacacactttaaggggaggagaaatggaagacccagtgctggcctgcagcctactcttgctcttggcaggtctgtgggtctgcccatgcaggctcctaccatggcctgaactctcagctacaagactagagagagaacaggcaggtgcagtggcatacaaagtgggaggaacagcggaaagtggctcgccctgggattaatgaatggcagagctgctgcacctccgtcttaggtgcaggtcaccatacacttcacaagtatactataaagagtgaaagaaagatttaaacctattttaagaatt

SEQ ID NO: 41524 - DNA, 364 bp, Homo sapiens
  misc_feature (1)...(364): n = a,t,c or g
gagcaatcataaatttatatatgattataaacatatttttattaaaaatatataaagtgnnnnnnnnnnnnnnnnnnnnnnnnnnnnnnnnnnnnnnnnnttagttttaaacttcctaacccttgggagaaggcaaaacacttgatgaaatctacataaagactaaaacattttaccaattttgcattgtttgtttgaaattgcattgacgactggtatgttaattttgtatatatttttatgagaacaatgttggacatcatttaatttttttaggtttttttaattgattattgattggttcatttgcaggaactgactattagtaatcaaggatacaaattgttaagagaatatgttaccg

SEQ ID NO: 41525 - DNA, 411 bp, Homo sapiens
  misc_feature (1)...(411): n = a,t,c or g
ggttgctttcatgctaaaatagcagaagacattccctgactgctgcttgaaacagtcatatctcataaagaagaaaggaaatgaatatttatactcttacaatttttcttattttcttcataccttcctaaagaccttagtgttatttttaccttaagcctgaagaatttcctttaggccccaccaccccttccccttcccccactccagagatagannnnnnnnnnnnnnnnnnnnnnnnnnnnnnnnnnnnnnnnnnnnnnnnnnnnnnnnnnnnnnnnnnnnnnnnnnnnnnnnnnnnnnnnnnnnnnnnnnnnnnnnnnnnntattagcattnttgatggtgcagcctgtggngatgannccangctnatcncnnctnntaggncnncnngctnntnnnnnngccct

SEQ ID NO: 41526 - DNA, 430 bp, Homo sapiens
  misc_feature (1)...(430): n = a,t,c or g
gcgtggattcctgccagggggtccactcattttgcatagtggactgtgtggcacagccatctgtgggtgtggtcctgnnnnnnnnnnnnnnnnnnnnnnnnnnnnnnnnncttctaaggacagtgacatagtgggtacttgctccagtgacctactcagttttgcccaagtgtgcagatgctggggaccacatctgctcttctggggcccaggatttcttagagaccagctctttccacgtaccactcaccataggaaaggctaggtgaaggtgcgggaccccctgttcttcctgtggggctggactctgcctgctccaacagggacctgctgaggatggttcccccccacgtgggcagccatgatgattcaccctccagctgtangcaacctccggggctntgnanacagacctggcatcctaataact

SEQ ID NO: 41527 - DNA, 436 bp, Homo sapiens
  misc_feature (1)...(436): n = a,t,c or g
gaaaaatgtaggaggttagaatatttgccccagatcacacaggtcaccctgggtagagcaggcaataaatcaggtaacaatggctgccaagtggccatcaagccaatgcctttgttattttcctggactcaccttggattggagaaaagttaatcagtttccagaaaggtaagagacccagtggagcagggccttttgagaatgaaaactgaccttttctttcactgttattgttgtgatttccctggaaatatattcacccccagttttcctgggccaatataaagttgttcattttgctggcttggaaatgttattctctctccttgttttgaagtgttaaatgtgtgntttcaaaatgcatttctcaaaccactctacggaaagacagcnnataatctgataanaaaatgttcaaggatgcctgtaatcccac

SEQ ID NO: 41528 - DNA, 419 bp, Homo sapiens
  misc_feature (1)...(419): n = a,t,c or g
gnnnnnnnnnnnnnnnnnnnnnnnnnnnnnnnnnnnnnnnnnnnnnnnnnnnnnnnnnnnnnnnnnnnnnnnnnnnnnnnnnnnnnnnnnnnnnnnnnnnnnnnnnnnnnnnnnnnnnnnnnnnnnnnnnnnnnnnnnnnnnnnnnnnnnnnnnnnnnnnnnnnnnnnnnnnnnnnnnnnnnnnnnnnnnnnnnnnnnnnnnnnnnnnnnnnnnnnnnnnnnnnnnnnnnnnnnnnnnnnnnnnnnnnnnnnnnnnnnnnnnnnnnnnnnnnnnnnnnnnnnnnnnnnnnnnnncattgcagacagaggaggaaggggacccccagctgagccacacaatattgatagctcaagctaaatcagttggtttcagagcagccctcgtgtgctgcttacaaccctggcaccaggggctgaaa

SEQ ID NO: 41529 - DNA, 421 bp, Homo sapiens
  misc_feature (1)...(421): n = a,t,c or g
gctgggaggaaagatgttcataggatagatactctgaaaagctctgacatgtgcaggtctgtgtccatgcagaggaaagatctcaaagggtccttccgcacgctcctgggacaccctctgcgctttggcttcttgtcatcatcagactcttctgtctcactctcagaagcagaggatctctgggcctgcctcttggactcactgtcagagtcactgtcatttgtctgagcctgagaaagaccttgagcaactgtgcaagcaggaactgaaagttaaggcagagttgtcaattgccttccanagcattgaaacgtgccccaacaacacatacccancccttnaacaaaggctggtagacttacagcncnnagcatttaangaaatctctgncaatnattanctgccactannctanggagta

SEQ ID NO: 41530 - DNA, 448 bp, Homo sapiens
  misc_feature (1)...(448): n = a,t,c or g
gcttggctccatccgctttggggtttccagtctttgttggagtcaggactctcaaaagaagggaacgcgttataggggcccaaactggatttggggactgcaaaggcgagcagcgctcgttcagtttatctcctgggaacgcaccaggagttgggcacacgcgggagctgggtcggtgctcctggcaggtaacggcttgttcccggtgcatactggcagactgcggangaacnggaggccganaggcagcangcgaaccgnatcctcctgcagntgcannagnangccttnataanagcntgnacagnacgntgcnnctgaccctctnnggcgnacnaattngtnactnntcgnntgnagatctggngccgtgtntagnnganttaanctgnangactnantnacgtcanngnnttcttntanngantcnntannntnttttatgatg

SEQ ID NO: 41531 - DNA, 444 bp, Homo sapiens
  misc_feature (1)...(444): n = a,t,c or g
gggtaggcagtagagccaggaagtctacctgagtctgacttctgtgatgcacttactcaccacgccctcctgcttcttggtgggaagggatcagttaacacgtgttacaggagcctgtttgggaccagggactgtgctgtaggctggaggcctatcaagaaggtgggactctggaggagctcacaggcaagtttatagactctgtgaggaaaactaatcctttgaaagaccaacacactattacttacatagtgacttgatgttcagtctgagaagtgaattatatgttaaacgtcaagagaatgttgttgnnnnnnnnnnnnnnnnnnnnnnnnnnnnnnnnnnnnnnnnnnnnnnnnnnnnnnnnnnnnnnnnnnnnnnnnnnnnnnnnnnnnnnnnnnnnnnnnnnnnnnnnnnnnnnnctcaacttaaagaatacaaaag

SEQ ID NO: 41532 - DNA, 439 bp, Homo sapiens
  misc_feature (1)...(439): n = a,t,c or g
nnnnnnnnnnnnnnnnnnnnnnnnnnnnnnnnnnnnnnnnnnnnnnnnnnnnnnnnnnnnnnnnnnnnnnnnnnnnnnnnnnnnnnnnnnnnnnnnnnnnnnnnnnnnnnnnnnnnnnnnnnnnnnnnnnnnnnnnnnnnnnnnnnnnnnnnnnnnnnnnnnnnnnnnnnnnnnnnnnnnnnnnnnnnnnnnnnnnnnnnnnnnnnnnnnnnnnnnnnnnnnnnnnnnnnnnnnnnnnnnnnnnnnnnnnnnnnnnnnnnnnnnnnnnnnnnnnnnnnnnnnnnnnnnnncaaagacaatgangcttncaccttgccctctctggaattatttgctctgnagaagccagttgcatgcttcgaggatactcaagcaacccttgngagagatctacatggcnnggatttgtgnttcctgcacanctangccaacttgccag

SEQ ID NO: 41533 - DNA, 373 bp, Homo sapiens
  misc_feature (1)...(373): n = a,t,c or g
gtaaggagaaaaataagacctatgtcaggcacatgggtagatggttcctcataaaggcttaagacaaaacccaagtaaataaaaatgagtttgtatttttctgatgaacttttttgtatatgttttatgtgaactcatgtgaggcagaggcagagagtcactatacatgatttctagatactggccataaaactttctttctcatcattgctaataggagaatcagagagcatatagttacaactagttttttaattcaatctggcaatctctgtagtttaattgaagttttttataaaatttatacttaaggccagatgangnggctcacgcttgaantncagnactttgnnangccnangngnnngntcac

SEQ ID NO: 41534 - DNA, 457 bp, Homo sapiens
gaaaatgcagttagaagagcaatcaagtgaatccagacagaaagtgaaagtacagctggcaagatctggaccctgcaaaccagtagcccctctggaccccccagtgaatgctgagatggagctgacagcaccgtccctcatccagcccctgggaatggttcccctgatccccagccccttgtcatcagcagtgcccctgatcctacctcaggccccttcaggcccatcctatgccatctacctgcagcccactcaagcccaccaaagtgtgaccccaccccaaggcctgagcccaacggtgtgcaccacccactcttctaaagctactggctcaaaagactccacagatgccaccactgagaaggcagccaatgatacctcaaaggccagtgcctctaccaggcctggaagcttgctgccagcaccagagaggcaaggggcaaagagccgaaccagg

SEQ ID NO: 41535 - DNA, 435 bp, Homo sapiens
  misc_feature (1)...(435): n = a,t,c or g
gagatctggtttgtgtaggttttgtgtaattgcatttgtatttatgttgcttttagtgaagcagagtagctctgggatccccccaccggcccccgcccataaccttaaataagatttgttatgaagaggtgggtcaacctgggcaactcctactgaggatgtaaaaacagtgttacatttgaagtgcaccaaattcagggaattctgccatgctaaagttgtgctgtaaatatgccaccctgtcagacttgagtccacatctctacttaggcaaagctgggctttgagatatttttcttgcttaagaagtgtaggtcaggtcctgtatcacagagcattttgctccatttgtatgatactctgccattttgccagtctctgtgacccttaagtcttttggtattatcatggnannttgagttctcggaagcccca

SEQ ID NO: 41536 - DNA, 394 bp, Homo sapiens
  misc_feature (1)...(394): n = a,t,c or g
gnnnnnnnnnnnnnnnnnnnnnnnnnnnnnnnnnnnnnnnnnnnnnnnnnnnnnnnnnnnnnnnnnnnnnnnnnnnnnnnnnnnnnnnnnnnnnnnnnnnnnnnnnnnnnnnnnnnnnnnnnnnnnnnnnnnnnnnnnnnnnnnnnnnnnnnnnnnnnnnnnnnnnnnnnnnnnnnnnnnnnnnnnnnnnnnnnnnnnnnnnnnnnnnnnnnnnnnnnnnnnnnnnnnnnnnnnnnnnnnnnnnnnnnnnnnnnnnnnnnnnnnnngaggacagatcacctgaggccaggagttaangaccagcctnnccaacntgggaaaccntgactntactaaaanttnaaaaattanccnanagcagnggtttanncctgaatcccnaanntnggnaggc

SEQ ID NO: 41537 - DNA, 453 bp, Homo sapiens
  misc_feature (1)...(453): n = a,t,c or g
nnnnnnnnnnnnnnnnnnnnnnnnnnnnnnnnnnnnnnnnnnnnnnnnnnnnnnnnnnnnnnnnnnnnnnnnnnnnnnnnnnnnnnnnnnnnnnnnnnnnnnnnnnnnnnnnnnnnnnnnnnnnnnnnnnnnnnnnnactccatctcnnnnnnnnnnnnnnnnnnnnnnnnnnnnnnntacatatatagcactgaaataatagaaaattatgaaagttttcaaatcagtgatctaagcttctaccctgtgaaattagaaaagaagagcaaattaaacccaaagcaagcagaaggaaggaaatagtaaagataagaaatcaatagcattgaaaacaagatgaatagagaaaacagaccaacagctggtctttgaaaagatcaataaaattnnnnnnnnnnnnnnnnnnnnnnnnnnnnnnnnnnnnnnnnnnnnnnnnnnnggncggatnacag

SEQ ID NO: 41538 - DNA, 451 bp, Homo sapiens
gtgatctgatcctcttcttttgctgagcttgtcttgtgccagattgtcctcactggtctcctttcagtctctccaatgcaccatcacaggccctttgtatgtgctatttcctctgcttggaaggcacccccaatccccaatgtcccactccaatctaagtgactcctattctttgttcagatctccatccaaatgacacctactctgggaagcccttcctgactcccaacctaggtcaggatttgcagaattgtgtacacttcctttctggactcttggctcagtttgcaagtctgccctctgctctgggtgaccatatgataaggtcttcccagcccactaaactgtgaggtacatgaaggtgggaatgggatgtgcttctgatcaccacaatatacttagcatttttcacagtgcctaacacatggcaaggattcagcaaatattgaat

SEQ ID NO: 41539 - DNA, 379 bp, Homo sapiens
  misc_feature (1)...(379): n = a,t,c or g
gagaaaattggaatatactggttttgatggcctggggttccccagggaagatttttctgatgggttttcttggtggagagctggtctttttgctgtgccttttctttcttttttcttttcttttttgaagcggagttttgctnnnnnnnnnnnnnnnnnnnnnnnnnnnnnnnnnnnnnnnnnnnnnnnnnnnnnnnnnnnnnnnnnnnnnnnnnnnnnnnnnnnnnnnnnnnnnnnnnnnnnnnnnnnnnnnnnnnnnnnnnnnnnnnnnnnnnnnnnnnnnnnnnnnnnnnnnnnnnnnnnnnnnnnnnnnnnnnnnnnnnnnnnnnnnnnnnnnnnnnnnnnnnnnnnnnnnnnnnnnnnnnnnnnnnnnnnnnnn

SEQ ID NO: 41540 - DNA, 376 bp, Homo sapiens
gctcaagatggaaaaatatggattggatagcggtatagatgaatgagtttaggtcttttacccaaagagggatgatcagtggcgtaatgtcagacttgagcaaggtgtcgatagtgtcgcttgagaaaggcatatggtacagctggtgggaaaaacttcacacagtacaagagatagggtatttggaaccaaggagatgataattgcgtcgttctttgaagcactgtagatagtggttacgaatagagactccaaagccagactctgggcaagttatttgagttctttatgcctctatttcttcattcataaaatacaaataatagtaataatacctaccttagagggctgttgaagatgttgaaggattaaatta

SEQ ID NO: 41541 - DNA, 374 bp, Homo sapiens
gcaatagcctgagagttgtttacacctagcagggtttcatcaggcagaattagccagagctgtgagaaccactttgggttctgcccactgatcaaaatggttgtggtccttttcagttctgcatggtgggcattgaggtgggacagctgcagcctcccagtagatgctgtctgatttcagcctgatccagccatcagtgagccaggcccaggcatttaagggagcccttgggaattgagggcccactgagccaacaacttcacttcaggtgcagagtgggggataaagtttccctagaggggtacctgccatttttccacataaagctgaaatataggtggggcaagcccactgcatgagcaccagcctctttg

SEQ ID NO: 41542 - DNA, 380 bp, Homo sapiens
gaatctactttatcattttacatgttcccgctttgctgtagcacacacccctgacacacacacatccaccactctgtccagactgacctttcctgcccacctcctcctctcctactttgttcctgtgacatctcatgtatttatacccttccccctccgcctgtgccacctgcgaacccttcagtccttatgggatttccacaatttactctttgacagctttggcccacattcttttctccattcacttgctgctgcagaacttggagcttaaggaaggctttttacttattctctaattcttgtgtgtttatcaacctagttaaagggtaaactccttgagaacagagattgtcttaaacttcttggtatccttaatc

SEQ ID NO: 41543 - DNA, 361 bp, Homo sapiens
  misc_feature (1)...(361): n = a,t,c or g
gggagatgattagtctttccttggtatctcaacattttaactcagtatactttattatttctggagcttaaaatgtatgaagttctgaaaactgccaaatttaaacctaacactctttattgatggttttttaatacaactccttctaggtagggagacttgaaaaacaacttcacaacaattttattgttgtatatccatttcaagtgccagtaggcagtggtgtaacaatgtagtaatgtaataatcaggttctaagaaagtgatgtagttatgaactggctgcatgggtgaaatgattgattgattgatttgntntttcatttcagggagngaaaaaaatanatcctgatttatatga

SEQ ID NO: 41544 - DNA, 375 bp, Homo sapiens
gaaagttcttggtttgatcttgccaatggtgaacttggctaagttgctctaagcttggcacactagttcttctcattgtgtagtagtgggtataatgactaatgactccagttctggctcatagggtcaaatgagatacgtatgaaagtagctttgtaaagtattatataaatgtatagtggtgttttccttctcagttcctatgtcatacttagtaccaacgcatacacaaaataagtgattacttataaatatttatgacattaatttgaaaattttaggtaagggatatactgtggtaaaggctgtactcaccaaggctgcatacactgagaggtgattatagcacaatagtggtaacatatatcctgcctt

SEQ ID NO: 41545 - DNA, 365 bp, Homo sapiens
  misc_feature (1)...(365): n = a,t,c or g
gtctagggatattcttataaatgtggccagcttgtgttaaaatcatgttgtgtatatgaatttgacaaacagaagtagatattctgttaaacattctgtgttttcatgatagtgagttatggttgagtgctctcagtgtactgagtcgtttagaatatattcagtacaattgttattctgaaagaacatcccttttatcttcataacatatcacaattgtcaagaaaaaacactagcttaaaagttaacactggaaataaatagtggnggatgcanataacattttggggcttaanagttttggaaccacncgttttannntnaaagngctctctttanaccnnnngntntntannannnncctt

SEQ ID NO: 41546 - DNA, 368 bp, Homo sapiens
  misc_feature (1)...(368): n = a,t,c or g
gaaacaacttaataatttcttgtttgtagaaactacttgactgagttaaaaaactgaaacattcactttctcctttggcttgtagtgagtattaaataaatgaggatggctaacagtatgcagttgaagaaattctgccttggttactttccccatgcagagaaccagattagcaaagtttacattagaacaatcnnnnnnnnnnnnnnnnnnnnnnnnnnnnnnnnnnnnnnnnnnnnnnnnnnnnnnnnnnnnnnnnnnnnnnnnnnnnnnnnnnnnnnnnnnnnnnnnnnnnnnnnnnnnnnnnnnnnnnnnnnnnnnnnnnnnnnnnnnnnnnnnnnnnnnnnnnnnaggtggaggctgaggca

SEQ ID NO: 41547 - DNA, 377 bp, Homo sapiens
ggtctgtcactctggccacctgagtggccacttgcccaccgcactgaacctgagctctacctgatgctttgctgccactgagacaaggagctggagccccaagtggccacttgaacagctgccaacccaggaaggagaggcaggccatcttcagttctcttggctggccagcaaggtatccaatgtgtggcccacagggcaaggatgaaggaatgtgaggctccccaggagggcaccccaaaaaaactcctaggggccgaagagaaggttgcaagaggtggggccagccctgctgtgccgcatagccctttgggtgccaggctgtgcccggcttcatcttcctccaagcgaggagatgtcctgtcccagtggccgga

SEQ ID NO: 41548 - DNA, 371 bp, Homo sapiens
  misc_feature (1)...(371): n = a,t,c or g
ggaaaatataagttctgcaacaataaaactatacaatgaaactaaagagcacaaaaaagaacttaaacagataaaaagcagaccacgtttttggataagaagattaaaaattataaatatatcaattttcactgttaatctataaattcagtgtaatcccaataaaaatgccaacaggttttccccaatagcattgaaatgattttaaaatttaatgaannnnnnnnnnnnnnnnnnnnnnnnnnnnnnnnnnnnnnnnnnnnnnnnnnnnnnnnnnnnnnnnnnnnnnnnnnnnnnnnnnnnnnnnnnnnnnnnnnnnnnnnnnnnnnnnnnnnnnnnnnnnnnnnnnnnnnnnnnnnnnnnnnnnnnng

SEQ ID NO: 41549 - DNA, 368 bp, Homo sapiens
  misc_feature (1)...(368): n = a,t,c or g
gctggaagaaatatgatttcagtagtagcaatgaattcattttatatattacatgaactttagtgcttgccccattttctaagaagagcaaagtgctagcaaggacatcatattcttcacatatgggtaactaccttatcaatatttttcactggcactctgtgctcacaaaagtttcctttagaagatgtctgtagtaacatctaagatacatcaagtctctgcttttgagacatgagacatttctagtaattctgtcactttgcttcctaactgttcattagactctgtcttaaggaggtcgtatgatataatggaaaaataacagtaattaggagaagacccgagctcaaggntggggnttaatt

SEQ ID NO: 41550 - DNA, 362 bp, Homo sapiens
gattagggaaaacatcatttaaaagttttaacggccgtgataaactgtcatttgcagttctcagctgacagtcaaacagctgcaatctgttagtgagcttttactttcaactgccagaggtctttcaactcctgtgcccctggaaatgaggagggctgggctggacgcatagaagggaagtgagggttgaaatacatattttcccataccatatttttcatgcctccccacagtttccatagaaatgggaacataaataacaccccaccccagactttgaagagcaatcgtttatgtgtaaactgcagtagatggaccttaaagaggcacacaaaataagctaatcttagggtctttccttt

SEQ ID NO: 41551 - DNA, 347 bp, Homo sapiens
  misc_feature (1)...(347): n = a,t,c or g
gaagccacatccggcgacgtgtggcaccccaccctggctgctacagatggggctggatgcagaagagaactccagctggtccttagggacacggcggccttggcgctgaaggccactcgctcccaccttgtcctcacggtccagttttcccaggaatcccttagatgctaagatggggattcctggaaatactgttcttgaggtcatggtttcacagctggatttgcctccttcccaccccacagttgccccccaatgggggccttcggctgctcacaggatgaagggttcaagaanaaggctgtccctggaggtaanaaggcttatgaaccatgtncaaacctttg

SEQ ID NO: 41552 - DNA, 338 bp, Homo sapiens
  misc_feature (1)...(338): n = a,t,c or g
gcattgcaagttacaatagctattttgcttttagatttttcccagcactttgtatttattagctttcattaacttgcctccagtatacattccacttcgtgcttttcttaggtcatttctacatcccttattccttggttttcctgcagtgaaatggccctgaatgccctctgagccttnaacnccattatggncccaacctaaactatncttgganangnnaagcccttnttagggnncgggnnnnnanggannaanncgggnnaancannngcccnnnnnncgnnnngnngnggnnaaccngngnnnnngnnanaancnnccngnncannnggacc

SEQ ID NO: 41553 - DNA, 432 bp, Homo sapiens
  misc_feature (1)...(432): n = a,t,c or g
gaaagttttcgtctacccacatctttatctccattgctgcccataggcctggacaacaggggcctccattggaaacatgtattttagagggtcctgctcttttcttgctccatctgtactccttcctcctcacagggcaaggagtctggtcaagcggacatgcccacctagaccctgtgccctgcctgccttctagaccatctgagattgtgaaattccctacgcagatggccaggagctgcaagaatgttttctaggtcctcccagtggtttttctgcagacggntgattgcatagaggcccngaacacagttcgganntgacngctggngngctancaantgatggngctntgtnncnngnctacannnntgnnnatgggnnnctngannanganaacnactggncnannnacantacatggnangagcc

SEQ ID NO: 41554 - DNA, 334 bp, Homo sapiens
  misc_feature (1)...(334): n = a,t,c or g
gcggcacgaggtaagttaccgaagggacagaaataggaggcagcttgggcaggaaccagaacatatagaccattcagtccaccctgggagctaaaagtttatccgtcaatagagaggagcttgttgaatgtttttgagcagacaaaggtatgaccagattgcctttgttatgagttgaggaaaagggcaaattagttgaggccaggagcagggaagccagttaggagataaggttgagggttcaggcttgccaccaatatccattctntnttnttccatagggatataaatttacctggatgcnaggntattcnnaatnatnattantgatatg

SEQ ID NO: 41555 - DNA, 409 bp, Homo sapiens
  misc_feature (1)...(409): n = a,t,c or g
ggctgaagaacggacaaagaaaatatagtacatatccatccaagagaatagtattcagcaaaaaagatgannnnnnnnnnnnnnnnnnnnnnnnnnnnnnnnnnnnnnnnnnnnnnnnnnnnnnnnnnnnnnnnnnnnnnnnnnnnnnnnnnnnnnnnnnnnnnnnnnnnnnnnnnnnnnnnnnnnnnnnnnnnnnnnnnnnnnnnnnnnnnnnnnnnnnnnnnnnnnnnnnnnnnnnnnnnnnnnnnnnnnnnnnnnnnnnnnnnnnnnnnnnnnnnnnnnnnnnnnnnnnnnnnnnnnnnnnnnnnnnnnnnnnnnnnnnnnnnnnnnnnnnnnnnnnnnnnnnnnnnnnnnnnnnnnnnnnnnnnnnnnaagttctgattcatgctatataacatgcgctacttgg

SEQ ID NO: 41556 - DNA, 328 bp, Homo sapiens
gggggctgggcggaagagaaactctgccctgctgggcacagatccgagagccactgaagctgtgggcaggggccgtgccaggcaggtagatcctgccccagcttacctgggcgatgaggatgccgacgacgatgcccagctggtgcagggtgcccagggccccacgaagggctgtgggtgacacttcacccacatacatgggcacgaagcctgtggtcaggccgcagtacacaccgatgatgaagcggcccaggatcagcatctcaaaggacttgcccagtttcgagaagcccatgagcacggcggacacgaaggccagcaggttcat

SEQ ID NO: 41557 - DNA, 320 bp, Homo sapiens
  misc_feature (1)...(320): n = a,t,c or g
gggagaatggcaagaaattaaacaagaggttgagtctcagtaagtacctggagctttaatcccactgttattacaagtgattttacatcccagtacttccctaaattgcagtaagtaatttcaaggatgctgtgcttattaaaagtatagcttgaggccagatgnnnnnnnnnnnnnnnnnnnnnnnnnnnnnnnnnnnnnnnnnnnnnnnnnnnnnnnnnnnnnnnnnnnnnnnnnnnnnnnnnnnnnnnnnnnnnnnnnnnnnnnnnnnnnnnnnnnnnnnnnnnnnnnnnnnnnnnnnnnnnnnnnnnnnnnnnnnn

SEQ ID NO: 41558 - DNA, 341 bp, Homo sapiens
  misc_feature (1)...(341): n = a,t,c or g
gcagtagtacacaatttggagaacacttggctcccatagaaatcaaagccttcctgagtaattaattatttggcctgatgatgaattactgtgcctgagatgatagagctaatttatttttcaattcactcaggggacacacgttattttcactgtgaatttggttaaaatgaaaagatttcctgctctaagtcctggatagacctttatgtaatagcatactcttcactctttttgaatcacatgcagttgtcacactggatgatttccagacagaggctccaagtctttcatcatgtttgggttanagacctnnttaacntactannnctgccatttga

SEQ ID NO: 41559 - DNA, 294 bp, Homo sapiens
  misc_feature (1)...(294): n = a,t,c or g
gattaaggtcaacattgtgaatgaaaagaacatgctatttatccagctatatttaactataaaagaacaataaaagaaacagcagtttttagaatcaatatgaaatttccagttccattttccctctatagactcacaatatgagtttgtgataggtgggatctgtgttacttgcctgttacctgatcatatatactcagcactgtaattcaggaaactatgagctatctatgattatatacaaacataatctcccttgtcggtcagtttcattggaattgaaggttnttttaa

SEQ ID NO: 41560 - DNA, 515 bp, Homo sapiens
  misc_feature (1)...(515): n = a,t,c or g
gaaaaaacaacaacagaaaagcctttcctgatagctaggtcattgaggaattcactcatgttttcttctagtacctgatttcatttttctgcacttagattcctgactcatatggagtttatttttgtatctgatgtgaggcatagatctaatttattattttccaaatggctaactagctgtctctaaaccctttattaaaannnnnnnnnnnnnnnnnnnnnnnnnnnnnnnnnnnnnnnnnnnnnnnnnnnnnnnnnnnnnnnnnnnnnnnnnnnnnnnnnnnnnnnnnnnnnnnnnnnnnnnnnnnnnnnnnnnnnnnnnnnnnnnnntattnnnnnnnnnnnnnnnnnnnnnnnnnnnnnnnnnnnnnnnnnnnnnnnnnnnnnnnnnnnnnnnnnnnnnnnnnnnnnnnnnnnnnnnnnnnnnnnnnnnnnnnnnnnnnnnnnnnnnnnntcnaaaaattggctgggtgtggnggcgcatgcctgantaccagctctcangagctgggc

SEQ ID NO: 41561 - DNA, 339 bp, Homo sapiens
ggatgaagataaaatggaccagttgctacagatgctgcaaagtacagaccccagtgatgatcagccagacctaccagagctgcttcatcttgaagcaatgtgtcaccagatgggacctctcattgatgaaaagctggaagatattgatagaaaacattcagaactctcagaacttaatgtgaaagtgatggaggccctttccttatataccaagttaatgaacgaagatccgatgtattccatgtatgcaaagttacagaatcagccatattatatgcagtcatctggtgtttctggttctcaggtgtatgcaggccttctccaagtggtgcctcctgg

SEQ ID NO: 41562 - DNA, 332 bp, Homo sapiens
  misc_feature (1)...(332): n = a,t,c or g
ggataaatactatataaatgttagctactgttgcatgttttttataattgttataataattattataatagtgtaggtgctaaaatcctgaatatatttagtaaatttattgacattctccttaagatatgaccgttttcaaactgtttcttctaacttgttaatgttgtagattattcaaaaaagttcatnnnnnnnnnnnnnnnnnnnnnnnnnnnnnnnnnnnnnnnnnnnnnnnnnnnnnnnnnnnnnnnnnnnnnnnnnnnnnnnnnnnnnnnnnnnnnnnnnnnnnnnnnnnnnnnnnnnnnnnnnnnnnntagacccattactgg

SEQ ID NO: 41563 - DNA, 347 bp, Homo sapiens
gcaggtatttaaaggtctaaagacattgccctcacagagtgaaatgatggcagaaatatctaaagctcaagaggaaattgacaaaaggtatgtggagagccaacgccataccattcagggagactacatagataccatggaagagcttgctgatttggtgggggtcaggcccaatctgctgtctctggccttcactgaccccaagctggcattacacttattactgggaccctgcactccaatccactatcgtgtacagggccctggaaagtgggatggggctcgaaaagctatcctcaccacagatgatcgcatcaggaagcctctgatgacaagagtagttgaag

SEQ ID NO: 41564 - DNA, 340 bp, Homo sapiens
  misc_feature (1)...(340): n = a,t,c or g
ggagaatttcaatggcaagatggaaaagggcaaatctctccattttagattatcacgtaatttatgagaggactatgagtttaatgttaatatgagtttttttgggaaccaacagtgaaggtgtgaggtatctgataagggggctaggcaggtgaccagagagaacacaagctctgcaacttcaatctcatcatcttggccaatatatacaggctgttcctttccccagccagcatccaggaccagaggcattacctggttttataaaatagtanacgcataaattttataaagcagtaaacaacaannatatanaataggaactaanaagttatgacag

SEQ ID NO: 41565 - DNA, 410 bp, Homo sapiens
  misc_feature (1)...(410): n = a,t,c or g
gaaataataatgctttaaaagtacatcaaatggaggcccggcctcaaacacctctcaatgattcgcttgagtatgtgtaaagtgatgcacaggccaccctgaagaccttggtggtttctattgaaactacacatcaagccgggcgcggcggccggtgcgcggtgcccagaatcccagcactttgtgaggctgnnnnnnnnnnnnnnnnnnnnnnnnnnnnnnnnnnnnnnnnnnnnnnnnnnnnnnnnnnnnnnnnnnnnnnnnnnnnnnnnnnnnnnnnnnnnnnnnnnnnnnnnnnnnnnnnnnnnnnnnnnnnnnnnnnnnnnnnnnttggaggttgaagccctcgctggggtggagaggcaaggctgtantgagccctcatcgnccactgnacttcanactgggcg

SEQ ID NO: 41566 - DNA, 332 bp, Homo sapiens
ggaggttatcaataagctcctagtccagacgccatgggtcatttcacagaggaggacaaggctactatcacaagcctgtggggcaaggtgaatgtggaagatgctggaggagaaaccctgggaaggctcctggttgtctacccatggacccagaggttctttgacagctttggcaacctgtcctctgcctctgccatcatgggcaaccccaaagtcaaggcacatggcaagaaggtgctgacttccttgggagatgccataaagcacctggatgatctcaagggcacctttgcccagctgagtgaactgcactgtgacaagctgcatgtgga

SEQ ID NO: 41567 - DNA, 262 bp, Homo sapiens
  misc_feature (1)...(262): n = a,t,c or g
gggataagttactggaaatagaattgctgggtcaaagaatatacatttaaaattttgtgtattgcaaagttgtcttaaaagaagttgtgtaccattttaaatgtcctccaacaatgtacagagtataaatacatcagattgatttctaaaagttccccacaggggaggttagatattctcatctgcagggagagacnanaantaacaacctttttngnggcancanttncannggcctnnncnncctcattnnnanntttcc

SEQ ID NO: 41568 - DNA, 320 bp, Homo sapiens
gggtgaaataaggaaagactttgagaagcaataagaaatatatctgatttgaccttgtccattaggtgagtttcctttttttttggttcagttaaagaatatgatatttagggaaacatttaaacatgtgttgtaaatatatattaatggagacagtagacttgacaaataccaaaaagacctatatatagctggctgtctacagcttattgacaacaaatggaagaagctaagaatcctggcatcattgatttagtggtattaaaacatcaggaaaagccttgatttttctgagcctagtttaatgtttttaaaagaac

SEQ ID NO: 41569 - DNA, 320 bp, Homo sapiens
gcattaaagtgcctgaacgcttttggaagagcagtgttttagaaataaaacatggactagtggcttgtctgatagtagtgcagtttgcattccagctcctaccaagaaacattggattcttgtgcctcaagacaatgttgccttcagtcttggaaagccttagccagggaaacaagggatgcacaagaagtcaatggctatgaatgagctgctgttttgaggttcatttcacttcaagctaaaactccagttcagaaatatatctggtttagaatatgatctggggacctactgccactaaactactagactcaccctgc

SEQ ID NO: 41570 - DNA, 329 bp, Homo sapiens
gggctgagcgtatcttcattgagctcaagtttactgtacgtgactgcaacagcttccctggtggcgccagctcctgcaaggagactttcaacctctactatgccgagtcggacctggactacggcaccaacttccagaagcgcctgttcaccaagattgacaccattgcgcccgatgagatcaccgtcagcagcgacttcgaggcacgccacgtgaagctgaacgtggaggagcgctctgtggggccgctcacccgcaaaggcttctacctggccttccaggatatcggtgcctgtgtggcgctgctctccgtccgtgtctactacaag

SEQ ID NO: 41571 - DNA, 408 bp, Homo sapiens
  misc_feature (1)...(408): n = a,t,c or g
gacaactttgaaattatctgggcctggtgttttgttcagaatagatcttttacaacaatggaaagttgttgtaaaggcttatatgaaagctattgacctgtatctttttggtagacagcaatataaagctctctcttattgtagttaatacattttggtttgaattctacattgaaattaacattgccatgctttatgtctattctaataattgtactttttcaaacagctttacttggaatanccaaaaactggaagtnacccaatggacattggaacaacatggaattnanaagnacatngtgnnanntncntncgncnaaatncnnnnctcaatatgacttnngaaacctcananntnnnncnaccccnancntgtntcntatgatncctgatnnaccnnacctc

SEQ ID NO: 41572 - DNA, 333 bp, Homo sapiens
  misc_feature (1)...(333): n = a,t,c or g
gaggaatcaaggctatacagggtccaaaaattagcctagattatgtgtgctagttccaggtatcttctatcttttagaattttaaaagaatagaggcagaaagtcacaagcttaatctagatgaggtaattatcatttaatgtcttgaacataaagtaatttgctaaattagaatttattttaannnnnnnnnnnnnnnnnnnnnnnnnnnnnnnnnnnnnnnnnnnnnnnnnnnnnnnnnnnnnnnnnnnnnnnnnnnnnnnnnnnnnnnnnnnnnnnnnnnnnnnnnnnnnnnnnnnnnnnnnnnnncatannngtgcnccnnnntgccca

SEQ ID NO: 41573 - DNA, 403 bp, Homo sapiens
  misc_feature (1)...(403): n = a,t,c or g
ggtatcctaaagccaaatgtaagtgaattttcttactttagaataatatattctctcttttaaataatcaagagttaaatgttgcgtgaaatattagagaagatgggagcttaatttctactgaaaaatcaggtaagaggaaatagctccacctacagggcaaataatttaaactagatataaagaaattccttgtaggaaatttgttacagacttgaatttactaccaaagctagatttgctatgcctgcctctaccttctcctgggcagagtgcctccatcccgccttagtacttacttttttgtccactcccaacctagcacataaatcagtctttctcactagccctgtggtcttcatttctctctttctctgccatgtggntccttcttggggctggg

SEQ ID NO: 41574 - DNA, 386 bp, Homo sapiens
  misc_feature (1)...(386): n = a,t,c or g
gcggcacgagagaggtcacatgggcttaaagtattgggaagcactgtggttgaaatcaatcaaatgaaaataaattttttgaattcatatttctgggaaaagctatagtataaaatacactactagtatggtagtcagcattaaatgggcaaggcatgtctttgaaaataggcttgaagaaatatgaccctttttgatgggaaaaacaataaaactgtttaaacaataaccatgtagatgagagcaaagagtgctgtgatttatgaaagtggctttatagcttctcttacttccccaatcctgcccattcccaaaccgttttatactataancataatggctctatgaaangnnatttantctanactnttntggnaagnnctatc

SEQ ID NO: 41575 - DNA, 271 bp, Homo sapiens
  misc_feature (1)...(271): n = a,t,c or g
ggagagagctagcaccatgagcttcaataccctggagaactggaatccgagtcagcggaaatccaggctggcctttgctaggacactgggatgacgatggtggaagtcagggttaaagaaagtnnnnnnnnnnnnnnnnnnnnnnnnnnnnnnnnnnnnnnnnnnnnnnnnnnnnnnnnnnnnnnnnnnnnnnnnnnnnnnnnnnnnnnnntngtaccannctgntctnnatngnnaanccnnnnctttantnnnnttacnnnnnttatcc

SEQ ID NO: 41576 - DNA, 325 bp, Homo sapiens
  misc_feature (1)...(325): n = a,t,c or g
gcaggggcaaagcccctgaaaaaggctgtggtgatgcccctacagctaattcaggagcaggcagcatccccaaatgccgagatccacatcctgaagaataaaggccggaagagaaaggtgaaagtagctgggggcttaggctacacctggagcccagaagtaagggggagtaggctctagggggaggagcgttggccttggggttaaacgaactggatgatggccgccagctactaacagacctcaacttgcttacccctggaatgtggtgatggatggttccttgcagggcatttagggtgnaaggcantgatggtgatgtacc

SEQ ID NO: 41577 - DNA, 340 bp, Homo sapiens
gggggtggtgaccatcggctgtgtgggtttccctaatgtgggaaagtcctcgctgatcaatgggctggtggggcggaaagtcgtgagtgtctccagaaccccgggccatacccgatactttcagacctactttcttaccccctctgtgaagctctgtgactgcccaggcctcatcttcccatctcttctgcctaggcagttgcaggttctggcagggatctaccctatcgcccagatccaggagccctacactgctgtgggctacctggcctcccgaattcccgtgcaggccctgctccacctgcgccacccagaggctgaggacccctcagcggaacac

SEQ ID NO: 41578 - DNA, 168 bp, Homo sapiens
  misc_feature (1)...(168): n = a,t,c or g
ggagagagcagtaagagctccagcctctggacactatccagagcctgacctaggcacctacttgcaccatcctgccctgatgcacttgggttgagagagggttgccgtgtgtgtgtgtgtgtgtagagaatatggtgntatgtgtactggaggaggngnncnanacct

SEQ ID NO: 41579 - DNA, 350 bp, Homo sapiens
gggaacgtctgaggttatcaataagctcctagtccagacgccatgggtcatttcacagaggaggacaaggctactatcacaagcctgtggggcaaggtgaatgtggaagatgctggaggagaaaccctgggaaggctcctggttgtctacccatggacccagaggttctttgacagctttggcaacctgtcctctgcctctgccatcatgggcaaccccaaagtcaaggcacatggcaagaaggtgctgacttccttgggagatgccataaagcacctggatgatctcaagggcacctttgcccagctgagtgaactgcactgtgacaagctgcatgtggatcctgagaa

SEQ ID NO: 41580 - DNA, 376 bp, Homo sapiens
  misc_feature (1)...(376): n = a,t,c or g
gaaaagtgaaggatgctccctaagctcccaagaaagtacatacttgggctccaagataattgaaatttggattctagacaaacaaaatcgctcaatttagacagtaaagaaaaaggtgagcttaggacctgagtgatctagataatggctttaactgtgtacttggtgggactgaangctnnnattgngtnttnccctaaannagntcannntaanctnatncnnttngctanttagcnncttgngatntnnncgtcattnnnnntttatattnnnttntaantncatntntnntnaaatnntnntgtnntnnntctatttatnttntnntttnntnttnnaatgcnttntntgntttnntncattattnttgtta

SEQ ID NO: 41581 - DNA, 352 bp, Homo sapiens
  misc_feature (1)...(352): n = a,t,c or g
ggaccaaagctgagatctggttagccatgctaaggagaaagcaagaagcttctcaagcataggggacagtagcagatgtccagaaatgagactgagcacagatatttgggaacccattttggagcanaatntggnaccccaaagaccaagaaacctacatttatggatgacnaacgaantgaatnctcnnntnncttatnnccntnactttncncnnncananantnggnnccctatntgnatatnngnancttntnntnnngnttantnncnntncngtctnggnaanccatcncnttctnnatcnntttnnnnatctctanttnccctggnatntatngtaccctnttac

SEQ ID NO: 41582 - DNA, 189 bp, Homo sapiens
  misc_feature (1)...(189): n = a,t,c or g
gctggaagaannnnnnnnnnnnnnnnnnnnnnnnnnnnnnnnnnnnnnnnnnnnnnnnnnnnnnnnnnnnnnnnnnnnnnnnnnnnnnnnnnnnnnnnnnnnangctttncattcggaatccagggaccaccctttgcactcannangcccttgttttcctgcgtggaaagcggnngnncttgngaggc

SEQ ID NO: 41583 - DNA, 339 bp, Homo sapiens
  misc_feature (1)...(339): n = a,t,c or g
gtcctaatccacaagtaaatgtcctgaagatgagacttgaatattttctcttgattagctaagtcttttgtatatttactgtaagtatatctgttgtttccctcaccccccattgctaaaagggtaagttctaagcttgagcatttaaggctcnnnnnnnnnnnnnnnnnnnnnnnnnnnnnnnnnnnnnnnnnnnnnnnnnnnnnnnnnnnnnnnnnnnnnnnnnnnnnnnnnnnnnnnnnnnnnnnnnnnnnnnnnnnnnnnnnnnnnnnnnnnnnnnnnnnnnnnnnnnnnnnnnnnnnnnnnnnnnnnnnnnnnnnnnnnnnnnnnnnnnnnagc

SEQ ID NO: 41584 - DNA, 340 bp, Homo sapiens
  misc_feature (1)...(340): n = a,t,c or g
ggaaagtcatggatactgttacacaaagaacactctatataactgtgttaagtccttcagacaagttcaggaaatcaaaaagtttaaaaagggaattctttagagatttaggggagatttctcatttttgtactatgaagaatcatggaatgttttaaaaatatttttaaagcacagtttgattcaggtgcttcttgaacagcataaatcccctggagagtccacatgtaagaaagacatgtgcnnnnnnnnnnnnnnnnnnnnnnnnnnnnnnnnnnnnnnnnnnnnnnnnnnnnnnnctcccaaatgcctcaagtgatccactcaagatgacttgagg

SEQ ID NO: 41585 - DNA, 348 bp, Homo sapiens
ggatgaagtggggtcacattctcctgggagtctgggtcttgggcaggtccctactcttccccgaacctcagtccttctcgcaccccaagcgcccctaggccacgcagctggtcaccagcgagccaggggtcacagaaggaggcagtccataccctcacaccctactgtgtggctgcgggagggcatcatcctctctgggccgccctggctattcctccgggccaagccagacctcactatacccgtctgtaaaatgggccgggagggaggcagctcagattctcgacagccccacttttttcccagcgctgcgggcaatagaagttttgggcacacaagagccacagg

SEQ ID NO: 41586 - DNA, 337 bp, Homo sapiens
gcatttacttcaagacttcacttgaaaaacaaatcgtaggtatagttactatccccttttgcagcacccacttctcccccatgttagtttctctttaaaactcaattttcttcagttttgctgattcaccaaggaacaggccaggtcctgtctgaaaagaatgtaagctttacagagataacctctgaagggaaaaagttgttatgaatacatgcaaagatgagccagttggtagttttccaaatgtaattttctcctacattcttaggccttgtggagacactttaaaacatattttcagacaagtttcaaaaaactccctcctagataagcctat

SEQ ID NO: 41587 - DNA, 318 bp, Homo sapiens
  misc_feature (1)...(318): n = a,t,c or g
ggatttatactttgggactaggtaactgtatgaccttatcaaatgctgtttctaaaagtgctatactcatagtaaaactatgtgtataactatgcatagtcagtcctcaaaatagattgctatgtgcatttggctatgtgcatttgaattttgactacagtcttacaagtggaatcttactgtanagtagntccanacctgacgaataacgncaggcatgngcnggnccggnncanaggnnnancancancggnntnncntntngctnncttnccnnntcctttnntntnnntnttnnannnnannnnnacccngctt

SEQ ID NO: 41588 - DNA, 342 bp, Homo sapiens
gcagtggttcacagaagaagtcacaagacaagggtcctaaaacaggatcagtaaagaaggaaaaagcagtaaagccagaggaaggtaatggccttttttgaaatttttagatttgtcatcaaagtttatcagaaataacttgtgtagtaagtaattcatgatgtttgatagcagtgtgtgtacaatataaatacttggtcttacatttctggaaaacaaagttcttatataatactgggagaccacgaggcaccttctgtttgcttaaacagaccagggcagtaagagtcaccttcagacccatgtcttctcctgtgcagggtggggtcaggtttaggtaat

SEQ ID NO: 41589 - DNA, 331 bp, Homo sapiens
  misc_feature (1)...(331): n = a,t,c or g
gaaatgaaaatcagtgaaaagcactcagttttttaaaagcaagaatgattttattggtttcaaagttaaacttactatttgaatcaaatttttataaaatccatttattttttaaatacttgaaattttgagtaagaaatataaggacatggaacaaaataaggcacaaaagcgtatacagtgaaaagtaagttgtcacccccaaaccactcaagtttcctcctcttttctttttttttttttngnanncngantntaantccntcncccagncnggagnncntngggtnnangggggtnntnggncctaancctccnnaatanctggagt

SEQ ID NO: 41590 - DNA, 339 bp, Homo sapiens
  misc_feature (1)...(339): n = a,t,c or g
gtggaagcagatggaggaagctgtagaaggagatttggcaatagtaccttaataacccactgataacaaaggtgatagcaaacaccaatccaaaaaccaaaagctaagcagtctagggcactttatgtatgggcaaatggtcctatgtaccataatagccctcaagaatagcactatatttataatacagtataattgatttcagtttgatagcactgaatatgttttgaggttagagtaagttatagnnnnnnnnnnnnnnnnnnnnnnnnnnnnnnnnnnnnnnnnnnnnnnnnnnnnnntaataataataggatctgggtgtggtggctcacactt

SEQ ID NO: 41591 - DNA, 302 bp, Homo sapiens
  misc_feature (1)...(302): n = a,t,c or g
gnnnnnnnnnnnnnnnnnnnnnnnnnnnnnnnnnnnnnnnnnnnnnnnnnnnnnnnnnnnnnnnnnnnnnnnnnnnnnnnnnnnnnnnnnnnnnnnnnnnnnnnnnnnnnnnnnnnnnnnnnnnnnnnnnnnnnnnnnnnnnnnnnnnnnnnnnnnnnnnnnnnnnnnnnnnnnnnnnnnnnnnnnnnnnnnnnnnnnnnnnnnnnnngaaaaagaatatatgaatatatgtctcaggccagatgcagtggatcatacctgnaatctcancactttggnaggctgangcanncnnatcactt

SEQ ID NO: 41592 - DNA, 176 bp, Homo sapiens
  misc_feature (1)...(176): n = a,t,c or g
gggaggaaaaggcgctccgtcatggggatccagacggtaagaccctcattcagtatcctccactgggggacccctccccatctggttctggccactcagctccggaccaggggctgtcgctgccgaccccgccccgcagggctctgggcccaccgtggatgctggggtccngatcc

SEQ ID NO: 41593 - DNA, 326 bp, Homo sapiens
  misc_feature (1)...(326): n = a,t,c or g
ggcggttttatgaatgggttctcttctgtcttcagaattactgtgcatcctttctgtcctcatctgtttcatatactttttactgtgataaatttggaagaaactggatatatttgatcagctagtgaatggggagcaggagggaagtggcacctgagaatgataaacaggaagtgtttaaaaagaagttaggcnnnnnnnnnnnnnnnnnnnnnnnnnnnnnnnnnnnnnnnnnnnnnnnnnnnnnnnnnnnnnnnnnnnnnnnnnnnnnnnnnnnnnnnnnnnnnnnnnnnnnnnnnnnnnnnnnnnnnnnnnnnnnnnnnnnn

SEQ ID NO: 41594 - DNA, 335 bp, Homo sapiens
  misc_feature (1)...(335): n = a,t,c or g
ggtatagttgatgtcttggaagggaagccctacttagcccaattcttcttttttctaattacacctgtttctgtttctgaacaagaatatacacacatcttcaattgaaagagnnnnnnnnnnnnnnnnnnnnnnnnnnnnnnnnnnnnnnnnnnnnnnnnnnnnnnnnnnnnnnnnnnnnnnnnnnnnnnnnnnnnnnnnnnnnnnnnnnnnnnaggatgttactctctactaaaaatactctactctactaaatnnnnnnnnnnnnnnnnnnnnnnnnnnnnnnnnnnnnnnnnnnnnnnnnnnnnnnnnnnnnnnnnnnnnncgggaggctg

SEQ ID NO: 41595 - DNA, 399 bp, Homo sapiens
  misc_feature (1)...(399): n = a,t,c or g
nnnnnnnnnnnnnnnnnnnnnnnnnnnnnnnnnnnnnnnnnnnnnnnnnnnnnnnnnnnnnnnnnnnnnnnnnnnnnnnnnnnnnnnnnnnnnnnnnnnnnnnnnnnnnnnnnnnnnnnnnnnnnnnnnnnnnnnnnnnnnnnnnnnnnnnnnnnnnnnnnnnnnnnnnnnnnnnnnnnnnnnnnnnnnnnnnnnnnnnnnnnaacacagtatattattgacctttgtatttttgcctatgattggtaaaatatgctatgtaaatgtggttttaatttcatttgtcttctgagatggggacccttttatgttcaaaaactctccttttcttcatctcttttgttcatgtttctattagccttttgatcttttccttatcagtgtgaaacaactgtatag

SEQ ID NO: 41596 - DNA, 406 bp, Homo sapiens
  misc_feature (1)...(406): n = a,t,c or g
gctcgagtttgttgaagcgtctacggtttcactgacggattcagaagctcattttacctcagctttcattgaaactacctcctatcttgagtcttcactcatttcccatgaatccgcagtcactgcactggtgccccccggctctgagtcttttgacattttgactgccgggattcaagcaannnnnnnnnnnnnnnnnnnnnnnnnnnnnnnnnnnnnnnnnnnnnnnnnnnnnnnnnnnnnnnnnnnnnnnnnnnnnnnnnnnnnnnnnnnnnnnnnnnnnnnnnnnnnnnnnnnnnnnnnnnnnnnnnnnnnnnnnnnnnnnnnnnnnnnnnnnnnnnnnnnnnnnnnnnnnnnnnnnnnnnnnnnnnnnnnnnnnnnnnnnnnnnnnnnnnnnnnnnnnnnn

SEQ ID NO: 41597 - DNA, 409 bp, Homo sapiens
  misc_feature (1)...(409): n = a,t,c or g
gggcatgggtgtttgcgtgcgcgttctggtggcagtggaggtggatcccagccgctgttttccacgacagggtgtggagaggagactgtgcatctctctctcctcaggagactgtttttgctgtcaggggttccaggtggaggggagtagaaagcgcatggacgctccagggttttctgtagcttgaagggacgggtccgggccttgagggctgggaaaccccttgcggagggggaggggcgcgttcctgtgtggccaggagcggatggggaagcgaagcgggtggaaaaaatcaagacagctcnnnnnnnnnnnnnnnnnnnnnnnnnnnnnnnnnnnnnnnnnnnnnnnnnnnnnnnnnnnnnnnnnnnnnnnnnnnnnnnnnnnnnnnnnnnnnnnnnnnnnnnnn

SEQ ID NO: 41598 - DNA, 399 bp, Homo sapiens
  misc_feature (1)...(399): n = a,t,c or g
gnnnnnnnnnnnnnnnnnnnnnnnnnnnnnnnnnnnnnnnnnnnnnnnnnnnnnnnnnnnnnnnnnnnnnnnnnnnnnnnnnnnnnnnnnnnnnnnnnnnnnnnnnnnnnnnnnnnnnnnnnnnnnnnnnnnnnnnnnnnnnnnnnnnnnnnnnnnnnnnnnnnnnnnnnnnnnnnnnnnnnnnnnnnnnnnnnnnnnnnnnnnnnnnnnnnnnnnnnnnnnnnnnnnnnnnnnnnnnnnnnnnnnnnnnnnnnnnnnnnnnnnnnnnnnnnnnnnnnnnnnnnnnnnnnnnnnnnnnnnnnnnnnnnnnnnnnnnnnnnnnnnnnnnnnnnnnnnnnnnnnnnntggagcangancangtggancntgttannntgcnttanctggggngtactgcca

SEQ ID NO: 41599 - DNA, 390 bp, Homo sapiens
  misc_feature (1)...(390): n = a,t,c or g
gaggacatcaggccagatttggccctcgggctataattttccgactcctgtatttaggaagctagttaactattccagttccactgactcaatctaatctttaaaattgaaatatagaagccacatttcctttcaaccgtactctccaacctgaggtttttgcacttacaggacagcataacactgtctactcatggaaatgatactgccagcatgtcctatgtcctggacgctgccaactgcttctcaagaacactcatttaatccttccgcagcctctaatagaaagcctctcccatcttctcaggatgaggatttggnacagagagtaataaatgccaggtcnagtggattgnangnngactgtctnactngntctactgnccgctg

SEQ ID NO: 41600 - DNA, 371 bp, Homo sapiens
gctgaactctctgaaactccatttcgtcatgcatgctggggatggctaacagtagtccttacctcacagagacactacgaggattaaatgatgaaatgcatggcacatgaccaacctagagtaagtgtctgaatgtgcggtgattctatcagtcaggacattgttggttgctagtatcagaaacccagctcaacctggcttagagcagaagagggcgcccctagccaaaaaatctgcagtcatctgattggccaccctagtatctagagttggagtgaggtcgatccactagctggcggaaagcgagatctcccaaggaaaactggagcatagtagccagaaaaagagggatggatactgggcaggcagaa

SEQ ID NO: 41601 - DNA, 357 bp, Homo sapiens
  misc_feature (1)...(357): n = a,t,c or g
gtgaaaatccagatttggattcagtagacccaaggtgggtagggttgccagataaaacatgagatgcccagttaaatctaaatgtcagaaagacaataagatgtcttggtataattatgccccacacattccaagggccatactcatgcttaactggcacactgctttttatttgctaaataaggcatccctaaagatggagtctgaaatcccacatttctgaaaagcttaaagatgaagccttatatgcatttaaaatgcaatttaaatctatgaaaactatattttatgcagccatgaattttatggtctcttttttaagaccactgaacagtctaggcaggcntntcccacctt

SEQ ID NO: 41602 - DNA, 341 bp, Homo sapiens
gaagttttttacgtggatgaagtctagtttattgatgtttttaatggtttgtcccttttaggtcctatccaagaaatctttgcctaatccacagttgcaaagattttctcctagaagttgtgtagttttagattttatatttaggtctatgatatgttctgagtttatttttcataaacagcataagagatggaccaaggttctttttttccccatatggatgtccactgatctgcattttgagatagccagggaagagggccatgtgcaaaggagatcgctgcaggtggaatgctgggtgctgccagagggggttgtgcaaggcaccaggaagccctgag

SEQ ID NO: 41603 - DNA, 351 bp, Homo sapiens
gcggcacgagggttagtatttgtatgaatagctgggtagtatggcctagcctgtcatcaaaatgtgaggcactttgagctttaaataacaaaggactttcaaaatatcttctccttttgctgaactgagaagcctaaagaggctcattctccctaagaaaacagcagtcagatcctgagtgatctcgggtgtgagaagaggtatgattatggggccagaaagctgcagtggctgtggtcaatgatagaggtaggaaaaaggagaaaatgtggcacctgccttgggagggttttgagacagggattttaacaaggagtttgaagaagctttggtatgtgataagtgaggccc

SEQ ID NO: 41604 - DNA, 346 bp, Homo sapiens
ggaaaactagtaaatgcttttgaataggtagtatgacagctattttaaatgtataaacatttgtgtgccaaacaacatatatgaagggatgtgatgccactaactagtgcacattgtttctcaatgtgccattgagacacaaggcacagtaagtcaggattctgaggcattggaagggttttcttcagctgtaattgtttccacagtgcttttcatctgaggggctcaaagtttaagagtgcattcaataacccatgtactagcttcttgaggtaagtaaataaatcttgttctcatgttacatgttaatacaccaaggcaccaaaacatttaaagtgccatgaat

SEQ ID NO: 41605 - DNA, 334 bp, Homo sapiens
gctataaatgacttcagttgcagctgttctccgggtaacagtctgtggacaccaatgcgcacaattcctatcaaggtcctgtgtgtagagccactgtggacactgtggttctctggtgcatatgttgtgggtggagaagcagaccacttgaagccctggtaggaactgtttgctcctgtcaagcaggaaacaaacacgtgcatcttgaaaatgccgagctccctttgcagttctgtgctcgtattgaagagaggatcggtactggggtgacagctcacaggattccagcagcagcaccttggtttcgcctagccgttcagcctttgcctgtctt

SEQ ID NO: 41606 - DNA, 425 bp, Homo sapiens
  misc_feature (1)...(425): n = a,t,c or g
gcggcacgagattactggggattatgcagtcgaggtaaatataaaatgaggttgtttcttcttttttttatttgagacagagtcttgtttgnnnnnnnnnnnnnnnnnnnnnnnnnnnnnnnnnnnnnnnnnnnnnnnnnnnnnnnnnnnnnnnnnnnnnnnnnnnnnnnnnnnnnnnnnnnnnnnnnnnnnnnnnnnnnnnnnnnnnnnnnnnnnnnnnnnnnnnnnnnnnnnnnnnnnnnnnnnnnnnnnnnnnnnnnnnnnnnnnnnnnnnnnnnnnnnnnnnnnnnnnnnnnnnnnnnnnnnnnnnnnnnnnnnnnnnnnnnnnnnnnnnnnnggttctaaanacnctttcagctctaaaacattgantctaacagatcacatttcaggaggactctagnaaaccngcatatgcaaattat

SEQ ID NO: 41607 - DNA, 430 bp, Homo sapiens
  misc_feature (1)...(430): n = a,t,c or g
gtnnnnnnnnnnnnnnnnnnnnnnnnnnnnnnnnnnnnnnnnnnnnnnnnnnnnnnnnnnnnnnnnnnnnnnnnnnnnnnnnnnnnnnnnnnnnnnnnnnnnnnnnnnnnnnnnnnnnnnnnnnnnnnnnnnnnnnnnnnnnnnnnnnnnnnnnnnnnnnnnnnnnnnnnnnnnnnnnnnnnnnnnnnnnnnnnnnnnnnnnnnnnnnnnnnnnnnnnnnnnnnnnnnnnnnnnnnnnnnnnnnnnnnnnnnnnnnnnnnnnnnnnnnnnnnnnnnnnnnnnnnnnnnnnnnnnnnnnnnnnnnnnnnnnnnnncacacaccnaaatttattatctcatggtaccagctggctcctctgtcagggtctcactaggcccaaagcccttttcatcctgtgtccctgtctatcactgccatcatcccacatcc

SEQ ID NO: 41608 - DNA, 265 bp, Homo sapiens
  misc_feature (1)...(265): n = a,t,c or g
gccaaagtccaaggttgggatctcattccaaagtccaaaaggaagggatcagcaaactgtggctggcccttggaccaaaactggctcaccacnnnnnnnnnnnnnnnnnnnnnnnnnnnnnnnnnnnnnnnnnnnnnnnnnnnnnnnnnnnnnnnnnnnnnnnnnnnnnnnnnnnnnnnnnnnnnnnnnnnnnnnnnnnnnnnnnnnnnnnnnnnnnnnnnnnnnnnnnnnnnnnnnnnnnnnnnnnnnnnngnatgganatggg

SEQ ID NO: 41609 - DNA, 416 bp, Homo sapiens
  misc_feature (1)...(416): n = a,t,c or g
ggaacaagttgtttgaaatggtgcttttgtttcaggtgataatacaagtcactcttctggaagacttaatttttttgtttctctgggtgtaagtggcccacccaggcatgccagttacatttggtacccagagcctttgaggcagccaaagtatggtgcctttagatgctcctcgtcacccgcacgaccccctcaacaggtactgtgtttattttctggtccattttctcctcttgtgaaggtggcaggtcttcctaggcactctcagcttctactaacccgtttgcattggtaaactgccctgtacttacaagctgccctgcttcagggtttgatatttcattttaagggcaggtgtttgattctaaggcatgtgaagtgtcagggnttaggtttaagaagggggcaagataaag

SEQ ID NO: 41610 - DNA, 413 bp, Homo sapiens
ggccaggtggcagggccttggggagccccagcacaatgatattgtgtaatcttccctcctgtggaatcgaggggaaattattcttcccaataccttgatttgattttcagtttcataagcttcttcctctgaatcttattgagggactatggtaccaagcaggtaggactgttcacctggtggaacagttcttgctctgccttctaggcttcatcccagaaatccagcctctttctggagaccccaaagctggagggagatgggctttcctctgggcctctctcctactttgccatccacactgctcctggctaaccccagcaataaccaacaaatggtaggaagccccatctattgctttttctcaattatgactgcataagtttgtggaaacaaagatcttgaggaagaag

SEQ ID NO: 41611 - DNA, 394 bp, Homo sapiens
  misc_feature (1)...(394): n = a,t,c or g
gactgaactacacgacctgcagaacagatcacaaacttatgctgttttaatccacaacgtttatggcaattagttacagcaatcaaagattcacactggggtacagaggaaagctgtgcctgcctcaaagtggccccatagcctgagccctgtggtgacagggctttgggcagagcatgatgcagcagtttttgggtgtgcccaggttcccaggtatgatgcccagtgggtgacagggcgttttgcctaccttggtacggagtgcagcctggccacagcaaggacaggtgctcaacaccatggggtcctcaggagtctgcctgagtgttctcccagaggcatctgcagccatggtggaanggggtgcagcccttctcacttntgtgaccagcag

SEQ ID NO: 41612 - DNA, 406 bp, Homo sapiens
  misc_feature (1)...(406): n = a,t,c or g
gtttttgtttgttttctttttcttttttgtagacacaaagtctctgtgtgttgcccaggctggnnnnnnnnnnnnnnnnnnnnnnnnnnnnnnnnnnnnnnnnnnnnnnnnnnnnnnnnnnnnnnnnaatgggccatcttttccagcctttagctatgtttctgtagctagactcttacaaagcttccaaatttgaggtcaagttgttttaataactcctgnnnnnnnnnnnnnnnnnnnnnnnnnnnnnnnnnnnnnnnnnnnnnnnnnnnnnnnnnnnnnnnnnnnnnnnnnnnnnnnnnnnnnnnnnnnnnnnnnnnnnnnnnnnnnnnnnnnnnnnnnnnnnnatcactactanaaatgcaaaaattatcaggccgtgatggtggcacctgtaatctcacta

SEQ ID NO: 41613 - DNA, 416 bp, Homo sapiens
gctcattgcaaacgaattcatacctagattccacagaatcaaagatgcagccgagttacccattgagctggagtgggggcgtagaattgccctgtttggcctccttgctgacattgctgttcctactgcagcctctgatgcttccccttggaggctcccagacccagttgggcaaccacagtgttgtccgtctgcttctcccagttcagaggctcggctttgccgaagtccctccactcgaagtggcacagagttgaggtctcttccaggcacactggcgttccctcactgggctcctgtccctgccttggtcaacatcctggtgcgcactgggtggtgactaacaacatttttggagttgtggctggagcccaggtgactactccaaatcacggttttccattctgtgtgagatg

SEQ ID NO: 41614 - DNA, 400 bp, Homo sapiens
  misc_feature (1)...(400): n = a,t,c or g
gaggctccagtgcagtggcacaacnnnnnnnnnnnnnnnnnnnnnnnnnnnnnnnnnnnnnnnnnnnnnnnnnngtttgttgatgaaaaagagtcaaactctggctgagcccnnnnnnnnnnnnnnnnnnnnnnnnnnnnnnnnnnnnnnnnnnnnnnnnnnnnnnnnnnnnnnnnnnnnnnnnnnnnnnnnnnnnnnnnnnnnnnnnnnnnnnnnnnnnnnnnnnnnnnnnnnnnnnnnnnnnnnnnnnnnnnnnnnnnnnnnnnnnnnnnnnnnnnnnnnnnnnnnnnnnnnnnnnnnngancctatgatgcnnantttgttngtcnatnatnttgntnnnatnntntntnagttnntcatannnagnatttttttantatnnaaaaantnntataca

SEQ ID NO: 41615 - DNA, 336 bp, Homo sapiens
  misc_feature (1)...(336): n = a,t,c or g
gcagacagacttgaggtaggaatgactagttgccgacgtttctatactacattctgatgctcnnagtgtggttgttgnncccatngnccaaaaactnnngcaattttaaaccagattttggcttaggctttggaacattttctnnagnttagcttttccgtantgacttaatnaacgggttnttatngctncttcntgcttgcctngattaggnctnacaaagttggacgcttnagtnccatnggcnggntcttactggccntnacttnnnactnttancacnggtccttacccctaannntcctgggaatctctggccccttaaacatncttccg

SEQ ID NO: 41616 - DNA, 362 bp, Homo sapiens
  misc_feature (1)...(362): n = a,t,c or g
gcagacagacttgaggtaggaatgactagttggtgtctttatatactacattctaattctcaaagtgtggttttttgtttgtttgtgtgtttccatggccaaaaagttgtaaaaattttaaaacagattttggcttagggtttggaacattttactagagtatagataatgctgtatttgattaatgtaacgtttataaaggctacaacatccatgtttagaatagtggataagaggttggacgctaaagtcacattgcctggttacatcactgtacctcaatttcctcatctttaaaacggcgcttacctcaaagagttangggaatatctggcacatancaaatgcctcctgaatgtttg

SEQ ID NO: 41617 - DNA, 401 bp, Homo sapiens
  misc_feature (1)...(401): n = a,t,c or g
gacaaaatgcaattaaacttgaagaaagcataagaaaagttaagagaaaaaagtaatgaagaaaatgtacagtannnnnnnnnnnnnnnnnnnnnnnnnnnnnnnnnnnnnnnnnnnnnnnnnnnnnnnnnnnnnnnnnnnnnnnnnnnnnnnnnnnnnnnnnnnnnnnnnnnnnnnnnnnnnnnnnnnnnnnnnnnnnnnnttaaatattagttgggtttcattgtgcatacctccgnnnnnnnnnnnnnnnnnnnnnnnnnnnnnnnnnnnnnnnnnnnnnnnnnnnnnnnnnnnnnnnnnnnnnnnnnnnnnnnnnnnnnnnnnnnnnnnnnnntaggtgaaagagtctcaaaaaaaaaaagtncagtagagaaaagncactgaaagaaaataaaacg

SEQ ID NO: 41618 - DNA, 342 bp, Homo sapiens
ggaggttatcaataagctcctagtccagacgccatgggtcatttcacagaggaggacaaggctactatcacaagcctgtggggcaaggtgaatgtggaagatgctggaggagaaaccctgggaaggctcctggttgtctacccatggacccagaggttctttgacagctttggcaacctgtcctctgcctctgccatcatgggcaaccccaaagtcaaggcacatggcaagaaggtgctgacttccttgggagatgccataaagcacctggatgatctcaagggcacctttgcccagctgagtgaactgcactgtgacaagctgcatgtggatcctgagaac

SEQ ID NO: 41619 - DNA, 345 bp, Homo sapiens
  misc_feature (1)...(345): n = a,t,c or g
gaaagacttctcagggaggcagagaatccactgagacatacgtagtgtgcgttcagtccctgatgtaccagagctcagtatttcctgcttccttcttgtgagaccctctctgcctccagggatcaaggagaagaaagaatctccccagacactccaaaatccctttggagatgctacccgcgaattagtacatgttttcttggtaattataacagggaaataaaagttttaaaaatataatagcgnnnnnnnnnnnnnnnnnnnnnnnnnnnnnnnnnnnnnnnnnnnnnnnnnnnnnnnnnnnnnnnnnnnnnnnnnnnnnnnnnnnnnnnnnnnnnnnnnnnn

SEQ ID NO: 41620 - DNA, 324 bp, Homo sapiens
  misc_feature (1)...(324): n = a,t,c or g
ggcaagcgtgcgtatccaggaatctgcatgagtcgcagtgtttcagggttcaggagggttctcctagtgctgaaatggctgcaggaaccacaggcgtaggttatcaatactcattgtcctttgaatttttggaaagccctctnaagaagnacggctacaaanaagccnaaactgtgaanactgnaataaatgccctactntncnttgcccagacatntntntcatccacttngancctatactatacnccgaaaaagacctccngaacggacntnttnttgcctattgannacccctgcnntgatgagaccgctgnnaggaccc

SEQ ID NO: 41621 - DNA, 340 bp, Homo sapiens
  misc_feature (1)...(340): n = a,t,c or g
ggtaaatcagtcctgtttctgatctgtaagccagaagaagtggtacagtttcttttgggaattatttccactcagaattgcaaggagatacttgatatatcaccttggtttgagtctgcattcttagtggagggtatggagacgtcctggaaagagtccctgtgcgggnnnnnnnnnnnnnnnnnnnnnnnnnnnnnnnnnnnnnnnnnnnnnnnnnnnnnnnnnnnnnnnnnnnnnnnnnnnnnnnnnnnnnnnnnnnnnnnnnnnnnnnnnnnnnnnnnnnnnnnnnnnnnnnnnnnnnnnnnnnnnnnnnnnnnnnnnnnnnnnnnnnnnnnnnnnn

SEQ ID NO: 41622 - DNA, 298 bp, Homo sapiens
ggaactggataagcccattgctgccacttccaactgaagctcagtgacctgggtgggcagtggccaagctgctgttcctatgacaggcccactcaacctgggcagaccgagaggcccgtgcactttggaatgggagcgtggaaccacctgtacagagtgacagatttgggatgcaccactggattgtagattgatttttctttcctgtccccctactccctccctaccttttccatcctcctcctctgccttcaaaaaaggaaactttcccttggttgtcttaatttttttttttttt

SEQ ID NO: 41623 - DNA, 352 bp, Homo sapiens
  misc_feature (1)...(352): n = a,t,c or g
gtgggaggccaacacgggcggattgcnnnnnnnnnnnnnnnnnnnnnnnnnnnnnnnnnnnnnnnnnnnnnnnnnnnnnnnnnnnnnnnnnnnnnnnnnnnnnnnnnnnnnnnnnnnnnnnnnnnnnnnnnnnnnnnnnnnnnnnnnnnnnnnnnnnnnnnnnnnnnnnnnnnnnnnnnnnnnnnnnnnnnnnnnnnnnnnnnnnnnnnnnnnnnnnnnnnnnnnnnnnnnnnnnnnnnnnnnnnnnnnnccccaaaatgagtttattttaatcctagtaagtttaaactatgtattcaaaattatttaatagctgggtatggtggcgggcatctgtaatcctagctactcg

SEQ ID NO: 41624 - DNA, 341 bp, Homo sapiens
gactagaggaaactccaaataccactactatgggattcgtgtcaagccagattcccctcttaatcgtctgcaagaagacatgcagtatatggctatgagacaacaacccatgcaacagaaacaaaggtacaagcctatgcagaaagtggatggggttgcagatggtttcacaggaagtggtcaacagacaggcacatctgttgagcaaactgtaattgcccaaagccaacatcatcaacagtttttagatgcatctcgagcacttccagagtttggagaagttgaaatctcttctctgccagatggtactacctttgaggatatcaagtcactgcagagtc

SEQ ID NO: 41625 - DNA, 351 bp, Homo sapiens
  misc_feature (1)...(351): n = a,t,c or g
gttaagttcnnnnnnnnnnnnnnnnnnnnnnnnnnnnnnnnnnnnnnnnnnnnnnnnnnnccatccacattgctgcaaatgacatgattttattnnnnnnnnnnnnnnnnnnnnnnnnnnnnnnnnnnnnnnnnnnnnnnnnnnnnnnnnnnnnnnnnnnnnnnnnnnnnnnnnnnnnnnnnnnnnnnnnnnnnnnnnnnnnnnnnnnnnnnnnnnnnnnnnnnnnnnnnnnnnnnnnnnnnnnnnnnnnnnnnnnnnnnnnnnnnnnnnnnnnnnnnnnnnnnnnnnnnnnnnnnnnagttgtgtttttagtgctctgagaaatctccctactgttttgtataatggctg

SEQ ID NO: 41626 - DNA, 340 bp, Homo sapiens
gctggcccaagttggcgtcatcatctttctgtgactctcctcttggccatgagctatctggctccttaaacttgtcgtttcctgcagaatcctgctaatgattagaccaccgccacatgtcctccaaacttccttctgatgccctgggattcccccaaccattgcaaacccaacccagggtgttaactgcagtggggtgggcagtttacatatgagtgatcaactcaagaggggcaattttctttcccagtttcttgctggtgaaggagagtcaggtggggatggagcagagtgccaaggagcacaaagcagacagccacacagtagaaagagtgcaagc

SEQ ID NO: 41627 - DNA, 312 bp, Homo sapiens
  misc_feature (1)...(312): n = a,t,c or g
ggagtcattgacggtgaatacagggatggtagactcttcagcaagtccagacttttatttaatcccccatttcagttcatgtcttaatcctttccactgtttcactagatatttcttaatcttgaactaatctgaagttctgtaggacccttgcctgtattccccctttttattctaggacttgacttcctcttagttttgccanttaccacttctctacctactttnagnnttcncntgacantgttgangtntnttgtctanttgctntnttncnncacctcanttnnnnnttgatnatatctcttgact

SEQ ID NO: 41628 - DNA, 349 bp, Homo sapiens
  misc_feature (1)...(349): n = a,t,c or g
nnnnnnnnnnnnnnnnnnnnnnnnnnnnnnnnnnnnnnnnnnnnnnnnnnnnnnnnnnnnnnnnnnnnnnnnnnnnnnnnnnnnnnnnnnnnnnnnnnnnnnnnnnnnnnnnnnnnnnnnnnnnnnnnnnnnnnnnnnnnnnnnnnnnnnnnnnnnnnnnnnnnnnnnnnnnnnnnnnnnnnnnnnnnnnnnnnnnnnnnnnnnnnnnnnnnnnnnnnnnnnnnnnnnnnnnnnnnnnnnnnnnnnnnnnnnnnnnnnnnnnnnnnnnnnnnnnnnnnnnnncttcgcatttttcttttgcaggntgcatgccanccaatattcctctgtgctgggaanggaaagtttg

SEQ ID NO: 41629 - DNA, 356 bp, Homo sapiens
  misc_feature (1)...(356): n = a,t,c or g
gctcttctttctctgttgaatggatttgccttctgtgtcgatttttgacctaaggtctcttttgtctgatattagcagagccacttcaactctcttttggttactattttcatggaattgctttttgcatcttttaagtttcaatctatttttgtctttgggtcaaaagtgagtctgttgtagataacatatacagtcatgtgtcacttaacaatggagatnnnnnnnnnnnnnnnnnnnnnnnnnnnnnnnnnnnnnnnnnnnnnnnnnnnnnnnnnnnnnnnnnnnnnnnnnnnnnnnnnnnnnnnnnnnnnnnnnnnnnnnnnnnnnnnnnnnnnnnnnnnnnnnnnntgaaa

SEQ ID NO: 41630 - DNA, 325 bp, Homo sapiens
  misc_feature (1)...(325): n = a,t,c or g
gacgtgttcccttgttcttctatggggacatggggaactcctgtactgttttattttcctgaaatatttttattgaaatataattcacataccataatacctaatccttttgaaatatactattcagtggattttagtatattcacagttgtgtaaccagcaccactatctgattttgtagcactttcatttcccctaaacccatacatatgaagcagttcctccctcccgcagcacctggaagccactaatgtcctttctgtctgngaatttgccaattttggatatttcctatanatggaatcttacngnntatggncttttg

SEQ ID NO: 41631 - DNA, 320 bp, Homo sapiens
  misc_feature (1)...(320): n = a,t,c or g
ggtgacataaaagatgtgaaggttgtcatcctgggacaggatccatatcatggacctaatcaagctcacgggctctgctttagtgttcaaaggcctgttccgcctccgcccagtttggagaacatttataaagagttgtctacagacatagaggattttgttcatcctggccatggagatttatctgggtgggccaagcaaggtgttctccttctcaacgctgtcctcacggttcgtgcccatcaagccaactctcataaggagcctgggagcagttcactgatgcagttgtgtcctggctaaatcangaactcgaatgg

SEQ ID NO: 41632 - DNA, 341 bp, Homo sapiens
gcgtttgcacagtcctgggcagggcttctaccttctgagcgcttcctcatcagtgaactgggtacacccacacggggttctcgtgttgcttaaattagcgaatgtgtgaaagatccagtgtagggtctggctcaccgcaggctcactgatggctatggcgattgtcagggtcacagggcctccgctgaaaggtgatacctggttcagggtcagttaggtctcccatcatggggccctccttttcctgacagggtcaataaactaaatgaatcgtgcccactttctgggccagcatcttaactattggtgtttggttaataccacgttgcacctgcgtggca

SEQ ID NO: 41633 - DNA, 372 bp, Homo sapiens
ggtaacagttaggtgatatagttagatatattaatatacatgcttttccagttaccttaatgaacttaactgttactatatcttcttgccacccatttaccagctcttccttaaagtgggacattgtacaggtagttgattttaaatgttacatttgtatttatccttgtttcaccctcattgtaatcttaaacttgaggtttcagagaaaccttaatatcaaccattaaacacatttaggagatgcggcctaatgaataatgagatttagaggcagatgggattgtgggttaatgtcaagtgaaggtctggaagaacaaatgtggacattaagaagtgagtaaaagattactaagcagtaaaaaaaaccaa

SEQ ID NO: 41634 - DNA, 371 bp, Homo sapiens
gcggcacgagctgctgagttgtggtctgcccatattctctgcttgatcacaatcgctggtgatctcagaggtaattagagtagagtcagttttgtctgtagcaggaactacagtgaatggccctcgattgttggccaagagatagtttgtggtcaggctgttttgggcttgccaatctaacgctgtacatgaatgataataaatgtcacacaggctaagtatggattttacatttacattagaagtgcttctttgaggccagggatttgttacttaattgttgcttctgtttacggaaaatccttttgaaagatttctgacaggttgctgagatgttgtaggaatgccataatgtgagcctagaatgagtg

SEQ ID NO: 41635 - DNA, 376 bp, Homo sapiens
  misc_feature (1)...(376): n = a,t,c or g
ggtatgcttaaagatgctatggtagaaagggaaatacaaagttaaataaagatatccaaataccattatagcatcaaacttcataataaaatgaaatcatagagagcagagatggcatccttctggttctgaatgtatgtacctgtcaacaaaagaaagccatctccatgtttccagagtcatgatgaaatcacatttcaaattgtttcaacaggtgccttatgtcaaatgcctcttcctataaaagaaactgcttgagttgttctaaacagtgcatgaaaatagcaagtgggctgagtgagcaatcacagtgaggtccttgagaggtgtaaaaaaccccagattcagattcagctttcttcnaaaaagnggggta

SEQ ID NO: 41636 - DNA, 366 bp, Homo sapiens
  misc_feature (1)...(366): n = a,t,c or g
ggatagcctctatcaactagcagatttcttattttgtgcactgttttttatcatagttgtgatcatactgttcatacagttttgactagtaaactgagaaaataatagacttcagaaaaataagaaacttaagaaaaaaatagaaactttagaaatattagaaacttcaggaaagtaaagatacttcatgaaagannnnnnnnnnnnnnnnnnnnnnnnnnnnnnnnnnnnnnnnnnnnnnnnnnnnnnnnnnnnnnnnnnnnnnnnnnnnnnnnnnnnnnnnnnnnnnnnnnnnnnnnnnnnnnnnnnnnnnnnnnnnnnnnnnnnnnnnnnnnnnnnnnnnnnnnncccagctactcgggaggc

SEQ ID NO: 41637 - DNA, 366 bp, Homo sapiens
  misc_feature (1)...(366): n = a,t,c or g
nnnnnnnnnnnnnnnnnnnnnnnnnnnnnnnnnnnnnnnnnnnnnnnnnnnnnnnnnnnnnnnnnnnnnnnnnnnnnnnnnnnnnnnnnnnnnnnnnnnnnnnnnnnnnnnnnnnnnnnnnnnnnnnnnnnnnnnnnnnnnnnnnnnnnnnnnnnnnnnnnnnnnnnnnnnnnnnnnnnnnnnnnnnnnnnnnnnnnnnnnnnnnnnnnnnnnnnnnnnnnnnnnnnnnnnnnnnntctgtgtgaaattttatgaaaacctgctggtgattcatgcccagtaaccactggatcccatccctgtggttcacccaacacctgcagcagggagaggtcagaaccaaagcctccaacataacccacagtg

SEQ ID NO: 41638 - DNA, 372 bp, Homo sapiens
  misc_feature (1)...(372): n = a,t,c or g
gatcaaatattgataatatccctttatgatcctactgatagtccatttgtaaccggttagaactttctgcatagtaactttgttttatttgaataatatggaccttctagaaaagtttgttcaaatgctactcttgatgttcagcccagtgatttaagttgttaaaacaaccataagttaagattctttctctattactaagttagtgtagacctgtagctacctaggtatcggttttagaacattcagcttctttgccagagaaatcgggttaaatctccttgatttttgnttctcattgntacacattattaacaacaaaagtacttactgaggagaggcgacatttttttttatcatgcccttaattgg

SEQ ID NO: 41639 - DNA, 332 bp, Homo sapiens
ggcacaatcaattttcataagtttagttcatatcaagatttaggaacattatctgaacaaattgctaaaaacatcacaaattaggacaaactgaaatacaagttgtacacatataacattcaaaaagcaaaagccttaaagcagtgtagataatatgtatcagtggcttcttatttcagattacattttttttaagagaacattgtaaccatgcaaagttgttgaagaatatttagggatttccttagtgtaagcataaattatggtaatttttctaaactggggtatgaagaaataatcaagttatcatacgaagaagtctaggaagaggt

SEQ ID NO: 41640 - DNA, 331 bp, Homo sapiens
ggagtggttggccaaagctgcacagcaaactggttctgggcaatgtgggccaagagccctggatttccagtggggttgaggggaggcctcagaaatgggtccgcagttgagtgaagctcagaaccccatagagtatccccaagaaagcctttttcccttggccttctgtgctgccgcaagatggaggaaggtggcaggagtctgcacgctttcctcccttccccacgaggcagcaatgaagccagaggggccacccgaaaaacaatccccgagccctgccccacaggccccagccacaggaaccagcagactgtggtgggaaagggctgtt

SEQ ID NO: 41641 - DNA, 318 bp, Homo sapiens
gagaaaatagtacacattttgaaggtcgaatgtaattgaaatattttatgatgtggttagataaaaaaaagtttttactaccttattgagtaaagtacacagaagctgaaagcaatcatgtaaatttttccctgggaattttttcttggtggatctagaaaaattcagtggtcctgaaaaatgttccctttgaacaaatcagagccactaacctatactgctttgacattcatgatcctactatggttcagaaaatcctatttttaaagcccagtttcatgtctggcagaaagatacttaagtcagggaaagacaggc

SEQ ID NO: 41642 - DNA, 248 bp, Homo sapiens
  misc_feature (1)...(248): n = a,t,c or g
ggatttgttaaataagtattagaggactaaacaaggcaaaagggaaatacagaggaaggacattgagatagtaactgtaggaagcagctttaccctctagctgagggaacaggaggagttgttggggattattagaatttanaagcctggaagtgntgccntntctagctgantntngancctctganaanaggnncctttgnacntannnnngncattncctatctgntnnncnttctnannntcta

SEQ ID NO: 41643 - DNA, 326 bp, Homo sapiens
gacagtacaagtacaacagaaatgaatccccaggtacttttccaaagggtctgatagcaatttcttttgataactacatcctggagaaaagtgattagccaaacatttggaagacttgtggacacagggtctaaattgatgtccagatgcctagaatatcatccccttctgttagagtggctgcatgtggtggccaggtaattgatggagttctgctaaaggtccagcttacagtggacccatagacctagtggactgatctagtgatattttcttagccttcgagtgagtaattggcattgacatacttggcagtgaatgctcat

SEQ ID NO: 41644 - DNA, 325 bp, Homo sapiens
ggagatatggagaagcagataaaagttgctgctttcaaagaacacagttcactaataggagactggcttggaatcatctattctataagtgaaattttgatggattattgttgaggtgcaaaggatggagcagtcagttgaatcttgctgggggaattgtaatcagaaagctccgagaatagtaaacgagagttttggaggcctaagatcttggaatcacatgtgtagaaggatatttaaggtgtgcaggctcctccatgagtagccccaatgccttgagtggaatggatgcaaaggtacggacttcttgcatccttcccaggat

SEQ ID NO: 41645 - DNA, 312 bp, Homo sapiens
gggtggggatggccctcagagggaactggctacttcctatgtgttgtggctcgctgtgacccatgaagccagggcctgggagcatcccaatcttgcaagtctgaatggcataatctcctgagacctatatgtccctggggtcatgtagtgaccggtgaggacctgctcactggggccaccaccttggcaccaggcactgcttgtgcccagccctcttctcgaatcctcctgaccctacctggacttgtccctgactccaatctgagctctgatactgagccagatacttcccctgacctggctcctctggtc

SEQ ID NO: 41646 - DNA, 313 bp, Homo sapiens
gtgaagaattaatattttgcaaagttcagtacattactaaaacaccataagtggttctttcttggtgagtatcacaaatttcaccggaggaaacacgggtggctagggccatggtcccagcctcctcatctcactggccagggctgcactcaaccagtccttcagtggcctccccttgagtggcatctcaggcttcctgcagccactgccagccttccctggcaaggcctcccaactaggggctgacagtgctgagctgtacccacggccaagaccctgtgcagtcccaggcagccctggctggagcacacaa

SEQ ID NO: 41647 - DNA, 325 bp, Homo sapiens
  misc_feature (1)...(325): n = a,t,c or g
ggaggaagattaaaaaatgaaggagaaaaaaagaaaattttagtacaaaacagcaaaaccatgtgatttcaaagcagtggttagcaaggggttataatgcagaaattatacatataaacacacctatagtcatgtgccacataacaaagttttggttaacgatggactgcatatatggtgacggtggtcccattaggttatatatannnnnnnnnnnnnnnnnnnnnnnnnnnnnnnnngagatgtcataggcattgtaacattgtagtgcaatgcattactttgtctctgtttagatatgtttagatacacaatatttaccatt

SEQ ID NO: 41648 - DNA, 314 bp, Homo sapiens
gagctttacggagcttttgctttttctgccaacttcacagattctgttacaactgggaggcacattaatgactatttgagaaggcaaacatacgggcaagtcgtggactgcctcccggagttcagccaggacacgttcatggatcttgccaattacatcttcttcaaagccaagtggaagcaccctttcagtcgctaccagacccagaagcaggaaagtttctttgtggatgagaggacttctctccaggtccccatgatgcaccaaaaggaaatgcacagattcctctatgaccaggatttggcttgcaccgt

SEQ ID NO: 41649 - DNA, 229 bp, Homo sapiens
  misc_feature (1)...(229): n = a,t,c or g
ggtattccccagcttaaaaaggagttgctgtgtctctggtcgtgtgattgttgccccaggaatgagggactcactcattctagcagagaggcagttccctaagccatctgacaaaactcctagtccattctctttcttggatcatttcccaactaaccaaggtaacgcagtctgtttttcctgtgattnttnttnnnnttcnctaaannntccnntnnnntnnttaact

SEQ ID NO: 41650 - DNA, 323 bp, Homo sapiens
gggtgaaggagctaaggcagcagattctgggcttgttttagctcttgaactctggccatgtcatccatctctgcttgatagatgaagagaaccctctggttcaaatagggaaattggtgcaaggtccaacaagggttaaaatatgaaaaggcaggtacaatttttataaaaactggaacagctaccactgaaaattaaagactgtgttttcctttgtaacttcatcccttttccttgtggtgatcagttgcaaaacaaatctttgaaaatgaagggaggggaacaaaagggccttttgtgctcgttttgggtacagtaggaag

SEQ ID NO: 41651 - DNA, 315 bp, Homo sapiens
  misc_feature (1)...(315): n = a,t,c or g
gttttacccttcagtcggcccaagaaatcaaaataaaggaaacacatttcatatactgcaggtaacaaaagtcaaagtattttatcttttcacagcaagaacagtccatgttgtatataatacaaccaacattatagaacttttagggttgtgactggctttggtgcaaatgtgtgctcaagctaataagttattgtgaaactgagtttcctttaacttacaaagctagttgccatatttctattttattttaaaaagtaacatgnnnnnnnnnnnnnnnnnnnnnnnnnnnnnnnnnnnnnnnnnnnnnnnnnn

SEQ ID NO: 41652 - DNA, 313 bp, Homo sapiens
  misc_feature (1)...(313): n = a,t,c or g
ggaggtcagagcacagcttgtccttgcaggctatgggggatatcagatgtcctgagggagagggaagccactggaagcttttttgatatataattgataagatccgactcgtggtttgtnnnnnnnnnnnnnnnnnnnnnnnnnnnnnnnnnnnnnnnnnnnnnnnnnnnnnnnnnnnnnnnnnnnnnnnnnnnnnnnnnnnnnnnnnnnnnnnnnnnnnnnnnnnnnnnnnnnnnnnnnnnnnnnnnnnnnnnnnnnnnnnnnnnnnnnnnnnnnnnnnnnnnnnnnnnnnnnnnnnnnnnnnnnnnnnnnn

SEQ ID NO: 41653 - DNA, 323 bp, Homo sapiens
  misc_feature (1)...(323): n = a,t,c or g
ggtgctttcacttatttaagcctcaacactcctgttagttggtgttattgcctccattttacacaggaggaagtgagctcagaaatggttaagtatcttggccaatatgcagctagtaagcaggtagctatgattcagaaatcattctcccaaccaagagcaaaattctcactttaccttctttgagagtattaaagcttcaaccatgtaaccagagttactggttttgtctcatagtgatttaagtgttttttttttttngnaaacagntttgtntcccaggctgnagngcaggggcccaatntnngntnanngnancctcc

SEQ ID NO: 41654 - DNA, 315 bp, Homo sapiens
gtcgggctcttaaatatgtcataccaggagctgctgctccttttttcccatctccttcatcatccatgtgtcagacatgcctcaggcctgctgggcatctgctgtttatcagtgggcccctctccacccccagcctcctgggaaagccctctgaggagtgaattattggaaacacaagcatccacagagaatacaatgcaaatattttagttcccagtttggcagaaacaggtagtgaactaactgaaggtttactcactgaaggcttgttcatagccaaaaataaaaacaaaaaataagtaacttctctgcatc

SEQ ID NO: 41655 - DNA, 342 bp, Homo sapiens
gggctcaagcaaacctcctgtcctggcctctcaaaatcctggttttacagaagggatccaccacattgcctcgccctgacatgtacatttaaatggatttaagaaggtaaattatatgttatgtttttttaaaacaattatttttttaaaaactggagacaatacaggattatgaatcttttttaaaaattaccttcaaatcacaaaagaattatctcacacaaaaggaatatatattcatcattaaacacatggtgaaaataagactatttccaaggctactaacttagacaagataaaaccaacattgaaaatgagctaagaggccaggcaaggcggctc

SEQ ID NO: 41656 - DNA, 348 bp, Homo sapiens
gtttcatttcttaacgccatatgcgatgtctattgcaggagtgattcgggaaagttacctcaaaggccacgaccagctggttcccgtcaccctcttggccattgcagtcatcctggctttcgtcatgggggccgtcttctcgggcatcaccgtctactgcgtctgtgatcatcggcgcaaagacgtggctgtggtgcagcgcaaggagaaggagctcacccactcgcgccggggctccatgagcagcgtcaccaagctcagcggcctctttggggacactcaatccaaagacccaaagccggaggccatcctcacgccactcatgcacaacggcaagctcgccactcc

SEQ ID NO: 41657 - DNA, 340 bp, Homo sapiens
  misc_feature (1)...(340): n = a,t,c or g
ggctttgggaagccagagtcaacgatgctcttaggtgtctgtcacttgtcctcagctcgcgtagaccgctcactcatgcgcttaccgggtattctaccttggagtgcatgctccctgccttcatgccctgtggtttgattttgagtcacggaactgttgttagggcacacattctgagcagtcacacagtgtcatcatgtcatcggaccactctgtgtaaatgtgcacaaggagtgttctgtatcttattcggaagactaacaagtttcccaggtgttagaatatgggccaatgaaacagctatatgcggctgggcacggnggctcatgtggtaatccca

SEQ ID NO: 41658 - DNA, 347 bp, Homo sapiens
  misc_feature (1)...(347): n = a,t,c or g
gcggaggccccactcaagtcccaggcctcatgggagctgaccctgatgcacggggactgagtcacccctgacagaacaataaggagacctcgtggcatttcccatctccacagaaaccaccaaatccatgtctgccatgatcctgctcacttcctcacccacccttccctgcaatccatccctaatgagtgctctttgaacccatccaactctctccatctctacagccctcgcccagcctcagtttcctcatttgaaagatgggaattctaacacgtgtctgagagggcttagatgagaattaagtttgcaaaactgaaagcagtgacttttgnttgtgttgctca

SEQ ID NO: 41659 - DNA, 339 bp, Homo sapiens
gccactctttaatgggtgcaaatatctgttgtaactatgtagaagatacagtgtctgggtttgaggacaggggagtgggaaaactgagtagggaagcggtaagacatgcatctggctttaggagtgtttgaagtgcctaaagatcagggtgaatttcccaaatttgaatcttgttgcccaagccacattgcaaccacctctttttctcttacctcgtccccacatccaggcactgccccattctgttcattccacctttttttttagtagaccctccatatatgtgtgtgttttggtgaatggccacacacagcaaagttatttttattgcaattttgt

SEQ ID NO: 41660 - DNA, 345 bp, Homo sapiens
  misc_feature (1)...(345): n = a,t,c or g
nnnnnnnnnnnnnnnnnnnnnnnnnnnnnnnnnnnnnnnnnnnnnnnnnnnnnnnnnnnnnnnnnnnnnnnnnnnnnnnnnnnnnnnnnnnnnnnnnnnnnnnnnnnnnnnnnnnnnnnnnnnnnnnnnnnnnnnnnnnnnnnnnnnnnnnnnnnnnnnnnnnnnnnnnnnnnnnnnnnnnnnnnnnnnnnnnnnnnnnnnnnnnnnnnnnnnnnnnnnnnnnnnnnnnnnnnnnnnnnnnnnnnnnnnnnnnnnnnnnnnnnnnnnnnnnnnnnnnnnnnnnnnnggtctttagtgcagaagaaactggacctgttatcccttgactccatgagtggcacagtg

SEQ ID NO: 41661 - DNA, 339 bp, Homo sapiens
gagtagatgggaggggaggtctttctaaacaaaaatgatatctatgtaaatatatgtagtttcaggcttgcacctgttatttcttttgttttcttttttaatggaacaacaatcgctttggctttgttttttcaacaaatgtcattttaaagttccaaatatcttgacaaccccctcccttcctttttccaagttctgggtgctgaggagaaacatcaacctccctttctgtcttccaacctgtccctctgaggcatgaccctgctgttcgcagtgggttgcgtcttcttcccgttgtgcttcactgccctgcgctggggcttgcagaaccacaccaac

SEQ ID NO: 41662 - DNA, 339 bp, Homo sapiens
gcaaaatagtctgtttacagggcagacttgataatgtcacttcctagtttggagttcttgctttccattgttaaccttggggtaaattctaaactccttagtacatagtagaaggtccctgcttaccttcttagccttatacttgcctcttttttcatagtgaactactctcatttcttcatgatgctagaccctcttgtctccttgatctcatagatgctattttctctacttggaatgcttccctattttttatatgcccatctttgcctaatttctggtttttatcctttcattctgagctttgctgtctttcaggaaaatgtttctgtttttcac

SEQ ID NO: 41663 - DNA, 341 bp, Homo sapiens
  misc_feature (1)...(341): n = a,t,c or g
gggatttgataataatgggttgtacatatttcttaataggtatctcaggccagtatagtggctaacnnnnnnnnnnnnnnnnnnnnnnnnnnnnnnnnnnnnnnnnnnnnnncattgggatttttaatgtgcagctaagattgcataccaatgctttgaacccagtccttgtcatctgtggttgtcatggctcattagcaacaattctctggtaatttgttttggtatcttatgtaaagtggtctctcccagttttcctctctctttcctttgtgacacttaacacagtgtacttttggcttggttacttgtttgtggtccttctcccctctacggtagtg

SEQ ID NO: 41664 - DNA, 347 bp, Homo sapiens
  misc_feature (1)...(347): n = a,t,c or g
gacctcatcaggtagttgtggggtttaagtcaaacaacatgtataaagggcccagatatgtgtacagtatcccttgataaatagtactgcaaattattcctacttttgtttctctccttaaagaaatccaacttccaaatgtagaactttctgttgcttaagttaatgctgagttggtaatcaataattcttttggatcacaatgttttcattagaaatgagcatcnnnnnnnnnnnnnnnnnnnnnnnnnnnnnnnnnnnnnnnnnnnnnnnnnnnnnnnnnnnnnnnnnnnnnnnnnnnnnnnnnnnnnnnnnnnnnnnnnnnnnnnnnnnnnnnnnnnnnnnnn

SEQ ID NO: 41665 - DNA, 350 bp, Homo sapiens
gcgtgtgaatatctaaaattagttgtgttcctccatactagtaattatcagctggaaatgtaaatggggaaaagtgttccatccacaggagcaattaagtacataaaatacctgagaaatatattaaaaggacaattacagaactaactgaagagatagaaaactataaaatcttattgagggacataaaaaatatctgaacaaaaagaaaggcagtagccacaatcttgcctgaaagagtttaatacacttggctgctaaaggcttatgtaaagtaaaaaaataaaataaaaggctcagtataataaatacgtaaatgtaatacaattcaaactgtagccccagtaggg

SEQ ID NO: 41666 - DNA, 348 bp, Homo sapiens
  misc_feature (1)...(348): n = a,t,c or g
gccaagtttgtttgtggatgccaatcacaatgggtttgttcctagggtaataaggtttgctttgatcatttccaagagtaagttgtaccactagatagcagaagaggtgtgcttaaaaagtatggcaaatgcatattgaggaagtagtannnnnnnnnnnnnnnnnnnnnnnnnnnnnnnnnnnnnnnnnnnnnnnnnnnnnnnnnnnnnnnnnnnnnnnnnnnnnnnnnnnnnnnnnnnnnnnnnnnnnnnnnnnnnnnnnnnnnnnnnnnnnnnnnnnnnnnnnnnnnnnnnnnnnnnnnnnnnnnnnnnnnnnnnnnnggtacttgggaggctgaggtgggagga

SEQ ID NO: 41667 - DNA, 341 bp, Homo sapiens
gacaaagatcatcgaagggggtgctgcccacaaggatgggaggttgcagattggagacaagatcctggcggtgaggactccatctagcccattttctagcccagatctgggtctcacctactagccctggcaggcccaagttcatcacttcaccccagtgcttctgtcttgggccatttgtggctttgtctgagctttgctttccttgactccaggtcaacagtgtggggctagaggacgtcatgcatgaagatgctgtggcagccctgaagaacacgtatgatgttgtctacctaaaggtggccaagcccagcaatgcctacctgagtgacagctatgct

SEQ ID NO: 41668 - DNA, 340 bp, Homo sapiens
gggaccaagtaatgtggaagttgcagtgctgaagaggccaagggatgggcacttccaagaaggaggaagtcaggaacagtgagggatgcacctgggaaagccagagaggtacgacctgaaatgtctggggtgactagtccttctcggccaggagacccgcttctcatggaaaatggcaccaggtggtctgtgtcagtcaaaattcatcctacggtgtgtgatacaaaccaaattcaaactcactgaacaaaagtgggagtttatttgcccacataactagaatgttcaaagggatcaaatcagctccagacatgacaaccaatggtacagttgatgtcat

SEQ ID NO: 41669 - DNA, 175 bp, Homo sapiens
  misc_feature (1)...(175): n = a,t,c or g
gctcttgcctttcctgtaaaattcactctcactaaggtgttgatgacttaatggcttacctttccctgcacatgtgcattttaagaaagcctaaagtgaanaaggggaaagtgtggctaggccctttacnaancnnnnancttcctcccctatnctnccccttnctnactcttat

SEQ ID NO: 41670 - DNA, 329 bp, Homo sapiens
gcaccacgcccggccgacaacagtgattttaaatggatttgtgtttaacagtaaaaaacaattatttcacagtatccaaaaagaagaatatctgagacttgggtgaggggaaaaccagctgtataaactgagagctgtaccttgttcctgtatggaagtatggaatatgggaaagatattagttatttttaaactgatttttattactagaccaattaaaatcccactgtgaaaaataagccataattttgactataaaatgaaaataattgaggaattgtcatatcaatattaaaatatactttaaggctaaaataatcaaaacaatt

SEQ ID NO: 41671 - DNA, 329 bp, Homo sapiens
gtttggctatgttgtgtgtgtgtgactgacagacagagagagaaaggaggagttagtatggggaagtgatacagtgaagaagtaagacattgaaccatgaaacagaggagctgccctgacttgtggccttgggagagttcctgaacctcatcaagtctcaatttgcccatctagaaagcggaaataacattatcagccctaatgggttataatgattaggaaaaacaccttagtgccaactcaggagcccacaatctgtggcagtcagctggagtgtgatttccagctgtcttaactctctaggcctcagttctatcttttaaaaataa

SEQ ID NO: 41672 - DNA, 333 bp, Homo sapiens
  misc_feature (1)...(333): n = a,t,c or g
gactttggaagatgtgtttggaaaaaaattctaggttaaatgaagaaaggttagtcttttcaaaaaatggtgctggaatactctattcatatgcaaaaaagttgagccttgacacttacagatttgcaaaaattaactttgaatggatcacagacttaaatgtaagagaaaaaactaaaaacttctaaaaggaaacataaaagaaaatatttgtgatcttgggttaggcaaagatttttnnnnnnnnnnnnnnnnnnnnnnnnnnnnnnnnnnnnnnnnnnnnnnnnnnnnnnnnnnnnnnnnnnnnnnnnnnnnnnnnnnnnnnnnnnnnnn

SEQ ID NO: 41673 - DNA, 333 bp, Homo sapiens
gataatgttatttgggaatttcttcatttgagaaaatataagtggcctcaccctctctcagtttctgagaggccctggttagacattcactgtagtgggtaatttaggcatagcaatacgaaattaaacaattttatgagagtaccattcacagtgtataattgttgggggaggggtgggcagtgtatactttctttggtaatacagttcccccaagacttaataagctatctgttatttcctagacacagttctcaaagtgctttatttctttgccttatttattttcttcctagacctcgtactttccccgcccctttctcttaacttaat

SEQ ID NO: 41674 - DNA, 336 bp, Homo sapiens
  misc_feature (1)...(336): n = a,t,c or g
gcatgagcctcactcctgcagcatgaactattgttgttgttagttcttgttattgtagggggctgggctgtaggattggaggtatgaagatgcccatccaataaggtttgtggacatttgggcaggtgagggagtacagctggggtcatttttaggaattctgtcttgggctttaaaatggctagtctnnnnnnnnnnnnnnnnnnnnnnnnnnnnnnnnnnnnnnnnnnnnnnnnnnnnnnnnnnnnnnnnnnnnnnnnnnnnnnnnnnnnnnnnnnnnnnnnnnnnnnnnnnnnnnnnnnnnnnnnnnnnnnnnntacatatatatatatatat

SEQ ID NO: 41675 - DNA, 336 bp, Homo sapiens
  misc_feature (1)...(336): n = a,t,c or g
gattgatgtatggatttgatcctgtcatcatgatagcagctggttatcatgcaggcttgtttgtgtggttgctttatagtgtctcactggtctgtgtacttaagtatgtttttgtagtgactggtctnnnnnnnnnnnnnnnnnnnnnnnnnnnnnnnnnnnnnnnnnnnnnnnnnnnnnnnnnnnnnnnnnnnnnnnnnnnnnnnnnnnnnnnnnnnnnnnnnnnnttctgtcannnnnnnnnnnnnnnnnnnnnnnnnnnnnnnnnnnnnnnnnnnnnnnnnnnnnnnnnnnnnnnnnnnggccgggcaaggtggctcatacctgtaatcctag

SEQ ID NO: 41676 - DNA, 338 bp, Homo sapiens
gggagatggagagaggtgagcactatgaggacttcacctacaacccagagatggaggatgaatgttcctagcaatttcaagtaagtaggagaagaaagcaaaggttctctgagagcccatgactcttcttaggaagacttagtaataataacaacaatagtaataataatattgatcattcatcaagcacttgccaagagtcaggcactatcctaacattaccctttggttcaggcactattattttttccattttacaaaggagtaaattaagactcagagagattaaatgacagagccgggttctaacacaggccgagctgcatgcaacacctatg

SEQ ID NO: 41677 - DNA, 343 bp, Homo sapiens
gtgccaaatggggacagtggtgtcatccacactattggctgtgaaaagtccttaatacagtgcttgacaccttgcaaatgttagatatatgctgcttgtaactgtatttgaacctttttgagactttgccaatttcctgataaaaccaagaatattgaggatgtagcaatgaatgctccaggtggcactatttggtgggtgaaatttaaaccttacatatccttgaagtatgctttttgtgattattaaaagcattttaaaaataagtattagagtttttacttagatgtttgaaaaagaattctgtcatcaaagtgtatgagagttgacaagtgtaaatatg

SEQ ID NO: 41678 - DNA, 339 bp, Homo sapiens
  misc_feature (1)...(339): n = a,t,c or g
gcaggctcaagccatccttgcacctcagcctctggaacaagtaggatcacagacgtgcgccatcacacacagctaacnnnnnnnnnnnnnnnnnnnnnnnnnnnnnnnnnnnnnnnnnnnnnnnnnnnnnnnnnnnnnnnnnnnnnnnnnnnnnnnnnnnnnnnnnnnnnnnnnnnnnnnnnnnnagccaccatgacccactgtgcctggcctacctctgtttcttaaagtcatctgtgccatttgatgtaacctgatcacaaagtcactgtcccatcatattcatagtttatgcctgtgttcaaagggaagggtatgaacatcagggaaagggaatct

SEQ ID NO: 41679 - DNA, 350 bp, Homo sapiens
  misc_feature (1)...(350): n = a,t,c or g
ggagagagctagcttcaataccctgaaaataaaactctctggttgaggcaacaccataggatacctgataatgttccattaatcagaccttaagctacttacctgacctttccatcttgattttnaaanncnngaattgganacatgncgngggtnantatttgtccntagcttaattnatatatatnanctgntnctnngtgnnagntntagntntaagaataantntattttcttnnatganatctgntgnngatnngtancattnnantactannntntatagcnanannnncgnaatannngttnatagcnttnntanaangaatncntcncngtantgnntactg

SEQ ID NO: 41680 - DNA, 353 bp, Homo sapiens
  misc_feature (1)...(353): n = a,t,c or g
gaactgtgtgaagaaaacaaggctgtacagaagtttctgaacagcaaagtgatatgaaaatgaggaaaccaggctgattgaacttaccttggtatgcagaatgtttccaaagaggttaattgaaatcnggtatggnactatggctntngtntantatgantntnncnnntntttctcnntnngntctncttcttctntnctntcttncttgnttnctgntatcnccttctnngttncnctcttcgntttcnntnnntnngnttngttncttnntcctcnctnntggtttntcttnnttnttttcttatnannctntnnnnnntgntnctttngtctngttntcnctttcctcc

SEQ ID NO: 41681 - DNA, 324 bp, Homo sapiens
  misc_feature (1)...(324): n = a,t,c or g
gtaaaaaactgcttccagacatcggacaataggcagtacaggagctgagcgaaaggaaatgagctgtgtaattcctcctgctttttcctgtagacactctctgcaccgtgttttaggaagggaacacccgtgcagagcatcttggtcttgctgagtcgaggagactggacttggggaaggtttatctggctggaatttgcaggtgggattgacagagagagggagctaggcagagaaataaacaccagaaacttatggggggggctntgnnnganantaccnnnnaatgccnnanactttanctgnnnaatnncnnacttatgg

SEQ ID NO: 41682 - DNA, 226 bp, Homo sapiens
  misc_feature (1)...(226): n = a,t,c or g
gggcctctcctatctaagtgtctcttctgcagcagcttttgctagatcatgtgtagacagcttgcagccagcttcttgtccttcttgtatcccacatcctgatttgcatgaggtagagtcggtgaaaatgcaacacacacaagatttggaacagaataatttcattgtgccaatctttgccttttatttcttaagtcatatttcttttttttttnnttgaaacaaa

SEQ ID NO: 41683 - DNA, 287 bp, Homo sapiens
  misc_feature (1)...(287): n = a,t,c or g
gagcacctctgtgaacttgacttcagatggccaggttttaggtaagcatggccttgcctggaggggaggacataaatcggttgctctggagggcccccgaaaaccccagggaacagcctgtcacatgttgtctccctcctttgtcaggaggttctcactgcgctggccctgtcagcaggggtcttgtttcccagctccacatctcagacttcaccccttctctcactcccaagtccatggtcagtgctaagtttgnggaattgantcannnnnnnntnccntncttg

SEQ ID NO: 41684 - DNA, 327 bp, Homo sapiens
  misc_feature (1)...(327): n = a,t,c or g
gcccatatgctttnnnnnnnnnnnnnnnnnnnnnnnnnnnnnnnnnnnnnnnnnnnnnnnnnnnnnnnnnnnaatgttatatttttaacttatattattttttattgttccttcactggtttttaaataatatttttgaatcatggttggttgagttagcagatgcagaacccaaggatatagagtataaactctgcaaacatccattgggaagacttagatttgagccttagtggatgacctggggcaaggtacttcacccttggtttcttaatttttaaaatgcanaaaataatatttttcagagtanttatgagcagnanaaac

SEQ ID NO: 41685 - DNA, 247 bp, Homo sapiens
  misc_feature (1)...(247): n = a,t,c or g
ggcagggccttataggactttggctttttactctgggcaagaaggaaaccttgggagagcttcaagcagaggagcgaaatgatctgatgcaggttatgaaaggatccccctggcagtggcacagagtatggcccctgacctgtgtggatggggcagaagcataaggctggccatttgcattccacaaatgacctcagtgtgagggatgnncnanatcatatactaatgcncttgctgantatnggta

SEQ ID NO: 41686 - DNA, 316 bp, Homo sapiens
ggagagatgacaatggcattgttctgctgggtgagagagctgccaagtgccgagcatatgccaaagcactacactacaaagaactggagttccagaaaggccccacccctgccattctagaatctctcatcagcattaataataagctacagcagccggaggcagcggccggagtgttagaatatgccatgaaacactttggagagctggagatccaggctacctggtatgagaaactgcacgagtgggaggatgcccttgtggcctatgacaagaaaatggacaccaacaaggacgacccagagctgatgctggg

SEQ ID NO: 41687 - DNA, 315 bp, Homo sapiens
  misc_feature (1)...(315): n = a,t,c or g
gnnnnnnnnnnnnnnnnnnnnnnnnnnnnnnnnnnnnnnnnnnnnnnnnnnnnnnnnnnnnnnnnnnnnnnnnnnnnnnnnnnnnnnnnnnnnnnnnnnnnnnnnnnnnnnnnnnnnnnnnnnnnnnnnnnnnnnnnnnnnnnnnnnnnnnnnnnnnnnnnnnnnnnnnnnnnnnnnnnnnnnnnnnnnnnnnnnnnnnnnnnctacttcacagggttattaggaagattaaatatgttagcatctgtaaagtattaggacaatacttggcacatattaagctttgtatcagtgttaactgtcaatattgntacc

SEQ ID NO: 41688 - DNA, 296 bp, Homo sapiens
  misc_feature (1)...(296): n = a,t,c or g
gattgaacagaccatcctttcaccactatcaccttccttataaatcaggcaaccatatatatgcatctagttttttttcttgtttattctggtaaaatatacacatctgtcatattaaccnttngnnngcatatnggncannggnactcacngncactgncattgaagnccngganctnatnccntccntgtcttcatanacctcctangnctannnacgagatccatgctgnacgtnncattngcngcttggangatncagactaactctgngctngnatnanantnctagatgg

SEQ ID NO: 41689 - DNA, 316 bp, Homo sapiens
ggctgtgagaagatgaccaggggtcctgtgtatacaaaggctagatgtgacatgcttctagttacctagcaaggggactgtcagctcttctagccatcccacaagcagggtgagtgaagccctggtgctggccagcatggacactggagctgcaggggaaggcaaggagctcattcctcccctgtcttcttaaagcctcctaggcctaaagacaagatccatgctgtacgtggcatttgcagtcttggaggatgcaaaataactctgagcttggattatatttctagatggttacagttcagaatttcataacagt

SEQ ID NO: 41690 - DNA, 327 bp, Homo sapiens
  misc_feature (1)...(327): n = a,t,c or g
gagcaaacaagggccaagaccatctgagccagccccacatctagaactcccagaccctggacttagccaccagagagctacattttaaaggctgtcttggcaaaaatactccatttgggaactcactgccttataaaggctttcatgatgttttcagaagttggccactgagagtgtaattttcagccttttatatcactaaaataagatcatgttttaattgtganaancagnnccgancacagtggntnangcctgtantaccgtnntcttagangtnnnncnngnntatanntgangttnggntncngngantntttggtgtgg

SEQ ID NO: 41691 - DNA, 343 bp, Homo sapiens
  misc_feature (1)...(343): n = a,t,c or g
gctggaagatcagggaaggtggtgaaatcttcaccaaggccaatgattgcacaacacataacttcttgaagcacttttttccacctgctcaaacactaaacataaggagtgtttcaaattacttgaggattcaccaatccctaactttcccttcctaaaagttcttccagagtttctgtcagaaattccttttangaanactccntagaatttcaggagtgnnatcntnatanctggnganacccctntctntatttattcnaaangtngngtatctnatnnttctnacanctnttgtntattcttnatntttttttatcntatattatntttttttatttta

SEQ ID NO: 41692 - DNA, 312 bp, Homo sapiens
  misc_feature (1)...(312): n = a,t,c or g
gatcttcaataggctgatgactgacaggtcaaatattttcctctccccatataattgcttggccttttccattgcctttgttactgtttctcttgaaaactgggagnnnntttgcnangnctntttaacnttccntcnaaaaanccnancantcgaactccngnnatnanntnntntnntatnananntacntanatcntatnntttgntccannttttttacntntcttcnttcttctnnttgntgtnatcatntnttnaanncnttgtnataancctncccacttttntcnntnnatnntaactncatct

SEQ ID NO: 41693 - DNA, 274 bp, Homo sapiens
  misc_feature (1)...(274): n = a,t,c or g
gccatgctgctggatggagctgagaatgctgatgatagaagctcagagcccagctttgagggacctccaaggtccctaaagttcacaccctctaccacgctcaccttccttcttcatcgcttccactacgtgctcttccagttctgattgagtccntctcatgatgggggacncactccttaccaacatcatcacttccattcttangcaatgagaacattcttccttatatccgntanaantnnnntnnnnnnnnntnntnnntnntnnctta

SEQ ID NO: 41694 - DNA, 141 bp, Homo sapiens
  misc_feature (1)...(141): n = a,t,c or g
ggggaaatactacaggagaagacagtgcagtgctgctgctgctgttttttttgtttgtttgtttgttttttgatatggnntcttntgnnacatccnngctgcttncnntggtncnatgtcnttttnttnnntnctnctctt

SEQ ID NO: 41695 - DNA, 342 bp, Homo sapiens
gaatgaggctcacgacgggacgaactcaactcaaagaccagttctgttgactgtgggcatcttgtgttgtttactcccatgatgactaagggtgtcatcatgaccatcaccatgttcattaaacactcagttcattaaacacccacctgtgcaaggtgtggtgctgagtaggggaaaaagaagtaaagcagaaacaggctattccctgctgggtgtgtagccaaatgtagatgctatctttgaggcatacacattggaaagatgaaacaaacttcagaagctttgaaacagacctcagaagcttgagtagagtatttgcactgtgtaggtgtgtcccaggta

SEQ ID NO: 41696 - DNA, 170 bp, Homo sapiens
ggagccttctctgcctacaccagtgaagctgagagacgtgactttgaacactttctgccaggaggataagtttccaggttcaaatacacatgatctactgaaatgaggaaatgtataccagaagaaatgaacaaattcaggaaaaaatatccatgagtaagggggtgatt

SEQ ID NO: 41697 - DNA, 330 bp, Homo sapiens
  misc_feature (1)...(330): n = a,t,c or g
gagtgatactgcccctggggtgtcctaaccccttggttgtgcagggactggtagcttggatgacatggctcagagtcccagcatccacttgaaacctccctctccacctccccgcccccgagagctacagcgtgtgatggaatcagtgaccggccaggttagcctctcccctcttggcctcctttcccacacgggcagatcatcagccttcatgttcttgtggacctgtctgttacggagtcacactggcccctgccccagccagaggtgactcagtgcctcaggatcttatggctccttcctccaactgngggactcttaaaggggctg

SEQ ID NO: 41698 - DNA, 296 bp, Homo sapiens
  misc_feature (1)...(296): n = a,t,c or g
gagtgtacctttgatatcctagcttgtttatgttaaactcttgtgcttccaagaaaaagtaagtgatctcttccgacctggaaaacatagcattgtttctgctaggtcactctgtactcatgaaaaccaggcccacttcaggttanaancagaaccaaggaatcctggnttgcattttntatannnggtantnntcnaaactangtaccnatggnangttanctncttaantnngaanncttntanattgggccctangntatgagagtttnnnannacatnttntctcntctatg

SEQ ID NO: 41699 - DNA, 302 bp, Homo sapiens
  misc_feature (1)...(302): n = a,t,c or g
gctccatctcaaaaaaaaagcatgtcacatttaaatgatgtagaatcagaatgacattaaatttctaaacagtgacagtgaaagcttgaagacagtaataccatccatgataccatcatgattttcaccctcaagaactattaacagtcaagctctcaattgtgttagcttagaattaagaaatttcttaattctaggcatgcagagtcacaagatttacctactggttatcttttgtccaggnanatatgctncccagagctagggaanggngcnnanatttagannacccatngnatctg

SEQ ID NO: 41700 - DNA, 310 bp, Homo sapiens
  misc_feature (1)...(310): n = a,t,c or g
ggtgcttaaattgatctcatttgtgtgtgactcattttttgctggccagcacctgcagtccccaataccaatacccccctaatcctggggtacattccttgcctgaaactagaaaactgtctagtttgctctagcgcccccctactctagagagggtgacaagtccttttaacattgggtnntnctncanatanntnccttaacataannnnnntaatgntnttatncangnntntnncnactntctctttttannaagancntnnanatatnntnttntnnctntgcntntnnttaatnataagttttc

SEQ ID NO: 41701 - DNA, 265 bp, Homo sapiens
  misc_feature (1)...(265): n = a,t,c or g
ggaatatacaagagttttgctgaaatcccatgtattatcactgtaagggctcagtgatgattattaccacattctgatagtgtttcaattaaagcatgttaactggtagactcgcatgtgtttgttacattcttagtcacgtaagtattggtttcctccagcatctccatcctntnctgancacttgcctgcaacacccgnggaatctncancccanaggntnntanctnnnatngaagannntnnnnnnnntatnnnnnnttag

SEQ ID NO: 41702 - DNA, 256 bp, Homo sapiens
  misc_feature (1)...(256): n = a,t,c or g
gtagcatttgtcaggtactctgtattttacctagaattcttagccttataacaccctgtaaagtagctattattcctgttttgcaggtaagtactctgaagctcaacaagtttaagtaatttatctagggtcaaaaaactgaaaaaaagaatccaaggatgggcnnnnnnnnnnnnnnnnnnnnnnnnnnnnnnnnnnnnnnnnnnnnnnnnnnnnnnnnnnnnnnnnnngnganagnnannnntcnngnnggttc

SEQ ID NO: 41703 - DNA, 330 bp, Homo sapiens
gtggcctaggagaattgaaaaaactgttggagacacacattcataatcagggtcttgcagccattgaaaagtgtggagaagctgctttaaatgaccccaaaatgtatgtacagacagtgcttgatgttcataaaaaatacaatgccctggtaatgtctgcattcaacaatgacgctggctttgtggctgctcttgataaggcttgtggtcgcttcataaacaacaacgcggttaccaagatggcccaatcatccagtaaatcccctgagttgctggctcgatactgtgactccttgttgaagaaaagttccaagaacccagaggaggcag

SEQ ID NO: 41704 - DNA, 329 bp, Homo sapiens
gcttttctgagatgatctgtttcattcccagtagataactttactagtaagtaaagattagaggatatgttaagaaaacagtttaagatagaacagaacccatagagtgggatcagtatacaaaaacatatactctggctttatcagctcccatccacagacaacacactcagcttctgcctcctcctgggtcgggacctctctggatagcccaggctggcctgtctgtcatttctttctgtggtggtcagctttacactggctataaactgctgctgctctgagacctaccctttgaaaacttacttaagaggcctttattagggcaa

SEQ ID NO: 41705 - DNA, 149 bp, Homo sapiens
gggaataacgaggcattatgtctgcaaaaagactccaatagttcacaaaaaaattataaacacacacacgcacatacacataccatgtagcattctaatttttagaaccagaaatgagcttttaaaaagtcaccataggctgggtgtgg

SEQ ID NO: 41706 - DNA, 213 bp, Homo sapiens
  misc_feature (1)...(213): n = a,t,c or g
ggtagaattctccagtttaagtgtagacaactcctattttacaaatttgtagaaattatttactagaagcttcctggcaaatagtccctttagctacttctccagtgcagtataaattgtaacataaaactttatgtgatataggaatagtgncantgacacagtttanagacctntatatnnncaatnatntncanagcntanttnnccatg

SEQ ID NO: 41707 - DNA, 288 bp, Homo sapiens
  misc_feature (1)...(288): n = a,t,c or g
ggtactacactcctgtgctggctaaagctgttgatggatatgtgaaaccacagatcaagcaagtggtccctgagtttgtgaatgcatctgcagatgctgggggcagcagcgccacgtacatggaccaggccccctccccagctgtgtgcccccaggctccctataacatgtacccacagaaccctgaccatgtactcgatcaggatggagaattcgacctggatgagaccatggatgtggccangcacgtggaggaactnttacgccgaccaanggacagnnttgact

SEQ ID NO: 41708 - DNA, 342 bp, Homo sapiens
  misc_feature (1)...(342): n = a,t,c or g
gtaaagactttttttaaannnnnnnnnnnnnnnnnnnnnnnnnnnnnnnnnnnnnnnnnnnnatatacaatttaatggcttttagtacatgctcaagcttggtcaaccatcctcactatttaattttataatattttccncatccnananaanannccntgcnttnnncatnntatcantntttancccatccanaattaaccntnctnnattnnccttaatttattaacctctntttnttttcctnnnncncttcaacccttntttcnnttttctattttttccntnattnnctanccnncnttttttnctancttttctnctttatantcntccttttgc

SEQ ID NO: 41709 - DNA, 198 bp, Homo sapiens
  misc_feature (1)...(198): n = a,t,c or g
gcacagaggcttcctctgtgcctcgccctgtgcaaattctgagactgttacggctccatggggagacaggccattgcaatccagcacgcccagtgctgcaatcaaggggacagggcgctgacggtcagcaggtcagacagggagcctgcaggtggcaggcaggncactcccattgggatagtcnnaananagtttggc

SEQ ID NO: 41710 - DNA, 346 bp, Homo sapiens
gagagttctgagtgtacaaatgtatattaaatagtaatgcacatgatttgaaattagggattatttgttatcttacttttgggaggttacataaccttgaggaacctcttgtttcctcatccgttaaaaagagataatagcgatacctatcctacatgggtgttttgaagatattaaagaggtgacataccaaaaaatgcattttaagttgaaaattgttatataagtgttagtcatgtcacacatgtgcctttctgcaattgaatttaaaatgaataattttacctagtttggggaacttactatttgatagagcactggtagtgttttgctgtaaaggagagca

SEQ ID NO: 41711 - DNA, 347 bp, Homo sapiens
  misc_feature (1)...(347): n = a,t,c or g
gacacagatgaatctcagaagtccagacctggnnnnnnnnnnnnnnnnnnnnnnnnnnnnnnnnnnnnnnnnnnnnnnnnnnnnnnnnnnnnnnnnnnnnnnnnnnnnnnnnnnnnnnnnnnnnnnnnnnnnnnnnnnnnnnnnnnnnnnnnnnnnnnnnnnnnnnnnnnnnnnnnnnnnnnnnnnnnnnnnnnnnnnnnnnnnnnnnnnnnnnnnnnnnnnnnnnnnnngagnnnnnnnnnnnnnnnnnnnnnnnnnnnnnnnnnnnnntccagcctgggctagagcgagactcctctcaaaaaaacaaaaggccagaccccacctcaatgtccacacacagaaaa

SEQ ID NO: 41712 - DNA, 334 bp, Homo sapiens
  misc_feature (1)...(334): n = a,t,c or g
gcctgaatttgaaataaataaccatggggtccaggacagaaaggaaaaaaagtaaatccagcaaaggggaacagatttcttttttaaaaaaatttttatttatttttttgagatggagtttcgctcggtgcccaggctnnnnnnnnnnnnnnnnnnnnnnnnnnnnnnnnnnnnnnnnnnnnnnnnnnnnnnnnnnnnnnnnnnnnnnnnnnnnnnnnnnnnnnnnnnnnnnnnnnnnnnnnnnnnnnnnnnnnnnnnnnnnnnnnncnntngacngnnnntnntcnntgngnntcccnttgcncnnnatcntttcnnnnttcnntgtcngcct

SEQ ID NO: 41713 - DNA, 345 bp, Homo sapiens
gaggagctcgtgccgtggcccacagcccacagcccacagccatgggctgggacctgacggtgaagatgctggcgggcaacgaattccaggtgtccctgagcagctccatgtcggtgtcagagctgaaggcgcagatcacccagaagatcggcgtgcacgccttccagcagcgtctggctgtccacccgagcggtgtggcgctgcaggacagggtcccccttgccagccagggcctgggccccggcagcacggtcctgctggtggtggacaaatgcgacgaacctctgaacatcctggtgaggaataacaagggccgcagcagcacctacgaggtgcggctgacgc

SEQ ID NO: 41714 - DNA, 336 bp, Homo sapiens
gggcaaacaagatttcatggtgggaatgtgactagaactggatttcaaagtttcttgaaagcactagttagaaaagacaaggtacactgatctgcacacaggaggtgctcagcgacgccagcactgatgggctcctcctgccttgagtgaagagcatctgcccctggacagtgaacaaaaggtggggccattttatgcctccaacaagacatctggctcaaactcaacttcaaagattagagtaaaaacgaaacttccattccaaactacttatctttattttggcaactggaacaatctgtaattgaacactaaattctattactaacttttatc

SEQ ID NO: 41715 - DNA, 335 bp, Homo sapiens
gaaaatttctgaagccaggtaggtatgtggtgttctctgataggaaggctttggcctgtgctggctcttggggagatggaggtgccctcctgccgtaggaaaggtcaacccctcttagtacaatggaggggattcacagcttgtctttgcaagtgacacctccttcctgcaccctccttttccgttttcacatctcttctgcttccctctctagattacaatattccctttcatttggatatcacttcgtctttagcaaagcacttgtactcccattatctcattgaaccctctggcaagtctatagacttaggacagtagtggtaggtagcaga

SEQ ID NO: 41716 - DNA, 324 bp, Homo sapiens
  misc_feature (1)...(324): n = a,t,c or g
ggaacataattgtacatggctcttcaggttataaggattacatgagttaacatatgcaaagtacctggcacttgttaggctttccataaggattagctgtaataattattattacttctatttttaactctttaacatgttgttctctataggatgacctgacccatgaaacaaatttttctcaattttattatcaagaattgtggtgctgcttctgatttggtgtngatgntgnccngntcntgacctcnacaccnnntnctgcnttcgcnntancntcnaatngnncngngngnnnnnannnnggngntaatacctnagtta

SEQ ID NO: 41717 - DNA, 318 bp, Homo sapiens
  misc_feature (1)...(318): n = a,t,c or g
gtgaaagtagatatttgattccttaattttgtgatctttttagtagcttgtcatctcatgtaccaccaaatctttatttcatcataaggccatcttaaaggtaaaaaacatgtgtggaaggtttttttgttattgttgctggntttttcttgtntgtntttagantnttaactatcaatatanaccagtnnctnagtnntnttnnngcatgnaantccnnanactnntntncacccgannccnnccatgggtcaantatccgnntatnttcnctttntgnntttgcntaanccccntnngtctcgnnctnnnctgtgt

SEQ ID NO: 41718 - DNA, 438 bp, Homo sapiens
  misc_feature (1)...(438): n = a,t,c or g
ctttgnnnnnnnnnnnnnnnnnnnnnnnnnnnnnnnnnnnnnnnnnnnnnnnnnnnnnnnnnnnnnnnnnnngaattcggcccnagctntntttaattcggcacgagcgnnnnnnnnnnnnnnnnnnnnnnnnnnnnnnnnnnnnnnnnnnnnnnnnnnnnnnnnnagtatatgtctttttaatatgtgaaaaaatgggaaatacaaagcacttttgctgcataaggaagcagtatcgtgtaattgaggaagagcacttgggtgatggagttgtttgctgaagtagtttgatttcatagaatatcgctttactggaaacagtgacaaactatgattattcatttagacttggatatttggcagacattttcttaaaagatgatcctgcacttcgaggaaaacnnattacncatnttattaatgtangaattngncttt

SEQ ID NO: 41719 - DNA, 265 bp, Homo sapiens
  misc_feature (1)...(265): n = a,t,c or g
ggtcattcataccctaccccatccccaacaactttgcgtagagaatacctcagatttgtttacctcagggaatacttaattgggctatgctatacaggataataaatacacaggctgctacttcagactagtcaattacaatttgatttatggataatcatattacgaaatatctttgaaaatctattgagaagtccccacataatgtctttaaaacccaggaaatttttgggggtgggagtcttgggttgggntnttntnaccc

SEQ ID NO: 41720 - DNA, 345 bp, Homo sapiens
  misc_feature (1)...(345): n = a,t,c or g
gatcttttatgttacaagtaacaaaagcaacaactcgcacttaccaagtcaaggccttgataggctcatataaacagaggctcagaggttgggtaggtttcagaatttcctcaatccatcagctccagctccattcaccagagtgttctggaccttgtcctattcagtgcatggacagtgtatggaaagcgtatgtcctattcagtttgctcttgctgcaggccggcctctctgttggtagcaaggtgactgaggccccacatctgcataccagccagtccaggaaaggaaagaccatctggtggtatgcccggtantggtgaaagggtgngantnctttctccc

SEQ ID NO: 41721 - DNA, 347 bp, Homo sapiens
  misc_feature (1)...(347): n = a,t,c or g
ggggtgcagtgagccgtgattgcaccagctggnnnnnnnnnnnnnnnnnnnnnnnnnnnnnnnnnnnnnnnnnnnnnnnnnnnnnnnnnnnntggtgaaaatggtgaatttcagttatgtgagttgtatttaaaaaataatggcatttagaaagactttcagaaatgtgtactttatgtcttggacatgagaaggtggtttagctagagtggagtctttgtaagggggagcggtggatgctaagggtgggaaaaggtttggctagatattgaaagatattgactggctaaggagtttagcagctataaatatagcaccatatactccatgaggaagaaggaaactca

SEQ ID NO: 41722 - DNA, 363 bp, Homo sapiens
  misc_feature (1)...(363): n = a,t,c or g
gcggcacgagctcacccacacacacacacacacacacacgtcttagatgaaaaaaactactttttttcttcttgtcacatttgcaagtttacatataaaacactagctaagaggttagttagaaggagcaacaaagacctgattctttcatttattttaggctatgtcaaaaaggaagtattaagaccatagatatattattagaaaacccatttctgccatctccttagccctcccgcttaagacacgctgcagtctagatcagccatgtactaacaatggttaaaactaggtagttcatggncgtctctactctgctttctatactctgacattttccataatttttaaaaaatgaagaga

SEQ ID NO: 41723 - DNA, 361 bp, Homo sapiens
  misc_feature (1)...(361): n = a,t,c or g
gggctggtggaaggacaaggggaccttcatgttaaggaattattgagtcactgaattcagtggtcatttttctctgtcttttttaatctcttggcttctgtgcactgtactttagtgtttttgttttacctcactgttaatttcttctttcttcattgttatccttttcttctctgcccttggggtgccctaaggcttggtgctcagccccttcttttctgtttatcctgtctcctcagcccccaaatgtaaattctttctgtttgctgatatctcctaaatatgtagctatangggntgacttttcctttgatcaggtgcttctatccagttggctattggacaactctacttaattgtc

SEQ ID NO: 41724 - DNA, 344 bp, Homo sapiens
  misc_feature (1)...(344): n = a,t,c or g
ggtaaaatttcttaagtgctttgttctgataaacggatgtaaaagtaacaaaaaaggaataacaactaatatggcctgtggatctgacaaagaaaaacctgaagaaattcagaatctagatacacttagattctaaattagacacactcagattctaatgaacacttagaatgcttcgccagtggcttttcaagttacactggaagcttgattatgagaaagttttgttttcattggcaagagggtagatgatcagtgatgacagattgtacagctgtgcccaaacctgacaacttacacattaaactcctgtaagagacactccttcctagtanaacaaggac

SEQ ID NO: 41725 - DNA, 254 bp, Homo sapiens
  misc_feature (1)...(254): n = a,t,c or g
ggtatagcagcagctagcatttattgtgcaccaactgaatgccaaatattgtcctgtgggctttggatggtttaattcactaaccatcatggcagtcctctgagataggtgctcttctgctcttcttcctatagatggggaaactgaggcacagaggggggaagtcacctgcccagggttgctcaactagtgagccaaggagcctggattcacaccagcatccagctttctctggaataccatggaggntggtg

SEQ ID NO: 41726 - DNA, 362 bp, Homo sapiens
  misc_feature (1)...(362): n = a,t,c or g
gggacaactgtatagtcacatgaaaaaaaatttggtccatttttcctattatacataaggataaacaccaaatggatctatgctctaaatgttaaaaatgaattaagtacaaggactggggggaaatgggctaattttgctagaactttggagtggtaaaagtattcctaattatgattcaaaatccagaagcagtaagaataaaagttgataaatatgacttgtgaaaaaaaatgttggacagcnnnnnnnnnnnnnnnnnnnnnnnnnnnnnnnnnnnnnnnnnnnnnnnnnnnnnnnnnnnnnnnnnnnnnnnnnnnnnnnnnnnnnnnnnnnnnnnnnnnnnnnnnnnnnnnnnnnnn

SEQ ID NO: 41727 - DNA, 344 bp, Homo sapiens
  misc_feature (1)...(344): n = a,t,c or g
gggactctgttcctggcctctccagctcctggtggccatcggtgcctgggctcgtggccgcatcactccagtgtcggcctccatcctcccgtggccctctcccctgtggcttctcttccatctcttgtaagacacttggcattggttctaggccccctactgggtaatctaggatgatctcatctcaagatccttgtgttaattacacctgcaaagaccctttttccaaataagataccaattatgggttccagggaattgntcatanacatatcttttggggacctccattcaacccactacagnctgcctctggccctcnnaacttacatntgcccacttca

SEQ ID NO: 41728 - DNA, 354 bp, Homo sapiens
  misc_feature (1)...(354): n = a,t,c or g
gcattcaaattgtctgtgggcctgaattttcatggccatgggacaaagaaccccatccttagctaaaccaagaaaaagtcctgcaacaatgggggtggattcctcatgaatgacttgggccatctccttagtgaaatctggtcatttaaaagtgtgtggcacatccccacccccgctcactgtggtnnnnnnnnnnnnnnnnnnnnnnnnnnnnnnnnnnnnnnnnnnnnnnnnnnnnnnnnnnnnnnnnnnnnnnnnnnnagatgctgctnnnnnnnnnnnnnnnnnnnnnnnnnnnnnnnnnnnnnnnnnnnnnnnnnnnnnnnnnnnnnnnnnnnnnnnnnnnnnnnnnnc

SEQ ID NO: 41729 - DNA, 352 bp, Homo sapiens
ggttagttttccccagggctcacttcttagcccctttctcctcatgtcttataatttgagtcatctcatctactctggggagttgaatggtcgcttgtatgctgaaaactcccaaatttgtatctgtagcccagcttttcctactaagctctacttacatatctttgcagacctcattacttcttgactaacttactggctccttaaatatctaaaattgaatccatgttctacctccccatacaaaaagttcctcctccttccctaccacagttaacagttaccattactctggccattactatcctggctctctgcctcctgaagggagtcaagctcctcctgcaagttg

SEQ ID NO: 41730 - DNA, 338 bp, Homo sapiens
  misc_feature (1)...(338): n = a,t,c or g
gggagggaggaagaggctggacagggttactgcatactgccggaaggagattctcatttggctgcagagtgtcgcacaaagtgactccctaaaggcgtctgaaaccaaaagcattttgaggattgttacaagacagcgtgtcgccaggcnnnnnnnnnnnnnnnnnnnnnnnnnnnnnnnnnnnnnnnnnnnnnnnnnnnnnnnnnnnnnnnnnnnnnnnnnnnnnnnnnnnnnnnnnnnnnnnnnnnnnnnnnnnnnnnnnnnnnnnnnnnnnnnnnnnnnnnnnnnnnnnnnnnnnnnnnnnnnnnnnnnnnnnnnnnnnnnnnnnnnnnnnnact

SEQ ID NO: 41731 - DNA, 355 bp, Homo sapiens
  misc_feature (1)...(355): n = a,t,c or g
ggtcttccagctgattcttttaaactgcatctctacaaaagtggagagaatataatgaatcactatgtattaatacttatcacccagtttcaataattatcaacacataatctactggttcattttgaatctctgcagacatttcatccaaaactattcaatatatatctctaaatgaccatttaaaaaaatcatagtatcnnnnnnnnnnnnnnnnnnnnnnnnnnnnnnnnnnnnnnnnnnnnnnnnnnnnnnnnnnnnnnnnnnnnnnnnnnnnnnnnnnnnnnnnnnnnnnnnnnnnnnnnnnnnnnnnnnnnnnnnnnnnnnnnnnnnnnnnnggctgtgcaccgtgact

SEQ ID NO: 41732 - DNA, 340 bp, Homo sapiens
gctggagagggcagaaatgagttgactttagcaagatgaaatgttaaaactttagatgcagtatcacacctgcattccagtagtcaagctcatattagcatagagaaagatggctttgcagtccacgtgagaaaggcctgagggggttcaggtgactgcagtatgatttagttgtcccgggaattaataatatcttgagcagcataagttatcaaggaagaggggcttatagtcatgttctgcttcctattcatataccacttgaaatgctccttttgccctagaccacatgtttgtgttgatttaacaacaaattggattgtctgaagcaggggttgtc

SEQ ID NO: 41733 - DNA, 339 bp, Homo sapiens
gaaacatcctggatacacctcaaggcattctgacttaactgcaacttttccaattcagttgtaccaaaatattttatatttgataagctttttaagtaccttctctacaatttatccttttacttcaacaagttggtacagatgtggtatgcttctacaactctggttctcagaaactactcaattttaagatgtcatgatgaggctgtgccaccttgttcaggatgtaacctccctgaaattttaaattatagagactgcacttaggaggtgtatcaactctcttgccatcattggatctgagaaactacagtgaagctggggtgccctggggaaatt

SEQ ID NO: 41734 - DNA, 355 bp, Homo sapiens
gcggcacgagacaaaactccagactcttgggccgtccccatttgcaacagcacacatagtttctggtatatttgttgggaaagataaaactctagcagttgttgaggggaggatgtataaaatggtcatggggatgaaaggatctctgagaccacagaggctcagactcactgttaagaatagaaaactgggtatgcgtttcatgtagccagcagaactgaagtgtgctgtgacaagccaatgtgaatttctaccaaatagtagagcataccacttgaagaaggaaagaaccgaagagcaaacaaaagttctgcgtaatgagactcaccttttctcgctgaaagcacttaagagg

SEQ ID NO: 41735 - DNA, 356 bp, Homo sapiens
  misc_feature (1)...(356): n = a,t,c or g
gatgaagttagccaccgtcccagaaagtggcgtctcagactctggagtcccagactccttagatttggaggaactcactttcaaaaggcacctgcctgaggcttttaactggatccatttcagttaattatcagatctgatttgctcctggacccagtcctacttgacccagtctaagaattgttcaaataaacttggagaacacaaaacacaaattcctgaagcttggaatctgagatagaactcacccatgacctccagttgctacaagagaacaaattggcacagtgtgccctgtcaggtacccttacttggtcactaaatgctcctgngggtcactggagttctacttccga

SEQ ID NO: 41736 - DNA, 360 bp, Homo sapiens
  misc_feature (1)...(360): n = a,t,c or g
ggaggtggttatgctgtgacgctgctgtctctaaccaccaagtattttctgcttaaaaagaaatgtaaggggctgcctttagcaaatgtgcgtagtagtctacttaatcctcatgnnnnnnnnnnnnnnnnnnnnnnnnnnnnnnnnnnnnnnnnnnnnnnnnnnnnnnnnnnnnnnnnnnnnnnnnnnnnnnnnnnnnnnnnnnnnnnnnnnnnnnnnnnnnnnnnnnnnnnnnnnnnnnnnnnnnnnnnnnnnnnnnnnnnnnnnnnnnnnnnnnnnnnnnnnnnnnnnnnnnnnnnnnnnnnnnnnnnnnnnnnnnnnnngagaatcgcttgaacccaggaggcanaaanttgcatt

SEQ ID NO: 41737 - DNA, 351 bp, Homo sapiens
ggcatttcaaacacatattgttcaggtgtcatctgtggttctcaatgtgtggtttcctgatcagcagaactgcattgtttgaaaacttgttggacatgcagattctcgggcctcacccatacctactgactcttaaactctgggagtagggtcttagccatttgggttttaatgagtgtctaccaggtgatcagatgtgcactgaagtttcagaaccaatagaatagagcaagataccagttttgtagtaattcaacctcttaagcagtattccttgttctttcacaaggaaccatgtatggagttcattacttgtgctttcttacagttggtgaagttggagtaattcat

SEQ ID NO: 41738 - DNA, 357 bp, Homo sapiens
ggtttttcaaaatggcattgtgaaatctttcaagggtttgtgaaaaataaggtatagcatctctttggtgagccaaatgagtttttctaaaataagcttggtaattttcaccctaaagttgatgtattttagtgtaaaaaatgaagaggtagtgaagtgtaatggagggtgggagccaggctcctcactgttggagtgggaagttacagacgagcaaagggaggaggctagaataatccatgggtaattgattagagtgggagacatctgtataaactcatatttagcttaatatataaatagtacatgaatatttatagatgtatctgtacatgggttatatagatccgtgtatac

SEQ ID NO: 41739 - DNA, 348 bp, Homo sapiens
  misc_feature (1)...(348): n = a,t,c or g
gcctaattccctgcaacattcccaacagtatataccattcgtctttaattttttttcaaccagctaggtgtaaagtattcatcttgtttttgtctgtaattccctgattattaatgatattgagcattttttcaagtgtttattgacagtttgtatagtctctgtatgattgcctgtcatttcctctattttttaattgaatttttttgtttgtattatttatttggnagaagtttttatatattctagatagcaattcattntctgttatagatactctttacttacacaaaagccttaaatttttatttgntagaaaatttanaanaatacactttgggaggccga

SEQ ID NO: 41740 - DNA, 347 bp, Homo sapiens
  misc_feature (1)...(347): n = a,t,c or g
gcatctctgctttaaccagaaataaaagatgacagagaggtcagccccacccgatccctcaaatgggctcttggaggcacccccaggggcagcccatttctcaaagtccagaaaattagggtcccagaagggggcagcagcaggctgggagttaggagggagagcagggtgccggccctgccaccaagttgagagctggagggaggtggggagagaacatcacagagcagccagccctggttcactcctggcagtttcttctcaagctccttccctaggannnnnnnnnnnnnnnnnnnnnnnnnnnnnnnnnnnnnnnnnnnnnnnnnnnnnnnnnncanacccag

SEQ ID NO: 41741 - DNA, 356 bp, Homo sapiens
  misc_feature (1)...(356): n = a,t,c or g
ggaacaggtgtttttctaattctgctatccctttggcatttgttagttggaattcttctataaaaaacannnnnnnnnnnnnnnnnnnnnnnnnnnnnnnnnnnnnnnnnnnnnnnnnnnnnnnnnnnnnnnnnnnnnnnnnnnnnnnnnnnnnnnnnnnnnnnnnnnnnnnnnnnnnnnnnnnnnnnnnnnnnnnnnnnnnnnnnnnnnnnnnnnnnnnnnnnnnnnnnnnnnnnnnnnnnnnnnnnnnnnnnnnnnnnnnnnnnnnnnnnnnnnnnnnnnnnnnnnnnnnnnnnnnnnnnnnnnnnnnnnnnnnnnnnnnnnnnnnnnnnnnnnnngagactcttctcaaaata

SEQ ID NO: 41742 - DNA, 351 bp, Homo sapiens
gccaaagcaacctcaaatctctcttgaacttctacaagagccccctaactggtctctcatctcttttctttcagcatacttcaccttccattactattcagaagctcttttactattcagaagttgaggcagggaactcaactggggtttccttccaaaacccagtccccacttgtatggcagaagctattcctaggcacagaaggctcagaaaattgtctcaattacctccacaccagctcactcataggttttatgccaggaggcgcaggctagaaagactaggggctaccatccaaatccaaggctccacttgtggagcaaggcaggtgtatcatttcagaagaagtg

SEQ ID NO: 41743 - DNA, 358 bp, Homo sapiens
gcgaacaggaggagaagagctccgaaaactcctcggcagagagggatttagctgatgtcaaatcgtctctagtcaatgaatcagaaacgaatcaaaacagctcctccgattccgaggcggaaagacggcctccgcctcgctccgaaagtttccgagacaaatcccgggaaagtttggaagaagcggccaagaggcaagatggagggctctttaaggggccaccgtatcccggctaccccttcatcatgatccccgacctgacgagcccctacctccccaacggatcgctctcgcccaccgccgaacctatctccagatgaaatggcactgcttgatgtccaggcagggagcctccaga

SEQ ID NO: 41744 - DNA, 361 bp, Homo sapiens
  misc_feature (1)...(361): n = a,t,c or g
gnnnnnnnnnnnnnnnnnnnnnnnnnnnnnnnnnnnnnnnnnnnnnnnnnnnnnnnnnnnnnnnnnnnnnnnnnnnnnnnnnnnnnnnnnnnnnnnnnnnnnnnnnnnnnnnnnnnnnnnnnnnnnnnnnnnnnnnnnnnnnnnnnnnnnnnnnnnnnnnnnnnnnnnnnnnnnnnnnnnnnnnnnnnnnnnnnnnnnnnnnnnnnnnnnnncaccacgcatctacagtctatggtattttactatggaagcccaccctaagatttcaatttagcttccatgtagttccctggtgcttggcaatctcctgactcactaccttgtcacatggtctatcccaaancagtccttctcctcttcc

SEQ ID NO: 41745 - DNA, 320 bp, Homo sapiens
  misc_feature (1)...(320): n = a,t,c or g
nnnnnnnnnnnnnnnnnnnnnnnnnnnnnnnnnnnnnnnnnnnnnnnnnnnnnnnnnnnnnnnnnnnnnnnnnnnnnnnnnnnnnnnnnnnnnnnnnnnnnnnnnnnnnnnnnnnnnnnnnnnnnnnnnnnnnnnnnnnnnnnnnnnnnnnnnnnnnnnnnnnnnnnnnnnnnnnnnnnnnnnnnnnnnnnnnnnnnnnnnnnnnnnnnnnnnnnnnnnnnnnnnnnnnnnnnnnnnnnnnnnnnnnnncaattataattataagaaaataaatttatttttatatctgaagtttaataaaactaattcttaaaggaaaa

SEQ ID NO: 41746 - DNA, 318 bp, Homo sapiens
gccaaacctggtattatttacaggtagttttgttgttgttttgtttttaaaccaaacaggttgacccattcactcaatctgagttaggaaatatattccaggcacaacctatcaggcggttgcctgcaagatcccagctgaaagcatcgctgggacaaaggtgatgctttggcagccaccctgttggctccgtccagcccacacctcagttgtctcaagctgctctttcagtgggaatgtgagatctggtagcagaggctcatttcaccccaattttctatttcagaaaaaggggccggtgcagtggctcaagcctgt

SEQ ID NO: 41747 - DNA, 321 bp, Homo sapiens
gtttattattctcaaaagttttttctaagttaaacagtcagtatgcaatcttaatatatgctttcttttgcatggacatgggccaggtttttcaaaaggaatataaacaggatctcaaacttgattaaatgttagaccacagaagtggaatttgaaagtataatgcagtacattaatattcatgttcatggaactgaaagaataagaactttttcacttcagtccttttctgaagagtttgacttagaataatgaaggtaactagaaagtgagttaatcttgtatgaggttgcattgattttttaaggcaatatataattg

SEQ ID NO: 41748 - DNA, 320 bp, Homo sapiens
  misc_feature (1)...(320): n = a,t,c or g
gcggcacgagaatgaacactatatgtatttataccaatccagggttcagcaagtgttgaaaacccttttcacataataggaacatgctaaaataattgtgggtgagacagagtctgnnnnnnnnnnnnnnnnnnnnnnnnnnnnnnnnnnnnnnnnnnnnnnnnnnnnnnnnnnnnnnnnnnnnnnnnnnnnnnnnnnnnnnnnnnnnnnnnnnnnnnnnnnnnnnnnnnnnnnnnnnnnnnnnnnnnnnnnnnnnnnnnnnnnnnnnnnnnnnnnnnnnnnnnnnnnnnnnnnnnnnnnnnnnnnnnnnnnnnnnnnnn

SEQ ID NO: 41749 - DNA, 328 bp, Homo sapiens
gcatttcacagaggaggacaaggctactatcacaagcctgtggggcaaggtgaatgtggaagatgctggaggagaaaccctgggaaggctcctggttgtctacccatggacccagaggttctttgacagctttggcaacctgtcctctgcctctgccatcatgggcaaccccaaagtcaaggcacatggcaagaaggtgctgacttccttgggagatgccataaagcacctggatgatctcaagggcacctttgcccagctgagtgaactgcactgtgacaagctgcatgtggatcctgagaacttcaagctcctgggaaatgtgctg

SEQ ID NO: 41750 - DNA, 326 bp, Homo sapiens
  misc_feature (1)...(326): n = a,t,c or g
ggtaatttttttcctcaaacttgtgtgtgtttagtgttgatgtatatatattacctaggcttttaggtctaaaatgatttataggacttttggtttcatttttaatattaaaattcttttatattttgcttgaaaaaaatctatcttcnnnnnnnnnnnnnnnnnnnnnnnnnnnnnnnnnnnnnnnnnnnnnnnnnnnnnnnnnnnnnnnnnnnnnnnnnnnnnnnnnnnnnnnnnnnnnnnnnnnnnnnnnnnnnnnnnnnnnnnnnnnnnnnnnnnnnnnnnnnnnnnnnnnnnnnnnnnnnnnnnnnnnnnnnnnnncaggt

SEQ ID NO: 41751 - DNA, 124 bp, Homo sapiens
gttgaaaaagaacttagagacattttgatggagaacaaagaaaagagatggaacttgagttttagttgggtctgccacctacaatgggatgtttcctttctttttctttctttttttttttttt

SEQ ID NO: 41752 - DNA, 325 bp, Homo sapiens
  misc_feature (1)...(325): n = a,t,c or g
ggaagtgtagaaaaagtcaagcagctataatctttccatcctaatataactactgtgatttcgttcnnnnnnnnnnnnnnnnnnnnnnnnnnnnnnnnnnnnnnnnnnnnnnnnnnnnnnnnnnnnnnnnnnnnnnnnnnnnnnnnnnnnnnnnnnnnnnnnnnnnnnnnnnnnnnnnnnnnnnnnnnnnnnnnnnnnnnnnnnnnnnnnnnnnnnnnnnnnnnnnnnnnnnnnnnnnnnnnnnnnnnnnnnnnnnnnnnnnnnnnnnnnnnnnnnnnnnnnnnnnnnnnnnnnnnnnnnnnnnnnnnnnnnnnnnnnnnnnnnn

SEQ ID NO: 41753 - DNA, 323 bp, Homo sapiens
gtgtacttttaacagcttaaaaatttcagtgtgaacattatcattgtttctttggttacagtgttattctcttttaccccttaagattctgaatttcctcatctgtccaccattcttatttcctttattttcatattcctagccccactcttattctccacaactctcttttttgtgtatgcagtctcctattgactccttttaccatagaccgtttctgactcacccctaccatcacctgctctgtttacaagtgcctggtaaataaaattgacaagagccatgatcattaaaagttgattggaaaattgaagtgttcacaa

SEQ ID NO: 41754 - DNA, 329 bp, Homo sapiens
gaaaaaactttaacagttaaatttataaaaatacatacttagtgaatataattaataagttttatgaaagtataaagtagaaacaaaagtcatttagaatcctgcaacccagagataactacagttaacatttggggtattttaaatctttttttcctctgcataaacatgtactttgcttttacataattgaaagtataggttatagagtatttttttcatttcattgtatgaatattctctaccttatttaattatagctttactgttagaaggtgaccttacattttttctttgttgtgttttaaggagttaacagcaaaattgca

SEQ ID NO: 41755 - DNA, 326 bp, Homo sapiens
  misc_feature (1)...(326): n = a,t,c or g
gatgtactttggattataaaccagtactataattgttgccctgattgtttcagctttagctattgggagccctttaggttcctgtgtccctttgacatacccgcattcttgtattttttggattttcannnnnnnnnnnnnnnnnnnnnnnnnnnnnnnnnnnnnnnnnnnnnnnnnnnnnnnnnnnnnnnnnnnnnnnnnnnnnnnnnnnnnnnnnnnnnnnnnnnnnnnnnnnnnnnnnnnnnnnnnnnnnnnnnnnnnnnnnnnnnnnnnnnnnnnnnnnnnnnnnnnnnnnnnnnnnnnnnnnnnnnnnnnnnnnnnnnnnn

SEQ ID NO: 41756 - DNA, 266 bp, Homo sapiens
ggtagtctgatataaaacagtagataattgaaacagatacattcaagaagtctttagtcagcacccagggtggaccgactgggttgcctgtctacctcagggggtgcttagcatatgaggaggggagatactaataagcatttctaagttgaaagtattttgaaaagggcactgagtctctcactctttgctgtgttctagagcattgcatcttggaaccactcactttcatgctttagtcatttaccagtgtttttttttttttt

SEQ ID NO: 41757 - DNA, 330 bp, Homo sapiens
gaaataagaatacatcatgtatatttttaatacttattcaaattacaaattcactgtctttaatttattctaacaaaagtaaacctaattttatagttataaaaaagaagaaatctacttctagtcacctaagagtaaaactgcccttataaaaaacaagacagaaatctcaaaattataactaattttatagttataaaattaaccaggactttaagaacgtttgcattttaaaattaaagttttcaatagttttcaatacaacaatgatactatctcaaaatactcagcatgtctaacaggcctcttttaaaagctcagcatgtttaa

SEQ ID NO: 41758 - DNA, 330 bp, Homo sapiens
ggggaacatggaatggaaccacgaaagtagcaatcaaaacactaaaaccaggtacaatgatgccagaagctttccttcaagaagctcagataatgaaaaaattaagacatgataaacttgttccactatatgctgttgtttctgaagaaccaatttacattgtcactgaatttatgtcaaaaggaagcttattagatttccttaaggaaggagatggaaagtatttgaagcttccacagctggttgatatggctgctcaggtatctgtatatatacatgtatccatttgaattaaaagtgtaaattaaaatgtggaataatcttaccaga

SEQ ID NO: 41759 - DNA, 323 bp, Homo sapiens
gcaggcgggaagtgctctagcaggggagtctgaccttgtgagggaatacctgtgtccccccttttttcccctttttacccaataaaaccctgccttactcaccctttaaatcatctgcgagcctaaattttcatggccgtgggacggacaagaactttatcttcagctgaactaagaaaaagtcctgcaacatttttggcgcgcaatgtgggggcaccagaagcgggcaccgttgagctgttgcaactgttatgctggagccttatgtatgtggttgaaaccacctgtactactggaatgaaagcacctttacagaagaggca

SEQ ID NO: 41760 - DNA, 324 bp, Homo sapiens
gaaagattttccatcaccaaaaagtgaggatgcagggaaactattactattgtttttatcacttccagatatatatagcttatttagacagcaaagtataagttagtaaactctttcctactttaacgccagtccatgggagaattaaagggaggaaggggcacgaatataaattaatcatctacatgttttgaatgtttgctgatccaaacatctgcttctttcctcttccctgcttctctcttctgcctgccttgtacttagcttatatcagttacccacttaacactttccttctattcattctgaacacttatactactg

SEQ ID NO: 41761 - DNA, 329 bp, Homo sapiens
gaactggatacctactaaatgccaaaagatatgccaataagcaaatagaaagtccctgcacccacagagtttatgtctaacctaggaaaaaaggctggcaactatttaaattacagtatggtaagtgcttcaaatcataacactttgagagtatacagcttatctaccctagtctgggagctcagaaaagagatccttcaggaagcaacatttaagctcagacaagcaggaaggggtaggagctggccaggaagagatagagaaaggactgtgtgcaaaggccagggagggcccaccgggatggtaagcaaaggccgtgtggctggagc

SEQ ID NO: 41762 - DNA, 359 bp, Homo sapiens
  misc_feature (1)...(359): n = a,t,c or g
gnnnnnnnnnnnnnnnnnnnnnnnnnnnnnnnnnnnnnnnnnnnnnnnnnnnnnnnnnnnnnnnnnnnnnnnnnnnnnnnnnnnnnnnnnnnnnnnnnnnnnnnnnnnnnnnnnnnnnnnnnnnnnnnnnnnnnnnnnnnnnnnnnnnnnnnnnnnnnnnnnnnnnnnnnnnnnnnnnnnnnnnnnnnnnnnnnnnnnnnnnnnnnnnnnnnnnnnnnnnnnnnnnnnnnnnnnnnnnnnnnnnnnnnnnnnnnnnnnnnnnnnnnnnnnnnnnnnnnnnnnnnnnnnntaaagattttaaaaaaaaggaaaaccacagacacaaagcagtaagaacagagaaattcaatatttaaaat

SEQ ID NO: 41763 - DNA, 344 bp, Homo sapiens
  misc_feature (1)...(344): n = a,t,c or g
gagctgacatgtaatgagggcgtgttcacacctggccctgtgctccatggactttatatttaaatcctcacatgccaactgtcattttataaatggaagagtgaggcttgggaaggttcagttatttcaccagtgttagaaaaaggtcagtggggttnnnnnnnnnnnnnnnnnnnnnnnnnnnnnnnnnnnnnnnnnnnnnnnnnnnnnnnnnnnnnnnnnnnnnnnnnnnnnnnnnnnnnnnnnnnnnnnnnnnnnnnnnnnnnnnnnnnnnnnnnnnnnnnnnnnnnnnnnnnnnnnnnnnnnnnnnnnnnnnnnnnnnnnnnnnnnnnnnnnnnnnnnnn

SEQ ID NO: 41764 - DNA, 341 bp, Homo sapiens
gcggcacgagtgaagaagctttgtccaagtttacattgaaaaagttattgttgttggtctgttttcttgattatgctaaaatttccagactcattgatcatgatccttgtctcttctgtaaagatgccgaattcaaggctagtaaagaaatccttttggctttttcacgagatttcctaagtggtgaaggtgacctttcccgtcaccttggcttattgggattacctgttaaccatgttcagacaccatttgatgaatttgattttgccgttacaaatcttgccgtagacttgcaatgtggagtgcgccttgtgcgaaccatggaacttctcacacagaac

SEQ ID NO: 41765 - DNA, 356 bp, Homo sapiens
ggtggtaacctagcaggtcagttatcagacttcttcctgaccaggaatattctcagcgtaattgctgtccggaaactcttcacagcagcaggatttctccttcctgcaatctttggtgtctgcctgccttacctgagttccaccttctacagcattgtcattttcctaatacttgctggtgcaacaggcagcttttgcttgggtggagtgtttataaatggcttggatattgctcccagatattttggatttattaaagcatgttcaactttaactggaatgataggaggactaattgcttccactttgactggattgatccttaagcaggatccggaatccgcctggtttaaaac

SEQ ID NO: 41766 - DNA, 342 bp, Homo sapiens
  misc_feature (1)...(342): n = a,t,c or g
gctaannnnnnnnnnnnnnnnnnnnnnnnnnnnnnnnnnnnnnnnnnnnnnnnnnnnnnnnnnnnnnnnnnnnnnnnnnnnnnnnnnnnnnnnnnnnnnnnnnnnnnnnnnnnnnnnnnnnnnnnnnnnnnnnnnncnccantgatntnttgagcggcntctgtnattcntcnttnagggggggtncaggtatnttgtnggacncngnacagcnttnctggcttctacacngnnnagtcngtancaccccactccctagttctaacaatcanaactgtctccanattaccanatgtcttctgggggctaaaatcatncccaaatgagatccataggangaaa

SEQ ID NO: 41767 - DNA, 357 bp, Homo sapiens
gggctcccatgttcagcagaagcgacttcagcgtgtggaccatcctgaagaagtgtgttggcctggagctgtccaagatcacgatgccaatcgccttcaacgagcctctgagcttcttgcagcggatcacggagtacatggagcacgtgtacctcatccacagggcctcctgccagccccagcccctggagaggatgcaggtgggccttaggggtgccaggcaggagtttgtcatgaaagtgatgccccttgcatgtctggccacacagtcttggggccccaggcatctgtgaggactcgcacagctccccccagtgttcagtgccatcctgccctgcggtcgtggcatttgtcctg

SEQ ID NO: 41768 - DNA, 342 bp, Homo sapiens
gtgcagaactctttgaaagcttagaagagtggtggggagagtgcagaggggaagcgatggggatggtagaaagtaatgatttcccaacaactttaccatgtgtctgtactggaaattccttccactctatcagccaatgtccatttctcaccagtcgtggtcttatcctgttaacactggctattgctaaacctgctgtaagtaagtaagtagcaaagaatgagtatcatggtagaaagagctttggctttgtcatcagattgacctacatttcaattctgtaagttgggtcaagttatttgataccctcaatctcctgatctttaaaaaggggcagtatgg

SEQ ID NO: 41769 - DNA, 334 bp, Homo sapiens
  misc_feature (1)...(334): n = a,t,c or g
ggggaatggtggcaggtgcttataatnnnnnnnnnnnnnnnnnnnnnnnnnnnnnnnnnnnctgccgccatgcctggctaatttttttgtatctttagtggaagnggcgntttnaccagnttggccaccctgctttgtctcatgantntatgatncacccncntcacgctcccaaanngctgnaatcctnacntcanactncatgcattnnctacnnntcactaataancaatnctgtannncaatactttgnanagcccangcnnnanancacctgaagantnaaatnntgancannctgccagcanganaaaactccatatntactaataat

SEQ ID NO: 41770 - DNA, 352 bp, Homo sapiens
  misc_feature (1)...(352): n = a,t,c or g
gggcgtnnnnnnnnnnnnnnnnnnnnnnnnnnnnnnnnnnnnnnnnnnnnnnnnnnnnnnnnnnnnnnnnnnnnnnnnnnttttaaaaaaacttaaaaaaaatttttttttaaacttcacaccaacaggttgtaaaaacaaaaaactagaaacagcctaaccatccatcaattggggaaaaatatatagagtaaatgtacagcatatttaaaaagaagaaagagaaaaaaagaaagctacatatcatttggtggtacatacatacataagggcactggggggaaagcctaaaagaaaannnnnnnnnnnnnnnnnnnnnnnnnnnnnnnnnnnnnnnnnnnnnnnnnnnnnn

SEQ ID NO: 41771 - DNA, 340 bp, Homo sapiens
gctagttttaggtaggaaagaagaaaacatatatttgtgtgctaactatataccaagcaatgtatactttgattcagcaaggatttaggatgtggatcttctcattccagatccagtgttcattccataagactatgctgttgctcctaactcaaaaagactctaatgttgatgatcagctgtgatttctaagctaaaagaatgacaaaggaattggttttcttttgtttccatggcactattacgctgtgctggggtatggtctgacattttcagaatgtctaaaaatgtgagacctagtttgttgaatgtaactaaaataaaatatagatggattggc

SEQ ID NO: 41772 - DNA, 338 bp, Homo sapiens
gccacatttgccacaaccaggacggctacagctacccctcgagacccatggtcagtctggaggatgacgtggcgtgaacatctgcctggagtcccgtccctgcccagaacccttcctgagacctcgccggccttgttttattcaaagacagagaagaccaaagcattgcctgccagagctttgttttatatatttattcatctgggaggcagaacaggcttcggacagtgcccatgcaatggcttgggttgggattttggtttcttcctttcctcgtgaaggataagagaaacaggcccggggggaccaggatgacacctccatttctctccaggaag

SEQ ID NO: 41773 - DNA, 340 bp, Homo sapiens
  misc_feature (1)...(340): n = a,t,c or g
gggggaagaggttatgcgttttatgctacctgcttccctctagtttattccagcaaactgaaagatggaaagtttactagcacagaaaattcattagagtccctttaaatttgcaatacaataaaatgtctaaaaagaataattaaaatgcccagctgcacaatcaggttaaggtaactatttcatcagccttagaattatagtcatgcctcacttactgatggggacacattctgagaaatgtgcccttaggtgatttcgtcattgtgggaacattnnnnnnnnnnnnnnnnnnnnnnnnnnnnnnnnnnnnnnnnnnnnnnnnnnnnnnnnnnnnnnn

SEQ ID NO: 41774 - DNA, 349 bp, Homo sapiens
  misc_feature (1)...(349): n = a,t,c or g
gcagcagggagccaagactgtnnnnnnnnnnnnnnnnnnnnnnnnnnnnnnnnnnnnnnnnnnnnnnnnnacctctgccaacttgaatgaaaaataccttaatttgtatttttaagaaatgactagttagtaaaacttgaatcttttttgccacagctctattttaataatttttctgttgagaaaactagtagatttcttgaattctaagagttctaacagggattttattcatcttaactattttgacagatttaaaaattatgtagtaagactttatttcaatgttgacaggacgggttcccatggtgtttttgcagagggttattcctgaaactgctngttacta

SEQ ID NO: 41775 - DNA, 352 bp, Homo sapiens
ggaaaatgttctattcaataaggtatctctttttcttctttttggccaagatggcactaagtaaaatttaaatcgagagatggcataatccatgagtcagccagactttcagctggaaaaatctttagtaaataccttccttctaaattacagaaagtaacttttccatacacactgtaaacagcagacactctaacagagcatcggttatgctccatctcctaacctgaaggactcttgtcacacacccacctctgagaacccaagctcctcagtttttttaatcttttggccacatttcatccaattaccatcataccttttatacgttagatttccaaggaggtaagtg

SEQ ID NO: 41776 - DNA, 324 bp, Homo sapiens
ggtagatacttttgcctttttaaaaaagccattattttatgagacttagtactcacactgcaaataactagtcagctcagttttaactttataggtttattgagtttcctttgtgtgatccatgtagatgcctcaaaatgtttcttcttcttttttttaatcttataagatatttttctaagtatttccagaaacatttgagagtgcccatcattttcaggtctgcagaaccatagcttccacgcacctgaacgagcacagaatgaactgacggtggaagacattatgagctgtgtccaacgttttaaccaaagatcgtatcgt

SEQ ID NO: 41777 - DNA, 173 bp, Homo sapiens
gattatctttacacgtaatcagtttcttaagcttcaaatgaccctcttagccacaaaaccggaggcacaaattcagctccagtggttagaatatcaagacctatatcataagaagttaggcttctgctgtgcgcacaaaacccatcagccaaagctgacattttcggcagagc

SEQ ID NO: 41778 - DNA, 311 bp, Homo sapiens
  misc_feature (1)...(311): n = a,t,c or g
gcgttacgagcccaattgcatgaggccaaccagcagctgcaatttgaaaataatgcagaagatttgcagcgctggctggaggatgttgagtggcaagtcacctctgaggattatgggaaaggcctggccgaggtacagaatcgactcaggaaacacggcctcctggagtcggctgtggctgctcgtcaggatcaggtggatatccttacagacctggctgcatattttgaagaaataggccatcctgattctaaggatataagggcaaggcaagagtccttggnatgccgattnnaanctntgaaanagcc

SEQ ID NO: 41779 - DNA, 178 bp, Homo sapiens
  misc_feature (1)...(178): n = a,t,c or g
gcatgctcacatggtactgtggcacttactgcatctttcttccctcttcaactagactataaatgccttcaatatagttttgtttgttttttttttttgaaacaaaatntnntttngtnnccccggntgaagtgcannggnccaatctnanttaanngnaacntcnacctgccaggtt

SEQ ID NO: 41780 - DNA, 111 bp, Homo sapiens
  misc_feature (1)...(111): n = a,t,c or g
nnnnnnnnnnnnnnnnnnnnnnnnnnnnnnnnnnnnnnnnnnnnatgtgtgacatcatgcccggctagttttggtagttttntggaaagncggtganngntngggccttga

SEQ ID NO: 41781 - DNA, 322 bp, Homo sapiens
  misc_feature (1)...(322): n = a,t,c or g
ggttaacccatgtgaggggcttagaacattagctggcatataggggatgctcaataagtagtatgatggtattgttgaagattacttgacaagtcaaaaagtacaaaggngaaannaaaaattcacctataatcattgataacattttagatnntganntacncacacacacncaccacncacncacactaaccaagnttanncatttcataaatnccatntntacanattntntccatttttaaattcttttnttgcctnatnntttcantttnnatngnatatccttnagtgtnnaagaccantntnnanntnnactgga

SEQ ID NO: 41782 - DNA, 340 bp, Homo sapiens
gcttttttgcagataaattgttgaataacctcatttccatgtgaaacttcggttcccgtctccctacacgtttcttattttctattatcaatgagagaggaatgagtatatcatgcttaggggagctgagcaggaaataagctgttagccctaaatagaggaattaaaggagggtgttgacggcccaggaaagcagggcggcttcattgtggcagccctcatttgctggcctcaagaaacagccccactgtcggggctgtgtgggtgcagttctgtctccaggcctttccctgcaccgtgtcccacatgtgatgttctgccctgacttggttcatgatga

SEQ ID NO: 41783 - DNA, 346 bp, Homo sapiens
ggcctgagttgggtgacaggaaagaactgtccttggtggaccgacttgatcgtttggctaaaattcttcagaatccaatcacacattctctccaggtctcagaaagtacacatgatgatagcagaggggaacgaagtgtgaaggaatggagtggtagacaacagcagagaaataagcttcagaaaaagaagcggtttaaaagcctagagaaaagccataaaaatacaggcgagcttaaaaaaagcaaggtgctttctcatcatcgagctgggaggtctaatcaaattaaaattgaacagattaaatttgataaatatattctgagtaaacagccaggttttaatta

SEQ ID NO: 41784 - DNA, 259 bp, Homo sapiens
  misc_feature (1)...(259): n = a,t,c or g
gcagatgtcagctccatccaggaccacccagcccacaccctgagaggaacgtctgtctccagcctctgcaggtcgggaggcagctgacccctgacttggacccctattccagacaccagacagaggcgcaggccccccagaaccagggttgagggacgccccgtcaaagccagacaaaaccaaggggtgttgagcccagcaagggaaggcccccaaacagaccaggaggtttctgaaggtgtctgngnnacannggggt

SEQ ID NO: 41785 - DNA, 337 bp, Homo sapiens
gttcaataccctgccaaagtacaaagcctaaatgtaatcatgatgaaagagacaacaccaaatggagagacagtctacggaataactggcctgtcaaggtcaagaaaggctgtctaactgctccaggttaaaagaagctaaagagacatgacacctgacagcaatgcatgacctgggactggacctggactggggaaatgtcagcaagaagatcagcaggaacggtaccgggactctgatgaaatgtgtgtatgaactgtgaattagacactagtatcaatgttaagtttcctgttttggtaactatacaggagtagtgagagaatttccttgttct

SEQ ID NO: 41786 - DNA, 340 bp, Homo sapiens
  misc_feature (1)...(340): n = a,t,c or g
gcatgggcatcagataaatacaagatggtttattagtactgctccagctctctctgatgttcataatagaatctttggtttgtagttatacagagatcttagaaatacagagannnnnnnnnnnnnnnnnnnnnnnnnnnnnnnnnnnnnnnnnnnnnnnnnnnnnnnnnnnnnnnnnnnnnnnnnnnnnnnnnnnnnnnnnnnnnnnnnnnnnnnnnnnnnnnnnnnnnnnnnnnnnnnnnnnnnnnnnnnnnnnnnnnnnnnnnnnnnnnnnnnnnnnnnnnnnnnnnnnnnnnnnnnnnnnnnnnnnnnnnnnnnnnnnnnnnagccgagattgcgc

SEQ ID NO: 41787 - DNA, 335 bp, Homo sapiens
  misc_feature (1)...(335): n = a,t,c or g
ggctcggcgtggcttacagtcttcattaggttcccgctcccaaccagaatgaggaatgatcacttcatctgtcaaggcatgcagtgcatggtccacaatctccattttgattgagtcatgggatgaaagattccacagggtccggtaataacttcagtaaggtccatatcacgagcctttcgaagcaatcgcacaagggcaggcacaccatcacagttttttatggcaatcttgttatcctggtcacgtccaaaagagatattcttgagagctccacaggctccaaggtgcacttcctttttgggatggnctaacaatnccaccannnctgggat

SEQ ID NO: 41788 - DNA, 329 bp, Homo sapiens
  misc_feature (1)...(329): n = a,t,c or g
gaagatgataaaaattaagttgaaccttttcacttgggatagaaaaattctcaaggatgtggtgccattttatctgtgactagtagataggattgggtatgtagcaaagggatagtgcttgaagcaggataatatcataaaaagatgcagaataagtatgatttatttggagaaaattacatgacagggagtgtactgtgagcaagagatccagattagaaagattgtttcattgccatcacaggacatttagacttgattcagtaaccagtggaataatttcacattaatggttgattggaaatttatttggtnngaagtangnacag

SEQ ID NO: 41789 - DNA, 292 bp, Homo sapiens
gggactgaaaggcatgatgggggtgagtggctgtatggttcttctagctcccctgctggctaggaggagccagtcttctctttggaagcaatttgagaagtgctctgctggacctaaattgatgctgtccaaatttctgccttggggcaagttggctatgccttctcggatgagtaatttcagcccctaaagagtatagcaaatccatataaccaagagttggcaagaaaaggctctttatgacatttgagtgtttcatgttcctctgactttctttctttttttttttttt

SEQ ID NO: 41790 - DNA, 150 bp, Homo sapiens
gaatgatgacagtggggatgaagatgataatgcttaaatgggaagaccttgtggtggtcataggaagtgttaggaattacttgcttatgtatctctcaggtgaaagtaccgtttgggaacataaggaaggaacagatttttttttttttt

SEQ ID NO: 41791 - DNA, 318 bp, Homo sapiens
  misc_feature (1)...(318): n = a,t,c or g
gcggcacgaggacagctagctgactcctaatctagggcaaaggcaggtgcctaaaaaggaccagaaaggagaccagaatgaagggcagnggggatgnannagatnntnccattgnatnnctttaaaggtntgngngtgcntnananngtnccctgnnncantacttctaatgnnanggctggcanacnttcttggtatcatatcttgtgttcttnctantgaattcctnctcncgtcnattannatttgnttctncntnaanntgtnctttncacatggaattaccgngtgaagctcttgngntagactgcctggttt

SEQ ID NO: 41792 - DNA, 338 bp, Homo sapiens
ggtgcatagcacagtgaatagcacatggtatgcactataccactgtttgttgttactgtgattgttactattagtaccaataatctacactcaggtcactaaacattcctctttaccatcctcttgcattaaggttatgagtgtgccagacagagttccatgtcacaagacttctaatggcaaggctgggcagacattcttggtatcatatcttgtgttcttcctagtgaattccagactcacaaagattaaaatttgtttccagcaagaaaatgtcctttccacatggaattaaccgtgtgaagtctcttgtgttaaactgaactgggttgaaagaa

SEQ ID NO: 41793 - DNA, 331 bp, Homo sapiens
gacatgcattgctatggaacaaaaggaaagtacaaataatagcagagatgtccagctttctactgaaaaaattcttaagtgttttcatctccccaaaatctttaaaatatcaggaaactcgacaatgctgagaacgcaaaatgaagcaaaggtgttagttaacagtgccagttctcgttatgagattgaaaattaagagttcccatgagcacaacacagaaataattcttaaaccattctaaatttactgtctttgttctattcagcaatttattgacagtggataaggggtaatattaccccttctgtccacgcaaagttttcagctcag

SEQ ID NO: 41794 - DNA, 337 bp, Homo sapiens
  misc_feature (1)...(337): n = a,t,c or g
gcacaaaatttgtggcacttttttacagcagcaacaggaaattaataaaagtcttccagtggtagggggtgaatctcattacgtttctaaggcaagcattgcttagtatcttgcttatttaaaagataaatttagctagtatacacaatagtgaccaattagattgtatgctataatacttgtaagaaaaatgattgcatannnnnnnnnnnnnnnnnnnnnnnnnnnnnnnnnnnnnnnnnnnnnnnnnnnnnnnnnnnnnnnnnnnnnnnnnnnnnnnnnnnnnnnnnnnnnnnnnnnnnnnnnnnnnnnnnnnnnnnnnnnnnnnnnnnnnnnn

SEQ ID NO: 41795 - DNA, 216 bp, Homo sapiens
  misc_feature (1)...(216): n = a,t,c or g
gaaggacagtgtggccagagtacagtgagcaagatggggaagtcacttgagaaacacaggtgctgtatcatgcaatgcgataataaagagctttaattgtattctcagtcatgggaaacatttgaaaggatttatgtaggctgattatatgatctgctttttgttttaaatattttttaaacattactttggttgatgtatggagaatgcnttgaa

SEQ ID NO: 41796 - DNA, 343 bp, Homo sapiens
  misc_feature (1)...(343): n = a,t,c or g
gttttttttgtcttgggctcgaatatggttcaactcagtactgggttttaccctcaaaggaagtaaagtctaggaagggggttctagctgttttaccttaagcaaatgacttaattcctctgcctannnnnnnnnnnnnnnnnnnnnnnnnnnnnnnnnnnnnnnnnnnnnnnnnnnnnnnnnnnnnnnnnnnnnnnnnnnnnnnnnnnnnnnnnnnnnnnnnnnnnnnnnnnnnnnnnnnnnnnnnnnnnnnnnnnnnnnnnnnnnnnnnnnnnnnnnnnnnnnnnnnnnnnnnnnnnnnnnnnnnnnnnnnnnnnnnnnnnnnnnnnnnnnnnnnnnnnnn

SEQ ID NO: 41797 - DNA, 339 bp, Homo sapiens
  misc_feature (1)...(339): n = a,t,c or g
gcagatgcagcccctttgtttcaattgtccaatttgtgacaagatcttcccagctacagagaagcagatctttgaagaccacgtgttctgccactctctctgagtatcccaacctcttggatgtatacagagattttatagaatagaacctatagcttctaccatgagttatatgagtcaagatcctgcctaacctgaaattattagggatttactcagccctgctgccgctaacagtggagttatgtcactgatctgaaggtcactgttaagggcttctgctgccatccttgtgggttgctacctttaagtcgcataactctagctgnatcatcctct

SEQ ID NO: 41798 - DNA, 343 bp, Homo sapiens
gggaacgcccaaccaccatgtacgacgttatttctaagagaaagtgaattctgagttgtgaaacaaaacaaattaacatctgtgatacacagccatggataaactgtgaactctttttatagtaaccttggcagtgataatcaaataaagaccagtaaaggctttcttgtacatgaatctgcttaaactcccttctctcagtcccagatgtagagctcttgttttcacaatacatcagacaaattgtgtgctagaactgcccagaagaattattttctgtcaaaatcaagaccttttaaactgtatataaatatgaacctactgtatattgaagtaagaacaa

SEQ ID NO: 41799 - DNA, 342 bp, Homo sapiens
gagagcttagtgacatgcacaattgcagtgttaaattggttttgagatgactggcagtgtggatgctattgctgagtaaaataggcgacaggtattgtgactatattaacatagaccatcacctctggtggaagacatggatattaaacttaagacagaaatcagggctacatccttatcttgaagaagacatgttcccagaggttttaaatagcgtgaaaagtgaactattgagagttccagtaagaaggagacttttcatgtgctaaaaccaacaaaatttccccaaaatatgtaagtatgaatgcccattgtggctatgtcaaatatttcataatacca

SEQ ID NO: 41800 - DNA, 336 bp, Homo sapiens
  misc_feature (1)...(336): n = a,t,c or g
gctggaggaattcatagtcgggatcatagtggtctgcagttacaacaggggaaaaagagacccgttagccacaggccctgcaggagcagccagctccccccgcccgcctctcgccggctcgctcatgggtgtgtgacaaagacctgtctccagggcttattttatattcacatgttatattcttcattcttctccctgattataaaagcaaaccagatgggaatatggctgtttgctatacttttattttttacatttcttatttannnnnannntncncnnccattacngaanccgtgnnaaannacntcnnnannntcnnnnnncccacngtcc

SEQ ID NO: 41801 - DNA, 339 bp, Homo sapiens
  misc_feature (1)...(339): n = a,t,c or g
ggcaaactcccttaaataatctctgaaacaagatactgattgacaaataattatacttgtttcacatttttcaactcaaatttatgtcagactgtattcgcctcatttcaatcaacaaatatttactgaatgttgcttatcatgtccaatatgatacagttgttaaaaatgcattgtctaggannnnnnnnnnnnnnnnnnnnnnnnnnnnnnnnnnnnnnnnnnnnnnnnnnnnnnnnnnnnnnnnnnnnnnnnnnnnnnnnnnnntttcccacttctattctaagggtttataggtactttgcccctctaatgaacttgaaactgtaccgtatggta

SEQ ID NO: 41802 - DNA, 340 bp, Homo sapiens
  misc_feature (1)...(340): n = a,t,c or g
nnnnnnnnnnnnnnnnnnnnnnnnnnnnnnnnnnnnnnnnnnnnnnnnnnnnnnnnnnnnnnnnnnnnnnnnnnnnnnnnnnnnnnnnnnnnnnnnnnnnnnnnnnnnnnnnnnnnnnnnnnnnnnnnnnnnnnnnnnnnnnnnnnnnnnnnnttatatttattatacatattaaatatatataatatattataattatatatacaaattaaatattttacatatatatatatnnnnnnnnnnnnnnnnnnnnnnnnnnnnnnnnnnnnnnnnnnnnnnnnnnnnnnnnnnnnnnnnnnnnnnnnnnnnnnnnnnnnnnnnnnnnnnnnnnnnnnnnnnn

SEQ ID NO: 41803 - DNA, 340 bp, Homo sapiens
gtcctaaagaccttatactggtcccaactgtaccacctaatcatgtgtcccttgagtttgtcacgtgacctttgctttcctctgaaaatccttttactcagtaggccaattaaacccatttataataattaataaaatcaatatgtttgacttcaagtttttcccttagttttatgattttttaaaagtattatccttttttggcatttaggaaggcatctatttttggtttaatgggtactttgatgtaatactttttttttctgctcttgtgtattgattcccgctgtgagtgataaatcagtcatttaccttttcttccccctcctctctttatttt

SEQ ID NO: 41804 - DNA, 318 bp, Homo sapiens
  misc_feature (1)...(318): n = a,t,c or g
nnnnnnnnnnnnnnnnnnnnnnnnnnnnnnnnnnnnnnnnnnnnnnnnnnnnnnnnnnnnnnnnnnnnnnnnnnnnnnnnnnnnnnnnnnnnnnnnnnnnnnnnnnnnnnnnnnnnnnnnnnnnnnnnnnnnnnnnnnnnnnnnnnnnnnnnnnnnnnnnnnnnnnnnnnnnnnnnnnnnnnnnnnnnnnnnnnnnnnnnnnnnnnnnnnnnnnnnnnnnnnnnnnnnnnnnnnnnnnnnnnnnnnnnnnnnnnnnnnnnnnnnntatcactatagaggttgtgaggcttatagggttcagacnaaaatgngttttaa

SEQ ID NO: 41805 - DNA, 334 bp, Homo sapiens
  misc_feature (1)...(334): n = a,t,c or g
ggtttgatgcccgattcctcaacttaaaagttatatccaacatccatccagcagaatggctaaaacaaaaaggtagacaatcctgagttccnnnnnnnnnnnnnnnnnnnnnnnnnnnnnnnnnnnnnnnnnnnnnnnnnnnnnnnnnnnnnnnnnnnnnnnnnnnnnnnnnnnnnnnnnnnnnnnnnnnnnnnnnnnnnnnnnnnnnnnnnnnnnnnnnnnnnnnnnnnnnnnnnnnnnnnnnnnnnnnnnnnnnnnnnnnnnnnnnnnnnnnnnnnnnnnnnnnnnnnnnnnnnnnnnnnnnnnnnnnnnnnnnnnnnnnnnnnnnnnnnnn

SEQ ID NO: 41806 - DNA, 323 bp, Homo sapiens
  misc_feature (1)...(323): n = a,t,c or g
gtggtgtttagggtccttcctacaaccctgtgtgataggtttaggagaaaaataagattaccttaatttgaaataagaaatagattaaaggnnnnnnnnnnnnnnnnnnnnnnnnnnnnnnnnnnnnnnnnnnnnnnnnnnnnnnnnnnnnnnnnnnnnnnnnnnnnnnnnnnnnnannnnnnnnnnnnnnnnnnnnnnnnnnnnnnnnnnnnnnnnnnnnnnnnnnnnnnnnnnnnnnnnnnnnnnnnnnnnnnnnnnnnnnnnnnnnnnnnnnnnnnnnnnnnnnnnnnnnnnnnnnnnnnnnnnnnnnnnnnnnnnnttc

SEQ ID NO: 41807 - DNA, 296 bp, Homo sapiens
  misc_feature (1)...(296): n = a,t,c or g
gtgggaggaagagctctccccgccccgagcccccggagactgtgagcaaggctgagacgcctccttcctggtgctcaagctgcaggtgttggataggcctccagaagcccagattttaaatgaccgctccaggttaacctggggatggtcaggcagaacaaggaggagaggccagcagtgaagggcagggctggtgggcagtggctgggggtgncnganngnggntcncncnnntnnnnntccgcnnnnncagtnncnctcncnggncncnacnnnnncgncanntcnnngacccc

SEQ ID NO: 41808 - DNA, 329 bp, Homo sapiens
  misc_feature (1)...(329): n = a,t,c or g
gcactgcagaatcttaaattactgatagatgaaatgtaggctaggctgtttgaattctacatctctattcttccttgtggggtttcagtgaaatagtaaaactaaaatattgccatattgaaggccgtttcttctcatttcagtttgtaccctttgatggctcagttaggaatggtggtctgtgttcttctatctaaatatttatgcttacaggacaaattagacttacaaatatagtacagtctgaatgtgtgactactcttgggctctttttgtctagaggaaagcaactgattataaagcatgctttgctttcatagnactcaaac

SEQ ID NO: 41809 - DNA, 331 bp, Homo sapiens
gtgtggtcggtcagcaagtgttgttttaaatgatctacaacgccaaatatcagagagcaaccatgccaccaacagcggtaattctgcatcagattaagcctcacggcctgaatactgccatcataacagccagtgtaaatcatgcttttatggatggtcatacacataatcatgtctttgtgtcctccataaacttgtaatcgatcatgagactgtaattcatagacacgaacaaatttatccaggcaagcagtcaccatcacttttcctaggatattcaccacagtcactgcatgattgtgacctttatagatccgcacgagctcaccag

SEQ ID NO: 41810 - DNA, 316 bp, Homo sapiens
  misc_feature (1)...(316): n = a,t,c or g
gtaaaattagtaaattggaagatggaattgaggacttcactgagaatgtgacacacagaccaagataagaaatatgaaaggccaattgaaagtaataaggannnnnnnnnnnnnnnnnnnnnnnnnnnnnnnnnnnnnnnnnnnnnnnnnnnnnnnnnnnnnnnnnnnnnnnnnnnnnnnnnnnnnnnnnnnnnnnnnnnnnnnnnnnnnnnnnnnnnnnnnnnnnnnnnnnnnnnnnnnnnnnnnnnnnnnnnnnnnnnnnnnnnnnnnnnnnnnnnnnnnnnnnnnnnnnnnnnnnnnnnnnnnnnnnnnnnnn

SEQ ID NO: 41811 - DNA, 352 bp, Homo sapiens
  misc_feature (1)...(352): n = a,t,c or g
ggagagctagcaccataccctgcttggtcactgacaccctgcacatggacactctcttcacagcaggcagtcctgacaactgtaggtgccccctaacactgccccacctcacggcttcaaggctgacttgttcaggaagaaaaaggagaagctctaatttaacagttttaagaaattaagagttttcaaagaatatnnnnnnnnnnnnnnnnnnnnnnnnnnnnnnnnnnnnnnnnnnnnnnnnnnnnnnnnnnnnnnnnnnnnnnnnnnnnnnnnnnnnnnnnnnnnnnnnnnnnnnnnnnnnnnnnnnnnnnnnnnnnnnnnnnnnnnnnnnnnnnnnnnnnnnnnnnnn

SEQ ID NO: 41812 - DNA, 319 bp, Homo sapiens
  misc_feature (1)...(319): n = a,t,c or g
ggtaagttgcttgaggtcacacagccaaaggtggcagagctgggattgagcccatatctgtctgtgccccaagcctgtggctttaactgttgaggggatttgggcagcagaggaggtgggacaaagggagggcttcctggaggctgagtttattatttgggaaaccagtaattaaaagcatgtanaacctgaggtgtnagctttcaacctggcagtgacatgctgcttctgtctttnataatcttntacanctnnntantntcnctgtttttttnnanaaagtnggnggntttnnnnngtgtnnctanttnttattttt

SEQ ID NO: 41813 - DNA, 345 bp, Homo sapiens
  misc_feature (1)...(345): n = a,t,c or g
gcaaagagggaaaacagccaacctctgagggggaaggccccagttactcttagctacaaggatgggaagcgctttctgtctccacttaaaaagagaagagcacnnnnnnnnnnnnnnnnnnnnnnnnnnnnnnnnnnnnnnnnnnnnnnnnnnnnnnnnnnnnnnnnnnnnnnnnnnnnnnnnnnnnnnnnnnnnnnnnnnnnnnnnnnnnnnnnnnnnnnnnnnnnnnnnnnnnnnnnnnnnnnnnnnnnnnnnnnnnnnnnnnnnnnnnnnnnnnnnnnnnnnnnnnnnnnnnnnnnnnnnnnnnnnnnnnnnnnnnnnnnnnnnnnnnnnnnnnnnnnnnnn

SEQ ID NO: 41814 - DNA, 346 bp, Homo sapiens
  misc_feature (1)...(346): n = a,t,c or g
gctagaactgaaaattagcatgcttgaaattaggagactgatggatagaattgacagaacaggcatagctgaagaaagaattgttgaatgaacacaaattagaaaaaaaaatccagaatgatgcagagagacaaaataataaaaatacaaaagttgagacatagatttagtaaaagatctaacagaggaaatttatgtcccaagagaggagagagaaaatgaaacataagcaatagtttaagagataannnnnnnnnnnnnnnnnnnnnnnnnnnnnnnnnnnnnnnnnnnnnnnnnnnnnnnnnnnnnnnnnnnnnnnnnnnnnnnnnnnnnnnnnnnnnnnnnn

SEQ ID NO: 41815 - DNA, 317 bp, Homo sapiens
  misc_feature (1)...(317): n = a,t,c or g
gaacaaacaaaacaaaacaaaacaaaaccaaaaaccaaaacaaaacacaacaatttaatttaagcaaaacacctgcagctaataatggtagcatttgtagtnnnnnnnnnnnnnnnnnnnnnnnnnnnnnnnnnnnnnnnnnnnnnnnnnnnnnnnnnnnnnnnntgccatatgaagaaatttattttattgtccccattttgtagatgaaggaactgaggcacagaagaggtcaaataacctgctgaaagttacatagcttgggagaaaattctgtgctatgtantccagctccagagcctgtgctttttaaatca

SEQ ID NO: 41816 - DNA, 340 bp, Homo sapiens
gcatgtttaagaagtagcacatcccaggtaaacagagtaggccattattcaactcttaggatgagtatattaaaagcattcagatatcaatgacagaagaaacaagccctaatgtttctttataacagctgattcctgcaagaaatgcaaacacaggatatttttctgttccattacaagattactaagagatggaaaatattatcattctgtattttgtcagtagtacgattgcatacatactaagttgtaaacattgaattacaaaaaatgattgtcctaattgaagcagtcctcaatccatttgagtctgtcaataccctgaaaaggaaacaacagg

SEQ ID NO: 41817 - DNA, 332 bp, Homo sapiens
  misc_feature (1)...(332): n = a,t,c or g
gaaaggacctggggttttgaaacaaatctggtgaggaataagacttttttannnnnnnnnnnnnnnnnnnnnnnnnnnnnnnnnnnnnnnnnnnnnnnnnnnnnnnnnnnnnnnnnnnnnnnnnnnnnnnnnnnnnnnnnnnnnnnnnngnnnnnnnnnnnnnnnnnnnnnnnnnnnnnnnnnnnnnnnnnnnnnnnnnnnnnnnnnnnnnnnnnnnnnnnnnnnnnnnnnnnnnnnnnnnnnnnnnnnnnnnnnnnnnnnnnnnnnnnnnnnnnnnnnnnnnnnnnnnnnnnnnnnnnnnnnnnnnnnnnnnnnnnnnnnnnnnnnnnnnn

SEQ ID NO: 41818 - DNA, 310 bp, Homo sapiens
  misc_feature (1)...(310): n = a,t,c or g
ggttgcatttaagaaagaaaaaaacagtgtgaagcaaggtctggtagaggcagaaaaagctggccatgtttggagcaaaagtagttcaatttggctagaatataggagagaaaagtacataaattggggccagtttatgtagagtcttaaatatcaggctaaggtgtttggacttaattcagtagacagtggggagccactgaagtgttttgagtaatatgatctgagccatacttttggaagattaatctggttgcattgncagtaatgaatgagaaaatgaaagtgttntccattgntggaacacttt

SEQ ID NO: 41819 - DNA, 324 bp, Homo sapiens
gctggaagtgactatgtatcagccccacctatcatcctatgtactcatggggaccactgtatctccagtactgagcatagtgcctggtatgcaaaaggcgcttgataactggacacagggttcatttacttatccagaaataaatgagctgataactactaaaaggccatgggttttgaagcccataatgtctccctcagaacaaggtgccagcagcaccaggacaaggaagagttttcttaagccctctctccctgcagagatctgcctcagtcatgctgagaagcctctaaataggagacccagcacaggggaagaagttgt

SEQ ID NO: 41820 - DNA, 336 bp, Homo sapiens
ggaataaatcaagattattttattgaccaggcactataaatgggcatgttccctacttaatgatttagactacatttattataagaacaatgtgtacacttgataaaaatcataactccatctaagcttttttatgtttacttagggatatcagttactttccattttcgtaaaccaaattttagaatgaattggtggaatgggtgagggaatagtgggacagataagaggttgtaaatttaaacaaaatgaggatcaagggtagggaaaacagaattgattttatcaagaactgcagctttgataaccacagataaaagtgagctgtgagcttag

SEQ ID NO: 41821 - DNA, 266 bp, Homo sapiens
  misc_feature (1)...(266): n = a,t,c or g
ggaggagcagcacctagatcaaagccctaacaaaggactatactacaacagatctggctgattaataataaagtttcctctgtaaaacctggaccttgatattagcctacagtagactttatatttaaaaatgcnnnnnnnnnnnnnnnnnnnnnnnnnnnnnnnnnnnnnnnnnnnnnnnnnnnnnnnnnnnnnnnnnnnnnnnnnnnnnnnnnnnnnnnnnnnnnnnnnnnnnnnnnnnnngtctctactaaaaaaaaaaaaaa

SEQ ID NO: 41822 - DNA, 336 bp, Homo sapiens
gggatcaaagagaggtcagatcatttgtccagagcacatgggtaccaagtgacaggccatgatctgaactcaggaacactggctctgatgtgccattctttgccatgtcaccgtagctgccaagagcataggtttccctcttccgaaccctgcctcaagcaatgaaatttctagaaaagtatatgaagttttaatacgatagctgctatggtctgaatgtgccccttttaaattcatgcactgaaacttaatcatcaatgtgataatattaagaagtcgggcccttaggaggtgaatgagattagcgagtttatatgagggctggagggagctagc

SEQ ID NO: 41823 - DNA, 327 bp, Homo sapiens
gtaattccagaggccatgtacttaacttatgtacgatgttgtcttggtgccattaatttgatattaatttcatttacctgatgattaatgtttgtcagacagaaaaagtgatgcatatgagaagctgtggggccctttctgtgttggctcgtggggggccctgttcttgtcctggtccttaggtcttccgcagtgagtgcttctcaagcagtcttggtggacagaaaccttgttgtatgccagtcaatccgcttctgcatttcttcagaatatttttgcatttcctcttggaactgattccaagtatccttagaggtagcagattgt

SEQ ID NO: 41824 - DNA, 335 bp, Homo sapiens
gtaaaaatggagaaacagacttctgtgttctacccaggaaattctggtttggcatttgggagccactgatttaaaagacatcccttagttggttttttgagggtaaaataaaagaatcaccaccttccattcagtcacgcactgtgtgtttgaagccagctgcttctcaagccccgggccaggaactggggcaccagtcccagccttcaccaagtctttcatggtagacaggccaatacagcaccctctgtggaccacatagtgccaagcatgtgacatgtcttggctcgagtaagccttctaacaagcctctgaagtgtgggtcctgttactcc

SEQ ID NO: 41825 - DNA, 242 bp, Homo sapiens
  misc_feature (1)...(242): n = a,t,c or g
gctcctgtcctccacatggttgtgcagggccatgtgtgaagacagcatgagtcttaacnnnnnnnnnnnnnnnnnnnnnnnnnnnnnnnnnnnnnnnnnnnnnnnnnnnnnnnnnnnnnnnnnnnnnnnnnnnnnnnnnnnnnnnnnnnnnnnnnnnnnnnnnnnnnnnnnnnnnnnnnnnnnnnnnnnnnnnnnnnnnnnnnnnnnnnnnnnnnnnnnnnnnnnnnnnnnnnngnatttag

SEQ ID NO: 41826 - DNA, 339 bp, Homo sapiens
  misc_feature (1)...(339): n = a,t,c or g
ggatttttttcgnnnnnnnnnnnnnnnnnnnnnnnnnnnnnnnnnnnnnnnnnnnnnnnnnnnnnnnnnnnnggtagctgatagcttattgtcactgtaacctggaactcctggactcaagtggccctgcatnnnnnnnnnnnnnnnnnnnnnnnnnnnnnnnnnnnnnnnnnnnnnnnnnnnnnnnnnnnnnnnnnnggcaggagggntngcnntgttcccnnngnnnatntgnnantcnagccctacctngntccttncngtntactnnctnatngagnntnngngacctnntcccccgtgcacnggnttaaactcccnccttaangatgnncttgg

SEQ ID NO: 41827 - DNA, 333 bp, Homo sapiens
ggagtgagtcttgaggccagtgttaggtttcaggcggtatcagatttgaccttgaggctggggtcagagtagggttaggttggggattagcattgggattgggttggttcagttttggtgccggggtagatctgatggtggatctggttaggttagagctaggttttggcttgcattgggagtggggactagggaggtgcatagcttccagccacccctttctcttccagaacttcatcaaagccaagcagtacccaccaagcacacaggtggaggtgcagaatgatggggctgagtcggccgtctttcagcagctcttccagaagtggacag

SEQ ID NO: 41828 - DNA, 343 bp, Homo sapiens
  misc_feature (1)...(343): n = a,t,c or g
nnnnnnnnnnnnnnnnnnnnnnnnnnnnnnnnnnnnnnnnnnnnnnnnnnnnnnnnnnnnnnnnnnnnnnnnnnnnnnnnnnnnnnnnnnnnnnnnnnnnnnnnnnnnnnnnnnnnnnnnnnnnnnnnnnnnnnnnnnnnnnnnnnnaaaaaaaattnnnnnnnnnnnnnnnnnnnnnnnnnnnnnnnnnnnnnnnnnnnnnnnnnnnnnnnnnnnnnnnnnnnnnnnnnnnnnnnnnnnnnnnnnnaggattacaggcatgagccactatgcctggccacgttgttttcttaagctcatcaccaagcanagaggggcactgataanccctggttggaaccaa

SEQ ID NO: 41829 - DNA, 116 bp, Homo sapiens
gcagagaactgtgccagagaagtgtggtttcagtgtgccagcattttcctgcgtatctgtttatttggttaattagcacctgcaaagatggttatagcctcctttttttttttttt

SEQ ID NO: 41830 - DNA, 347 bp, Homo sapiens
ggcagtttataattatattgctagaaaaaggaatattgggcaaaaagtgggtagttaacatatgcaaataagcaagggcctcatcggaattttcatggtttcatcactaaaaatgttggggtgctgaaatcttgaggggctcggttgcaccagaaggggatcctttgtcactagtgcaggcaggaagggatgcttgagggaggatggggggaacttttcaatagttcctcccctcccctaccaatagcgggtgggagggcgttggtttagagccaagcctctaggagaagatgagagcaatggctaaagtttgtctggcctccccctatgagaagggggcggaggct

SEQ ID NO: 41831 - DNA, 155 bp, Homo sapiens
gctccaacactcagaggttgggagaagatggcaatagagatggatataacacagatgtataaattcaaaagaagaagtacctcaaataaatattaagtgcaacatctttcaaaacagtattttttttagataagagtaaagtttttttttttttt

SEQ ID NO: 41832 - DNA, 293 bp, Homo sapiens
  misc_feature (1)...(293): n = a,t,c or g
gtgcttattgttgactcaagttctttccatattctgcatgaaaaacatacatgtaatatatagaattctttgtctccatttgtgacaaatattgtgaatattttcatgtttggtttgcctgttcattttcttaatggtgtcttttgaatattttttattaagcctaatttatcaaagatttgggtgnggaggctnangncggctccccatnacttatgnnaggccaaggtangctnatnacctgangacgnannncnnnaccnncnnnccaananngnnnnnnnctannatac

SEQ ID NO: 41833 - DNA, 99 bp, Homo sapiens
  misc_feature (1)...(99): n = a,t,c or g
gtaatgaggttgagcatcttttcacatgtttatgggccatttacttcctcttctatgaaattactattcaagccctttgcccatttttctgntatgttg

SEQ ID NO: 41834 - DNA, 343 bp, Homo sapiens
  misc_feature (1)...(343): n = a,t,c or g
gaattgaaatgnnnnnnnnnnnnnnnnnnnnnnnnnnnnnnnnnnnnnnnnnnnnnnnnnnnnnnnnnnnnnnnnnnnnnnnnnnnnnnnnnnnnnnnnnnnnnnnnnnnnnnnnnnnnnnnnnnnnnnnnnnnnnnnnnnnnnnnnnnnnnnnnnnnnnnnnnnnnnnnnnnnnnnnnnnnnnnnnnnnnnnnnnnnnnnnnnnnnnnnnnnnnnnnnnnnnnnnnnnnnnnnnnnnnnnnnnnnnnnnnnnnnnnnnnnnnnnnnnnnnnnnnnnnnnnnnnnnnnnnnttcccnanaacacaagccccaaaccgttaacancnggctntggatcctagcc

SEQ ID NO: 41835 - DNA, 335 bp, Homo sapiens
gggaagaacaggatttgaggcatgagagggctacaaggtgggcttggcagaaaaccagcttggccaagtccacactttcatgtctacggtgagagaggaaccatgagcaaatgtttacaattttttgtgcttctgctcaatttttttctctccaattgactgggtaagcctcctgccatagtcaaagggcttcattcatttgttcattcactcactcaccaaacaagtctgtctggcacaacacgaggcatgggggccgtggtcagtgtgagtgagactgataggtctctctctcccacagtctgatggacaggcaggcagacagatacagagca

SEQ ID NO: 41836 - DNA, 345 bp, Homo sapiens
  misc_feature (1)...(345): n = a,t,c or g
gcggcacgnnnnnnnnnnnnnnnnnnnnnnnnnnnnnnnnnnnnnnnnnnnnnnnnnnnnnnnnnnnnnnnnnnnnnnnnnnnnnnnnnnnnnnnnnnnnnnnnnnnnnnnnnnnnnnnnnnnnnnnnnnnnnnnnnnnnnnnnnnnnnnnnnnnnnnnnnnnnnnnnnnnnnnnnnnnnnnnnnnnnnnnnnnnnnnnnnnnnnngntttctgancanagtgggactattacaatttncacagantgatattccaaagtcnctctntagaggtcancttgcnacacacctccccacaggtggacactggtcagttttgnaaganacaggagccaaggnctctgc

SEQ ID NO: 41837 - DNA, 336 bp, Homo sapiens
ggtggcgtggatatgaaggagctggggccgagcactggggcatccctcagtctccgtggccccttctcagacaccagcactgtcacttggcaggatgacagggcctgggctggggccacaggacgagccataataggcttaaggggagactgtaaatccctttccaggctgagcaatcagctccttcaggcaggcagaggctggagctcccgggggagggccctgtactcctagggatgtgtcatgtggttgctgttcttagactcctgccccatggtccctagtggcccagcagggaccaggccaggcctagcgtgccagtccctcagagcaggc

SEQ ID NO: 41838 - DNA, 344 bp, Homo sapiens
gggaacgtctgaggttatcaataagctcctagtccagacgccatgggtcatttcacagaggaggacaaggctactatcacaagcctgtggggcaaggtgaatgtggaagatgctggaggagaaaccctgggaaggctcctggttgtctacccatggacccagaggttctttgacagctttggcaacctgtcctctgcctctgccatcatgggcaaccccaaagtcaaggcacatggcaagaaggtgctgacttccttgggagatgccataaagcacctggatgatctcaagggcacctttgcccagctgagtgaactgcactgtgacaagctgcatgtggatcc

SEQ ID NO: 41839 - DNA, 336 bp, Homo sapiens
ggacacctctgaaacgcagaaccagctcctcactttgaggaacagcaattgcagtctctcaccacccctgagagttgtagcatcagtacaactgagttttacatattggaaaggatttttaaaattcaggcatttgtaagaaaatgaaggcatgtgcagactcacacacacaaaatctctctctctttctttctctgtctttctttctctctctgtctctaaaaaactgggtaggatggagcccaatgtgtctgttaatgagtttcaaagttggacaaatgccaacgggcagagaattttgaccaggagtgtgaaggaaacgagaaccacaccccg

SEQ ID NO: 41840 - DNA, 336 bp, Homo sapiens
ggacagtactatgtcagttcagccacctattttgcattgttttctataaggaggcaaagcatatgtgttttcctgttatgcaccttttatagcctttaccactgtgtaatgttcacaaacaccaaagtaaaggaaaaatgcaggatgttaccgtaaaatccagctgctattcatggagctgaaaaacaaagcacaaataatagatagctaagttaagaactactaagtagtttatagaagtagggaaaaacgtaatactgctttttattcatgtctttaaagcctttttcagaataagtgccaatcactgatgttgtaaataatggtgccttaact

SEQ ID NO: 41841 - DNA, 344 bp, Homo sapiens
  misc_feature (1)...(344): n = a,t,c or g
gaggcaagcacagatccctgggctcttgagcaccacactgccagggcaggattctggaagcaaagttatatccgcatccttaggaaccgcacaaccacagcaggaaaaagtagttggatcatctcctggccatccagctgtgcaggtggagagtcattnnnnnnnnnnnnnnnnnnnnnnnnnnnnnnnnnnnnnnnnnnnnnnnnnnnnnnnnnnnnnnnnnnnnnnnnnnnnnnnnnnnnnnnnnnnnnnnnnnnnnnnnnnnnnnnnnnnncccagcaaagtactgataaagatcttnnnnnnnnnnnnnnnnnnnnnnnnnnnnnnnnnnnnnnnnnnnn

SEQ ID NO: 41842 - DNA, 329 bp, Homo sapiens
  misc_feature (1)...(329): n = a,t,c or g
gcggcacgagtgggcatatactatatataagtaaggggtttaaaaaatgatatannnnnnnnnnnnnnnnnnnnnnnnnnnnnnnnnnnnnnnnnnnnnnnnnnnnnnnnnnnnnnnnnnnnnnnnnnnnnnnnnnnnnnnnnnnnnnnnnnnnnnnnnnnnnnnnnnnnnnnnnnnnnnnnnnnnnnnnnnnnctnnnnnnnnnnnnnnnnnnnnnnnnnnnnnnnnnnnnnnnnnnnnnnnnnnnnnnnnnnnnnnnnnnnnnnnnnnnnnnnnnnnnnnnnnnnnnnnnnnnnnnnnnnnnnnnnnnnnnnnnnnnnnnnnnnnnn

SEQ ID NO: 41843 - DNA, 334 bp, Homo sapiens
gggaatacagtacttgcagcctattgtctaagagtactctttgacatttataatatcaggtataagcatttccaaaagagatcttccttaacataccatacccttaatgatcttttgacaggacagaaatggggagagatgttagcagggtatattttaatttatattctccaaaagtatacatcctatactatgatgaattattatggattttattttcatgtaatatggactcccttgcataactggagagaaacagcttccaattaaagtaattatgctagcagctctgagactactctttggaactgttgtcagcactttggtttgaaga

SEQ ID NO: 41844 - DNA, 343 bp, Homo sapiens
  misc_feature (1)...(343): n = a,t,c or g
ggagagagagagagagagagctaaagagagagaaagtgatcaaatagaaatagtatatgctagactcagttttatatacttcagctttgagatttggccaagtgaaataaccagattaacaatttagaagagatatcttagtttacattgaattacatgttgagttcatcctacatatatgtacatttcttctcgtttaacatcagttttgaccttgttagaatgtaatcatattctatttttatttgactcaggctttcagaatccttttctaaaaaaannnnnnnnnnnnnnnnnnnnnnnnnnnnnnnnnnnnnnnnnnnnnnnnnnnnnnnnnnnnnnn

SEQ ID NO: 41845 - DNA, 334 bp, Homo sapiens
  misc_feature (1)...(334): n = a,t,c or g
nnnnnnnnnnnnnnnnnnnnnnnnnnnnnnnnnnnnnnnnnnnnnnnnnnnnnnnnnnnnnnnnnnnnnnnnnnnnnnnnnnnnnnnnnnnnnnnnnnnnnnnnnnnnnncaaaatttctactctttccgaggggctaatgctgttctcagctgtgaaactttattgttgtcaattctggcatttaattctgaatagggtgccatcaccttcactactctattcatgtggtctttcaacaaatgtattgaatactactgtatgctatgttagggataagaagtgacccagactgctataagggaaagataaaacagtagtaggagagtgtataa

SEQ ID NO: 41846 - DNA, 328 bp, Homo sapiens
  misc_feature (1)...(328): n = a,t,c or g
gnnnnnnnnnnnnnnnnnnnnnnnnnnnnnnnnnnnnnnnnnnnnnnnnnnnnnnnnnnnnnnnnnnnnnnnnnnnnnnnncctggagccctggaaccagttgcctaggaataccaagggacaactgtacacacatatatatagcaactttttcattttaaaaattgacctaatgtaaggaagggatccatcaattacctgaaacaggctataaatgaatacttttgaaaagatnnnnnnnnnnnnnnnnnnnnnnnnnnnnnnnnnnnnnnnnnnnnnnnnnnnnnnnnnnnnnnnnnnnnnnnnnnnnnnnnnnnnnnnnnnnnng

SEQ ID NO: 41847 - DNA, 316 bp, Homo sapiens
  misc_feature (1)...(316): n = a,t,c or g
gaggcactgttctatgtaacatattgcttttttccctctaagaaaatagagctcttctgtatttgtgaagatttcatactggagataaggtccagtaaataaatttttccccccgggatacttggggatggaaagacgtggatgcttggatatatgctgggcttatttatgtatgtgggtatttagggaagtgannngactganctaangggaanggatngnncangccangtgtctggngnngcnccncnnngacgctnntannacncgnccatnncnnatnnntaccnnncnnngngnngntgcnnanctctcc

SEQ ID NO: 41848 - DNA, 286 bp, Homo sapiens
  misc_feature (1)...(286): n = a,t,c or g
ggatcaaagagggaagtgaccttccttagagtcagtgtgtaaagtcctaaggaagataccacgtggggtgctggggccatgtgcccatccctggcccatgaccatggggatgctacactaactgggggccacgcatggctgttcctgccctgaactgccagctggctttgcagtgcagcctcaccagaatcacatggaatagtagggatatgaattgtttcccaaagaaagtgtgtggggtggtagaattactgnnnnnnnanggnntcntgtccantnnnctacc

SEQ ID NO: 41849 - DNA, 313 bp, Homo sapiens
  misc_feature (1)...(313): n = a,t,c or g
ggtgatggtgatgacaggattgtgttggtacctgggagaggaaatactgaggtgggccatctcccgcacaccagttcctatcatgagttctggccaagactggaggagnnnnnnnanaccctaggcctgngattgatgcatttatttattcattcattgaactagggttttgtngatgatcttncntcntatactacccnctagngncacancactgnntancncacnccanccacngtcgctacnanaannaggannanctcctctcggccccactgnttcccnccnnnnntccccctntnctnncnncccc

SEQ ID NO: 41850 - DNA, 329 bp, Homo sapiens
  misc_feature (1)...(329): n = a,t,c or g
ggggagaggatattagcaatatatgtgaaaaataaaagttaatatctttaatattaaaagagctctcttttttactttttaaannnnnnnnnnnnnnnnnnnnnnnnnnnnnnnnnnnnnnnnnnnnnnnnnnnnnnnnnnnnnnnnnnnnnnnnnnnnnnnnnnnnnnnnnnnnnnnnnnnnnnnnnnnnnnnnnnnnnnnntaaagagctcttaaaatcaacaagaaatacacttgaagaacccaacagagaatgggcaaaagctagagaatgggcacatagaagaaatannnnnnaaaaacattaaaggatttcactttcattaat

SEQ ID NO: 41851 - DNA, 83 bp, Homo sapiens
gggtagcatagttttaactaaaatcctaaacttcgttgccttctaaaaaccttaaattgctacattttgtttttttttttttt

SEQ ID NO: 41852 - DNA, 324 bp, Homo sapiens
ggataaatctgtggccagaatggtcaggataagaagagataaggtgcatattaccagtaacaggaatgagagagggggacatcactacacgtcctatggacattaaaggataataagggagtattaagaacaacttcatgccaaaatattcaacaacttagataaaatacacaaaattccttgtaagacataaatgtatggttctttgacttcacgttataatacgttgctgtcctgcattttgaagtacaagtcttatttgttagaatttttaacactagaggattagagaatctcatcttgctcttctctctgtatgcttac

SEQ ID NO: 41853 - DNA, 332 bp, Homo sapiens
  misc_feature (1)...(332): n = a,t,c or g
gatctttttctttttctgcaaaatatctcagtagctaatatgttgctcttcatcactcaataagcagcaaaaccaacccagcacaatctaacacaacacctcaaacagagcctgtgaacctcagtggctacaggtggtgggatcgaagctgcccagctgaaattccaaacctaggacagtggatagaacaggaaaaaagacaaaaaataactatcagctgcaagctggtttccattactcaagcagtgggatcatcaatattcnnnnnnnnnnacagttcatctgttctttgtgnnnnnnnnnnnnnnnnnnnnnnnnnnnnnnnnnnnnnn

SEQ ID NO: 41854 - DNA, 331 bp, Homo sapiens
  misc_feature (1)...(331): n = a,t,c or g
gnnnnnnnnnnnnnnnnnnnnnnnnnnnnnnnnnnnnnnnnnnnnnnnnnnnnnnnnnnnnnnnnnnnnnnnnnnnnnnnnnnnnnnnnnnnnnnnnnnnnnnnnnnnnnnnnnnnnnnnnnnnnnnnnnnnnnnnnnnnnnnnnnnnnnnnnnnnnnnnnnnnnnnnnnnnnnnnnnnnnnnnnnnnnnnnnnnnnnnnnnnnnnnnnnnnnnnnnnnnnnnnnnnnnnnnnnnnnnnnnnnnnnnnnnnnnnnnnntcccggccaaaagcatgtctttattattggccttcattcattgaacagattccatgagccatacattatactg

SEQ ID NO: 41855 - DNA, 317 bp, Homo sapiens
  misc_feature (1)...(317): n = a,t,c or g
gctgnnnnnnnnnnnnnnnnnnnnnnnnnnnnnnnnnnnnnnnnnnnnnnnnnnnnnnnnnnnnnnnnnnnnnnnnnnnnnnnnnnnnnnnnnnnnnnnnnnnnnnnnnnnnnnnnnnnnnnnnnnnnnnnnnnnagctgcatgttggacaagcttagtctagtggatgaatgnannnnnngaaagagttcaatagatttggggtctttggnccctgagcacacactgggcataaaacaggangntctcacgaggcnatggagccattaatcttgccccagggccntggtctggcctccctaccactctgtacccca

SEQ ID NO: 41856 - DNA, 319 bp, Homo sapiens
  misc_feature (1)...(319): n = a,t,c or g
gaattttgagtcttttgtatggcatagtaattttcttattcttactttgatgtgttaccactgcataaatagaatagatagtattctcattttacaaatgaggaaaccagtagtaggattggctttaggttcttttactaatcttatactgccaccctatcagctgatactttcctgtatataaaaggtataacaactaggatagtcttaacttgaaagaagttgtttctaaccaggaagaacctcatagcctgagaagtttaaaaaacacacatatacagancgaatacntggangncctnnnccaangnaccnttat

SEQ ID NO: 41857 - DNA, 330 bp, Homo sapiens
  misc_feature (1)...(330): n = a,t,c or g
ggtaaataaagaccatgggcaattgtaatgaatttcgccttcattctttgactacatgactgtccccagagctgtaactttattgaattttttagaagccatttagctagcaactgagcctaaccagccactcaccgtcattattcagtgctcttttattattgtctatttctcctccaacttggctacactcacaaagtgataaaaacttgcatttgttttctttccttttcannnnnnnnnnnnnnnnnnnnnnnnnnnnnnnnnnnnnnnnnnnnnnnnnnnnnnnnnnnnnnnnnnnnnnnnnnnnnnnnnnnnnnggtctctcat

SEQ ID NO: 41858 - DNA, 325 bp, Homo sapiens
  misc_feature (1)...(325): n = a,t,c or g
gcgattggagatgacaatggaagtttcactcacatgaaaaatctgaagagactgtccaagttatgtattgacctgcctttaggtttagcaatcaaaatttactactgagacttttaatttaaaaagccctagggtaatcacaaatgtcatcttcaagcatataaaaatctctgtattttcactggggagcttgttaactttgcttggcatggagggagggtgttcattaaggctgcagtcataattgtggttntaactcanatattgataggaggcttttacagtcaacccaaggancatcctgncanacgtatanangtncacc

SEQ ID NO: 41859 - DNA, 324 bp, Homo sapiens
  misc_feature (1)...(324): n = a,t,c or g
gatttctaatagtggtattcatttaaagaacatttatagagaaaaatagtgttaggttacagtatttatgtagtattgaacattttttccctgtatcttctttattcaaccccttatttctgggatttaaaaaaatcctcagtctgaggctttataatttcagaatttaaattttctgccttgtggcttttccttagatttggtttaccctctatgtaaaggaaaagaactagtaatcttaaggtctcttccagctctaaaagtgttttgttcctttaatttaantacacagattctccttgacctacaatggggttacctact

SEQ ID NO: 41860 - DNA, 319 bp, Homo sapiens
gattacaattttcagtctaatgttaaaggtgttcatgctactgattattttccacctcctatgaggcaacaaataggtgaggccatgtgaacagcttaaatggccatagtgggaaataacctagagttcaaacccaagggagaagttcatggagtcactgagttgtatgttacaccattgatttaataactgctttgtaccacatgaaatgccccatccattgcaagaagcagcatgtgttccaaagtgttctaagtgaaaataaagcctgtcacagaatcaaggacaaagggaaattatacttgtatcttagggatga

SEQ ID NO: 41861 - DNA, 324 bp, Homo sapiens
gatggaatacaagcttattcacttacatagcatctacggcagcttttgtgcaacagcaaagtggagtagttgcaacagacactggcccataaaacctcaagtgtttactctctggccctttacagagagaatttgctgatcctcagctagacggtcaacgtggattaatcttaaggacataatatggaacaacaaaaaactagttgcacaagaaataggatactatttatattgactttagcatgtgaagcaattttgtatttcttatgggttcatgcaaacatagtaaaccgtatgaaaacgtgcatgggaatgctgaacaca

SEQ ID NO: 41862 - DNA, 321 bp, Homo sapiens
  misc_feature (1)...(321): n = a,t,c or g
ggccacgctctggctgacagaggatgaggcaagctctacaggtggcagggaacctgtcggcccttgccggcacctgccagtctccactgtgtctgacttggagttgctgaagggactccgagcacttggcccagagttttcagggcacagcctagaactggctgcagccctgcggacgggctgtattccagatgtccaggcagatgaagacgcgctggcccagcagtttgagcagccagatcctgccaggaggtggcgggagggggtcgtgaagtctagctttacctatctgctgctggaccccanggagactcacgacct

SEQ ID NO: 41863 - DNA, 323 bp, Homo sapiens
  misc_feature (1)...(323): n = a,t,c or g
gccagagacgtggcccacgtgggcaggacggccgcaggatggggtggctgtgctggtccgacacctgggctacaagccataagagtacaagatgggcaggaccaagatcttcatccgcttccccaagaccctgtttgccacagaggatgccctggaggtccggcggcanancctggccacanagatccaagctgcctggaggggctttnactggnggnagaaattcctccgggngaagagatcagccatctgcatccanncgtggnggcgtggaacactgggccggangaaggcagccaanaggaactgggnggcacagacct

SEQ ID NO: 41864 - DNA, 246 bp, Homo sapiens
  misc_feature (1)...(246): n = a,t,c or g
gatccaatggtttcagtccatgttctgcacccgtattgatgacctgtcatgttccacacactttaagtattgtacattcttttaatgctcacaacattctcccctatctccgcaccccctgccctgctccnnnnnnnnnnnnnnnnnnnnnnnnnnnnnnnnnnnnnnnnnnnnnnnnnnnnnnnnnnnnnnnnnnnnnnnnnnnnnnnnnnnnnnnnnnnnnnntgtctccaaaaaaaaaaaaaa

SEQ ID NO: 41865 - DNA, 323 bp, Homo sapiens
gattacaggcatgagccactgtgcccagctggcctggttctaatttagctcatgtcatctggtgaatgtctaaaatcctggtagtttccccaggtgcttggatttggagtcccaggggatcaagaagtcaacatgtattttgaccccccatagaacatcagagatcacaggagctgttactattaagtaagtccagtgtgctctgatacagatttctccaaaaccatttttagctgtgtggccccctagctgtttgcagcaattaatatttatgagactttatttaaaaaaatatatcatttagaggtggtttgctgtgctga

SEQ ID NO: 41866 - DNA, 190 bp, Homo sapiens
  misc_feature (1)...(190): n = a,t,c or g
gcaaatatatcttaaaacaataatggaagcaggaatagaagattgtattagtgaaacagaatatactcttgcttataaataaataaattataaagtatatggtaaatcagaggatattaaaataagagcttaatgccaggtgtgatggttctcacacctgtaatccttgcacttttatgaggctgnagga

SEQ ID NO: 41867 - DNA, 352 bp, Homo sapiens
  misc_feature (1)...(352): n = a,t,c or g
gagcatatttatttatatgtaaatcattacttgagttgtatccactattcttactataaagagtgttcagataagtcaccgaatatttatataaattttcttcacccatagtagaagtctatcttacnatatggatttggggaaggaccnagaaatatattctaagcccttttgggccagatatttaatgataaactcttcttttttggttttgggttttttggaaanggaagcttggttctggcaacccaggtngaatngcanggccgggccctngnttnatggacccttggcctcccgaggtncaggcantnnccttcttancctcccaggaacnngggnttncgggccc

SEQ ID NO: 41868 - DNA, 344 bp, Homo sapiens
gttcaataccccgagaaaacatgctttcctccatttgccatgctgtgggcaaagagaaagaagagctgcagccttcctgggaacccagatctcagggcttcctaagccagagctgtgacacactgtaataccttctatggggctctgaagttcctggcatctctgagctttcaggtgccactgcattccccttgtctggatgtgggtgcctgcagtggaagcctcttgtggtgtatctggtacagctacagccttgcacggagctggcacctgtagctgccttccctgcactgaagccagtgtacctggctgtgcacagtgggcagacctcatgattgctcact

SEQ ID NO: 41869 - DNA, 346 bp, Homo sapiens
  misc_feature (1)...(346): n = a,t,c or g
ggatataaatatgttccctgccttcaacagttgatgtaatcgaatttcttgactattacgtaaaagtgtctttaaagttataaagcattataaaaatctgtgatagtgataaacacacacacatacacacatatggatatgtatatattttttccccaccagggaagcctgtctgaggctatattnttgnnagganatatggcnnnnngtactgncgtnttgtggnnacctntnnnnantatntcttnntccacngtacttgnctnatgnagttcctnnanactnnttttacannccccntnngannngnctnnnnnnnnnccntagncttgtntcntntattctc

SEQ ID NO: 41870 - DNA, 336 bp, Homo sapiens
  misc_feature (1)...(336): n = a,t,c or g
gtacaatttgaattttggtgggcactgccaaattgctctccaatttagggatgttcagaagttcacctttgtccttagtaatttgccaaaatctgccatttagcttgggtctttggaaggtgtgcttttaacatttctagcatccctgaattgtgtgtgatctaccatcatgtaatagcttaagttactatcatatggaattaatgtaacaatgtcagnatgagaggtgtgacctttggacttactactttctaataacagnanntatttnagatataacttgaaatactccttnngggattnanncantgaannctatcaatcnnanntanaaca

SEQ ID NO: 41871 - DNA, 284 bp, Homo sapiens
  misc_feature (1)...(284): n = a,t,c or g
gctaacaaccacatttacaacttccccagctctgagacacacttgcctccaccccttccatcaccccattttaagatgaaaataccacaccagcctggaaggaagaagttacttgcccagggccacatagtgagttaagggctgatctagagctaggaagctgtcttcctgaaccataatcctggactcttctaacctctctactcatcgcaaatagagttcattttagngatttgaaggaagatgggacaagnnttttnanacacctgnnngacnncntggaa

SEQ ID NO: 41872 - DNA, 267 bp, Homo sapiens
  misc_feature (1)...(267): n = a,t,c or g
gggcatctttctcaagggagaagatactaatttttttaaacaaaaggaaaatagaaagtgaaatgactttacagtgggatactatactaactgattttagtgggaccttcctgtaaagtgaatattctgtaaaagggatgacnaatgagtgccacctnctgtccaagatgagggaggaacaggtancacttgntgataancactctgtggncncaccaggntccttggtgattnggcttctntnttcnnnncnnttnnctnantttc

SEQ ID NO: 41873 - DNA, 249 bp, Homo sapiens
  misc_feature (1)...(249): n = a,t,c or g
gacagccttgtatgaggaattggctttttatttgtctgtgtgctcctcgaggctaggatgggaccatatcttattcacttttgtgtccccattgcctggtacatacctccttcgtgaatgttgaatgaatgaatgaaatgccatatgtattcagaactgggaagttcagaagagggacaaataacattttattgggtgtatgaaaatgngggtccatggntttaananncnnnnanaanncntcactat

SEQ ID NO: 41874 - DNA, 298 bp, Homo sapiens
  misc_feature (1)...(298): n = a,t,c or g
gcaccacttctccatgctcctcattcaccactcagacaaaggaaatattaataacgataatattgaccagcatgtactgagcaccccttatgtccgcggtgctgtgcccagcacttcctatgtaacaaccaggatactggtattattgctctcctcttctgatccatagaggttgcctaactttcccaaagtcaaccagcagaatggaactcctatccatgtctgcctgaggctcgttcccaggcccttaacctctgagccatgtgggtagttnncttntatgnntgctanangaagg

SEQ ID NO: 41875 - DNA, 282 bp, Homo sapiens
  misc_feature (1)...(282): n = a,t,c or g
ggatctgatcttcttccccctaaatttgatcctcttcctgtaatctattgtttccatcatcttcaactcttccctttccctctcccttgtccctcagttctagtcaatcacaaagtcctacagtttcactttctgtataccttatttctggaattcatctntagacatcaanntatatatatatanancattntctnncnntcnnggcnnnatntnatnnntatntnnananctcncntnngnagnttnnnannnactcntncacncnacggnnttnctata

SEQ ID NO: 41876 - DNA, 337 bp, Homo sapiens
  misc_feature (1)...(337): n = a,t,c or g
nnnnnnnnnnnnnnnnnnnnnnnnnnnnnnnnnnnnnnnnnnnnnnnnnnnnnnnnnnnnnnnnnnnnnnnnnnnnnnnnnnnnnnnnnnatgcactaccacacccacctttattctattatatcaaatgaacaggaacgacaacagaaatgtctccattctaagaaaacctttgttttctgaaagacttgaatcccgtagagtacagtaaagctccctaaggacagggatggtacaatcttggtgtgtggtctttcccattgttctaggcccaaaggaggccttcatttgggatttgngtaaataactttncagngngntcttgngganaaaacat

SEQ ID NO: 41877 - DNA, 340 bp, Homo sapiens
  misc_feature (1)...(340): n = a,t,c or g
ggaagagttccctaagtttaggaaagtgtgcagagaagagcgtgaagaaggctgggagagggaggggacggtggtgctgggcacacagagcctgtcctgctggcgtcctgcagtcccctacactagttcctcctcatgcatgagccagggggccctgctacattctaggcaactgggcttggagatgtgagattctaaggtcactgagctgctgaaagggggagctgaactcagcacttangaacttctttaccccctctctaccacaaaacaacattggaacatgctgtccagntgttgancatccaatggttagggatacctcttatannggccccca

SEQ ID NO: 41878 - DNA, 353 bp, Homo sapiens
  misc_feature (1)...(353): n = a,t,c or g
gcatagggctcggcgtggactttaaagctcannnnnnnnnnnnnnnnnnnnnnnnnnnnnnnnnnnnnnnnnnnnnnnnnnnnnnnnnnnnnnnnnnnnnnnnnnnnnnnnnnnnnnnnnnnnnnnnnnnnnnnnnnnnnnnnnnnntttaccacngatacatatnttaagccatgcctgctggcgcgctccttcaatctcagccacntgnnagnnctnantccggncgaanctnantgcnaacccgannnnctgaantnttattntgangaccacntgtgcnacntgntnanacnctcctttanaaatgtantaatttaccntnangnngnnncttctcntatcnttctaac

SEQ ID NO: 41879 - DNA, 342 bp, Homo sapiens
  misc_feature (1)...(342): n = a,t,c or g
gtagtaacaccatagtgcagcacattatttaagtgtttatggtgctggtgtaaacgtgctgcactttcagttgtataaaagtacaagacagnnnnnnnnnnnnnnnnnnnnnnnnnnnnnnnnnnnnnnnnnnnnnnnnnnnnnnnnnnnnnnnnnnnnnnnnnnnnnnnnnnnnnnnnnnnnnnnnnnnnnnnnnnnnnnnnnnnnnnnnnnnnnnnnnnnnnnnnnnnnnnnnnnnnnnnnnnnnnnnnnnnnnnnnnnnnnnnnnnnnnnnnnnnnnnnnnnnnnnnnnnnnnnnnnnnnnnnnnnnnnnnnnnnnnnnnnnnnnnnnnnnacagagcg

SEQ ID NO: 41880 - DNA, 341 bp, Homo sapiens
gggcttgaccattggctgttagtaatgtaattctgacgtcttactcctgatcctgagatgaattctcagggttcttagccacttttgtgccgtggaccctgtggcagtttagtgaagcccaaggatcttttatgtttcgagtaaatggatgcatagaattacagggacaaccgtttttgaaataattagattactattttgaaacaactttgaaaatgtttaaaacctttatggtaaatattttgttgatgtattaaattttaaaaccagaaatttagtacggtctactcagtagtatggtctgattaccataattccacaataataaggctcagctaact

SEQ ID NO: 41881 - DNA, 346 bp, Homo sapiens
  misc_feature (1)...(346): n = a,t,c or g
gtgagaccagtgttcctcacactggagggtgatagaccccaaggggaactgaagagtggagctcagtttcctctcttctcaccctccacctgttcctcatttgccattattcaccttgtcccttgcctgcccctctctattagtacctcatcctccactcaccgttccttatcatacttctcacctctacttagcccattcttgtaggatggaaatatttgagaactactgagttagaactttactatcatatgaatgtgntatgttatatgactanttntgcancantntnnnttcnnnttttntnnttgntntgnntagcctntttctnctttctnnttntccc

SEQ ID NO: 41882 - DNA, 343 bp, Homo sapiens
  misc_feature (1)...(343): n = a,t,c or g
gactgatttgaaatgccatttttaatgtattccctaacatatttgggtctgtttctggatcctctaacccactgttctagagagaaaggtgatcgttttagattatttgtctctctgtaatctaaaatccaaggtannnnnnnnnnnnnnnnnnnnnnnnnnnnnnnnnnnnnnnnnnnnnnnnnnnnnnnnnnnnnnnnnnnnnnnnnnnnnnnnnnnnnnnnnnnnnnnnnnnnnnnnnnnnnnnnnnnnnnnnnnnnnnnnnnnnnnnnnnnnnnnnnnnnnnnnnnnnnnnnnnnnnnnnnnnnnnnnnnnnnnnnnnnnnnnnnnnnnnnnnnnnnnn

SEQ ID NO: 41883 - DNA, 353 bp, Homo sapiens
  misc_feature (1)...(353): n = a,t,c or g
nnnnnnnnnnnnnnnnnnnnnnnnnnnnnnnnnnnnnnnnnnnnnnnnnnnnnnnnnnnnnnnnnnnnnnnnnnnnnnnnnnnnnnnnnnnnnnnnnnnnngaggaagaagagaaagatattttactgcctgtagtaattaattactgggaaaatatctctgctaaatatgcattaaaaggaaatgcttaaattaccaacttcacccgagggcatgattctaggtatttgaaaatttggtttgtgcttctgggtagcatgaactctttgtgtcccattgatttctctcttggtttcttagtaaggctttatatacattttgggggggaggtggggcaggatctctctctgttg

SEQ ID NO: 41884 - DNA, 352 bp, Homo sapiens
ggagactgcatagggctcggcgtggatggaggagatagagaatggagaccagtctggggctgctgaggacctgctgagagatacctgcagcgtggaccaggtgggggcggctgaggatttgccaagaggtacttgcagcatggaccaggttggggttgctgaggacctgctgagaggggcctgcagcgtggaccaaggtgcagccacaggttaggcagctgtagccaacgtccaggtggaccatggaggtagaaccagtgggagctgccgagtggccggtgaggcactgggaggaccaggtcaccgcgaggaggaggaggggctcccagaaagatagggtttgaggtgagag

SEQ ID NO: 41885 - DNA, 345 bp, Homo sapiens
ggaaccagtctactctccaagaggcctttagccaaagctcataatgataggactagctattaattgtctactactttctgtctactatactaaacattttacgtatgccatctaatttaacaagcctatctgctaggtactattaatccccttttgatagatgaagactttgagatttagagaggttaagccacttgccctggtcacgcagtgacaggatctgaatctgggcttcctctcttcctctatctatctatctccccctccctccctctctttacccccacggtccgccctattaagcacacatttgaaacatcagccaggccgggcgcggtggctcac

SEQ ID NO: 41886 - DNA, 327 bp, Homo sapiens
  misc_feature (1)...(327): n = a,t,c or g
ggcggtgtgtaagtagggtgttaaaatattcaataattttacttccaagtggaattccaagaatttatactaagggaataattagggtctcaataaagcttagtgtatatagaacattcattgtaatattacagattatgtctaaaagggaatagttcaataaattatgccatagccagtctccataatattttctagtcattaaaatgatttcgaattagtatcgggaagattgttaggacaaaataggannnnnnnnnnnnnnnnnnnnnnnnnnnnnnnnnnnnnnnnnnnnnnnnnnnnnnnnnnnnnnnnnnnnnnnnnnnn

SEQ ID NO: 41887 - DNA, 332 bp, Homo sapiens
gagaaagtacaactagaatgacaaattaatgtttaaaagtatttctaatataagaggttagtgggatgtgtcttaaagtggaaatatatgatttagagctcctgacatttacttttgagaaaataataaaaattattagaaattgagaatatatagtacctattctttttataatttattttaatacaataaaatgttactagaaatgttactagaaatttgaaaataatgttagtagaaatgtgacctaaatatttggagagatattagaatatatccaatggaagcagactaatatagaaaaatgagcactctactgtgatatttgaggc

SEQ ID NO: 41888 - DNA, 326 bp, Homo sapiens
  misc_feature (1)...(326): n = a,t,c or g
gtatctttgctattatgaatagtgctgtgataaatatannnnnnnnnnnnnnnnnnnnnnnnnnnnnnnnnnnnnnnnnnnnnnnnnnnnnnnnnnnnnnnnnnnnnnnnnnnnnnnnnnnnnnnnnnnnnnnnnnnnnnnnnnnnntattgtttttccattaagttgtactgaaagagatagagagcaacgtaataatactggaggacttcactccacttacatcactatatacatcatcgaggcagaaagtcaacaaagaaactctggacttaaattggacttcagaccaaattaacctaatagacgtttacagaacattctac

SEQ ID NO: 41889 - DNA, 325 bp, Homo sapiens
ggagaagtctgttattgctatttgatagatgagaaaagactaagttaaatatgccaagatcacatagatttgagtattatgttatttgcatttatgtttctcattagaatagaatagaaatactcagataccttgctttggaggaaaaatatatacatacacagagtaaagatctccactcaagacttcatagaaatgttttaatgcttcctaaagcaccttgtgtataccttgtgcttagttgttcctttactgaattattataacgatttaaaaaaacttacaaagtgcctagcaatagaaggcactcatggcaactattatt

SEQ ID NO: 41890 - DNA, 330 bp, Homo sapiens
gaatcctccttcagatatttactattgatgacattggcaatcaatgctgctgaatttctccagccctccatttattcatctattaaggggagagctacctacagggcggggaacttacaaggattagatgaggggatatgtgtaaaggcctaacacccagtaggtgctcactaaatgatgttccttattattatggtgattaccactggaattttttcagatgaaagtgttcggtcacctggaacctgtgagtatgtggtttttgatctgtgactaaactgttcacccatttcccagtttctctgctctgtcaaatatcaacattttacc

SEQ ID NO: 41891 - DNA, 87 bp, Homo sapiens
gaaattgtgtccccttggaccagttccttaatttcatgagcctcttgttttctctttgagaaaattttatttatttttttttttttt

SEQ ID NO: 41892 - DNA, 323 bp, Homo sapiens
gcggcacgagccccctcaaaaaaaaggctttctggtcttatccttaacatatgtatctatttaaatagaatgtaaattatcattttactgatactgacttaaataattattttgtatattttgtgattccagtttactttgcacccttgatttagcataggaagggaaacaatccatgtttatttggaggacaaatgtacagtcactgtgataatctggattgttttctgctttaggcaattaaatcagaattgtatatttgtccatgggtgatttttgatggtgatatgccattactgtaacaacaggctacattcttggtg

SEQ ID NO: 41893 - DNA, 322 bp, Homo sapiens
ggttgctaggatggtcttaggtttttgtggctttcaggaagtaaagggaaggccacaagctgtgtgagtgaagcatttgcaagctggccttgtttttctctgcccccacttcactggcatgctgaaagccaagctgggaatctaggcatggtgcaggaggtgtcagagcctggcttcctagccagaaatgtcattcagtgcaaacattttctcaagcataaggtataacattcattcagaaatgagtatttatgaaaatagaaagagttgattgtgggaacttggatgatgaaaacatttatacttagtgattccatagccc

SEQ ID NO: 41894 - DNA, 324 bp, Homo sapiens
  misc_feature (1)...(324): n = a,t,c or g
gnnnnnnnnnnnnnnnnnnnnnnnnnnnnnnnnnnnnnnnnnnnnnnnnnnnnnnnnnnnnnnnnnnnnnnnnnnnnnnnnnnnnnnnnnnnnnnnnnnnnnnnnnnnnnnnnnnnnnnnnnnnnnnnnnnnnnnnnnnnnnnnnnnnnnnnnnnnnnnnnnnnnnnnnnnnnnnnnnnnnnnnnnnnnnnnnnnctaaactaaactaatgataggcctaggtctatttacttggggagaatttattttgaattatttctcagataaatcttccttttcccatataggaaactgaccttaattagatttatacagtgtaatagc

SEQ ID NO: 41895 - DNA, 328 bp, Homo sapiens
  misc_feature (1)...(328): n = a,t,c or g
gttcaataccctnnnnnnnnnnnnnnnnnnnnnnnnnnnnnnnnnnnnnnnnnnnnnnnnnnnnnnnnnnnnnnnnnnnnnnnnnnnnnnnnnnnnnnnnnnnnnnnnnnnnnnnnnnnnnnnnnnnnnnnnnnnnnnnnnnnnnnnnnnnnnnnnnnnnnnnnnnnnnnnnnnnnnnnnnnnnnnnnnnnnnnnnnnnnnnnnnnnnnnnnnnnnnnnnnnnnnnnnnnnnnnnnnnnnnnnnnnnnnaattattatttctaaaagaaatcaactcgtgaattcctaaagaactatgctgaatctgcttatgagtatcaccgatctg

SEQ ID NO: 41896 - DNA, 325 bp, Homo sapiens
gaaaccaatgtactttcttccacatttctcagcccccagtgttcccctcagcattcaccgctgggggctgtgaaaagcccacagcacatcagtttgcccccatcacccaacaaccctcactttctgccctcatcctccggggcccagggagaagggcacagggtctcctcgcccatcagcagccaggtgtgcactgcacagaactcaggagcacacgatggccatcctccaagcttctctccccattcttccagcctccacccgcccttctctggagcccaagcagacagcagtcatggtgccgggggaaacccttgtcccaaaa

SEQ ID NO: 41897 - DNA, 325 bp, Homo sapiens
  misc_feature (1)...(325): n = a,t,c or g
gnnnnnnnnnnnnnnnnnnnnnnnnnnnnnnnnnnnnnnnnnnnnnnnnnnnnnncaataataataatgaaaaataaaaataaaacaaaacaaaataaaataaaatgaattgagcttatattttgggattccctttctgccaaagctgagtagttcttcatgctctggagnnnnnnnnnnnnnnnnnnnnnnnnnnnnnnnnnnnnnnnnnnnnnnnnnnnnnnnnnnnttggttgtgagattgtcgggggagcggtctactnnnnnnnnnnnnnnnnnnnnnnnnnnnnnnnnnnnnnnnnnnnnnnnnnnnnnnnnnnnnnnn

SEQ ID NO: 41898 - DNA, 325 bp, Homo sapiens
gaccatgcaatacctgctaaatgtatccagtgcattccagctgctctgaggctgatgtgtggtggctggggaacaggcctgttgctgagtcgtggtgtgtacacacacacacaatttacctccttctctgtttcacttgcccttggcctagggaatgaactacatctcagtctaaggaaccactaaattggattcaaagacagttgagcagatctacagccctgttgggtccatccgaaaatcaaggtggccagtaaggtgacagctcttttaggagccttttacctgctataatgtctgattattggattctttactcaggtca

SEQ ID NO: 41899 - DNA, 372 bp, Homo sapiens
gacgagaagttgaaaatccacagaatcaattgagatgtagtcaagaaatggagcctgtaataacatgtgataaaaaatttcgtactcaattttacattgactggtgcaaaatttcattggttgataaaacaaagcaagtgtccacctatcaggaagtgattcgtggagaggggattttacctgatggtggagaatacaaacccccttctgattctttgaaaagcagagactattacacggatttcctaattacactggctgtgccctcggcagtggcactggtcctttttctaatacttgcttatatcatgtgctgccgacgggaaggcgtggaaaagagaaacatgcaaacaccagacatccaactggtcc

SEQ ID NO: 41900 - DNA, 394 bp, Homo sapiens
  misc_feature (1)...(394): n = a,t,c or g
gnnnnnnnnnnnnnnnnnnnnnnnnnnnnnnnnnnnnnnnnnnnnnnnnnnnnnnnnnnnnnnnnnnnnnnnnnnnnnnnnnnnnnnnnnnnnnnnnnnnnnnnnnnnnnnnnnnnnnnnnnnnnnnnnnnnnnnnnnnnnnnnnnnnnnnnnnnnnnnnnnnnnnnnnnnnnnnaagaggttctgctgccagatgtgggttctgtgggtcgggtgtgggttctgtgggtcgggtgtgggttctgcagaccaggtgcggattctgtgtaggttntgcaggcccagtgtanannnnnnnnnnnnnnnnnnnnnnnnnnnnnnnnnnnnnnnnnnnnnnnnnnnnnnnnnnnnnnnnnnnnnnnnnnnnnnnnnnnnnnnnnnnnnnnnnnnnnac

SEQ ID NO: 41901 - DNA, 417 bp, Homo sapiens
  misc_feature (1)...(417): n = a,t,c or g
ggagtcccagagccatgggagcgaacagagactgatgcggattaaggaggcctttcggttggcgcagcatccacaccacaaccaggcgaagcaggtagtggcgctgaatcgctcctgccgcggggtaagcgctcccggcccgcgcccgccccagccccgacctggcggggccaggacgctggttcatacactccaannnnnnnnnnnnnnnnnnnnnnnnnnnnnnnnnnnnnnnnnnnnnnnnnnnnnnnnnnnnnnnnnnnnnnnnnnnnnnnnnnnnnnnnnnnnnnnnnnnnnnnnnnnnnnnnnnnnnnnnnnnnnnnnnnnnnnnnnnnnnnnnnnnnnnnnnnnnnnnnnnnnnnnnnnnnnnnnnnnnnnnnnnnnnnnnnnnnnnnnnnnnnnnnnnnnnnnnnnnnn

SEQ ID NO: 41902 - DNA, 410 bp, Homo sapiens
gggaggatggagtcgatggccgtcgctaccgacggcggggagaggccgggggtcccagcgggctcaggtctgtcggcttcccagcgtcgggcggagctgcgtcggagaaagctgctcatgaactcggaacagcgcatcaaccggatcatgggctttcacaggcccgggagcggcgcggaagaagaaagtcaaacaaaatcaaagcagcaggacagtgataaactgaactccctcagcgttccttccgtttcaaagcgagtagtgctgggtgattcagtcagtacaggaacaactgaccagcagggtggtgtggccgaggtaaaggggacccaactgggagacaaattggactcgttcattaaaccacctgagtgcagtagtgatgtcaaccttgactccggcagcggaac

SEQ ID NO: 41903 - DNA, 388 bp, Homo sapiens
ggccttagtatgtgagatgtcttttcatatgagggagttcttaacctactttagcttaatcaccagatccttttgtcttttatgctaacacataaaaaacacaggcttggtattacagctttttgtcttctatgcatgagcagttttgttttgtatcccagggatcccagaagaacagctttgcttggccagggtacccattcattggcttaggcaacctagaatgttaagattcatatatcttaatcaaatacgaaggtcttcctgacctcactaccataagcagaagtttttctgaaaactttgatcagagagcaagtaggaagaagggccagattccagtttcattaaaccacaggcatatgaatacttcacagtttctgtgctt

SEQ ID NO: 41904 - DNA, 388 bp, Homo sapiens
  misc_feature (1)...(388): n = a,t,c or g
gagaagatgcatctagagtgtcagccttatcagtgtttaagannnnnnnnnnnnnnnnnnnnnnnnnnnnnnnnnnnnnnnnnnnnnnnnnnnnnnnnnnnnnnnnnnnnnnnnnnnnnnnnnnnnnnnnnnnnnnnnnnnnnnnnnnnnnnnnnnnnnnnnnnnnnnnnnnnnnnnnnnnnnnnnnnnnnnnnnnnnnnnnnnnnnnnnnnnnnnnnnnnnnnnnnnnnnnnnnnnnnnnnnnnnnnnnnnnnnnnnnnnnnnnnnnnnnnnnnnnnnnnnnnnnnnnnnnnnnnnnnnnnnnnnnnnnnnnnnnnnnnnnnnnnnnnnnnnnnnnncaggccaagctattcttttaaagtaagcttcctgacgacatgaaataatt

SEQ ID NO: 41905 - DNA, 389 bp, Homo sapiens
gggggtcgcctgcttttgacccaaaggtcctgacggttgcgtccgggggaggggaaggaagggccgctgtcgccaaggttttctctcccagaacccacagtgggaaagcggtcttgccaggcgttgtccattgtcagtgtgctcgtgggctggtgactgggtcttgggatcccaggccacgcgccagccaggctgtgggcagggcggggccagggacgccaaagagaggttgcagtcagaaccgtggacggggtgggttgaggcctctctgccacccgtcttcctggtcagcagaagtgcatctcggcttgggtttggggtgggcgtgtgtggtccgcatcccctgcttgccactatgcgcaccaaggtttccccacatccttcccaga

SEQ ID NO: 41906 - DNA, 385 bp, Homo sapiens
gtctttttttttcaaatagccacattatacttttttttctcccatcagttagccttttaaaaattctagttgctagatattatgctgggacatttgagacagataataacagacaattatacaacagcgtgacaaattacatgatcaagtaaaatgcagaagaaatatgaacaagatgaagttgataggtgcttacaaaggcttccccagggaggccatacctaaagtggtctttgaggttgataagaagaaaataattccaggtcaagttgagggaagacagaagaggggagttgccctgcagagtgaccatcatgttggtgggcttagaaatgagaaagggccatgtctgcctcattatgaggctgctggtttttcagtatga

SEQ ID NO: 41907 - DNA, 399 bp, Homo sapiens
gatttatagcagtagcagtgatcccgggcctgtgggctcggggccggggctgcagttcggaccgcctcccgcgacccgcggggccggctcggagacagtttcaggccgcatctttgctgacccgagggtggggccgcgcgtggccgtggaaacagatcctgaaggagctagacgagtgctacgagcgcttcagtcgcgagacagacggggcgcagaagcggcggatgctgcactgtgtgcagcgcgcgctgatccgcagccaggagctgggcgacgagaagatccagatcgtgagccagatggtggagctggtggagaaccgcacgcggcaggtggacagccacgtggagctgttcgaggcgcagcaggagctgggcgacacagcggcaacagcggcat

SEQ ID NO: 41908 - DNA, 398 bp, Homo sapiens
gccagccttcctgtgggccccttagcaatgtcttaggaaaggagatcaacattttcaaattagatgtttcaactgtgctcttgttttgtcttgaaagtggcaccagaggtgcttctgcctgtgcagcgggtgctgctggtaacagtggctgcttctctctctctctctcttttttgggggctcatttttgctgttttgattcccgggcttaccaggtgagaagtgagggaggaagaaggcagtgtcccttttgctagagctgacagctttgttcgcgtgggcagagccttccacagtgaatgtgtctggacctcatgttgttgaggctgtcacagtcctgagtgtggacttggcaggtgcctgttgaatctgagctgcaggttccttatctgcacacc

SEQ ID NO: 41909 - DNA, 348 bp, Homo sapiens
  misc_feature (1)...(348): n = a,t,c or g
gaactggagtggggcccaggaatctgcattttaaacaattccctggtccccagataagtaattcttaagtattctatcttaagtagacctaaagccgtattttgaccctgtactagtatgttattttagtataatcattactgaattcctcatacttttacgtanncantncttactttgactantncacnttacanttaataaannngatntcnttntntatatcnnnatnnnnntttnannnntnanttntnnannnttnnnncttttnntnntcttnntatnnggantgtttnttantnntcnatttnacntcatnntttnatcncattcntcntanattttgtc

SEQ ID NO: 41910 - DNA, 288 bp, Homo sapiens
  misc_feature (1)...(288): n = a,t,c or g
ggatattgaccatgagacagtggttgaagaacagatcattggagagaactcacctcctgattattcagaatatatgacaggaaagaaacttcctcctggaggaatacctggcattgacctctcagatcccaaacaactggcagaatttgctagaatgaagccaagaaaaattaaagaagatgatgctccaagaacaatagcttgccctcataaaggctgcacaaagatgttcagggataactcngccatganaaaacatctgcacacncacggtcccanagtccacgt

SEQ ID NO: 41911 - DNA, 246 bp, Homo sapiens
  misc_feature (1)...(246): n = a,t,c or g
gagcattttttataattttctaagtcgtgcactttctcggtccactcttgttgaagtgctgttttattactgtttctaaactaggattgacattctacagttgtgataatagcatttttgtaacttgccatccgcacagaaaatacgagaaaatctgcatgtttgattatagtattaatggacaaataagtttttgctaaatgtgagtatttctgncctttntgnnnaatgnnacatnnctgatag

SEQ ID NO: 41912 - DNA, 243 bp, Homo sapiens
gcagatgcccagccccaaggatgaagcaagacatgtggggccgtagcgaggtgtcacatggggcaggaaagcttcatgcccacgggttctgccagccccagcacagacccaaactggggctgggcctctatccctcctctgcctctgttcgcatagtaagaaggagtgaccgggatcctccccttcccctaccctaagctgtagcctgggtgactgactggcctgggcctggggtggggaccg

SEQ ID NO: 41913 - DNA, 116 bp, Homo sapiens
gactgctcagaacccacgtcttcagcagcatttgaaacactggcagcaatgcacaagagcaagatggtgtcaggaaccatgtcaaaccctcaccttcttccatttttttttttttt

SEQ ID NO: 41914 - DNA, 409 bp, Homo sapiens
  misc_feature (1)...(409): n = a,t,c or g
tgaacngattangaatttaatacgacttactannagtnatttggncntttnggccctgaatncngcangagccacaaacgatgcctangccnaaggtgccctggccctgggatcatctctgaaacagcacaggaccaccaggaggctggtcgtgctcgccacccctcaggtctcagactccatgagaaaagttttagagacagtctttgatgaagtcatcatggtagatgtcttggacagtggcgattctgctcatctaaccttaatgaagaggccagagttgggtgntngctgacaaagctacagtgntggnnnnttacncagtggntcaggtgtntnttatnangcnncatgngcnntacnatatatccctgantgatgatntttttgatnagaaaatgttnagggc

SEQ ID NO: 41915 - DNA, 262 bp, Homo sapiens
  misc_feature (1)...(262): n = a,t,c or g
gnnnnnnnnnnnnnnnnnnnnnnnnnnnnnnnnnnnnnnnnnnnnnnnnnnnnnnnnnnnnnnnnnnnnnnnnnnnnnnnnnnnnnnnnnnnnnnnnnnnnnnnnnnnnnnnnnnnnnnnnnnnnnnnnnnnnnnnnnnnnnnnnnnnnnnnnnnnnnnnnnnnnnnnnnnnnnnnnnnnnnnnnnnnnnnnnnnnnnnnnnnnnnngncncgatgatanaaactccgtcacataaaaaantnnaanttntnttatatgttt

SEQ ID NO: 41916 - DNA, 346 bp, Homo sapiens
  misc_feature (1)...(346): n = a,t,c or g
gcatccctgtacgctgcttcacttgtggcaagatcgtcggcaacaagtgggaggcttacctggggctgctgcaggccgagtacaccgagggggacgcgctggatgccctgggcctgaagcgctactgctgccgccggatgctgctggcccacgtggacctgatcgagaagctgctcaattatgcacccctggagaagtgaccacgctggaacccacccacccgctgtgctgaccatgggccctgagcgtcctacccngaattcacnaggctgangcatncnnnagctggcgnaatgcctngncnnantnnnnnanannnnattnnnnantntnnaanntnnnatcc

SEQ ID NO: 41917 - DNA, 315 bp, Homo sapiens
  misc_feature (1)...(315): n = a,t,c or g
gagaggtttctgtaacccctgccctggtgtgaggaggaaatggctctggcctggctgcctggccgtggcttctctttggctcccaaagagaaggacagtgttgggagtatctgccgtggnttctctttggctcccaaaaanaagnnnnntgttggaatatnngccgctnntttccagtncttttantntnntnanntctntttnntntcttaaanctgtcttgaatttcnntttnacnttttatttcnnntacntnttnttntntnnnttncctcttctnanttnnntaattnttctttttnatnattnnntaat

SEQ ID NO: 41918 - DNA, 342 bp, Homo sapiens
gctgtgcaacatacccctggccagccgagagacgacccgccttgtctgctatgatctctttcactgggcctgcctcaatgaacgtgctgcccagctaccccgaaacacggcacctgccggctatcagtgccccagctgcaatggccccatcttccccccaaccaacctggctggccccgtggcctccgcactgagagagaagctggccacagtcaactgggcccgggcaggactgggcctccctctgatcgatgaggtggtgagcccagagcccgagcccctcaacacgtctgacttctctgactggtctagttttaatgccagcagtacccctggaccaaa

SEQ ID NO: 41919 - DNA, 250 bp, Homo sapiens
  misc_feature (1)...(250): n = a,t,c or g
gtttaaacaaggagctgccatcggcattccatattttactgcttatcgagctctgatccacagtgcctgtgtgaaagctggagagagtgttctggttcatggggcaagtggaggagttggattagcagcatgccaaattgctagagcttatggcttaaagattttgggcactgctggtactgaggaaggacaaaagattgttttgcaaaatggancccatgaagtgntcaatcncananaannnnnttac

SEQ ID NO: 41920 - DNA, 252 bp, Homo sapiens
  misc_feature (1)...(252): n = a,t,c or g
gcctacttaaggatccacttttagggctcacccacatttgtttctagatttacccctgcgctagagtaagcactttatctccagaactgagagcaaagttaacaaatctcaccccttctctcctgcaaattagtggacagactccctggaacatgtttggggcttccacctagggccacctagtggtatctctgggtctttacttggtcagatgnnnattctacnttgnnccccnngancngannnngagct

SEQ ID NO: 41921 - DNA, 360 bp, Homo sapiens
gcataatgtttgtagatcagaaaagggagatctgcatctaaagcaatggtcctttgtcaaacgagggattttgatccacttcaccattttgagttgagctttagcaaaagtttcccctcataattctttgctcttgtttcagtccaggtggaggttggttttgtagttctgccttgaggaattatgtcaacactcatacttcatctcattctcccttctgccctgcagattagattacttagcacactgtggaagtttaagtggaaggagggaatttaaaaatgggacttgagtggtttgtagaatttgtgttcataagttcagatgggtagcaaatggaatagaacttacttaaaaatt

SEQ ID NO: 41922 - DNA, 359 bp, Homo sapiens
  misc_feature (1)...(359): n = a,t,c or g
gcatacaatcagctgttgcatcttgcttctgagcaaggtagttttgatggtggggaccaaggcatactgaacacattttttagcagctgggcaacaacagatatcagaaaacacctgccgtttatttataacctaagcagcatctctatatactcctacctcccggcatttaaagtgtttggtgcaagngtcatagntgcncatttcctgnngnnannttataccatgnnaattatncttangnnccatannatntgnggttnnnngngnnnctcntgancnntngntgatttnntcnnanttntgtannncnntngtnttaatcntttnttntatatntngnctantcncntnttttt

SEQ ID NO: 41923 - DNA, 324 bp, Homo sapiens
  misc_feature (1)...(324): n = a,t,c or g
ggctgagaataatggcccggttggcccgggacgagtggaatgattaatgatgttttgcagcagttttctacgtctgaaattttttatgtctctggaacccagaatttgctaagagatggaggaacctcagaaaagctatgtgaacacaatggaccttgagagagatgaacctctcaaaagcaccggccctcagatttctgttagtgaattttcttgccactgctgctacgacatcctggttaaccccaccaccttgaactgtgggcacagcttctgccgtcactgccttgctttatggnggcatnttnnanaanacnnaatgcc

SEQ ID NO: 41924 - DNA, 138 bp, Homo sapiens
  misc_feature (1)...(138): n = a,t,c or g
gggaaattaagtccaatgaaagatgctgttcttttgatggagatgcagacagaattgtttattactaccatgatgcagatggccactttcatctcatagatggagacnngatagcancgttaattancagntnnctta

SEQ ID NO: 41925 - DNA, 248 bp, Homo sapiens
  misc_feature (1)...(248): n = a,t,c or g
gnnnnnnnnnnnnnnnnnnnnnnnnnnnnnnnnnnnnnnnnnnnnnnnnnnnnnnnnnnnnnnnnnnnnnnnnnnnnnnnnnnnnnnnnnngtaaaatttttaaatggagaattgggtgcgagatgtggtttccagcctggtgcctggggtgctgagctagtgagtggtgcanncangacacctttgctttatntnacttacacggcacctggagccgnntcangnggntaangcatnctgnngccca

SEQ ID NO: 41926 - DNA, 235 bp, Homo sapiens
  misc_feature (1)...(235): n = a,t,c or g
gtggtagtgctttgaagggaggaagcaagaaatcactctgctccccttctactgattctgaatacttggcttctaaatgtgtatggcatgtgcaggagtggtggatctggggattggaggaacaggaaaaggagggaaatgaagatggaggaagaggttctgtgtgaggaaaaacacacatgaaaggcanatggcaggaagntgggaancangcattgaaaatgacncatactat

SEQ ID NO: 41927 - DNA, 348 bp, Homo sapiens
  misc_feature (1)...(348): n = a,t,c or g
gtctgaggttatcaataagctcctagtccagacgccatgggtcatttcacagaggaggacaaggctactatcacaagcctgtggggcaaggtgaatgtggaagatgctggaggagaaaccctgggaaggctcctggttgtctacccatggacccagaggttctttgacagctttggcaacctgtcctctgcctctgccatcatgggcaaccccaaagtcaaggcacatggcaagaaggtgctgacttccttgggagatgccataaagcacctggatgatctcaagggcacctttgcccagctgagtgaactgcactgtgacaagctgcatgtggatcctganaacttc

SEQ ID NO: 41928 - DNA, 340 bp, Homo sapiens
  misc_feature (1)...(340): n = a,t,c or g
gcaggaaatgcagaccctaaaacacattgaacagtggtcactaaaacaagcaagaattgacttctggaaaaaatgccatgagaattttaagaaaaattcaatttcaagcaaagcagcttcttcctttttctcaacccaggcccatgtggcatgtgagcacccaactggatggagcagcatggaggagcgccatctgctgctcaccttggcagggcactggcttgcccaggaggcgtggtgcccttggataagctggaggagctggagaagcagatctggctgtgccgcatcacccagcacactcttggaagaaatcaggaggaaacagagcccanatttt

SEQ ID NO: 41929 - DNA, 265 bp, Homo sapiens
  misc_feature (1)...(265): n = a,t,c or g
gaaggaaaaaagaatctgatttaccatcagctattcttcaaactagtggtgtttctgaatttactaaaaagagaagcaaactagtacttcctgcccctcagatttcagatgcagaactccaggaagttgtattaagtaggccaagcgagtgaaattgcacgtcaaactgccgaggaatctggcataacaaattctgcttgcaggacacttttgctgantacaangnnacnaacnncagcgnngntnttanancnccncnagcgcc

SEQ ID NO: 41930 - DNA, 299 bp, Homo sapiens
  misc_feature (1)...(299): n = a,t,c or g
ggcaattcctcagataacaggtcaaaagatgtacagatacattctgaagttttcttgctattaaaggcacaagagtttccttgtattttgactgacaatgtagcatgtttccattttagtttgttagtgatgggtggttttccctttgaaagccatttggtatattcaccataacaattagtttaatatgattacataagaaaactatgataaaacccagcaattttagtagttgtgaaaatacgttttttaaatcatgtttaagaggaattgnnngacttgannccnnnncctgatgg

SEQ ID NO: 41931 - DNA, 339 bp, Homo sapiens
gatatgtggccctttcaaaagcccaattatacagaaatccgacagtactgcaatcactggcgaaattttgctgacattgatgattcctggaaaagtataaagagtatcttggactggacatcttttaaccaggagagaattgttgatgttgctggaccagggggttggaatgacccagatatgttagtgattggcaactttggcctcagctggaatcagcaagtaactcagatggccctctgggctatcatggctgctcctttattcatgtctaatgacctccgacacatcagccctcaagccaaagctctccttcaggataaggacgtaattgccatc

SEQ ID NO: 41932 - DNA, 356 bp, Homo sapiens
gggagctgcttttcattaggaccttggagagtcccctcagttttgacacccttgtttcaccacaagaaagcacccgacaccctgggttgcatacttactactcaggggctttccccccagctttcagagcactgaattattgtgagctggtgactctgcaggcctgagtggtattagggttgtggaatgttgttgcatacacgtttatgagttaaccactatttaaatgatgctgctttttaaagttttttcaaagtacaatagatttttgaagtttcaggtaactggaaaaatctttaacttttgctttaagtgtttggggcaggataaaacaacatagaaaatataaaacaatt

SEQ ID NO: 41933 - DNA, 349 bp, Homo sapiens
  misc_feature (1)...(349): n = a,t,c or g
gcttttttttaccgggctgacgagaatgatgaggtgaagatcactgtcatctaaaagccggctactgtcagcaaagcctgaagaagtggggctggataccctgcccccaccatatccctaccatcccttctcagtcaaccctttacccttacagtagcaagcatagacccctgtctaacgggggtagacaggtgcagatgaggtgaagatcactgtcatctaaaagctggccactaaattaaaaaaaaattaaaagttatgggattaaaaaaagttatgggataaaaaaggttatgggtaacttatggtataaaagttatgaaaaaaggcaggtgcannggctcacgcc

SEQ ID NO: 41934 - DNA, 355 bp, Homo sapiens
  misc_feature (1)...(355): n = a,t,c or g
ggagcttcaatacctgaaaataaataaactggaagcatctgattacatcctgtgatcctgaaactatttaaaatcaagaagacaaatctttttcctcatcattgattagtaaaacttttaaaatgcaaaacaaatttataaaaaggtttccttactgaagaaggaaatcaactttnnnnnnnnnnnnnnnnnnnnnnnnnnnnnnnnnnnnnnnnnnnnnnnnnnnnnnnnnnnnnnnnnnnnnnnnnnnnnnnnnnnnnnnnnnnnnnnnnnnnnnnnnnnnnnnnnnnnnnnnnnnnnnnnnnnnnnnnnnnnnnnnnnnnnnnnnnnnnnnnnnnnnnnnnnnnnnnnnnnn

SEQ ID NO: 41935 - DNA, 349 bp, Homo sapiens
gagtagaaaatgtatatacacagcatcaacctttcctacatgaaaccctggatcatctcatcaaaggaaggcttaaggaaaacctatatccttatttaggccccagcacactcagagacagacctcaggatatcattgtgtttgtaattggaggagccacctatgaagaggctctaacagtttataacctgaaccgcaccactcctggagtgaggattgtcctgggaggcaccacagtgcacaacacgaaaagtttcctagaggaagttctggcttctggactgcacagccgaagcaaggagagctctcaagtcacatcaaggtcagcgagcagaagatgaaacggtgg

SEQ ID NO: 41936 - DNA, 346 bp, Homo sapiens
ggttaattatcctaaaccaatggtgaaccatgctgaggcaagccgtttgaatatcgaaaggatgaaacagatctatcagcagctttcacgatatagaggactaggtcttctggcatcagtaccttctaatcctaatgggaatggaggcttcatgggatattctgcagaaaatatcccaggttgtagcagcagtggaagttgctctcaagggagtggtattttacactatgctcatggcgacagtcagcaaactcacctgttgaagcaaggaagaagctccatgggcactggtctcagtggtgggaaacgtcctagtcaggaagaggacacacagagtattggtcct

SEQ ID NO: 41937 - DNA, 209 bp, Homo sapiens
  misc_feature (1)...(209): n = a,t,c or g
gggtcagtaaggtgaaatgctacagagaggtcaagtgaggtaaagactggaaaaatgcccatcagatttagagacatgtgggtcattggtggccttagcttgagctgttttggtggcatgatggaggtgaaagccagactggcgtgggaggtgaggaaacagacggtgaacatagacaactctttcccgaaggttggctgtgnaggagg

SEQ ID NO: 41938 - DNA, 346 bp, Homo sapiens
gaagatgaggacgatggtttctttgtgccccatgggtacctgtctgaggacgaaggtgtgacagaggagtgtgccgaccctgagaaccataaggtccgccagaaactgaaggccaaggagtgggacgagttcctggctaaggggaagcgctttcgcgtcctgcaacctgtgaagatcggctgcgtgtgggcggctgacagagactgcgcaggcgatgacctgaaggtactgcagcagttcgcagcctgcttcctggagaccctgccggcccaggaggagcagacgcccaaggcctccaagcgggagaggagagacgagcagatcctggcccagctgctgccgctcc

SEQ ID NO: 41939 - DNA, 352 bp, Homo sapiens
gcagggctggccagggcaacgtggggctggccctgctgtggtcagagaagatcaagggtcctctgcacatcagagcctctgagggtgcccaggtggccttagccgcatctgtgccagactggtggcctacagtctccaagtagtccgaagccttggctggcgcaggctgatggggaggctggggcctggggcctttggcctctgtccagggtcttcccgtcccatctgtctgctgcgcctactgggtgggagccctggtttccatctgggaaagtcccccttgtaggtgccctgcctggccccacccatgctcaggggccccaggcacgtgggttgttttctccctggactt

SEQ ID NO: 41940 - DNA, 170 bp, Homo sapiens
  misc_feature (1)...(170): n = a,t,c or g
gacagtttcttgaagacgagtacccagacatgcccactgaaggcataaaaaatcttgttgactttctcactggtgaagaagtcgtgtgtcacgtggctagaaacttggctgtggagcaggnnacactgancgaagaattcccagngcccctactgtggnccgntggacta

SEQ ID NO: 41941 - DNA, 356 bp, Homo sapiens
gaactgggagtagttggcatctccgcgcgtccggacacccgatcccagcatccctgcctgcaggactgttcgtgttcagctcgcgtcctgcagctgtccgaggtgctccagttggaggctgaggttcccgggctctgtagctgagtgggcggcggcaccggcggagatgcctgggaagaaggcgcgcaagaacgctcaaccgagccccgcgcgggctccagcagagctggaagtcgagtgtgctactcaactcaggagatttggagacaaactgaacttccggcagaaacttctgaatctgatatccaaactcttctgctcaggaacctgactgcatcaaaaacttgcatgagggg

SEQ ID NO: 41942 - DNA, 357 bp, Homo sapiens
gggaggaggccgtatttctgctggccagagacgtcgcgtccctggctgggcattcagtcacccccaggaaaggaggcaagtccacgctgggagttagaaggcatcgcctctaatccaggtttcgccatctcctctgctaagtgacgtccagcaagtcacttcactttcaggacctcaaatctcctccccagtagtaaaataggggtaataaaaacagctacagcgcaagactgttgtgaggcacagagaaagggcttggtctttggaagcgggttccaggttctcaaccttcatttccttcacggttgaagggcgccaaagaaagcggaaagggtgtgcctagattgatcggtataa

SEQ ID NO: 41943 - DNA, 347 bp, Homo sapiens
gaactgaagacctcattctgtcatgctgccccagtgagatagtgagtggtcaccaggcttgcaaatgaacttcagacggacctcagggtaggttctcgggactgaaggaaggccaagccattacgggagcacagcatgtgctgactactgtacttccagacccctgccctcttgggactgcccagtccttgcacctcagagttcgccttttcatttcaagcataaggcaataaatacctgcagcaacgtgggagaaagaagttgctggaccaggagaaaaggcagttatgaagccaattcattttgaaggaagcacaatttccaccttattttttgaactttggcag

SEQ ID NO: 41944 - DNA, 275 bp, Homo sapiens
  misc_feature (1)...(275): n = a,t,c or g
gggattaaacagtatactggaatcaatgctatctcaaagaaagagttttctatcgatgttggttatgagagatttttgggacctgaaatcttttttcatccagagtttgctaatccagactttacacaacctatctcagaagttgtagatgaagtantccnnaatngnnctattgatgtcagangtnctctctacnanaatattgtcctctctggagggccnccatgttntgnactttngacntgntngntangnnnnnngtgnnttgnanattc

SEQ ID NO: 41945 - DNA, 348 bp, Homo sapiens
gcttccaacacgtagctgcccttcagccacccgcccgcagcctgggagtgccctgagggtgggtcgggggagctgcgcagggacatctctacaccgttcccatccgggaacagggcaacatctacaagcccaacaacaaggccatggcagacgagctgagcgagaagcaagtgtacgacgcgcacaccaaggagatcgacctggtcaaccgcgaccctaaacacctcaacgatgacgtggtcaagggcaactcacaacatggcagctggtttccagtagagcaagcgagtgagagaacaagaaaggcaagcaagattgactttgaagatgtgattgcagaaccagaag

SEQ ID NO: 41946 - DNA, 343 bp, Homo sapiens
gggttattctaaattatagtagcctcaactcattctgtcaccagtagaattcagcagttaatatattccatattatttctttgaatcaattcattttcagagcactttaaagtctgatatttctcgatgtgcactgtgatgcctggaaccttcctctggaagtgctgattttatggactgaggactggtgactggtctgtgatagaagcaaattccaattccaaatgtaattagacaaaaatcatttttttagaatgtgtttttattgtaaaagtatctttttcagcttcctgttctattgtcttttttcagatacaacatttttgtctatggtgaactgctg

SEQ ID NO: 41947 - DNA, 352 bp, Homo sapiens
gggaacacagtttcagagacagccaaggacctggtgtccaagatgctacacgtggatccccaccagcgcctcacagctaagcaggttctgcagcatccatgggtcacccagaaagacaagcttccccaaagccagctgtcccaccaggacctacagcttgtgaagggagccatggctgccacgtactccgcactcaacagctccaagcccaccccccagctgaagcccatcgagtcatccatcctggcccagcggcgagtgaggaagttgccatccaccaccctgtgaggcaccagggcattcgggccacagggcggtgctagcttgacacagtcagcatgcttccagaggg

SEQ ID NO: 41948 - DNA, 353 bp, Homo sapiens
  misc_feature (1)...(353): n = a,t,c or g
gtggagggcagcaggaaggctggggaattccccatgtacagtatttatgtttctttttanatgtgtaccttcccaagcacttatttatgcagtgacctggtcacctggggtgggggtgattanaangcctnncangnggnatagagccntatanctgcnntgaggaccancctgggactctaaccttcctttctgnaggnacctatgcnccnntnagcccaattcnattcatacngactcacncantacgcacactgnntgtccaaggccctantcattgcccgatganatatantttccnggncncancntaagnggangcctcantcctnnaanntnnnntnntntttatt

SEQ ID NO: 41949 - DNA, 362 bp, Homo sapiens
gtacagagcatattaaaaatcttcagactgaacaagcatctttgcagtcagaaaacacacattttgaaaatgagaatcagaagcttcaacagaaacttaaagtaatgactgaattatatcaagaaaatgaaatgaaactccacaggaaattaacagtagaggaaaattatcggttagagaaagaagagaaactttctaaagtagatgaaaagatcagccatgccactgaagagctggagacctatagaaagcgagccaaagatcttgaagaagaattggagagaactattcattcttatcaagggcagattatttcccatgagaaaaaagcacatgataattggttggcagctcggaatgct

SEQ ID NO: 41950 - DNA, 341 bp, Homo sapiens
  misc_feature (1)...(341): n = a,t,c or g
ggaagcaaagaaaacagaaaaataacaatttaagttgtgtaaattggttgcctttatatattacatttggtaaaatcagtgcttaaatacgcaatgatttaaactggaacctgaggtatttttcatgctatctaatcatatacctaagataaaccaacccagttacttatattaataatattcagaaagagaagtggctttttttttttttggaancggannttgctttngancccnggntgnnnggnnngggggnantntgggttnatngaaccnttngcnnccnnggtnaaaagnnttntctngcnaanncntcccnagancnngganttntngccccc

SEQ ID NO: 41951 - DNA, 335 bp, Homo sapiens
gaaattctccaggattttaatttcaggaaaatgtattgattcaacagggaagaaactttctggtgctgtcttttgttctctgaattttcagagactttttttataatgttattcatttggtgactgtgtaactttctcttaagattaattttctctttgtatgtctgttaccttgttaatagacttaatacatgcaacagaagtgacttctggagaaagctcatggctgtgtccactgcaattggtggtaacagtggtagagtcatgtttgcacttggcaaaaagaatcccaatgtttgacaaaacacagccaaggggatatttactgctcttta

SEQ ID NO: 41952 - DNA, 341 bp, Homo sapiens
gggcatatagattagaacctatgattgttccagatttggacctaaaagctgttctcattccacatcacaaaggcagaaaaagacttcatttagaattgaaagagagtctctctcgtatgggatctgatttgaagcagggttttattagctctctcaaaagtgcttggcagacattaaatgagtttgcccgtgctcatacgtcttcaacccagttgcaagaagaattggagaaggtggccaatcagatcaaagaagaagaagaaaagcaagtagttgaagcagaaaaggttgttgaaagtccagatttttccaaggatgaggactacttaggaaaggttgga

SEQ ID NO: 41953 - DNA, 352 bp, Homo sapiens
gaaagtgatccatgttggacataattgagtttttaaatcagtttattgggttctagggctgtagaacacatagatactagatttttaatttgttcatggttattctacatttctagaaagttcttatcagcaagatggtcccataagcaaatttcttgtggtttgtacagatttgttaaaatgtgaacgttttctaactgcctcgtagggtagaaaccaatatttttcaggatgctgtatttcactcctgtaaggactttttctttattgtcacattcataatgctgatacttacatgtaagttgttcatgttgcagaaaaaggttataccgtaccacggattctctttaat

SEQ ID NO: 41954 - DNA, 349 bp, Homo sapiens
ggccttgtgaaatgatgattcagtttatccattcgctgagtgcgctgcactgaccttcttccaagcctcagttcctgttctaggaacttgaggctatgtagccagaaaatgccctgcagtctgcagtgttctactgtgaactgcttgtgtgttggcaggctaccggtaagaatggttggtgtcagcagggacggggccctctgagacccatctcacaaagatgagtggtgaaaatctgatcacttgctgcagccctttagttttttattaagccgatgcctgagtagctttaatagctattagctatgttagtagactgagatcttctgttagaagtctttagttctgt

SEQ ID NO: 41955 - DNA, 359 bp, Homo sapiens
ggcagggatgaggtgatcacatgggtggacaccatcgtgaaagatgaccaggaggctgtgctatgtttctacaaaaccgccaaggactgcgtcatgatgttcacctatgtggagctccccagtgggaagtccaacctgaccgtcctcagggagccagagtgtggaaacacccccaacgccatgaccatcctcctggctgtggtcggtagcatcctccttgttgggcttgcactcctggctatctggaagctgcttgtcaccatccacgaccggagggagtttgcaaagtttcagagcgagcgatccagggcccgctatgaaatggcttcaaatccattatacagaaagcctatctccac

SEQ ID NO: 41956 - DNA, 359 bp, Homo sapiens
gctttgtcttcctttagggacagcaagtcctgtggagccttttaggattcagtactctgcattaaacaggagcttttctaatatggctggaaactgttgggggtggattagagatttttaaggatcttatggcaagctttggctggtagagtacaagaatctagtggtgtcttttattggggttttgggggtgctgggaactatgacattacaaagagccactaattgttaactgaaggaaaaaatactggtcaatgaagggaaacttaactataaaatcaacttagtagaaataaaccattaagtggtactaatatgggcaggcacagtggctcacagctgtaattccagcacgttgg

SEQ ID NO: 41957 - DNA, 336 bp, Homo sapiens
gattttaatttggtctgtcattgtcctttttgtggtgcagaggagtcattctgcctagagattggagctaaaatacattgcagaaatttgttttagactagtctcttatgtagattgtgtgggtttatgtagaacattttgtgttcagaatgcttttattaaccttcttcatggtactcttgagaggctgtccttatctcttactgatgattagactgagacaagtggaaagtaaaggttagacaagatgtaaagtgtgtggtttgagctgtgatgagcacactagggagttccagataccagtttgatgcttattcaaccatttaggttatcggc

SEQ ID NO: 41958 - DNA, 338 bp, Homo sapiens
gatgagggtctagccctgttggggacagaaaagtgtgtagaccttcttcctgctagggctgcactgtcctgggtgttgggcccttctggtggacaaggctgtgccaaccctgtacagaatcgagtgctgtagcctggccagaccccagagcccttgtgccatctttcttcctggccagagtgatggggttccagccatggggaagcaacccaatcctctgtctccttgctccaatggaggcagaagagcccaggacccaagcgtcttggcaggggtgctgtgaatgtccagtggtcccagctccccaccctggccctgccccagcctgtgtagctctt

SEQ ID NO: 41959 - DNA, 168 bp, Homo sapiens
gagattttatactgtcttcttggtagaacttaattcacaatagagaaataaatgtctttgtatttatcacagatctccagggaaattagtttgaccaccttttaaattgtttttctccccctaaatagaaagcgttctcctcattctctctctcaaaaaaaaaaaaaa

SEQ ID NO: 41960 - DNA, 311 bp, Homo sapiens
ggtctgatgatgctggtgacaccttagccactggagacaaagcagaagttactgagatgcctaatagtgattctttacctgaggatgcagaagtgcattgtgattcagctgcagtttcacatgagccaacaccagctgaccccagaggggaggggcatgaaaatgcagctgtgcagggtgcaggggctgccgccattgggccccctgtgcagcctcaggatgccaacgccctggagccccctctcaatggagacgtgactgaggatacacttgctgaatgtattgattccgtcagccttgaggcagaaccc

SEQ ID NO: 41961 - DNA, 309 bp, Homo sapiens
ggaagatgaaaaaaatactgcactaaagaccattcagaaggcagctctcctttctccaggtgatcctgctatctgggctgggctaatggcagcctgtcacgctgatgataaactggccttagtgaacaacactcagccaaagaggatagatttatacttggcactgttatctgctgtttctgcttcaattaaagacgaaaaattctttgaaaattacaaccagtcccttgaaaagtggtctctctcacaagctgtcactggtctaatagacacaggaagaatatctgaagctgaaactctctgcacaaa

SEQ ID NO: 41962 - DNA, 304 bp, Homo sapiens
gggaagccaagtgaccgtagtctcatcagacatgagggaatgggtggctccagagaaagcagacatcattgtcagtgagcttctgggctcatttgctgacaatgaattgtcgcctgagtgcctggatggagcccagcacttcctaaaagatgatggtgtgagcatccccggggagtacacttcctttctggctcccatctcttcctccaagctgtacaatgaggtccgagcctgtagggagaaggaccgtgaccctgaggcccagtttgagatgccttatgtggtacggctgcacaacttccac

SEQ ID NO: 41963 - DNA, 300 bp, Homo sapiens
gctgagaggtgggagatgattggaggccatggcctatgtacaaacatactggaagaaaaccagcttgtttttaaaacttagcacaatcagaaatttttctttttgtgtttgaatctaacacactgacgtttggaaaacttgatcaatgagcttttaaccacgatttctcccgcaatttgttccttctttttacctttttaaaaatctgttagaagaaaaaaagaagcagacgaaagagaaaaaccctcctctggtagttctgtgtgtgcccctcacccctgtgtgctagtgtctgggaag

SEQ ID NO: 41964 - DNA, 340 bp, Homo sapiens
  misc_feature (1)...(340): n = a,t,c or g
gnnnnnnnnnnnnnnnnnnnnnnnnnnnnnnnnnnnnnnnnnnnnnnnnnnnnnnnnnnnnnnnnnnnnnnnnnnnnnnnnnnnnnnnnnnnnnnnnnnnnnnnnnnnnnnnnnnnnnnnnnnnnnnnnnnnnnnnnnnnnnnnnnnnnnnnnnnnnnnnnnnnnnnnnnnnnnnnnnnnnnnnnnnnnnnnnnnnnnnnnnnnnnnnnnnntacaatatatatatatatatntataaaaaatnccctgannaataannntnaaanatttgttnaaagtgtnttgaatatgtacntnattntncttgtaaaacgtttatatntatgtnaatanggttttt

SEQ ID NO: 41965 - DNA, 331 bp, Homo sapiens
gggtgttagtgcatgcaagggttgaactagatagaccctgccttagtagagggtgggactataaccttagaggccagaacttgatccagaagttgctgtccacagaagtgctttctatttcatcatttttgtttctagggctctttttctgtagccaggtcttcccaaggattttagtatttgcattggagttgaggtttactctaatgatggtggcccagctgtgcccagaggacagccaggcaggccctgggagggagtttagaaagacagtcctggtgaatgggcttcaagtggtcacaaagagggtggctgtgaggtgaccccagac

SEQ ID NO: 41966 - DNA, 332 bp, Homo sapiens
  misc_feature (1)...(332): n = a,t,c or g
ggaagaagaacagagctggaggactcacctcgctggtttcaagactcctctaaagctgcaggagtggaggtggagatggcccagctcaggcacaggcctgcaggccatggagaaggcagcaagctcaagctgacccacacgcatgtggtcattgnnnnnnnnnnnnnnnnnnnnnnnnnnnnnnnnnnnnnnnnnnnnnnnnnnnnnnnnnnnnnnnnnnnnnnnnnnnnnnnnnnnnnnnnnnnnnnnnnnnnnnnnnnnnnnnnnnnnnnnnnnnnnnnnnnnnnnnnnnnnnnnnnnnnnnnnnnnnnttggtgatngttttttgacaa

SEQ ID NO: 41967 - DNA, 339 bp, Homo sapiens
gcggtggcgacctcggccttcagtgtttccgacggagtgaatggcggcggcggctgggatgctgctgctgggcttgctgcaggcgggtgggtcggtgctgggccaggcgatggagaaggtgacaggcggcaacctcttgtccatgctgctgatcgcctgcgccttcaccctcagcctggtctacctgatccgtctggccgccggccacctggtccagctgcccgcaggggtgaaaagtcctccatacattttctccccaattccattccttgggcatgccatagcatttgggaaaagtccaattgaatttctagaaaatgcatatgagaagtatggacc

SEQ ID NO: 41968 - DNA, 340 bp, Homo sapiens
ggctttgtggaactacctgagccagaagggagtcaatagcgacgccatctgggagaagataaaggatgttgttgtcaaaactatcatctcgtcagagccctatgtgaccagcctgctcaagatgtatgtgcgacggccctatagctgccatgaactctttggttttgacatcatgctagacgaaaacctcaagccctgggtcctggaagtcaacatttccccaagcctccactccagctctccactggatatcagcatcaaaggccagatgattcgtgaccttctgaatctggcaggttttgtcctgcccaatgcagaggatatcatttccagccccagc

SEQ ID NO: 41969 - DNA, 327 bp, Homo sapiens
gttttttttttaactccttccctctttgcggattctagaacggaacctttttttaattcttcccagtagaaacgtaggaacaatttcgtgaacgcaatccggagtgcccaacatggcggcggccgtaaggtgcatgggtagagccttgatacatcatcaaaggcatagcctttccaagatggtttatcagacatcactttgttcttgttctgtaaacatccgagtgcccaacagacattttgctgctgctacaaagtctgcaaagaaaacaaaaaaaggtgctaaagaaaaaacaccagatgagaaaaaagatgaaatagaaaaaat

SEQ ID NO: 41970 - DNA, 327 bp, Homo sapiens
gtgggtgggggagaagggagggctttattcaggtgccagcacttcttcacctttctctacatttgctcatcctggaggtggggttgagctgggtctgccttgtcccctcacttccctctctgccgagagagtcctgagcccacccattactggtagcaaagcccggggcacaatctccgttttcctatttgtaaaatggagctaacagtagtacccatctcatcagatggctgtagagatgaaatgagataatgtatttgtggcgttaggacaacagtggtcctgctacagggagaagcctgggccaggagatagactagtctccag

SEQ ID NO: 41971 - DNA, 297 bp, Homo sapiens
  misc_feature (1)...(297): n = a,t,c or g
gatcttttttattttttattttgctgcctgttccctcattcccccaactccccaatggcagggagttctgttttggtcactgctgaatccctggtgacctgagcagtgatgatgcagagttgttgtgatatttgtggaatgaatgaatgcaggattttttgttttaccttcacttggcacaaatgctgtggntntgttaccantcccnctgaagnnntgaaacttggcccanncctggctnanngaanngnnnacacannnnnngatangacnnactgnannntgctngnggnaccc

SEQ ID NO: 41972 - DNA, 355 bp, Homo sapiens
  misc_feature (1)...(355): n = a,t,c or g
gggcgggcactgtgaagctggcagggcgggtggcttgtgccatgagcagccatgagttgctcctcactgagctcatgtttgacaatgcactgagcaccctgcggcctgaggagattgctgccttgctctctggcctggtctgccagagccctggggacgctggggatcagctcccaaacaccctcaagcagggaatagaacgtgtccgggctgtggccaagcggattgggaggtccaggtggcttgtggcctgaaccagacggtggaggaatttgtgngganctgaattttgggctggntgagntggatatgagtgggcccggggcatgcccttntccgagttgcagggctctca

SEQ ID NO: 41973 - DNA, 363 bp, Homo sapiens
gtaaccagcttagatggaaaccatttgagattccaaaagcatctcagaagaaagtagactttgtgagtggcctgcataccttgtgtggagctggagacataaagtctaacaatgggcttgctatccacattttcctctgcaatacctccatggagaacagatgcttttacaattcagatggggacttcttgattgttccgcagaaagggaaccttctcatttacaccgagtttggcaagatgcttgtacagcccaatgagatctgcgtcattcagagaggaatgcggttcagcaataatgtctttgaggagaccaggggctacatctttgaggtctatggtgccactttgagttacctgacct

SEQ ID NO: 41974 - DNA, 370 bp, Homo sapiens
  misc_feature (1)...(370): n = a,t,c or g
gggccaggaaagaagtgcaacaaataaatggaagatgaccctaaaaatgcaccagtgacagtcagtcaatccatcagaccaccttacatgcagggtagaaacatggagtgtgcggcagcatcctcctcacatccctttgtgagcacggctgctccggaatactgaccatctgggctagcacgacttatcagagggttctgcannatgtgctattttaaagtagctgggtnttncttganaaannnggaatntntagcanaatctngtgcannnatgtctgngattnanttctgnatgnntcnncattcttttttgntnnccttntntatctnattnncnnctttnnnttnnnanttttttttcntttatg

SEQ ID NO: 41975 - DNA, 321 bp, Homo sapiens
  misc_feature (1)...(321): n = a,t,c or g
gcaagaaaactttacaaggattgaagggactggcacaggatctctttctgggaaagccttgggttcagtggtatatgtcaaagaaagtgatggactagaaatgacagatgtggaatgaagcaatttgtacgtattaccaaagaaaccaaaaactgcctttgactaaggggggtgttgaaagagaacttaaccttattaggaaaccntgacaaaatgatggaagactattgccttattttgcactatttgggaatcatcttacactgcatttttttatgatgcttattnannnggnanntgctttangnnnaaaaanccttt

SEQ ID NO: 41976 - DNA, 359 bp, Homo sapiens
gagaataacttgccatctgcctgcaccaaacccagggatgtggaagacatctccccacaactgccactgctcaccaggacaagctgcccttcctgtctccacctctcagtccccctagaatggatggctggggagaggtggaggctgacagctgagacgtagtgtcagatatgatctaggagggcggatcaccgggatccgggaccatacaagtaacatggtttccatggcaactgcttgctcgtttgaattaagacagcagtcagttgtcattgccatgacaaggcctctatctccaggcacaatgtccctgctgtctcctaatccaatggacttgctctcaccccagggatgaaacg

SEQ ID NO: 41977 - DNA, 363 bp, Homo sapiens
  misc_feature (1)...(363): n = a,t,c or g
gagtttcttaagcattcagacgaagccctgaaaatcctagggggtgttggactcttctttagctttacagagatccttggtgtttggctagcaatgagatttcggaatcagaaggatcctagagccaaccccagtgcctttctatgagactttggatccttctgacttttcttctgctctctctaagctttctcttcctcccttagggaatatctagggcctgtaaccgttntggtttgnnaataaggaaaggccccttgnctnatncnctttnattgatggantancattganttnatgccttgncntntttttgaggnagncccnctatatacgnataaattggnnaaanttntttttgtg

SEQ ID NO: 41978 - DNA, 376 bp, Homo sapiens
  misc_feature (1)...(376): n = a,t,c or g
gagttgagcaaggaaaataatttgcataatggtgtttgctccctggtgaaactgaaacccagcctgtgtgggtggggccttgtttccaaacgtcagcgctgctgcccacgaaggcctgcaccaacgcacggtgccctccgggccgcccacagaggccggcgtctggccaggagcaggggctggggacagcaagtgtgaaaccagctgaagcacctgcagctcaggcgggctgcaggctccctgctctccccctgtgaagaagcacacattgttctttcttcccgcacatttgaatctctcagtggggtctcattttctgtgacatggcaaacctcaaaaaatgggagtaaatcatttctaaagagcttanctaggg

SEQ ID NO: 41979 - DNA, 321 bp, Homo sapiens
gcagaggtccgcagacgggagctcctagaatccatttctccagctttgttaagctacctgcaagaacatgcccaagaagtggtgctagataagtctgcgtgtgtgttggtgtctgacattctgggatctgccactggagacgttcagcctaccatgaatgccatcgccagcttggcagcaacaggactgcatcctggtggcaaggacggagagcttcacattgcagaacatcctgcaggacatctagttctgaagtggttaatagagcaagataaaaagatgaaagaaaatgggagagaaggttgttttgcaaaaacactt

SEQ ID NO: 41980 - DNA, 327 bp, Homo sapiens
  misc_feature (1)...(327): n = a,t,c or g
gatcatgaacaaagtcatcggagagtttctgtccaaccagcagccatacccccagttcatggccaccgtggtgtataaggtgtttcagactctgcacagcaccgggcagtcgtccatggtccgggactgggtcatgctgtccctctccaacttcacgcagagggccccggtcgccatggccacgtggagcctctcctgcttctttgtcagcgcgtccaccagcccgtgggtcgcggcgatcctcccacatgtcatcagcaggatctngaacangtggaccgtgaaccttttctgcctggtcgcacagacttctacagacaccagata

SEQ ID NO: 41981 - DNA, 130 bp, Homo sapiens
  misc_feature (1)...(130): n = a,t,c or g
gctgcacagcctgtgacgagtcctgcaagacgtgctcgggcctgaccaacagagactgcggcgagtgtgaagtgggctgggtgctggacgagggccgcctgtggacganngtgcngncnnnccgttaatg

SEQ ID NO: 41982 - DNA, 136 bp, Homo sapiens
  misc_feature (1)...(136): n = a,t,c or g
gtgaatattcattagtcatcttcttgtaatccttttgcaaacaacagttcttttgnnnnnnnnnnnnnnnnnnnnnnnnnnnnnnnnnnnnnnnnnnnnnnnnnnnnnnnnacannggtncaatnacagcctactg

SEQ ID NO: 41983 - DNA, 340 bp, Homo sapiens
gttttaagagattgcatgccaccagaatctgaacaacaataacaaaaacctagtaccttctggaagtagaatttactcttttgccgttggcaggcaaatacgccatgcgagacctggtcaaccggctccccggcggcaatggccccagtgtcttgtctgatgagaccatggcagccatctgctgtgctctgcacgaggtcaccagcaaaaacatggagaacgcaaaagccctggccgactcaggaggcatagagaagctggtgaacataaccaaaggcaggggcgacagatcatctctgaaagtggtgaaggcagcagcccaggtcttgaatacattatg

SEQ ID NO: 41984 - DNA, 295 bp, Homo sapiens
  misc_feature (1)...(295): n = a,t,c or g
gctgctgtgaattcttcaagcactgaccctgaaaggctggctgtgaccacggcatggaccactgatagtaagattttgtccccaggaggagaggctggggtcactgagatccacggaaagtgtgaaaatatgactataacccctagaggtacaactgtgacccctacaaaggaaactgtatcccttggaaagcacactgtagctctaggagagaagactgagatcactggggcaacgaccatgacttctgtgggncatcannncatgacccctgnagagaannccctgacccctg

SEQ ID NO: 41985 - DNA, 327 bp, Homo sapiens
  misc_feature (1)...(327): n = a,t,c or g
ggccttttctagttttatacaaagacagccacttttagctactgctaatgagacttgagtctatttttgtacaaaagagaagcaaaatcttttttctaaacctgtgcctccctctcctcggacacccagggtctagccgctgccctgggtcctgcctgcagtattacagaggtcgtcgaaaggtgcagctgcgttctgagggcgtggngaatgggcaggtggcctntgctggtctntggctctacgattanncacccntttncnnagnctctnntcttgtgcangnnctgtgnttaannaancnntttnntggnccnannnnncttt

SEQ ID NO: 41986 - DNA, 332 bp, Homo sapiens
ggtggagcgaagatgtccgaaaactggctgttgttcatgaatctgaaggattgttggggtacatttactgtgatttttttcagcgagcagacaaaccacatcaggattgccatttcactatccgtggaggcagactaaaggaagatggagactatcaactcccagttgtagttcttatgctgaatcttccccgttcctcaaggagttctccaactttgctaactcctagcatgatggaaaatcttttccatgaaatgggacatgccatgcattcaatgctaggacgtactcgttaccaacacgtcactgggaccaggtgccctactgatttt

SEQ ID NO: 41987 - DNA, 70 bp, Homo sapiens
gataaattttcacagactaagtttatttcagacaaaatagagaattcttttaaaagtttttttttttttt

SEQ ID NO: 41988 - DNA, 344 bp, Homo sapiens
  misc_feature (1)...(344): n = a,t,c or g
gcggcacgagattggagtgagggccatcaggagagtagttaagtgagccagaaaaccttgccctcatgcataagtgaaaagattgaagccnnnnnnnnnnnnnnnnnnnnnnnnnnnnnnnnnnnnnnnnnnnnnnnnnnnnnnnnnnnnnnnnnnnnnnnnnnnnnnnnnnnnnnnnnnnnnnnnnnnnnnnnnnnnnnnnnnnnnnnnnnnnnnnnnnnnnnnnnnnnnnnnnnnnnnnnnnnnnnnnnnnnnnnnnnnnnnnnnnnnnnnnnnnnnnnnnnnnnnnnnnnnnnnnnnnnnnnnnnnnnnnnnnnnnnnnnnnnanatggtgccactgcact

SEQ ID NO: 41989 - DNA, 291 bp, Homo sapiens
  misc_feature (1)...(291): n = a,t,c or g
ggctaagctggaagggtgcttatccctgcgtagaaacgcctgccaatgctttctcatttggacccagactccagatcgggagcagtcttatagctggatcagctaccaagagaagttctaaaccaagaagagaaaagcatttcaatttgggacatttatttgcacctggaaatggggaatgggctgtcagaccagacttctatcctgtccaacctgccttcatttcagtctttccacattgttattctgggtttggactgtgctgnanagacaactgnttatacnngctgc

SEQ ID NO: 41990 - DNA, 236 bp, Homo sapiens
  misc_feature (1)...(236): n = a,t,c or g
ggagagacttccatttttagttcctttacactcaccaccctagcaagtgccctgcacagagtaataagtaaattgatttcctaatcacaattctatgtgacttatggtcaaaagagcagttttaataactttaaaagtacttcagatagacgcagaaaattggtgagtggttgaccaagaacactgcacaaatataaaaaaagttctggaaatgcanaagggcgttagatntatat

SEQ ID NO: 41991 - DNA, 354 bp, Homo sapiens
  misc_feature (1)...(354): n = a,t,c or g
gnnnnnnnnnnnnnnnnnnnnnnnnnnnnnnnnnnnnnnnnnnnnnnnnnnnnnnnnnnnnnnnnnnnnnnnnnnnnnnnnnnnnnnnnnnnnnnnnnnnnnnnnnnnnnnnnnnnnnnnnnnnnnnnnnnnnnnnnnnnnnnnnnnnnnnnnnnnnnnnnnnnnnnnnnnnnnnnnnnnnnnnnnnnnnnnnnnnnnnnnnnnnnnnnnnnnnnnnnnnnnnnnnnnnnnnnagctgacccgnnttggngngcncctgtggncctttactcngnnggnttaggcagganaattgcctgancntnaaaggctgnggctgcagtnaactgtgaccggccaccgnactccagcctg

SEQ ID NO: 41992 - DNA, 344 bp, Homo sapiens
  misc_feature (1)...(344): n = a,t,c or g
nnnnnnnnnnnnnnnnnnnnnnnnnnnnnnnnnnnnnnnnnnnnnnnnnnnnnnnnnnnnnnnnnnnnnnnnnnnnnnnnnnnnnnnnnnnnnnnnnnnnnnnnnnnnnatccttccctagagctagtatcctaaagctgcagagctagcccagacctcattggtttccttgtccttggggtgcttttcctgaatctttgcgggtgaagggagtgttgctcccagtccagaggcctgattctgtttggactgggttctcaagacacgaccaggttctcaagacacgagtccccttgttcctccccattaaagggggtttgcanaacnnnaacagccctntccca

SEQ ID NO: 41993 - DNA, 347 bp, Homo sapiens
ggtttcctaacgccattggaggccttcatccctctctacgataaggttgcagaaatgggaagagctacccgtggttgcttttgattacccttaggaagtgagacagtgtttttgaaaatatgtatttctcccatttctccctctccttccctgacacttctctgggctgcacagcagaaacgttggtaaaagggcagtttggtttcaacacagcagacctgatatgggatcccttagccactttagtcaaacagccctgacagagtctataattgagttcaggccccccaccttgcctaataactgcaaatcgcatgttcagccagcagcctcctaagcccaccttc

SEQ ID NO: 41994 - DNA, 342 bp, Homo sapiens
  misc_feature (1)...(342): n = a,t,c or g
gnnnnnnnnnnnnnnnnnnnnnnnnnnnnnnnnnnnnnnnnnnnnnnnnnnnnnnnnnnnnnnnnnnnnnnnnnnnnnnnnnnnnnnnnnnnnnnnnnnnnnnnnnnnnnnnnnnnnnnnnnnnnnnnnnnnnnnnnnnnnnnnnnnnnnnnnnnnnnnnnnnnnnnnnnnnnnnnnnnnnnnnnnnnnnnnnnnnnnnnnnnnnnnnnnnnnnnnnnnnnnnnnnnnnnnnnnnnnnnnnnnnnnnnnnnnnnnnnnnnnnnnnnnnnnnnnnnnnnnnnnnnnnnntnatccagntanccgntaccnnctaattaggaggcactggnnctnnaacnggca

SEQ ID NO: 41995 - DNA, 345 bp, Homo sapiens
  misc_feature (1)...(345): n = a,t,c or g
gtgggggccctgctcaagaagggggccaggcagctggaatcaggggagtgcatcatcctcgggagctgacaacagccaggctacaccagggcacccgcctctcaaaatcagctgggcgcccactctcctcctaaagaacacccttctggccctcagtctgttccccttctcaggtagagattggggctgctatggggactggccctgtagggttgagccacagacagctcttcagcccagtagcagtggagcaggccctgtcctgccctcccagcaataaccacctccctggaggccanctganatgcctggctacttggcaccanggacttcctgacaccacaa

SEQ ID NO: 41996 - DNA, 303 bp, Homo sapiens
  misc_feature (1)...(303): n = a,t,c or g
gggatgagctgcaactgaggtaccactgctgcgggcgccacgggtacaaggattggtttggggtccagtgggtcagcagccgttacctggatcccggtgaccgggatgtggctgaccggatccagagcaatgtagaaggcctatacctgactgatggggtccctttctcctgttgcaacccccactcaccccgcccttgcctgcaaaaccgnctttnanactcctacncncacccnctgttnnatnccnnanaancnnncnnaacctntnncccannnnnnccntnnnnnncnnnnnnncctt

SEQ ID NO: 41997 - DNA, 309 bp, Homo sapiens
  misc_feature (1)...(309): n = a,t,c or g
gccccatcatcctgcccctgtggcatgtcggaatgaatgacgtccttcctaacagtccgccctacttcccccgctttggacagaaaatcactgtgctgatcgggaagcccttcagtgccctgcctgtactcgagcggctccgggcggagaacaagtcggctgtggagatgcggaaagccctgacggacttcattcaagaggaatnccagcntctgaanactgantcatagnanntccacaaccagcttncannctggnagatangccttgntngntgccttntggannntnggtcngntnattncatgg

SEQ ID NO: 41998 - DNA, 356 bp, Homo sapiens
  misc_feature (1)...(356): n = a,t,c or g
gcagctggacagaatattcaatgtaatgggatttcctgcagataaagattgggaagatataaaaaagatgcctgaacattcaacattaatgaaagatttcagaagaaatacgtataccaactgcagccttatcaagtatatggaaaaacataaagttaaaccagatagtaaagcattccacttgcttcagaagctgcttaccatggacccaataaagcgaattacctcagaacaggctatgcaggacccctatttcttagaagacccacttcctacatcagacgtttttgccggttgtcaaatcccttacccaaaacgagaatttttaacggaagaagaacctgatgacnaaggag

SEQ ID NO: 41999 - DNA, 355 bp, Homo sapiens
  misc_feature (1)...(355): n = a,t,c or g
ggagccagactataaggaataaaaggaaaaactttcttcctctctctccaagaggatatgggaagcttctgtgagtgcataggatgggggctggagtcattcttagctgtttcccttcctctgtccatatactggatcacctcaacataccctggtgtggctctaagggtaaatcagggatagggccaaggagaaaacaaccaagaactctttcctgtaataagcaggatccagtttgagaaagtttagcgaatataaaagtaaaagccatttaaaaatctatattcttttttttttttnnncncaaagtntngntttgtnncccagnntgaagnncaagggcntgatntnggtc

SEQ ID NO: 42000 - DNA, 347 bp, Homo sapiens
  misc_feature (1)...(347): n = a,t,c or g
gaaaagtttggatatactgtatctgaagaaaactacatgtgtcggaggtttctaaagtaaaaatcttgtaagaaaattgtcaaaggggctaatgctacaaggctacactcttcctagagttgaaatattttgttgctgcagccgagtgacctccataaatactggactgaaaaaacattgtaatactacaagtataatgacatttagaagattactttgggctggtgggacatgctgtgaatttagattacaaatgaatattataaaggggatgatttttaaccaaaggaatatatttttaacttgaatcttttcttgcattgnatttttctaaaagtttggcttcc

SEQ ID NO: 42001 - DNA, 357 bp, Homo sapiens
  misc_feature (1)...(357): n = a,t,c or g
gaaagtccagaataacttgtatcaccactgtgtagtcaacacgctcttgtctcatggagtgcctctgcctaattggcttataaacagttacaagaaggttgatgctgctgaattgcttngnttatacttnanctntgancttttagacnanccnccctatnnggtgnnagaatntgtggatgctncatnnggtgaaaggacatcgctacttatnatttnacgtancncngncnnnacagtcccngngnagannnttanntactccnctatngntnaacttatncctaactttngnataanaacnntgccnncannnccnnncatnantctnnctcnnaaaaanccttnncttttttg

SEQ ID NO: 42002 - DNA, 352 bp, Homo sapiens
gggagagatgaaggaaatagaaagaccttttgagacatataaggaaaatattgaattaaaagaaaacgatgaaaagatgaaagcaatgaagagatcaagaacttgggggcagaaatgtgcaccaatgtctgacctgacagacctcaagagcttgcctgatacagaactcatgaaagacacggcacgtggccagaatctcctccaaacccaagatcatgccaaggcaccaaagagtgagaaaggcaaaatcactaaaatgccctgccagtcattacaaccagaaccaataaacaccccaacacacacaaaacaacagttgaaggcatccctggggaaagtaggtgtgaaagaa

SEQ ID NO: 42003 - DNA, 347 bp, Homo sapiens
  misc_feature (1)...(347): n = a,t,c or g
gcagactgaatgttttatttcaacagacatccctggtttaaaaaaaaaaagtggtggtggggagggttcaacattttatcacacctgacagagagcaaaactcccaccccagaactcagagccccttcggaggcatcacacaagtctttgctagctccaggacagaagggagctgaattttctaacttgttaagaaaaatctatcaaatatgttcattctcgcagaggcgagggctgggtccttggggaaagagatcctgggcttaaagcagctggggtcccagaggtgaagctgggggccaggccagctgggctggcagganatcctgggagcaatcagttccaga

SEQ ID NO: 42004 - DNA, 347 bp, Homo sapiens
gtctcttctgaatagtttccatccccatgaagaggacctctcaagtattagtgcgacaccacttccagaggagtttgaattacaaggatttttggcattgagaccttctttcaggaacttggatttttccaaaggtcaccagggtattacaggggacaaagaaggccagcaacgacgaatacgacagcaacgcttgatctctataggcaaatggattgctgataatcagccaaggctgattcagtgtgaaaatgaggtagggaaattgttgtttatcacagaaatcccagaattaatactggaagaccccagtgaagccaaagagaacctcattctgcaagaaacat

SEQ ID NO: 42005 - DNA, 358 bp, Homo sapiens
  misc_feature (1)...(358): n = a,t,c or g
gggaacaactgggcatgatcgagaagctcgtcgctgcccagcaacagtgtaaccggcgctccttttctgaccggcttcgagtcacgccttggcccatggcaccagatccccatagccgggaggcccgtcagcagcgctttgcccacttcactgagctggccatcgtctctgtgcaggagatagttgactttgctaaacagctacccggcttcctgcagctcagccgggaggaccagattgccctgctgaagacctctgcgatcgaggtgatgcttctggagacatctcggaggtacaaccctgggagtgagagtatcaccttcctcaaggatttcagttataacccgggaanactttg

SEQ ID NO: 42006 - DNA, 356 bp, Homo sapiens
  misc_feature (1)...(356): n = a,t,c or g
gcgcaggagatgggtgcccccatccgcacactgtcctttggccaccggacatcatgcctcccaagaaggatgttcccgtgaagaaaccagcagggccctccatctccaaacctgctgctaagccagcagcagcaggggctcctccagccaagaccaaagctgagccagctgtcccccaggcccctcagaaaacccaggagcctccagtcgatctctccaaagtggtgatcgagtttaacaaggaccagctggaggagttcaaggaggccttcgagctgtttgaccgagtgggggatggcaagatcctgtacagccagtgtggggacgtgatgagggccctgggccanaacccccca

SEQ ID NO: 42007 - DNA, 354 bp, Homo sapiens
ggcgttagtgattagagtttcttccctgccggaggtgggatacacggtagcatcatggtcgaggaggtacagaaacattctgtacacacccttgtgttcaggtcgttgaagaggacccatgacatgtttgtagctgataatggaaaacctgtgcctttagatgaagagagtcacaaacgaaaaatggcaatcaagcttcgtaatgagtatggtcctgtgttgcatatgcctacttcaaaagaaaatcttaaagagaagggtcctcagaatgcaacggattcatatgttcataaacagtaccctgccaatcaaggacaagaagttgaatactttgtggcaggtacccattcatac

SEQ ID NO: 42008 - DNA, 330 bp, Homo sapiens
ggaccaaagcagaaaagaaaggagatgagtatattattaatggtcagaagatgtggataaccaacggaggaaaagctaattggtattttttattggcacgttctgatccagatcctaaagctcctgctaataaagcctttactggattcattgtggaagcagataccccaggaattcagattgggagaaaggaattaaacatgggccagcgatgttcagatactagaggaattgtcttcgaagatgtgaaagtgcctaaagaaaatgttttaattggtgacggagctggtttcaaagttgcaatgggagcttttgataaaaccagacctg

SEQ ID NO: 42009 - DNA, 333 bp, Homo sapiens
  misc_feature (1)...(333): n = a,t,c or g
gatttctttttcttgacagctcttctctttggacacatgggccttcttagagggttcagtctaggacccggctctcctggccctgtgttgagggtagctggtccctctgtccctgtgtctgctagcactagactttgttgctgcagattgatccagtgggtacataggctaattaatgtgagtctttttccttgtttaaaggagtccctcttgctgaaagtagatgattactattgctgtagtgttaggaaagtattaagtttgtgctgaaaatccattgccatttggtacaaatgacatttgttctttctgtgaaagagatgccctcnagtg

SEQ ID NO: 42010 - DNA, 354 bp, Homo sapiens
gggctttggaggggagtctggcagcccggctggcccaggccctgcagcggcagcctttccacagggcgcagcggcggcctttcgaggccctttctggggggtctgagggagacctggttgggaattggggctccagtgctcaggctggcttgggctgcatgaggacagccctgtgggaccctcgggagaccccgtggctgtctccgccccatcgaggaggaggcccgtcagccatggctgccatctggcttctgccctgtgaccccgtgaccccgtgaccccggaagtggtctggggctgatcttgccttgaggaagacccaggccatgttcccaaaggccagcgggggccctg

SEQ ID NO: 42011 - DNA, 354 bp, Homo sapiens
gggaagaattgagtcaggacagtactgggcgggtgaaacgattaccacccatagtgcgaggaggagccatcgacagatactggcccaccgccgacgggcgcctggttgaatatgacatagatgaagtggtatatgacgaagattcaccttatcaaaatataaaaattctacactcgaagcagtttggaaatattctcatccttagtggggatgttaatttggcagagagtgatttggcatatacccgggccatcatgggcagtggcaaagaagattacactggcaaagatgtactcattctgggaggtggagacggaggcatattgtgtgaaatagtcaaactaaaaccaaaga

SEQ ID NO: 42012 - DNA, 354 bp, Homo sapiens
gtcaaatttggcccccagccttgggcccggagctgaagatggggcagaagcccaggccccatctccacccccagctcttgaagacaccgctgcagcgggagcagcacaggaagaccaagagggtgtcggtgagttcagttccccaggccaagagcagctgagcggccaggcgcagcctccagagggctctgaagaccccagagggtccacagagagtttcggagctgccaacatctcccaggcagcacgggaaagggactgtgagagtgtctgcttcatcggccggccgtggcgtgtcgtggatggcacctgaaccttcctgtatgcaagggtatgatggaggccatgctgtac

SEQ ID NO: 42013 - DNA, 364 bp, Homo sapiens
gtttgctgtttccttaaaactaaagctgtgttcttctgttttgaagggtttccgcccccaacatatgttatccccccgcctgtggcattttctatgggctcaggttacaccttcccagctggtgtttctgtcccaggaacctttcttcagcctacagctcactctccagcaggaaaccaggtgcaagctgggaaacagtcccacattccttacagccagcaacggccctctggaccagggccaatgaaccagggacctcaacaatcacagccaccttcccagcaaccccttacatctttaccagctcagccaacagcacagtctacaagccagctgcaggttcaagctctaactcagcaacaac

SEQ ID NO: 42014 - DNA, 365 bp, Homo sapiens
gggggaggtggcagaggggaagttgccttccccacctggcccccaagagctcctcgacagtcccccagccctgtatgctgagcccttaaactccctgcgcattgctccatgcccttcccaggactccctatactcagaccccttggacagcacgtctgctcaggcaggagagggagtacaacggaagaaacctctctattgggacttgtatgagcatgcgcagcagcagttgctgaaggccaagctgacagaccccaaagaggatcccatctatgatgaacctgagggcctggccccagtccctccccagggcctttatgatctgcctcgggagcccaaggatgcatggtggtgccaagctcggg

SEQ ID NO: 42015 - DNA, 320 bp, Homo sapiens
  misc_feature (1)...(320): n = a,t,c or g
ggccaagccagggatggggccacagccagaaccccgagccctacttccaggttctggttagctcagccccagcccagcccagctgctctgcccagagctgggtgagtggggagacacctcagagccccgcaaaacccactgaccggaggcaaaaggcagtggggctgggggtagttttccatggtcacagagaactagtggtggctctgagaaggggaggacctatgggctttgattccatctccttggatttttttntttgnttttagagacagggncctgntatttnncanctgganttatgntgcnatngtngctac

SEQ ID NO: 42016 - DNA, 326 bp, Homo sapiens
gagacagggacccagggacaccccgaagcccacctgcaatctcccacctcctgcccatccctctcttgagggagcagcaggggccaggagctaccccaggagtgggccaggccgggccacagcaataggaaagccagggccagagcgagccatgccagccctactgccgatgccaaatatttgagagaagggaacttttgctgaggttttctctgaggtttttttgatgctttataggaaactattttttaaaaaaagccatttcccacccaaggacacagtggatgtgttttccctgactccagcagggcaaggaatgtagccca

SEQ ID NO: 42017 - DNA, 318 bp, Homo sapiens
  misc_feature (1)...(318): n = a,t,c or g
ggcaaaaatagtttttaccaataccagttaaaataggataggttagactttgggggcagggtgagacagtgcagccttttcactctgaaatggcaaatcagctgtactctttgagtctaccagagattcctatttgagtgtgaatggggtgtgtgtgtgtgtgtgtgtgctcattcatcttcatgctttcttccatggtgttaattcaagctctcctaataagggtatccaaagagtactgagaagtgaccatnggtatttggcatgantaaatgnannnccttttgccaaaaanactntnanangntacnnctggag

SEQ ID NO: 42018 - DNA, 313 bp, Homo sapiens
ggttatcctcagagggaagatgataatatataaataatataatgaacacacccttagtttctcataagcatttgccctcaccatggtttataaaactttgggaaaacggaatattcagaaataggtttccgccatgtactgaaaggtctgtggccatctgtgaggtagatgaagaagcagcatagtggtctccttacatctaggcctaactgtccctcttcctgcccccgggtaccacagtccacctttagaccctactgtcgccccatcttctccgtggatgggccatgcgtcctgaaaacaggacatcaga

SEQ ID NO: 42019 - DNA, 314 bp, Homo sapiens
  misc_feature (1)...(314): n = a,t,c or g
gatacaaaagaggtgggggctggggaggccctctgagtggtgttacaggaacaagtgtgttttcgaggggtaaaaagagaagaggaaaacctgacctgttagagtacaagaaatgtttagaaaaattaaggttaaatcagaaaagtagatcggataataatggggaccggcatacaccatatgtacaattttgtaacttacaataccaagagttttcaatgattcttcttttcagagggagttcagtaataggatcccccccttatttattnttacattttttgnnnanaccgangnntgactanngtaccagg

SEQ ID NO: 42020 - DNA, 324 bp, Homo sapiens
gagtttcccaacagttccagaagaagaaggagggaagaaaatttttcaaggaacttcttgctcatgtgttgctgtttcccaacacatcagccttatggaagatgtcatgaggctgcttgcctgggaggctacactttcctttccagaagacttcaaagctgactgccaaagcttctggtaaatccaccccacccttcacaccctttcctgaaaggcatttataccacccattttatttattggctttgctcccaaccccctgccctagagcaattgagtttttgaatttttgaccctctctctgtcttcagcaaaactgcatga

SEQ ID NO: 42021 - DNA, 313 bp, Homo sapiens
gagaatgttggtgggatacctgccttgttgcgactgttgagaaaatctattgatgcagaagtaagggagcttgttacaggagttctttggaatttatcctcatgtgatgctgtaaaaatgacaatcattcgagatgctctctcaaccttaacaaacactgtgattgttccacattctggatggaataactcttcttttgatgatgatcataaaattaaatttcagacttcactagttctgcgtaacacaacaggttgcctaaggaacctcagctctgcgggggaagaagctcggaagcaaatgcggtcctgcg

SEQ ID NO: 42022 - DNA, 322 bp, Homo sapiens
ggggaatctgtgctggccttcaggtggtgctggggctgcccttcctgctggagaaccccagcggctacctgtcccgctcctttgaccttggccgccagtttctgttccactggacagtgaactggcgcttcctcccagaggcgctcttcctgcatcgagccttccacctggccctgttgactgcccacctcaccctgctcctgctgtttgccctctgcaggtggcacaggacaggggaaagtatcttgtcgctgctgagggatccctccaaaaggaaggttccaccccagccccttacacccaaccagatcgtttctaccct

SEQ ID NO: 42023 - DNA, 343 bp, Homo sapiens
gttcaggtcctaggttgccacctgatagatactgcttaacagctccaaactataggctgaaatctttacagaaaaaggcatcaacttctgcgggaagaataacagtcccgcggttaagtgttggttcagttactagcagaccaagtactcccacactaggcacaccaaccccacagaccatgtctgtttcaactaaagtagggactcccatgtccctcacaggtcaaaggtttacagtacagatgcctacttctcagtctccagctgtaaaagcttcaattcctgcaacctcagcagttcagaatgttctgattaatccatcattaatcgggtccaaaaacat

SEQ ID NO: 42024 - DNA, 305 bp, Homo sapiens
gagagagctagcaaatcttctcctcatccaaagcagcctcgcaaacctcctcagcctccaggaccctgctggttttgccttgctagccctgaagtggaaaaacatttggtggtcaacatcggcacacattgctaccttgccctggccaaaggaggcttatctgatgaccatgtcctcatcctgcctattggacactaccagtcagtggtggagctttcagcagaggtggtagaagaggtggagaagtataaggccactctgagacggttctttaagagtcgagggaaatggtgtgttgtatttga

SEQ ID NO: 42025 - DNA, 305 bp, Homo sapiens
gggaggacggagaggacctgttcaccagcactgtctccaccctagagtcaagtccatcatctccagaaccagctagtcttcctgcagaagatattagtgcaaactccaatggcccaaaacccacagaagttgtattagatgatgacagagaagatctttttgcagaagccacagaagaagtttctttggacagccctgaaagggaacctatcctatcctcggaaccttctcctgcagtcacacctgtcactcctactacactcattgctcctagaattgaatcaaagagtatgtctgctcccgtg

SEQ ID NO: 42026 - DNA, 334 bp, Homo sapiens
  misc_feature (1)...(334): n = a,t,c or g
gggaaccctccttgggagccttctatgggccagccagcttcatcacttttgtaaactgcatgtactttctgagcatatttattcagttgaaaagacaccctgagcgcaaatatgagcttaaggagcccacggaggagcaacagagattggcagccaatgaaaatggcgaaataaatcatcaggattcaatgtctttgtctctgatttctacatcagccttggaaaatgagcacacttttcattctcagctcttgggggccagccttactttgctcttatatgttgcactgtggatgtttggggctttggctgtttctttgnattaccctttgga

SEQ ID NO: 42027 - DNA, 342 bp, Homo sapiens
  misc_feature (1)...(342): n = a,t,c or g
gcccgggaggagctctccagcctcggcgcctgggcagagggcccggaaaccctcggaccagagtgtgtggaggaggcatctgtgtggtggccctggcactgcagagactggtccgggctgtcaggaggcgggagggggcagcgctgggcctcgtgtcgcttgtcgtcgtccgtcctgtgggcgctctgccctgtgtccttcgcgttcctcgttaagcagaagaagtcagtagttattctcccatgaacgttcttgtctgtgtacagtttttagaacattacaaaggatctgtttgcttanctgtcaacaaaaagaaaacctgaaggagcatttggaagtcat

SEQ ID NO: 42028 - DNA, 353 bp, Homo sapiens
  misc_feature (1)...(353): n = a,t,c or g
gggctattctgcctggcagtgggtccgctgcagtgttctcctggagaggtttttgtccctccctctgaccttcctttccccctcccaccttcctttctctcccagtcaccaccacctgctctggttgcccccatggcatggggctttgtagcaggaagcaaggggtgggggagggcggggaacgctcctgcaacactgaaagcggggcactggccaagggcttcttcccacaggggctcagagccagggggaaggagagagggggaggggnctgcnnnatncctnncnncacnttnctnncgncnnnctnnaannnntttcttnctnntctntccanactccanncnnatcaa

SEQ ID NO: 42029 - DNA, 345 bp, Homo sapiens
  misc_feature (1)...(345): n = a,t,c or g
gattttaaaagtgacnnnnnnnnnnnnnnnnnnnnnnnnnnnnnnnnnnnnnnnnnnnnnnnnnnnnnnnnnnnnnnnnnnnnnnnnnnnnnnnnnnnnnnnnnnnnnnnnnnnnnnnnnnnnnnnnnnnnnnnnnnnnnnnnnnnnnnnnnnnnnnnnnnnnnnnnnnnnnnnnnnnnnnnnnnnnnnnnnnnnnnnnnnnnnnnnnnnnnnnnnnnnnnnnnnnnnnnnnnnnnnnnnnnnnnnnnnnnnnnnnnnnnnnnnnnnnnggcaacagaatgagactttgtttaaaaaaaaaaaaangggacttgatttaggggaaaaaangacnggntatattca

SEQ ID NO: 42030 - DNA, 318 bp, Homo sapiens
  misc_feature (1)...(318): n = a,t,c or g
gacgaaaccgacacccggaagcctagtcgcccggaggttctgagcgttctgttcggacctcctaccgttactctttcattcactcaagaaatgatttcttgagttcccggcctttgtcagagagatgaacgaggcacggtccgtgtccagctaaaggacagtaggactggaagagcgttgttttccaaggtacaggatgccgcgcctcctaggagccgaagggacgggaggccgcgtagaggaggggaccgtccccgagcctcgccgagcctgcggngtanacacctctggngnctannggtgangatctgngaccgg

SEQ ID NO: 42031 - DNA, 344 bp, Homo sapiens
  misc_feature (1)...(344): n = a,t,c or g
gccccgcaacaccataccttccttctccttttgctatgacaatgtctggtggtccaccattacctccccagttcggctcaatgtctggtcatttccatttccacccttctccccattacagtccctagtgacgcctgttacatctcccttccgcatagtatgtagtgacccccccccccatgaattcctcatcatanagtcttgggacttccattagccacctaacaacggngtctgnggtcctaacatcaacattacaccccagggcttagggatgtccacagtgccctttaaggacatgtttggngcaacctccatcttccccaaactaaggggcagtatct

SEQ ID NO: 42032 - DNA, 340 bp, Homo sapiens
gaggggacattttggtgagaaatgggacttaactccttccagtgtccttagaacattttaattcatcccaactgtctttttttccctaccattcagtgattactgtcaaggctgcttagaatccaaacttggatttttgactctggcaaagcttttagaaatactgcaagaaaatgatgtgtacccaaacgtgagcataggaggcttctgttgacgtactccaacagaagaactgtgtttcaagttcaatcctacctgttttgtggtcagctgtagtcctcataaaaagcaaaacaaaaattaggtattttgcctaaaacacctggtaggagtgtgtgat

SEQ ID NO: 42033 - DNA, 386 bp, Homo sapiens
  misc_feature (1)...(386): n = a,t,c or g
ggaagagaacagtcactgtgatgctaacacagagatgcagcagattctcacacgagttcggcagaactttggtaaaatcaacgtggtgcctcagttttctggggatgacctggttcctgtggaggtgtcagatcttgaggaagagcttgagagcttttctgatgaagaggaggaggaacaggagcaacaaagagatgatgcggaagagtcttcctcggagcctgaggaggaaaatgtgggaaaccgacaccaaagccgttattaaagcactggatgagaagattgccanatatcanaagttnntagacaanccanagccnaaaagttntcagcagtcngaatatccaagggactgantgaaganatttttgcnaaacctggagaac

SEQ ID NO: 42034 - DNA, 373 bp, Homo sapiens
  misc_feature (1)...(373): n = a,t,c or g
gccctccctctctccctccctgtttctccctccctgtttctccccgctgtgcctcccccagttacccacagaagtgcctgcctctccagcgctcacagaacacacaaaaagggacaggaattggtcactgggtagtggccgtggctcctgacgatccagaccagcgtctggcccaagccattcagaggtggggtctggggcctgggggttttgtgtcgtgacactttgtctcaaggagattccacatagggatttgaattaggctttctgcttgccaaggcctgtggcatctgagcctggctganggccgggcaagcctccctgacctttggaagccgagttcactctctgcctgcccaggggaacaccggtt

SEQ ID NO: 42035 - DNA, 368 bp, Homo sapiens
gtgggttatagagggctcagcatgaccaaagtcctaaagattttacctcccagctttggttgtatgtgttcccaagtggtgaggtgagattgtggctggaggaagaaaaaggatggcatgaaagaatgacccttattgtggtctgtccttctaatcaacataattagggcagcttaccccaacatgaaaatgatgacctggccatttttaatggccagagcttgaagtctggtctctcattttgtttcagaaatgagtgagaggccttcctgcagagcagtcaggagaaatggtggagcctggggccctggaatggctgaccctgtgcctagagagctgatggcaagggctgtctggcatggctcatt

SEQ ID NO: 42036 - DNA, 372 bp, Homo sapiens
gcaaaagcctattcaccacgatattcaatatcagaccggacctctatctcagaccctcctgaaagccctcccttattaccaccacgagaacctgtgaggacacctgatgttttctcaagctcaccactacatctccaacctccccctttgggcaaaaaaagtgaccatggcaatgccttcttcccaaacagcccttccccctttacaccacctcctcctcaaacaccttctcctcacggcacaagaaggcatctgccatcaccaccattgacacaagaagtggaccttcattccattgctgggccgcctgttcctccacgacaaagcacttctcaacatatccctaaactccctccaaaaacttacaaaagg

SEQ ID NO: 42037 - DNA, 338 bp, Homo sapiens
  misc_feature (1)...(338): n = a,t,c or g
gtgggattgtatttgctgacttctttataatgaatctgatcctctggggagaaggatcttcagcagctattccttttgggacactggttgccatattggccctttggttctgcatatctgtgcctctgacgtttattggtgcatactttgggtntaagaataangccattnaacacccaantcganccaatcagantccactgtctgaatcctgaacagtnnctntacacganaccctnncctgnctttatcatggnaggnnctcttccttncaggtnnccntntnaaccanntatatnanaactnntcctanncntctcacccngacngnaanatga

SEQ ID NO: 42038 - DNA, 199 bp, Homo sapiens
  misc_feature (1)...(199): n = a,t,c or g
gnnnnnnnnnnnnnnnnnnnnnnnnnnnnnnnnnnnnnnnnnnnnnnnnnnnnnnnnnnnnnnnnncaaacaaactgaaaacggaggtggagagagggtgggagcatgtttgactcagctgtgtgcgagctgcgcgcctctccagtgctggggtgaacatggaggcctggtgaacgcacaggtgggggcggtggggagg

SEQ ID NO: 42039 - DNA, 357 bp, Homo sapiens
  misc_feature (1)...(357): n = a,t,c or g
gagctggagaggagcagaaagaaactgctagtggcggctagatttcggaggccccagtgcacccgtggactccttcggaacttggcaccctcaggagccctgcagtcctctcaggcccggctttcgggcgcttgccgtgcagccgnnggctcngttcgctgcntntcgncncngganncnnangnactcngngnccagnntcttnntctggncnnctaactgcnnaatgtgnactnnctgccttancntngattgcnnnnnanngcggcanttgccantnncanncctntgacgctntnnttcancccnntccatngntnatnnatcctatctngcatncnctnacnntnccattct

SEQ ID NO: 42040 - DNA, 283 bp, Homo sapiens
  misc_feature (1)...(283): n = a,t,c or g
ggcagcacaaaaagttattagtaaaccaatctccgaacacaaaatcttattccttggagcaggagaggctgctcttggaattgcaaatcttatagttatgtctatggtagaaaatggcctgtcagaacaagaggcacaaaagaaaatctggatgtttgacaagtatggnttattagttaagggacggaaagcnnaantagatagnnatnangaaccatttactcactnanccccanagagcntacctganncttttgaanangcnnngannntnnngnngcct

SEQ ID NO: 42041 - DNA, 130 bp, Homo sapiens
ggtgcaaagaggctgttgtcagggtctcatatttagtaagtggtggtgctaggatatgaactcctcaggtaagccatctgtggagtctactggttgtcactggtcttcaagcagtatttttttttttttt

SEQ ID NO: 42042 - DNA, 357 bp, Homo sapiens
  misc_feature (1)...(357): n = a,t,c or g
ggtacttgctgtaggattcaagctgtctttgcactagctctaaagaagattttcttctggttttagagaactaattttgttttagcattaaactgttgaacttttttttgtacttagaaaacctagatactgcagtcagattttggaaactgccgtatagtcactgttttaaaaaccccggaggggctgtattaatttgtattgccccatggctgacaaaagccttttttttttgtttggatttttttttngnancngtngggggnaaaaaggntttttancccatttttgaaaagggggaantttggaaaacaantttaaaanccntnnnnntgngancnnattttttanangggt

SEQ ID NO: 42043 - DNA, 356 bp, Homo sapiens
  misc_feature (1)...(356): n = a,t,c or g
gggctctaacaagtccggtgcagaggagcagggcccaatagacgggcccagcaagtcgggtgcggaggagcagacctcaaaagacagccctaacaaggtggttccagagcagccttcccggaaagaccattccaagcccatctccaacccttctgataacaaggagctccccaaggctgacacaaaccagcttgctgacaaagggaagctttctcctcatgctttcaaaaccgaatctggggaggaaactgacctcatttctcccccgcaggaggaagttaagtcttcagagcctactgaggatgtggagcccaaagaggctgaanatgatgatncaggacccnaggaggnttccg

SEQ ID NO: 42044 - DNA, 300 bp, Homo sapiens
  misc_feature (1)...(300): n = a,t,c or g
gaggagctcgtgggaaaaatgagacgggccctgagggggtgactcatgggccaagcagggccacacaggtaccaggccgccacgtcctctcctgcctctcactctctggagactggacttcctttactgcctcctttctgacatttcctagacatcagactttgctacttagtacacaaacggggttcccttttaaatttgttcactctagttagcatttgcagaagctgtgaaaaattacagagagatgatgtgttgggtaagagatggtttaaaagnncncttgctgnnnttattaaa

SEQ ID NO: 42045 - DNA, 301 bp, Homo sapiens
gtggggtcactaagtgaagacaggtttccaggtagaacatagtttttgctcatttttctctgggtgtccagggtcgccatccctactcctactctgccttgtggaattcttccctcaaaggttttaagcgtcttaagtgcttctcacattcccagataagccttggtgctctacctgggatgcagtcggtgcccgttacccagatgttgaagggattaaatacttccatgcctgaactggtgattggacttgttgaaatgtttttccttttttcctcttttgtcccctggcactgggatgg

SEQ ID NO: 42046 - DNA, 361 bp, Homo sapiens
  misc_feature (1)...(361): n = a,t,c or g
gtcggttcagcgttaatcctatagaaaagtggtttggaggggattgggggatagtgggacaggtatagatttaatccatcaggagcaattagatattgtataaggtgcaatgatagcctaatgaaattacccgtcattcatcatttagaagtagcaacagtgaagactggacagtttacttgaatctggttggccactcctctacctacttggttatttgtaaaccttacaaatgtatatattgtgaagctaattttgaaaatattcctaaatatnnnnnnnnnnnnnnnnnnnnnnnnnnnnnnnnnnnnnnnnnnnnnnnnnnnnnnnnnnnnnnnnnnnnnnnnnnnnnnnnnnnnnc

SEQ ID NO: 42047 - DNA, 354 bp, Homo sapiens
ggccgatgggatcgaggtttcctacaatgcctgcggcgtcctctcccacatcatgtttgatggacccgaggcctggggcgtctgtgagccccagcgtgaggaggtggaggaacgcatgtgggctgccatccagagctgggacataaactctcggagaaacatcaattacaggtcatttgaaccaattctccgcctccttccccagggaatctctcctgtcagccagcactgggcaacctgggccctgtataacctcgtgtctgtctacccggacaagtactgccctctgctgatcaaagaaggggggatgccccttctgagggacataattaagatggcgaccgcacggcagga

SEQ ID NO: 42048 - DNA, 370 bp, Homo sapiens
  misc_feature (1)...(370): n = a,t,c or g
gctcagatgacacgttgaagcagctctgtgcccaggcgctgaaggatggctggaccaggtttaaagtaaaggtgggtgctgatctccaggatgacatgcgaagatgccaaatcatccgagacatgattggaccggaaaagactttgatgatggatgccaaccagcgctgggatgtgcctgaacggtggagnggatgtccnagctggccaaggtnangccatnnggggntngaggnnggngggctnccntggtgagatngnggggcgcacgancattggnnnnggggntgggncggatgagggagnngntnnggnnnggnnagnnagagggggnncgngnngtgggggangttaggtagngnngnnnaggg

SEQ ID NO: 42049 - DNA, 367 bp, Homo sapiens
ggcccacaatgcagagcatgaggcttgcgacctgcttatggaaattgagcaggtggacatgctggagaaggacattgatgaaaatgcatatgcaaaggtctgcctttatctcaccagttgtgtgaattacgtgcctgagcctgagaactcagccctactgcgttgtgccctgggtgtgttccgaaagtttagccgcttccctgaagctctgagattggcattgatgctcaatgacatggagttggtagaagacatcttcacctcctgcaaggatgtggtagtacagaaacagatggcattcatgctaggccggcatggggtgttcctggagctgagtgaagatgtcgaggagtatgaggacctgaca

SEQ ID NO: 42050 - DNA, 344 bp, Homo sapiens
gcaaggttttaatgaccagcccagtatctaagcttccaaacgaatgccagcccatcacatactcaccctgggaggctgctgcacgcgcattctcctgatgctcacgtcacttggtgtaggtttcaggatcgcctctttgaggaaggacttcaggaccaactggggcctgcataagaaaacttatctcattattagagtactcacagcttgtatctcccagctacatcctagaaccccattgtcctttattccaccaaaccagctccaggtgaccagactctactcagaaagcaaattcgtcatcaaagaacagagactggccaccacaaggacatgcaggagaa

SEQ ID NO: 42051 - DNA, 371 bp, Homo sapiens
  misc_feature (1)...(371): n = a,t,c or g
gctcagaatcaagggtcaaggggttgggcattctccgggagcaatggggagccatggaaggtttaagccagagagtgaagcagtctgactagttcttttatttttattttttatttttgactggttctttaagaagttgtctcnnnnnnnnnnnnnnnnnnnnnnnnnnnnnnnnnnnnnnnnnnnnnnnnnnnnnnnnnnnnnnnnnnnnnnnnnnnnnnnnnnnnnnnnnnnnnnnnnnnnnnnnnnnnnnnnnnnnnnnnnnnnnnnnnnnnnnnnnnnnnnnnnnnnnnnnnnnnnnnnnnnnnnnnnnnnnnnnnnnnnnnnnnnnnnnnnnnnnnnnnnnnnnnnnnnnnnnnnnnnnnnnnnnn

SEQ ID NO: 42052 - DNA, 379 bp, Homo sapiens
  misc_feature (1)...(379): n = a,t,c or g
gctaggaaaagacaagctttccagagaatgtttcagagaaagttacgtggagcgtgggcgtttcgcagactcctaagtggtctggaacctaacctgcagtgtctctgagcttctggcaagtatgaggcaaggatttcacagaagaacttggagcaaaaattcccactgtcatagctataggctgtccagtcttgagggagctgcaggaacaggaaaaagagaccttcagagaagacatggcttccagaaaagagaatgcgaagagtgcaaacagagtgctaagaataagccagttggatgcacttgaactaaacaaggccctggagcagctantttggtcccagtttactcagngctttcatggatttaaacctgggct

SEQ ID NO: 42053 - DNA, 499 bp, Homo sapiens
  misc_feature (1)...(499): n = a,t,c or g
tttggaagcccnnnnnnnnnnnnnnnnnnnnnnnnnnnnnnttggacgccgntgacccaaataaagagatctctcgaggatccgaattccnnnnnnnnnnnnnnnnnnnnnnnnnnnnnnnnnnnnnnnnnnnnnnnnnnnnnnnnnnnnnnnnnnnnnnnnnnnnnnnnnnnnnnnnnnnnnnnnnnnnnnnnnnnnnnnnnnnnnnnnnnnnnnnnnnnnnnnnnnnnnnnnnnnnnnnnnnnnnnnnnnnnnnnnnnnnnnnnnnnnnnnnnnnnnnnnnnnnnnnnnnnnnnnnnnnnnnnnnnnnnnnnnnnnnnnnnnnnnnnnnnnnnnnnnnnnnnnnnnnnnnnnaaantgaggntgnccctaaagantctgaaaaagagaatcagattcctgangaggcnggaagcannggcttangaaaagcanagaganagcatgcnctttgcaanctgatcacgcactgatgaacnnnantaganctttctcattc

SEQ ID NO: 42054 - DNA, 338 bp, Homo sapiens
atcttcactaaatcctatctcaaagagaaagacactactgttatttgcagcactcctaatacagtgcttcatatcagctctcttcttgcatggacactactgctgaccatatgcccaatcaatgaagtgaagaaaaagcttgagatgcatttccataagcttccaagcctcctctcttgtgatgatgtaaacatgagaatagctgctggtgaatctttggcacttctctttgaattggccagaggaatagagagtgactttttttatgaagacatggagtccttgacgcagatgcttagggccttggcaacagatggaaataaacaccgggccaaagg

SEQ ID NO: 42055 - DNA, 350 bp, Homo sapiens
  misc_feature (1)...(350): n = a,t,c or g
ggaaaatcctcaaacccatctctagtggatgtccgtcataatttaaagggtattttccccattcaaataaaacaatctcttgtaaagctacaatagttatataccaaagcaatacctagttacatgctttacacagtcccgtgaaaaaataatttaattgctcctaatccctgatgcaaggcacttcaaagcacccgcacaaaacgtgcatgtaaacagnantacagtncatcatttaaataacatanatgacttttacacagnttgacctaggaaaanatnnnatccatcatatccacngctaaanagcatgttnngattcacaatnggaatttgtgtntcttattatg

SEQ ID NO: 42056 - DNA, 416 bp, Homo sapiens
ggaagatggaacttctgtaaaaacactggaaacactccagcaaagagtgaagcgtcaagagaacctacttaagcgttgtaaggaaacaattcagtcacataaggaacaatgtacactattaactagtgaaaaagaagctctgcaagaacaactggatgaaagacttcaagaactagaaaagataaaggaccttcatatggccgagaagactaaacttatcactcagttgcgtgatgcaaagaacttaattgaacagcttgaacaagataagggaatggtaatcgcagagacaaaacgtcagatgcatgaaaccctggaaatgaaagaagaagaaattgctcaactccgtagtcgcatcaaacagatgactacccaggggagaggaattacgggaacagaaagaaaagtccgaaagg

SEQ ID NO: 42057 - DNA, 419 bp, Homo sapiens
  misc_feature (1)...(419): n = a,t,c or g
nnnnnnnnnnnnnnnnnnnnnnnnnnnnnnnnnnnnnnnnnnnnnnnnnnnnnnnnnnnnnnnnnnnnnnnnnnnnnnnnnnnnnnnnnnnngaaaattttaattttaatgtaaacagtatgaattatcttgttctgcagttggttgctttttgattgcttatttaatagagttgttaagatattttacatcttctcctgttagctgttcagcttttcctttcatattgagaacactacacagtgctgaagtccagctggtacacaccggggtgacaccttggctgcatctgttctcaacagtcanacacttcttctaattggttgatgctgggctgnactggttgctaaatattgcacatcattttaaaactatttgagatgcacttttgtactcaggaggccaaggcaggaggattg

SEQ ID NO: 42058 - DNA, 411 bp, Homo sapiens
tttttttgttccatctgctgtatgacctgatgatattccagcttctgagcctccagttgatcatgctgacgttgtagctcttctttttgtttctgaagctcatctgccttcttcttaagttcattttcttgtaaagcaataatattttcatattcttttagttcttcctctgtgaagaactgttgctgatctaatgtctcccagctatctggctccaagaattcttttttttctgtggctttcaaaaactcctccagagtcaccaatctgtctttgttagtatcaacctcattcattacatgttccctcattctaagcctttcttcttccatttctaccatatcatcctcttcatttttagggtcatatactttctccaactctttagtaaatagggcttctaattcttgg

SEQ ID NO: 42059 - DNA, 408 bp, Homo sapiens
aaatatttcagagccaaaagtgccttatacaaccttagcctattatagtaaatcattcaaggattcagaattttgcagtcacagaagagtgtatttattatgtagaatgaatgagggtactgtcacctgccttaatgtaggtaggcccagagtcttacatttaagatcttacatgcagttataaaaccgccacagtcttcaatccagatttgaagactcatgccataggtgacattctaaaataccattaaagccacttaaatgttaaataagaatatacatgcacatcagctcaatgtctttgagtattaattttatgtaagcattctatttaacatgaatataggacaaatcatggctatatctatagacctttggataaactggattgcccattatcactccggg

SEQ ID NO: 42060 - DNA, 359 bp, Homo sapiens
cagcttcttgatcgtggtggtgttcctcatcgctgggacgctggttctagaggcagctgtcacgggagttcctgttaaaggtcaagacactgtcaaaggccgtgttccattcaatggacaagatcccgttaaaggacaagtttcagttaaaggtcaagataaagtcaaagcgcaagagccagtcaaaggtccagtctccactaagcctggctcctgccccattatcttgatccggtgcgccatgttgaatccccctaaccgctgcttgaaagatactgactgcccaggaatcaagaagtgctgtgaaggctcttgcgggatggcctgtttcgttccccagtgagagggagccggtcctt

SEQ ID NO: 42061 - DNA, 380 bp, Homo sapiens
  misc_feature (1)...(380): n = a,t,c or g
atcttaactgaggccattaaggcatgcttccagaagagtggtgcatcagtggttgctattcgaaaatacatcatccataagtatccttctctggagctggagagaaggggttatctccttaaacaagcactgaaaagagaattaaatagaggagtcatcaaacaggttaaaggaaaaggtgcttctggaagttttgttgtggttcagaaatcaagaaaaacacctcagaaatccagaaacagaaagaataggagctctgcagtggatccagaaccacaagtaaaattggaggatgtcctcccactggcctttactngcctttgngaacctanagaagctttctacagtcncatcnntgaaatatgngtntcatnacttat

SEQ ID NO: 42062 - DNA, 353 bp, Homo sapiens
gggcacctctgggagtttgtcctgggcacagacagcttccacctgggctacacggagaccgggcactgcctgggcaaaccgaaccctgcgctcgcacctcctacacggctgcagtgggacattccaaaacagtgccaggcggtcatcaagagttcctaccaggtggccaaggcgttggcagacgacgtggagttgtactgcttccagttcctgccctttggcaaaggcctcatcaagaagtgccggaccagccctgatgcctttgtgcagatcgcgctgcagctggctcacttccgggacaggggtaagttctgcctgacctatgaggcctcaatgaccagaatgttccggga

SEQ ID NO: 42063 - DNA, 344 bp, Homo sapiens
tcctgggttaagcatacaagttataaatcaatcgggtcacgtaactcaacagctttctactccctgatatctactcccagcttcctcattaccagctcattaccaggattaacttgcttctcctttttatctaggtggtatttgtgtcactttggccagtctctaatccatgtcatccaggtggtcatcggctacttcatcatgctggccgtaatgtcctacaacacctggattttccttggtgtggtcttgggctctgctgtgggctactacctagcttacccacttctcagcacagcttaactggtgaggaacgtgcaggcactgaggctggagggacatgg

SEQ ID NO: 42064 - DNA, 380 bp, Homo sapiens
  misc_feature (1)...(380): n = a,t,c or g
gtgaatcttaagtcttaccagtccttgcattagtacattaaatttggatgttttggaagcaaattcatatgatcgtgagtgatttctccaaagaaaaaaagccttgtnnnnnnnnnnnnnnnnnnnnnnnnnnnnnnnnnnnnnnnnnnnnnnnnnnnnnnnnnnnnnnnnnnnnnnnnnnnnnnnnnnnnnnnnnnnnnnnnnnnnnnnnnnnnnnnnnnnnnnnnnnnnnnnnnnnnnnnnnnnnnnnnnnnnnnnnnnnnnnnnnnnnnnnnnnnnnnnnnnnnnnnnnnnnnnnnnnnnnnnnnnnnnnnnnnnnnnnnnnnnnnnnaaaaccctgatgccattcccagtncccgttgtaggacatncatttataa

SEQ ID NO: 42065 - DNA, 381 bp, Homo sapiens
  misc_feature (1)...(381): n = a,t,c or g
aaaagataaaaagaccaactgtcccctcacttgtttttataaacatctattataggcgaaacaaaacttacccatattatatagataagtgtctattcacatttgtacattaccatttttaacagcttgagataaactctacgtcttacaacacattaaacaatattcaagttactgagtaacaacaataacaacaataacaaaagaacacacagcagaagcctcaagtgtttcctcattgtctacaactcaggtatggtttcctttttatgagtgacaaagcaaattaagataatgaagtaaaaaacgattgtttgcaagatgaaagccaatttgtacttccttctaaaactacctttaagttgcaaatgtanatttaag

SEQ ID NO: 42066 - DNA, 379 bp, Homo sapiens
  misc_feature (1)...(379): n = a,t,c or g
ctaggatccaggggctgcctctggcctcttagggagcagagagcagaactccgcagcccagcccagaggagtgtcacctcccacctttggagaggaatccttccctcccctggacaaagttgctgacaagctgctgaagtggcctctccatattccagctgagcctgaatctgactcttgagggttggggctgcacttatttattgcggggagacagctctctctcccacctcctccccagatgggaggagagcctgaggcccaagcaggacccgggggttccagcccctagctgctctggagtgggngnaggttgnggaccatggagtccctggtgctgccctcaggtgggacccaggcgttctcagctgtaccctct

SEQ ID NO: 42067 - DNA, 388 bp, Homo sapiens
  misc_feature (1)...(388): n = a,t,c or g
attttatgttctcttctgtatcctttatgacaaacataaaattgaaattaattaaaacagggtccttcatatagaagctaaagatatcgataacagctcgtggcaattatataacatataagtgttacagtacagtatatgctcataaggaacctgagtgactactctggattttgttgttgttgctgnnnnnnnnnnnnnnnnnnnnnnnnnnnnnnnnnnnnnnnnnnnnnnnnnnnnnnnnnnnnnnnnnnnnnnnnnnnnnnnnnnnnnnnnnnnnnnnnnnnnnnnnnnnnnnnnnnnnnnnnnnnnnnnnnnnnnnnnnnnnnnnnnnnnnnnnnnnnnnnnnnnnnnnnnnnnnnnnnnnnnnnnnnnnnnnnnncactgg

SEQ ID NO: 42068 - DNA, 388 bp, Homo sapiens
tgaaatggcaacttttattaatgatgaatggcaatgacttttaagtttgatcacagagtgtttgcatattttcttactatttttggtatgatttaaaaattattggttcattaaccatttaaaagaggaataattcagtagaggcactaggaggttgaacaggatcattcttcagtaatattcagccttgacaagcacagcggctacaatacccaggaaagtgagcaacaggagaccgagtttttctttgttgaaccgtttcaagagaaaaaattttccccaatccacctttgactggctgttgggaggatatctgagtttgttagcaccttctctctttaaactttttaataaacagggacgctgatgagaaaaagtatcaaaacta

SEQ ID NO: 42069 - DNA, 381 bp, Homo sapiens
ctcagtttagctctcaaagaaggggtgaatcataaagccagtgaaaatttcaccctctgagggagttccccaatctgaaggggaagagggtgacctcagcggcttttctcccaaaaatcggctgaaggctggttgtggatccttgttcctctcctgaccccatctggctgctgccccgtctcccacccctgtccccggggctcgctggccctgcactccgccttagtcctggggccggcgacacagtgggggctcctcacttgctgcagtgtcatagcaataaaatgtgattcttggggtccccccagggagctgcccatggctttatttatgaacctggttttcgggagtcaggggaggagatgactttgcttctgtgca

SEQ ID NO: 42070 - DNA, 388 bp, Homo sapiens
  misc_feature (1)...(388): n = a,t,c or g
catcaccatccccacttagacacctcagtcagaaacctgggaatcctctcactgccctgctcaattcaatcaccaatctgcctctaaatctctctaattaatttgaccacttttctccatccccacagctactgctctaatcaaagccacctatcatcccttccatgaactactgcaaaatctccnnnnnnnnnnnnnnnnnnnnnnnnnnnnnnnnnnnnnnnnnnnnnnnnnnnnnnnnnnnnnnnnnnnnnnnnnnnnnnnnnngttnnnnnnnnnnnnnnnnnnnnnnnnnnnnnnnnnnnnnnnnnnnnnnnnnnnnnnnnnnnnnnnnnnnnnnnnnnnnnnnnnnnnnnnnnnnnnnnnnnnnnnnnnnnnnnnnnnnnnn

SEQ ID NO: 42071 - DNA, 385 bp, Homo sapiens
caaaacttgcatctaaccaaaaagtcttggttttatcttaatccattaaaaagttgttctttgtttccagcttgcattgattgctacaacatcactaatttggctttcacatttaaatggttctgtgctaatcaaaactttcgttgttattattcgttatggtagaatcatttttaattcacgtgctttgtgttcagttttgtggtctgagagatgtaccaattgtcaaattaccgcgtaccacctaatgtttataggagaaagcaaaatacatcagcttggtagttaacacatcaaatatttcttgctgcttctaggagaacttttttggtgtgtgttggaatggctgagcaaatattaaaattgttaatatgcagccatatat

SEQ ID NO: 42072 - DNA, 386 bp, Homo sapiens
  misc_feature (1)...(386): n = a,t,c or g
gggccttcttgcctgtgttgaggagtttggacttcatccggaggtgagggggccatgattcaatgtgcattttggaaggatatctctggctgcctgttcaggagcggactggagagctagaacactgtgggcagagagaccagttaggaggttggcaagaggtgatggtgtttcaaatgaaggttgtgggagagcgtgtgcaagagtgtgtgcagaaaaaagatnnnnnnnnnnnnnnnnnnnnnnnnnnnnnnnnnnnnnnnnnnnnnnnnnnnnnnnnnnnnnnnnnnnnnnnnnnnnnnnnnnnnnnnnnnnnnnnnnnnnnnnnnnnnnnnnnnnnnnnnnnnnnnnnnnnnnnnnnnnnnnnnttcgggtgtggggcaggc

SEQ ID NO: 42073 - DNA, 392 bp, Homo sapiens
aaaaagttatctgcagaaatgttgagggcccatctctccccccacacccccacagagctaactgggttacagtgttttatccgaaagtttccaattccactgtcttgtgttttcatgttgaaaatacttttgcatttttcctttgagtgccaatttcttactagtactatttcttaatgtaacatgtttacctggaatgtattttaactatttttgtatagtgtaaactgaaacatgcacattttgtacattgtgctttcttttgtgggacatatgcagtgtgatccagttgttttccatcatttggttgcgctgacctaggaatgttggtcatatcaaacattaaaaatgaccactcttttaattgaaattaacttttaaatgtttatagg

SEQ ID NO: 42074 - DNA, 180 bp, Homo sapiens
attactggctgtgtaatattaaatcaaggcttaataaaagggatagattgagccataatttatataaccttactgtgggacatttcaggttgtttctaatttctcacttttataaacaaagctgtgatgaatctccttgtgcatatatctttttatagttgtatgatttttttttttttt

SEQ ID NO: 42075 - DNA, 401 bp, Homo sapiens
  misc_feature (1)...(401): n = a,t,c or g
cagttaacataaccagcccaatgaacatagggcatcctgtaactataaccagtccattatccatgacctctcctttaacactcactaccccagtcaacctccccacccccgtcactgccccagtgaatatagcacaccctgtcaccatcacatctccaatgaatctacccacacctatgacattagccgcccctctcaatatagcaatgagacctgtagagagcatgcctttcttgccccaagctttgcctacatcaccgccttggtaaacagtattataaaatcaaaatatgggtaaaagtaaatatttaccagcaacttaacttttagttgattaaagcaaaaagtaaaccatgaaantgggagattttattacattagttaataagagtgtggtagca

SEQ ID NO: 42076 - DNA, 400 bp, Homo sapiens
taggcaacgtcttttattgttccatctggcacttgcaaacaccattcttgaagaacctagaaatgaaggtcagttactctgtttatcaggaacagaaccaaataaaaacaaatttttgaaaaagcaaccaagaaactctggttcatcactattttccatatctaatggttccttcaagataaagcataactcttcctttcatgatactttccaacaaagggagattaaagaaaaacagaaaagaaagttccccaccctaccccccataaattgtcattcatactggtaaaagagccagtcttgttagcagctaaatattgcactgcctttcattctgtatacagtcagggtccaatgaaagtggcacactcatggtataagtgacggacgatgacaccgc

SEQ ID NO: 42077 - DNA, 387 bp, Homo sapiens
aaaaaatgctccagggctttaaatgagaagtaaaattttctaagttaataaagatgaagaatgggtgactattatgatgaaccataactaaatgtcttattaaagcaactgagtgtctagccctaaattaaccaggtaaaaactgttaacactaacctgaagttttgtgaataactgttctttaacttattgagatgttgcaagaaatgcacatccagggtggactgggagctatgaaatgactaaattcctccttgcagtgtttaccttcaagattgtataggtattctctcctcttcttcccccagtccccattacttatttgcacacttgttttaactgacttcctgttttgatatttatcaccaagaccataaactcatcaat

SEQ ID NO: 42078 - DNA, 389 bp, Homo sapiens
ctcatctccttctagtccttttctacctcaccctacattcttggcacactgctttttttgtcattccattgtcatcttccctgcattatttacgacaagaagtctgtgatcattcttaccttggttcacctataaatgtgcctttttaaagattttcctctttctcactggtttttagcaatttgagtatagtgccttggttttatttgtatttatctggcttggagttcattgagctacttaaatttttttggttatagtttttatcagatttggaaatttttcagccatgggtatgttttctaatattttcctacccctacctctcttctcttattccttgaattacagtgtattaaatggcttgatgctgcccatagatccctggg

SEQ ID NO: 42079 - DNA, 387 bp, Homo sapiens
  misc_feature (1)...(387): n = a,t,c or g
ggacaaagcaagaaggagcaattgcctgcttggaattgggtgtattctggggccagaggcagaaggttcctgaatgtgctcttggagaggaggctaatgaatctagacccgtgctgtcctatactgtaatcactagtcatatgtagctattatatattattaaatctgcattgagatatgctgtgaacacagaatacacactggatttcaaagacttagtacagaaaaattaatcatttacaaatactgattnnnnnnnnnnnnnnnnnnnnnnnnnnnnnnnnnnnnnnnnnnnnnnnnnnnnnnnnnnnnnnnnnnnnnnnnnnnnnnnnnnnnnnnnnnnnnnnnnnnnnnnnnnnnnnnnnnnnnnnnnnnnnnnnnnnnnnn

SEQ ID NO: 42080 - DNA, 389 bp, Homo sapiens
attccaaaaggtccttgggttggatacgagaatgcgtcaggcctggctttggctatgacatccccaggaagtcactgtgtgcagtgtggtctccagggtggaagtctttgagctgccaatgaatatctcttaagtccaaacctccatgggcactatggcctctttggtcccaacagaaggcagtaggctttcttcagacaagaaataaaaggggaattgcaccaaaaatccacggatcttcttcagttcctcctcagctcgaatgggatcttccttagctaatacgggcttgtttataaagtctctcagctgaattaaattgtgtacttcatcattgggaaggcaccggaaaaccttgtcataaattgtagcatttcgagctgctgtga

SEQ ID NO: 42081 - DNA, 370 bp, Homo sapiens
  misc_feature (1)...(370): n = a,t,c or g
caaatttcaagatataaaaagcaagaaaaaaatatcaaagtatcattgggtaaaattatgattaaataggattaaataggtttgaatcacattagcttattcttgcataatataaactatcttacagaaaaatcgttaaattattgaagtgcttacattgataaaccatgcattttcacaaaattaaaatgtgaagtaattcttctcttaaaatgtttcatttcaccagacactcaaaatactctatgaaaaactaagttaacatttctgtattttcatatactcccattcatattagttngtaagtaggaataanaagaaaaatgagttctaaataaatgacncaggaggcaataaattgacacatgac

SEQ ID NO: 42082 - DNA, 313 bp, Homo sapiens
tagaaatcacaggacaatctctcttcccaccaaaaaaaagttgcatattttggtaagtgtttgtcctagagggaaaaacaactgaaatttacattagcagtgctgtgcaagattcttacataattcaagacctaaaaccagcctgcagtggaggtttcagtcctctgttcaggtgcttagacagaagccataagctgatgagcatgacagggaaaaggaggcagtgaagacaggtgacaggcacctggcagggaagaaggattcaggaatgccagactccttgaaatcatgtgggtttgtttttttttttttt

SEQ ID NO: 42083 - DNA, 381 bp, Homo sapiens
ccccaatatctccctttttttctctcttcctctatcttccaaaccccactttctccctcctccttttcctgtgttctcttaagcagatagcacatacccccacccagtaccaaatttcagaacacaagaaggtccagttcttcccccttcacataaaggaacatggtttgtcagcctttctcctgtttatgggtttcttccagcagaacagagacattgccaaccatattggatctgcttgctgtccaaaccagcaaactttcctgggcaaatcacaatcagtgagtaaatagacagcctttctgctgccttgggtttctgtgcagataaacagaaatgctctgattagaaaggaaatgaatggttccactcaaatgtcct

SEQ ID NO: 42084 - DNA, 403 bp, Homo sapiens
atttttaatcagcaatattgcctgtgcttctcttctttattgcactaggaattctttgcattccttacttgcactgttactcttaattttaaagacccaacttgccaaaatgttggctgcgtactccactggtctgtctttggataataggaattcaatttggcaaaacaaaatgtaatgtcagactttgctgcattttacacatgtgctgatgtttacaatgatgccgaacattaggaattgtttatacacaactttgcaaattatttattacttgtgcacttagtagtttttacaaaactgctttgtgcatatgttaaagcttatttttatgtggtcttatgattttattacagaaatgtttttaacactatactctaaaatggacattttcttttattat

SEQ ID NO: 42085 - DNA, 402 bp, Homo sapiens
  misc_feature (1)...(402): n = a,t,c or g
aaaaaactaagttattagttttaaagtctgagaatttagataacaaatttttccaaattatcagctcaatcctgggcagcaaaaattccatacttattgggcccactcttaaaggaagctagtaactggattttcctgagttgcctgtaatgtcacttacacatctctgtcagtagtgatgcttctgggcatagcaaaatgtggatgtagttgtgactgacaaacagataatgataatgaaacatactattttgagtaatttaagatgtgggaaataaaagttaattttatgaattttagacttagttgtatttcaagctttagtaaaaatgcagtatcttaaaatagtctatgtacttttattttttaaaggntatttatttaaatcatggttgttgaata

SEQ ID NO: 42086 - DNA, 398 bp, Homo sapiens
tatatcttttattccttgtttagctgtatatgccctcacatttgcatggtttcctttttattataagttagaaactccgctggagtcacttatgtattattgatgtatttattaaacaaatttattgaaggaccatgagctaatcatctaggtgctcccctttcttctctttcagtagacagtaaaatgcaggtctccaaactcctgtagttaccaaatgcaattctgggattttaggttatataaaggttttacctgttttggtgggaagagagaaatagagggttttgttttgttttattattcttaacgtttttcatactttgttcttggaatctaatgttgcaattcataaatatgtatttgggattctagttctccctttacatttttttccg

SEQ ID NO: 42087 - DNA, 394 bp, Homo sapiens
ggacaatgatagataccatccaaagccagtgttgcatatggtttcatcagaacaacattcagcagacctcaacagaaactatagtaaatcaacagaacttccagggaaaaatgaatcaacaattgaacagatagataaaaaattggaacgaaatttaagttttgagattaagaaggtccctctccaagagggaccaaaaagttttgatgggaacacacttttgaataggggacatgcaattaaaattaaatctgcttcaccttgtatagctgataaaatctctaagccacaggaattaagttcagatctaaatgtcggtgatacttcccagaattcttgtgtggactgcagtgtaacacaatcaaacaaagtttcagttactccaccagaagaa

SEQ ID NO: 42088 - DNA, 402 bp, Homo sapiens
gtttcagaagcctaactttttacacagtggttacatttcacatttcactaatgttgatatttggctgatggttgagcagtttctgaaatacacatttagtgtatggaaatacaagacagctaaagggctgtttggttagcatctcatcttgcattctgatcaattggcaagaaagggagatttcaaaattatatttcttgatggtatcttttcaattaatgtatctgtaaaagtttctttgtaaatactatgtgttctggtgtgtcttaaaattccaaacaaaatgatccctgcatttcctgaagatgtttaaacgtgagagtctggtaggcaaagcagtctgagaaagaaataggaaatgcagaaataggttttgctggttgcatataatctttgctcttt

SEQ ID NO: 42089 - DNA, 402 bp, Homo sapiens
cgacagttgaactctatgaagacagaaaagagggctaccctgctgttaaaaccctcgttactttgggtaaagaagacttatccattaagatcagtgacctaggtggtggtgtcccacttcgaaaaatagatcgtctttttaactacatgtattctactgctcctagacccagcctggagcctaccagagctgcccctttggctggatttggttatggtttgccaatttcccgtctgtatgctagatattttcaaggagatctgaaactgtattccatggaaggagtgggtactgatgctgtcatttatttgaaggctctttcaagtgagtcatttgagagacttcagtttttaataagtccgcatggcgccattacaagaccacgcctgaagccgatgattg

SEQ ID NO: 42090 - DNA, 348 bp, Homo sapiens
  misc_feature (1)...(348): n = a,t,c or g
gttggatgtcgtggaccaaacgccagaaagtgttcccaaaacctgacgttaaattgcctgaaactttaaattgtgctttttttctcattataaaaagggaaactgtattaatcttattctatcctcttttctttctttttgttgaacatattcattgtttgtttattaataaattaccattcagtttgaatgagacctatatgtctggatactttaatagagctttaattattacgaaaaaagatttcagagataaaacactaaaagttacctattctccacctaaatctctgaaaaatggagaaaccctctgactantccatgtcaaattttactaaangtcttttt

SEQ ID NO: 42091 - DNA, 401 bp, Homo sapiens
cgaatcctcgtcggataccctcccgagtgcctggatctcagcaatggggataccattctggaagacttgcccatccaatctggtgacatgctgatcattgaagaagaccaaaccaggcccagaagttcacctgcatttactaaacgtggtgcttctagttacgtcagggaaactttgcctgtgcttaccagaaccgtggtcccagcagacaactcttgcctctttactagtgtgtactatgtcgtcgaaggaggagtcttgaatccagcttgtgcccctgagatgagacgcctcatagcacaaattgtagcaagcgatccagacttctatagtgaggcaatactgggaaaaacaaatcaagagtactgtgactggatcaaaagggatgacacttggggagg

SEQ ID NO: 42092 - DNA, 396 bp, Homo sapiens
cttgggtctttttcttaggtctagtgcagggtgatgagcccttgaaggaatgggaattagcctagagaagaaaagttagagattctataacttgtttaagacatattaaaggttgatgatatggaagagagaagtcttttgacccactcctcagaggtgtggaagttcagggaggcagactttgacttcacaatgaagaactcaatagagctgtctgaaaatagaatgagctgccttagagaattataaattcccttcccctgagtgtatctgagtataagctaattaaattctttaaccagaatattataaaggagacccacacattggatgcagtggatgaaaggactgcaataaatgcttaaaagtctctttcaaccccaaaagtcttttttt

SEQ ID NO: 42093 - DNA, 384 bp, Homo sapiens
tgtatctgctgtagtacacgaatatgccttggctgtttgcttgagctttttctatcccgtgctcttcgtgctcttcatgttctttggaatggctttcaacttcattgtcaatgatagtcggaaaaagccgatttggaatgttctgatgtggacttctcttttcttgggcaatggagtcttactctgcttttattctcaagaatggtatgcacgtcagcactgtcctctgaaaaatcccacatttttggattatgtccggccacgttcctggacttgtcgttacgtgttttagaagcttggactttgtttcctccttgtcactgaagattgggtagctccctgatttggagccagctgtttccagttgttactgaagttatctgt

SEQ ID NO: 42094 - DNA, 331 bp, Homo sapiens
  misc_feature (1)...(331): n = a,t,c or g
gtttgccttacgatgccatctcatatcatgttgcccagtgctagccaggggtatcatgccatggcactgctcagtgaaaggtcagtagggtgaggtgtaggttcatgggtttaatccagaaatagctttaagaggacctaaagggacacatgagcaatgaaaaatagcaatgngatcttggttctggataatttttccacaaagtagtatagaatatcnatttcagnggaattgctatgantanaacctacngaatactancctgnacttttgaaatcanaaatgagaanntttnnanggnnnnanttnnnnnnctatnnnnnggntggcc

SEQ ID NO: 42095 - DNA, 339 bp, Homo sapiens
gggtgatggctgcctcctgggatgatcaggacaatctagggctgaagaaatgtcaacaattgggagttttgaaggattccaggctgtgtctctgaagcaagagggagatgaccaaccctctgagactgaccacctatcgatggaggaagaggacccgatgccaagacagatttcaaggcagtcaagtgtgaccgaatcaactctttaccccaatccttatcatcagccttatatctcacggaagtactttgctacacggccgggggccattgagactgccatggaagacttgaaaggtcacgtagctgagacttctggagagaccattcaaggcttctg

SEQ ID NO: 42096 - DNA, 332 bp, Homo sapiens
gcggcacgaggggctcggtagaggctgcaacaccggctgcagcctgctcagctcctcgcgggtgagctgggtcaccctctcagagatgacctgttggacggtccccagctggcgaaaggtgggaatggccacggcaaagtccgggatgaaggagatggtctgcatctctgtgatgtcagcgttcccgatgccaatgccaatgggcacagccccacccctcttcacgaccacggaggggttccgcacatcatccccagacctgtcggccgtgaggacgatcagcagctggggcacaccttctgttatcctgcttcccgcagagctgaccagga

SEQ ID NO: 42097 - DNA, 330 bp, Homo sapiens
gccaaaacacagctccgatcctgtcacgacctcttgctttaaagcccattagtagctttctgttgctcttgtgatagaaacaaaactccctgatacagcctacatggtcctgcattgtctggctcccacttccctttttcatttcttaccacactccttggcctctgcactagaggctcactggctgattgcaggcttgagaactgaccatgtttgtttctgccagaggcctttgcactgctgttttcttttcctggaatgtgcttccttccctatttagttaactcctagtcatcctttaatttattatttgagacggtcttgatctgt

SEQ ID NO: 42098 - DNA, 341 bp, Homo sapiens
  misc_feature (1)...(341): n = a,t,c or g
ggatgaggaccccccatgttgcctaaactggtttggaactcctgagctaacgtgatctttctggctaggcctcgcaaannnnnnnnnnnnnnnnnnnnnnnnnnnnnnnnnnnnnnnnnnnnnnnnnnnnnnnnnnnnnnnnnnnnnnnnnnnnnnnnnnnnnnnnnnnnnnnnnnnnnnnnnnnnnnnnnnnnnnnctgttatgctttgtttgnnnnnnnnnnnnnnnnnnnnnnnnnnnnnnnnnnnnnnnnnnnnnnnnnnnnnnnnnnnnnnnnnnnnnnnnnnnnnnnnnnnnnnnnnnnnnnnnnnnnnnnnnnnnnnnnnnnnnnnnnnnnnnn

SEQ ID NO: 42099 - DNA, 324 bp, Homo sapiens
  misc_feature (1)...(324): n = a,t,c or g
gtttcaatatgtaagacaaaaacatgaatgaatacaagagggaatgtcactgccactttgaaaaagacatatatatgtattatataaaatatgtatgttttatatatattcatatggaaagagtgtgagagcaagtatgtgcacataacatgcaaagtnnnnnnnnnnnnnnnnnnnnnnnnnnnnnnnnnnnnnnnnnnnnnnnnnnnnnnnnnnnnnnnnnnnnnnnnnnnnnnnnnnnnnnnnnnnnnnnnnnnnnnnnnnnnnnnnnnnnnnnnnnnnnnnnnnnnnnnnnnnnnnnnnnnnnnnnnnnnnnnnnnnnnn

SEQ ID NO: 42100 - DNA, 334 bp, Homo sapiens
  misc_feature (1)...(334): n = a,t,c or g
gattttggggagtaactttaaattcaaagatttacttaattattcaggcaatgcactagtatagggtggtggttaaaggtgtagaccttgcctccagtctgcttgactcaaatcctgcctctgccatttactgtctgtatgaacataggctagtcacctaacccttttgtgcttcggttttcccagatggaaaatcgtagtaaggccaggcacagtggtttatgctcgtnnnnnnnnnnnnnnnnnnnnnnnnnnnnnnnnnnnnnnnnnnnnnnnnnnnnnnnnnnnnnnnnnnnnnnnnnnnnnnnnnnnnnnnnnnnnnnnnnnnnattca

SEQ ID NO: 42101 - DNA, 332 bp, Homo sapiens
  misc_feature (1)...(332): n = a,t,c or g
gggctnnnnnnnnnnnnnnnnnnnnnnnnnnnnnnnnnnnnnnnnnnnnnnnnnnnnnnnnnnnnnnnnnnnnnnnnnnnnnnnnnnnnnnnnnnnnnnnnnnnnnnnnnnnnnnnnnnnnnnnnnnnnnnnnnnnnnnnnnnnnnnnnnnnnnnnnnnnnnnnnnnnnnnnnnnnnnnnnnnnnnnnnnnnnnnnnnnnnnnnnnnnnnnnnnnnnnnnnnnnnnnnnnnnnnnnnnnnnnnnnnnnnncttntgataatnggnaatccnttaaatcanggnaaaagcgtaagttccaaaatattcttnaagacccttaaaaattgttacc

SEQ ID NO: 42102 - DNA, 323 bp, Homo sapiens
ggaaggagctgcggggaacaacaaatcatttaatcttcagagcatcttagactgaaaacctttcaactgtgctgaaaaacctagaagacagaccattttgcccaccctctcatttaaaaggaattgaagaagaaataaaatggcagaggtttaaggttactattcaggatgactgatgataattcagatgataaaatagaagatgaattgcaaaccttctttaccagtgataaagatggaaatacacatgcatacaacccgaaatcaccacctacacaaaactcttcagccagcagtgtgaactggaattctgcaacccagat

SEQ ID NO: 42103 - DNA, 324 bp, Homo sapiens
gcacattgctctaatatataaagcctccagtggtttcccatatcactctgtaaaatgccccttgccagcctctcccatcaacctcgctttttctgttcttgtatatgcacatctcttcctgagcctttattgccatcctcatgtggggatgtttctgtctcagagatagtctttattcaggtcccactctgcagtcctctccagaggggctgctttcaccaccccttctaagtaagcctctctaaacacctctatcatattctatcccttagccagcactaattttttcataatgcttaccactaactgaaatttactttatca

SEQ ID NO: 42104 - DNA, 325 bp, Homo sapiens
  misc_feature (1)...(325): n = a,t,c or g
gagaaaagggttatctaaagagtaaggttggctgggattacaggcatgagccnctgngcccgaccagaccnttntnaactnctgnnnnagcttatgattgtnctctgttggaaanananacttttnacnagcccttttacntnataaggaacaaaaatcatgtccactgcngnctgacggagcnctacagctgttcttcttggtcattcantctgcncatttactgccncttanaacttgccgtatgtgcccttcatncatgctgctntctattgtgcanacntgggaangacttttgcttgacactactgngntntnctttatc

SEQ ID NO: 42105 - DNA, 333 bp, Homo sapiens
  misc_feature (1)...(333): n = a,t,c or g
gattcatgttatttactctgacctatttaaatgaaactgttttcctatttatttggaagtaagttcatccaatgtgaaatattttttaaaatcttcatactgtgagtttaattttaaaataataaactacgatttttaaagggtttattcacattaccttgagcaatactttgtctaaattagatgctcaaaaaattgcttacattttcaaaaaattatttagctttgtataataaaggcataagttaatatgatacttagagattttgaatgctttaattgtgggtatttaactccctgccacttttgatgctacttataaggnagggaggg

SEQ ID NO: 42106 - DNA, 344 bp, Homo sapiens
  misc_feature (1)...(344): n = a,t,c or g
gaacaactgtgtatagtgattggggaagtaaaaagaaaaatatatagtacacattctatgttggttaaggtcgattggggctagatttttggagaatttgttcatgcattggtattgcctctttagtgaaattctaaagtcagtgagagaggaaaaattatcacaattactttggaatatcttttacccctaaggtatagtgtgcatggttttgcatatgtgtagtttataataaaatgatctttcagttgcaagtaacaaaaaatgaaaattaggcttaaaacagngggtttttaccctgaccatgccantanaatcacctgaggtgcttttaacggtgtttg

SEQ ID NO: 42107 - DNA, 348 bp, Homo sapiens
gttgggagtgaggctgagacagctttcttggactgcagaactgacaaaagctgcaatgcaatgataagaggaatgccatacccacagaattcccctggactcacagtttctacaaagggaaaagtgagttggaggcaaatattcagcttccgcaccattctggaacactttgcaagaggttcactcttgttttatcccatggaaaacattggaaatgcctgcacagctggattacctggggtcagttagaaacaaagaatggggtgggactcacagcaactagtgtgcagatactggtggttgctttaccttctgaccaatgcaggtgatactccaaagggggtagcc

SEQ ID NO: 42108 - DNA, 353 bp, Homo sapiens
gcaggaagtactatcacgttcccattttaaagattagggaattgaagcaaaataaaattaaacaagctgcccaaggacttatggttaataagtgagtagcaaagccaggattcaaaccccacagtctgactccagggctgcacttgtaaccattgtgctacctgcagaatggccaggagcgcaggtcccacatggcaatgaaccacttcctgtaccacccacttccaaatccagtagcttcttcatcctagacctaaagaaagtcaagttcagctataaacaatacaatcatttcttttaaaacatcacattctctccaacatacgaaacatcttaggatgtatgttttcctt

SEQ ID NO: 42109 - DNA, 344 bp, Homo sapiens
  misc_feature (1)...(344): n = a,t,c or g
ggcagctgactnnnnnnnnnnnnnnnnnnnnnnnnnnnnnnnnnnnnnnnnnnnnnnnnnnnnnnnnnnnnngnnnnnnnnnnnnnnnnnnnnnnnnnnnnnnnnnnnnnnnnnnnnnnnnnntgtctgtttttttgtttgttgattgattaannnnnnnnnnnnnnnnnnnnnnnnnnnnnnnnnnnnnnnnnnnnnnnnnnnnnnnnnnnnnnnnnnnnnnnnnnnnnnnnnnnnnnnnnnnnnnnnnnngaaaacctgctgtttcatgtaaccaccttcatcaattatcttagatctttccaattgacttgctgcaccttctacttcagcatattctgttt

SEQ ID NO: 42110 - DNA, 344 bp, Homo sapiens
  misc_feature (1)...(344): n = a,t,c or g
gatgttaagtgttttgttgttgttgtttgcttgnnnnnnnnnnnnnnnnnnnnnnnnnnnnnnnnnnnnnnnnnnnnnnnnnnnnnnnnnnnnnnnnnnnnnnnnnnnnnnnnnnnnnnnnnnnnnnnnnnnnnnnnnnnnnnnnnnnnnnnnnnnnnnnnnnnnnnnnnnnnnnnnnnnnnnnnnnnnnnnnnnnnnnnnnnnnnnnnnnnnnnnnnnnnnnnnnnnnnnnnnnnnnnnnnnnnnnnnnnnnnnnnnnnnnnnnnnnnnnnnnnnnnnnnnnnnnnnnnnnnnnacccagactcttgttaagtattttaaaacagtgtctggtacatagtaag

SEQ ID NO: 42111 - DNA, 335 bp, Homo sapiens
  misc_feature (1)...(335): n = a,t,c or g
gggaggttgtttttttttaagggtatgagagaccagacttaagcatgtttccaggctgaggagaagtagtcactggagagagaaaactaggagatgagggagtgggaccaaggacataggtcacatcattctctcagattggagaaaggagataagtctgcaggtgagagaaagtaattgagagaaatcacactagctagcctccattttcttggtagtatagaaggccaagttaactgtggaaagttgaaggaaacagaagttgcaatgggactttgggagagtagagagggtttggaataacagtggaaaggagtagganaggganctgtcca

SEQ ID NO: 42112 - DNA, 333 bp, Homo sapiens
  misc_feature (1)...(333): n = a,t,c or g
ggggtagggnnnnnnnnnnnnnnnnnnnnnnnnnnnnnnnnnnnnnnnnnnnnnnnnnnnnnnnnnnnnnnnnnnnnnnnnnnnnnnnnnnnnnnnnnnnnnnnnnnnnnnnnnnnnnnnnnnnnnnnnnnnnnnnnnnnnnnnnnnnnnnnnnnnnnnnnnnnnnnnnnaccaatgtagtttatgtctgtttgattatccaaaatcaacacagttattcccttacacaaaaagatagtgtaattggaagggataatgttttattaggatacttaccctaattattattaggacacttatccctaattattttggaatttttactttattatg

SEQ ID NO: 42113 - DNA, 341 bp, Homo sapiens
ggagataacttaggaaaatattttacctttggggaagttttggtttccttctgagtgaaaaccctccatgaaagagaaacttaaatgcagttttcaaatgctcctgagacattcccagccttttctttgtggagaagtgaaggcaggacaatttccaaggcaaagagggacctatcgcagacagcagaccccaagtaaagaaaggcacagtgatggtgggtattcgtgcagtgttttgaaaatgtggaggtcagggatgctagcttaccaggccagcatgatcaagttacgagaaatggagaccaggacactacctctgctgggtgtgctgctccgggctc

SEQ ID NO: 42114 - DNA, 336 bp, Homo sapiens
gcaataggagtgaaaagtagtgggaaaaaataggatataagaactcaaatttacatatttagaggtgggtagagttgggctcaaataggtcctggagcaattactcagtggacacataacaaacaattactgagcaactactttgtgtaaaacattacactagggactagaaataaaaaatttcttaagaccttgttcttaacctgtggagtttctgttacagagcatgtcattctgacatggggcgagttgtgccctcccccaattttttcttctctaccaggatttcctgaccatctttcaagatctttcttgatgaaactacccaacaatgcc

SEQ ID NO: 42115 - DNA, 326 bp, Homo sapiens
  misc_feature (1)...(326): n = a,t,c or g
gcctattttcaattcacagtagctttgttcccttgttaaataactacttataaacaatataaatatgtcaggagaactattatataaccttacagagaatctctaatgtaatataaatagtacctgccctttaattgaattgtgcagccatctaacttaaaattgtgtttggataaaaaacataaagcatattttgaaaaaaactttttttgagacagggtctcannnnnnnnnnnnnnnnnnnnnnnnnnnnnnnnnnnnnnnnnnnnnnnnnnnnnnnnnnnnnnnnnnnnnnnnnnnnnnnnnnnnnnnnnnnnnnnnnnnnn

SEQ ID NO: 42116 - DNA, 142 bp, Homo sapiens
  misc_feature (1)...(142): n = a,t,c or g
nnnnnnnnnnnnnnnnnnnnnnnnnnnnnnnnnnnnnnnnnnnnnnnnnnnnnnnnnnnnnnnnnnnnnnnnnnnnnnnnnnnngcatggtggccgtgtgcctttagtcccagagtgctgggattatattttgttntaaatg

SEQ ID NO: 42117 - DNA, 312 bp, Homo sapiens
  misc_feature (1)...(312): n = a,t,c or g
ggaaacagagaactgatgaattcaccccaattctgggttctttttacctgtgaaaaaaaattttcagtaaggaagcatggagttttttgttgttcgtgttgggtatctgttctaatatcattatatttggacttcctcaaaagccagaacataagaccgcatttttctacttggctctatggtctttgttcctaaggaagggaattaacacatactgaatgctagctatgtatcagatactactctctgtgtatgctaattantttaaatanttctgtgntntacatncaatcnacanggngtnnnnattgt

SEQ ID NO: 42118 - DNA, 336 bp, Homo sapiens
ggattctttaaagcaggggcacgttcatattggagtataatttaggtttgtctgtatctgacaaactaaaatccaaaaagcagacttagatatttggttattagtatgtatttctcctacatctcttccagtaatgtcataagtaaatttgcagtgtggcaactggaaactggattgttgcttggttttagagttctagtataggaaaaaactggcatcattggaatcaccttttctgcagatatttttaatggcttatatatgtttcaggactttatacacatgtcatttatcttataggtatctaatttattcaggattttgataacatgagta

SEQ ID NO: 42119 - DNA, 325 bp, Homo sapiens
gactgattacaaacaaatatcagcaatatagcgaggtctcattacatgtaaactagtacatgcaagaagtataaattgttgaattgtatagctggaaatgtcctctaacgcttccctcaggtagtaatttaggtagcgacataagggattatttaacccgatcacgatcactgaagaccctggtatcaggctaaatggagtaagatgagggctagctctataattttggattttgaaagtccatgctccttatcccttttaagatttggataagaaacagcaaaactgaaatcggtccatctatttactctccataggacttcct

SEQ ID NO: 42120 - DNA, 333 bp, Homo sapiens
ggacaagtttcagagctgccactcaggtacagttgtttgagaagagcgtggttgtcttgccctgttttcgtcttgactggataatagaagtacacagtggaaatcctgagctgggcactctgctgtggctggacctgccccaggtccctgctgtcactttgccatctgaggtcagcagctgccctcagaaccgaccccgggatgtttagaatactggggctgagcttcacccgaggagattctcacctgattacctgtgagaggtccagacctgtggtttttaaagctggcaggccattgctctgtgcctccagagctgaaggctcttgacac

SEQ ID NO: 42121 - DNA, 318 bp, Homo sapiens
  misc_feature (1)...(318): n = a,t,c or g
gggggagcccttctgcgccacagtgatatcagtatcaagataaaagtttggaatgggagaaaaattctcaaagcctgaaagaaaatctgagattcaaataaaaatggaagaagaacaagttctactttagactctgaagggacttttaattcctataggaaagaatgggaagaactatttgtaaacaacaattacttggcaacaataaggcagaaggggattaatgggcagctgagaagcagcaggttccgcagcatttgctggaagctatttctttgtgntcttcctcnnacaaaagtcaatggatnnnnanaattg

SEQ ID NO: 42122 - DNA, 255 bp, Homo sapiens
  misc_feature (1)...(255): n = a,t,c or g
gnnnnnnnnnnnnnnnnnnnnnnnnnnnnnnnnntttaagtgaaccctggcctaagacnnnnnnnnnnnnnnnnnnnnnnnnnnnnnnnnnnnnnnnnnnttatgttgtcaatgttatcaatactttaaaggcacacttgtctgctttctacactgttgccggagaagggtcataaagtgaagtttggcagaaaagtttggccattgtctagtactgagaatgtgtggaagnnangaaagggnncnnnnnattac

SEQ ID NO: 42123 - DNA, 326 bp, Homo sapiens
gccctgttccaagttataacaaccaaaaatatctccaacactgcaaatgtccaaatgtcctcagggcagggcaggcaaaatggcccacaactgagaaacaatggtctatactactttttctttattcctttcccttggaatgctgattatgctccacaaaattttgttttattcactaacggatcacacaaatagatcacaacccacaatctgaaaaactactgctctaaataaagcaagaaccacaagcttaaatgtctatatgggtcaagccggtgagtcaagagaggaagataattaaaagaaattacaagcatgtgaaaaaa

SEQ ID NO: 42124 - DNA, 229 bp, Homo sapiens
  misc_feature (1)...(229): n = a,t,c or g
gaaggatctgaggcagtgcctctccaacattaaagtggctatgaatctgctgggcatcttgttaaaatgcaggtgtggattcagtaggtctgggtgaaggccaagattctgacttgtcccaggtgatgctganactgcagggncncangccacgctttgantancanggncannngaacanacacctgnnncntnnanatnnnncantnngganntacnnttnntgctt

SEQ ID NO: 42125 - DNA, 173 bp, Homo sapiens
  misc_feature (1)...(173): n = a,t,c or g
gctaaggcttacaaggcgatgtagttcttttttaagggtcatacacttagtgaaagtgaggctggaattttaaccctgacagggtgaccctagagtgcagttacccgggtatactctctgaggagtcctgnatgaatcacgtnctgggaattnttccanannnannngaatgc

SEQ ID NO: 42126 - DNA, 338 bp, Homo sapiens
  misc_feature (1)...(338): n = a,t,c or g
nnnnnnnnnnnnnnnnnnnnnnnnnnnnnnnnnnnnnnnnnnnnnnnnnnnnnnnnnnnnnnnnnnnnnnnnnnnnnnnnnnnnnnnnnnnnnnnnnnnnnnnnnnnnnnnnnnnnnnnnnnnnnnnnnnnnnnnnnnnnnnnacgcctgtagtcctagctacattccagcccaggagacacagcaagatcttatcaaaaaagataaaagcacagagatggaaaacaggagaaaaaacatgagaaaatcaaaatcagtcctgggagaaacatgtaaataacaggaactcaagaaaaacaaaacagcagctataaagcaagctgagagtgtcctgattg

SEQ ID NO: 42127 - DNA, 327 bp, Homo sapiens
  misc_feature (1)...(327): n = a,t,c or g
ggctgattaataacatttatgaaagttaggattccttgttgttaatatttaatgtgaatttgctcattaaatgttaaatcagataccttgttaaaatattatttaatnnnnnnnnnnnnnnnnnnnnnnnnnnnnnnnnnnnnnnnnnnnnnnnnnnnnnnnnnnnnnnnnnnnnnnnnnnnnnnnnnnnnnnnnnnnnnnnnnnnnnnnnnnnnnnnnnnnnnnnnnnnnnnnnnnnnnnnnnnnnnnnnnnnnnnnnnnnnnnnnnnnnnnnnnnnnnnnnnnnnnnnnnnnnnnnnnnnnnnnnnnnnnnnnnnnnnaagcaga

SEQ ID NO: 42128 - DNA, 336 bp, Homo sapiens
gaacagggatgttgcacattctgtgaaggaaaagtttggaaaaaaactctatgatgcattattaagaggagaaattcctgacctgaacgatattttagatcgagatgatctaacaattatgaaaagagccatcttttcaactcagcgacagtcattgcccccagtgaccacgcacaacatgattgatgactccaccgaccccatcctcagcaccattagacggattggacttttcaacaaccgcacagatagagtcaaggtgattttgcacccagagtttctatcctccaccagtcccttactacccatggactatgaagagtttgttagaggttg

SEQ ID NO: 42129 - DNA, 312 bp, Homo sapiens
  misc_feature (1)...(312): n = a,t,c or g
gggagattttaattttctatgagctatctgaaagaagagtagaaaataaatacaatcttgaaaaatcccatgaaaaccataggcaaatattaaatgattgaggcttttcttttttaaaacgtggctatgttctttttagatagcctggattcagggacttgggaccttgtaaagccaaagctgattgacactcataaggatgtcttcctgtatgccattctaatagacacacatgttacctgatagagctgggcagaggtgcttcagtctcaggctgaaggttctgaagnccangnaagnngnnngctgcca

SEQ ID NO: 42130 - DNA, 245 bp, Homo sapiens
  misc_feature (1)...(245): n = a,t,c or g
ggatagttacgtatagatgtagacactcaattcttaacaatagttttatgacatgggtacaatgatcatcatcccatttgatagatggtaaaactgaaacaaaagttagctacctcagccaaagtcagacagcttctaaatggtcttgctggagttgaaacttggctccagangactcgntttanccatgatggnatactgncttancngctcnngctannatgaatcttacnctggnnanatga

SEQ ID NO: 42131 - DNA, 338 bp, Homo sapiens
  misc_feature (1)...(338): n = a,t,c or g
ggtgtctcaggtgtctatccacacttgacacatgccatcacaccgaattctcagcaggtgtgcatccacgcttgacacatgccattgtgcatccacgcttgacgcgtgccatcacaccaaattctcaggtgtgcatccacgcttgacgcgtgccatcacaccgaattctcagcaggtgtgcattcacacttgacgcgtgccatcacaccgaattctcagcaaatctcagaggtaggctttgttatcaccccattttagaaagaaggaaactaaggctcananaagttaaacctactgcacaagactgntcagttcctgagaaggcanaatangaggag

SEQ ID NO: 42132 - DNA, 306 bp, Homo sapiens
  misc_feature (1)...(306): n = a,t,c or g
ggaagaaaagtatgannnnnnnnnnnnnnnnnnnnnnnnnnnnnnnnnnnnnnnnnnnnnnnnnnnnnnnnnnnnnnnnnnnnnnnnnnnnnnnntaatttttaaaatttttgtatacagatnnnnnnnnnnnnnnnnnnnnnnnnnnnnnnnnnnnnnnnnnnnnnnnnnnnnnnnnnnnnnnnnnnnnnnnnnnnnnnnnnnnnnnnnnnnnnnnnnnntgtactatcctgcanaacanaggacaggganattanactannggatggangcttganacntnataccacnnncnnggatgtgtat

SEQ ID NO: 42133 - DNA, 316 bp, Homo sapiens
  misc_feature (1)...(316): n = a,t,c or g
gggacttgtagaggcttcagggtcacactttcgaaacccagagttttagtatctccttatagaatatttgtaatttaagaaaaattatacaaggttgaattttcaaaaatatatttttaaaatatatttaaaaaagtatttttaaatatagtcctccggaatgcaaaaggacaatactactttcagctagtacttttaagtgattattttccgccacgtattcttttgaaattatgcannnnnnnnnnnnnnnnnnnnnnnnnnnnnnnnnnnnnnnnnnnnnnnnnnnnnnnnnnnnnnnnnnnnnnnnnnnncg

SEQ ID NO: 42134 - DNA, 328 bp, Homo sapiens
  misc_feature (1)...(328): n = a,t,c or g
ggcatgagaagagaagactatgaatttaaaactttacttgaattcttggctagagagatagtatgaatacaaaggaattcagtgtacattattttctgtgcatcagcattttgcataggtttggaaatcatctctctgcccatctccatcttcttcagactccaagaaagtaannnnnnnnnnnnnnnnnnnnnnnnnnnnnnnnnnnnnnnnnnnnnnnnnnnnnnnnnnnnnnnnnnnnnnnnnnnnnnnnnnnnnnnnnnnnnnnnnnnnnnnnnnnnnnnnnnnnnnnnnnnnnnnnnnnnnnattaggcccgggcgtggtggc

SEQ ID NO: 42135 - DNA, 324 bp, Homo sapiens
gcaggaacagtcgcgtttacagagctctcgggtgatagaagggaaagtaaaggtatattaaatttcttctaggcttgctgcctaatcccctaaggggccttctcatttctttcagcagtgccatctggcaggcctgagagtatatgggaataagtggggtgctggatcttgtgggcaggctatgggatctgggaaaggggttagcacctgggcctggagggacctggaatctagggggggcatacatctaagctaaatgtgctgtggcttgcaaactcagaggcctttcgggcagcctggtgaaatgataaatggcagttgctg

SEQ ID NO: 42136 - DNA, 315 bp, Homo sapiens
  misc_feature (1)...(315): n = a,t,c or g
gctcaaaccatagcagcatgaaattcaaaagcactccaccttgtatcccactgtgctctagggaaaagctgtatagcagttatggtcatgaagtcttcttccagcatagaatttgtttacatacacagtcatgcatggttaatgatgggatgtgttctgggggaaatgcatcattaagccatttcatcctttnnnnnnnnnnnnnnnnnnnnnnnnnnnnnnnnnnnnnnnnnnnnnnnnnnnnnnnnnnnnnnnnnnnnnnnnnnnnngtttgatgatcctaggctaccgacctggatagcatgctgctgtgtt

SEQ ID NO: 42137 - DNA, 326 bp, Homo sapiens
  misc_feature (1)...(326): n = a,t,c or g
gggtaaatacatcagctggggcattgctaaaccatcagtttccttcacaactttccactaagccatgtgtcagctttgccttataggctggctccttttttatcagtgggaaaaattttcccaaaagcttctggagacttctcttgtcacatgctccttcttaaaccggtcgtgagcaagggagaaaataaggttactgtggttggctgagactagtccagattactcctgggtcaannnnnnnnnnnnnnnnnnnnnnnnnnnnnnnnnnnnnnnnnnnnnnnnnnnnnnnnnnnnnnnnnntgatcacaggagttcgaaaccag

SEQ ID NO: 42138 - DNA, 327 bp, Homo sapiens
  misc_feature (1)...(327): n = a,t,c or g
gtgctcataatacctgataaagtaaatattaataatctagtaaggcaattaagactttgggcaattaaattctcactgtacgtcattgggacatggcagagaaggaagcctatgtctttttctgactatagtgccagttgactctgcacgtttgcatacggcagttctcagatcttcttagtaacagaatcctttatcccatgaaatcagactcccaatatataaaacaggtaagaatagtgttcagttatatacgtttattgtatttggtacgttaaatttaaggtggaaatctatgtttcaatcttcacttggnttcatcttaaa

SEQ ID NO: 42139 - DNA, 328 bp, Homo sapiens
  misc_feature (1)...(328): n = a,t,c or g
ggagccctgtttcaaataaataacctttcttcttttatcctactagccttattctatgctgaagaacaaagtttaaaaagtgaaagnnnnnnnnnnnnnnnnnnnnnnnnnnnnnnnnnnnnnnnnnnnnnnnnnnnnnnnnnnnnnnnnnnnnnnnnnnnnnnnnnnnnnnnnnnnnnnnnnnnnnnnnnnnnnnnnnnnnnnnnnnnnnnnnnnnnnnnnnnnnnnnnnnnnnnnnnnnnnnnnnnnnnnnnnnnnnnnnnnnnnnnnnnnnnnnnnnnnnnnnnnnnnnnnnnnnnnnnnnnnnnnnnnnnnnnnagatcgtgcc

SEQ ID NO: 42140 - DNA, 318 bp, Homo sapiens
  misc_feature (1)...(318): n = a,t,c or g
gnnnnnnnnnnnnnnnnnnnnnnnnnnnnnnnnnnnnnnnnnnnnnnnnnnnnnnnnnnnnnnnnnnnnnnnnnnnnnnnnnnnnnnnnnnnnngagccaccaaagtcacatccacaactaatgagggaaatctgtaaagccagttagatagaagaattttatttttctgtgggttttgtgttgtcttttttatgttaaaaagaaatccagtttgtgtttttctatagaaaaagtaaaagatcaggttatactttaggttaggggttctatttattcctgttagtaaataaaattaacaaatttctttgtttaacaaa

SEQ ID NO: 42141 - DNA, 385 bp, Homo sapiens
gcctgttcttgctgtctcagctaaataaaaccgagccctaatccccgcacaccacctttcttagtccatgggacctgtgaagacaaactttcttcctgtcactgcaaatatggtcttcaaaacacccagggaagcgcaacctatgatttcaatgtgagtgttatacaaactttctgatgaggcatacatttgcaaaatcacatttggttccacaatatttctaaggcttggcttgctgaatcggattctccagggagttgttgtttttgtaataattatagagaaagtgagaaaggcctttcacaaggcgagagataatttagtggaaacagatctcaaagacgacagttatgcaaattgtatttaatgtacttactttaaatga

SEQ ID NO: 42142 - DNA, 353 bp, Homo sapiens
gaaataacagtatgaatcatttgactgaaaccacagagacagatttcaataaagtggggcctttgtcactaattcaaatgtcatccgtctctgtttaaacgaatgttggtttttcctttcgtctttcaggaaaaactctaacttttctcactggaggcagttttaggtacagacacatctccagcggcctgtgaccccccagcgctccacgttacgtgtcccccgcggaatctctctgactgctctgtgtgaagcacgcagctccccaccccttcacgcagccctctggagtccaggcattatccactctgcagggccgccctgctgatctcaggggacgcgtccagctctct

SEQ ID NO: 42143 - DNA, 349 bp, Homo sapiens
  misc_feature (1)...(349): n = a,t,c or g
gnnnnnnnnnnnnnnnnnnnnnnnnnnnnnnnnnnnnnnnnnnnnnnnnnnnnnnnnnnnnncctggtgatcagtatagtacccaggaggtagtttttccatcctctccctcctcctcactccctccaccctcaaccaggccctgctgacttcttgttnnnnnnnnnnnnnnnnnnnnnnnnnnnnnnnnnnnnnnnnnnnnnnnnnnnngccatgtttggttttcttgcctgtgtcagttcccttagggtcnnnnnnnnnnnnnnnnnnnnnnnnnnnnnnnnnnnnnnnnnnnnnnnnnnaatatcctgnggnatatatgnaccacattntctttatccagntgacc

SEQ ID NO: 42144 - DNA, 377 bp, Homo sapiens
  misc_feature (1)...(377): n = a,t,c or g
gagcatttgatgctgctataagtaagatggtttcccattaataaaaggggcactcagtttactttgtcttcgccagacaggcaaagggtaaattaaggcggttacctgtggtgtcccagctctttcccaaggctggactagtgtgagccgattaaccaggcaggactcactcacaggtccctttctctgctacttctgctctggttttatgcgaagccctatttcccagctgcttcgggtaaacaaggacttctgtgttgaaataataaccacttnnnnnnnnnnnnnnnnnnnnnnnnnnnnnnnnnnnnnnnnnnnnnnnnnnnnnnnnnnnnnnnnnnnnnnnnnnnnnnnnnnnnnnnnnnnnnnnnncatgg

SEQ ID NO: 42145 - DNA, 343 bp, Homo sapiens
  misc_feature (1)...(343): n = a,t,c or g
gagagcaaactagaagaaccagcaatcattccactgtcctgccaaggtacacctcagtactccccttcccaactgaagtggtatgaggctagctctttccaaaagcattcaagtttggcttctgatgtgactcagaatttaggaaccagatgctagatcaaataagctctgaaaatctgaggaacattgtaggaaaggtttgttaagcatctcttaagtgccatgatgagcataacnnnnnnnnnnnnnnnnnnnnnnnnnnnnnnnnnnnnnnnnnnnnnnnnnnnnnnnnnnnnngacnnggnnnngagnnnnnancnnnctggncnnnntgctnnnacct

SEQ ID NO: 42146 - DNA, 374 bp, Homo sapiens
  misc_feature (1)...(374): n = a,t,c or g
gcatgaagctggacagagaaatagattcctgggaggaagaatagcaaaatgtctggagtaagaggaagtagggtatttcagggaactcagcaaacagtgtgatgacaaaatgaaagcacagtcatgcaatcagcacctgggtaaatattaggttgggagtctgtgttgacccagtctgcaggtaaccctcagcctggcccagcatttcactgccctcctactacttacccagaaacaactctcctgtattgattaagcaggaaagaggaaactctcctggaagacacaagggcagatccaagcaggagctaaggntttccagaatgtggncttaagctgtgaatggcttttggacagangcacagctgacattc

SEQ ID NO: 42147 - DNA, 345 bp, Homo sapiens
ggagagctagcaccatgagcttcactgctccatcatctgctttaaagccacaaggacagccagttaggtctttgtcatcatcacttttaacttttgtttaacttttaacaaagattggcctttttaaaggctcaattatattttaaaaaacaaacaaacaaacaaacaaactgccacttacgcagtccattgattttaaacaaagctggcaatgcaagtcaatgggaaaataatagtctttttcaacacatggaattggaaaaactggatacctatatgtataaaaatgaactttgatcccttaccccatactctgcacaagcattaaattaagattaactgaga

SEQ ID NO: 42148 - DNA, 344 bp, Homo sapiens
gctctgtcagaatcgagcaggcaaccctagtccaccctcaggacctgggcacaggtgtgcagtgctccctctggagctgagtgagcaagaggatgccgcagtcaggggacccacccggtgagcgggcacccccagtcagcgtccaccaccgtcctccatcctcatcctcgtcctcattactggaggagggagcgcgtgtccaggcaggcaggacagagcaccgagccagaccaggaatcagcgggagtgaggcatctgcccacattcaccgtgtgctctgcagaaagccccctcaggcctcagtctgcacccaggctgcccccggagtgagaccccatccctgc

SEQ ID NO: 42149 - DNA, 375 bp, Homo sapiens
  misc_feature (1)...(375): n = a,t,c or g
ggaggaatagaggaaaaaccttaagttggacaaattaataaaatattcttagaaaaaatgaagcagaagtttaggtttaggttttggttcacgaacccatcaaaaatttatggccnnnnnnnnnnnnnnnnnnnnnnnnnnnnnnnnnnnnnnnnnnnnnnnnnnnnnnnnnnnnnnnnnnnnnnnnnnnnnnnnnnnnnnnnnnnnnnnnnnnnnnnnnnnnnnnnnnnnnnnnnnnnnnnnnnnnnnnnnnnnnnnnnnnnnnnnnnnnnnnnnnnnnnnnnnnnnnnnnnnnnnnnnnnnnnnnnnnnnnnnnnnnnnnnnnnnnnnnnnnnnnnnnnnnnnnnnnnnnnnnnnnnnnnnnnnnggcgacgg

SEQ ID NO: 42150 - DNA, 342 bp, Homo sapiens
gggggacttagtcgattacctggaaaaagaaaagacccacactgtgtcctgctgtgcttttgggcaggaaaatggaagaaagagtggggtgggcacattagaagtcacccaaatcctgccaggctgcctggcatccctggggcatgagctgggcggagaatccaccccgcaggatgttcagagggacccactccttcatttttcagagtcaaaggaatcagaggctcacccatggcagcagtgaaaagagcccggagtcctgggttctagtccctgctctgcccccaacttgctgtataacctttgaaaaatcattttctttgtctgagtcttggttctccg

SEQ ID NO: 42151 - DNA, 249 bp, Homo sapiens
  misc_feature (1)...(249): n = a,t,c or g
gnnnnnnnnnnnnnnnnnnnnnnnnnnnnnnnnnnnnnnnnnnnnnnnnnnnnnnnnnnnnnnnnnnnnnnnnnnnnnnnnnnnnnnnnnnnnnnnnnnnnnnnnnnnnnnnnnnnnnnnnnnnnnnnnnnnnnnnnnnnnnnnnnnnnnnnnnnnnnnnnnnnnnnnnnnnnnnnnnnnnnnnnncntgcntggngcatnancagcccntggcctttggccaggcntggcaaggntgaggnggnagga

SEQ ID NO: 42152 - DNA, 334 bp, Homo sapiens
  misc_feature (1)...(334): n = a,t,c or g
gattaaatatactttcactcaaatgaagttttattcattttggcaacaattgcgtaatttatgcagttctacatatattttcagttgtatttaggaatgtcattaatcacacctttgccctttaagctttgttaaattctattttttattgcattactgccttctttccctgattttttttgattgtttcatctttcattttggttagtcccctgtttcacttannnnnnnnnnnnnnnnnnnnnnnnnnnnnnnnnnnnnnnnnnnnnnnnnnnnnnnnnnnnnnnnnnnnnnnnnnnnnnnnnnnnnnnnnnnnnnnnnnnnnnnnnnnnnn

SEQ ID NO: 42153 - DNA, 336 bp, Homo sapiens
ggcgatttcaactgaggatatcttgctacaaaggcagagggaagtggggaaagctgttttcagtccttaaagggctgaagtgcagccccctgagcttggtgccaacttggggttctccacacaccctttcaccagccaagtgtgcgtgtccagccctgttcaccgggtgggactgagctggaccacagtgaaggaggggaggactccgggatttccacagcaggttctttccttagttcatccatcctcagccactgtgcagccatcaatacggtgcccctagggtgggccagactgtgctgggtccacgagatacaatgaatgatgagcaacact

SEQ ID NO: 42154 - DNA, 246 bp, Homo sapiens
  misc_feature (1)...(246): n = a,t,c or g
ggagagagctagcaccatgaaccctgataaatttgttctcgagaacaattaggctcatttgaaagcattagcagtgctgaaaattgttttaaaaacataaattaacaaatgtttacatacctcaggagtcaactttgctatggatgtgaaaagcatagatacaatctaaaacagaaagaggaggatttcaggatattcttgttttgttttgnttntganacagggnntnnntatgnnnnnnngctg

SEQ ID NO: 42155 - DNA, 229 bp, Homo sapiens
  misc_feature (1)...(229): n = a,t,c or g
gaccagttttgcccaatgttcctttcctggtctaggatcctgtgcagaatagcgcatcacagcacattacatttagctgtctccttcacctcttctggtnnnnnnnnnnnnnnnnnnnnnnnnnnnnnnnnnnnnnnnnnnnnnnnnnnnnnnnnnnnnnnnnnnnntttgtgcacactgccccttaattgaaggttgtctcatgggttttttttgttttttttttttt

SEQ ID NO: 42156 - DNA, 327 bp, Homo sapiens
  misc_feature (1)...(327): n = a,t,c or g
ggttagtggcaaccctgcatcaggtaatttgattagtgcgnnnnnnnnnnnnnnnnnnnnnnnnnnnnnnnnnnnnnnnnnnnnnnnnnnnnnngtaaaatgtaagacagcaaacaactgagnnnnnnnnnnnnnnnnnnnnnnnnnnnnnnnnnnnnnnnnnnnnnnnnnnnnnntgtctcctcaggcctccctatttcctgagacgcaacatattgaaactaggccaattaaccctacagtggcctctaagtgtcaagtgaaagaaagagttaaaggnnnnnnnnnnnnnnnnnnnnnnnnnnnnnnnnnnnnnnnnnnnnnnnn

SEQ ID NO: 42157 - DNA, 337 bp, Homo sapiens
gcgagacccgaccctgggcgtggtgcatcgaggtagatgcaaagatgctggccagagcaagtgtcgcctggagcgggctcaagccctggagcaagccaagaagcctcaggaagctgtgtttgtcccagagtgtggcgaggatggctcctttacccaggtgcagtgccatacttacactgggtactgctggtgtgtcaccccggatgggaagcccatcagtggctcttctgtgcagaataaaactcctgtatgttcaggttcagtcaccgacaagcccttgagccagggtaactcaggaaggaaagatgacgggtctaagccgacacccacgatggag

SEQ ID NO: 42158 - DNA, 302 bp, Homo sapiens
  misc_feature (1)...(302): n = a,t,c or g
gagcaattgcaaaatggttactttcccctctccctgcctaaaatacgaggggatttttttctttgatgttcttgtaagaacctgttcaggctcctggaggtaaaagctatataggtccctcttaagtctggacctccagaagttttaactctcaagctagtccacactcagtcttctgcagttcgtcaaaattaccgttcaggtattgattactgtattgcttactggttcatgtagcttttgcttctggtaatctgatcttttctgtgattctctgtattttcttgtgattnttttncttc

SEQ ID NO: 42159 - DNA, 135 bp, Homo sapiens
gctctctgatccccagctgggcccaaatgccagggccagttgcttgatcccttgctccctgtcctcactctgaggggtggtggctgttggaatatggcataagccggactatctgggaatgtgggggaggggagg

SEQ ID NO: 42160 - DNA, 335 bp, Homo sapiens
  misc_feature (1)...(335): n = a,t,c or g
gatacaacatcaagttattgctacatatttgggtttaatttttcaaggtaaaagttcttattgaaagccttttatgttttgctgttctcctttccctactgtgaaatacttgtctctgatacaagtagattgtctttgtgacctcttcctggcaatagtgccctgcgtaaatgaggaccatttgcatctatctatctttttgctctgttcaaacatgtttagtgcagactccaaagtcagattacttgggttcattggtttaggctaagtaatttatttttttttttgagacgnnnnnnnnnnnnnnnnnnnnnnnnnnnnnnnnnnnnnnnnnn

SEQ ID NO: 42161 - DNA, 315 bp, Homo sapiens
  misc_feature (1)...(315): n = a,t,c or g
ggcgtggtactgaattaaggataaacttaatttttttctttatagtcttgtattttctgctttttgggggaatgaacatacatcattagaacatgactttgnatngatacaganccaangcctancctatnattcgaccacttananctttctngacacactcatactccttccctactncacancgnnnaatttncncanncnnnttataccccnntccatttctanaatggcnnaaactncctanncctncntngngcanacttnanagatngacttttttcnactnnccatcctncccnngaaaacccccac

SEQ ID NO: 42162 - DNA, 315 bp, Homo sapiens
gtaaaatatttacaaaatgctctcatttttaaacttataaggcatactgaagtagtgtatcaggcaagtgaaagcctcactagaagaaggaaagactagaatttaaaaaatgttttaacccataaggtcatcctggacttaccccaaggacaagaatgtcacactgtctttatccaagtctcaaaggtaaatatcacaattatttacttagatccctttaaaagtgatcatttctttttttttcttttttcataaataattacaagaacaagcaaataatttctccttttattgctgaggctaaagaaaagcagt

SEQ ID NO: 42163 - DNA, 221 bp, Homo sapiens
  misc_feature (1)...(221): n = a,t,c or g
gtgttgatggttttgtgtcattgggtaccatcttagtctcctcaacagtttaacaaaaagcaaaaacggtttgctagagaagtcgtgaaaaatataatcttagctggttccagaatagcaggaggttttaaaaggaatttatcagttctttatttgagtgtctttttgttaggaattgccttatatatccaantgngnnncnncnnganaacnattnccca

SEQ ID NO: 42164 - DNA, 209 bp, Homo sapiens
gggcgtgagccgccgtgcctggccagaattgaacatctttgtatctttcttcttagtttagtacaaaactgaataatatttgcaggcagcagaattggatcgggaatttctcaaactgccaaagatgaaattagaatgagtgatttttggctggcagcttgaagtacatatatatcagtttgtgtatgatacgtgtgagtatgaggtgg

SEQ ID NO: 42165 - DNA, 233 bp, Homo sapiens
  misc_feature (1)...(233): n = a,t,c or g
gaaacttaaggtctctccccagcatttagatatctcatctgcaagtcttgaactgatgctactagccagtggttcccaaactagtgtctgggaaaccatatgcactccatgcattgtttgtgaaccaaatacgtaatgtctcccaagcatatgtattactgtctttcagagtatgnagctacatttgtagaanantanaatacnnccttattacaatactactganttcacag

SEQ ID NO: 42166 - DNA, 291 bp, Homo sapiens
  misc_feature (1)...(291): n = a,t,c or g
gaagcctaggaagcgaacttatgaacagataaaggtggatgaaaatgaaaactgttcctctctgggatctccaagtgaaccaccacagactctagatctcgttagagcattacaagatctggaaaatgcagcctcaggtgatgcggcagttcatcagaggatagcttctttacctgttgaagncctttacccnaccctnnnacattntttggcanaccnngcccnngaaagnngncngnctttnnntntncnnggnatnnnnccccnnaggnnngtncnnngnnggncagg

SEQ ID NO: 42167 - DNA, 321 bp, Homo sapiens
  misc_feature (1)...(321): n = a,t,c or g
gtttctacatgccagttcaggagcaagtaaagaatcagtcatacatgatgtaataagtgtattgcttgtgagaagctgggtttgtccatcacgatttctaaaaagcaaagggtgtgagtatgctcaaacagtcgagtaaaaaaattgcttttcaggctctgatttgtgttctgtttatgagaaaatatatctctaagccctgaaattgcataatgggtgcaaattcaatgctggtatgaaaattatctttgntgttagcaaataggataactggggaagtttcttaaaaaaccattatggtaggatactgaaaatgaagca

SEQ ID NO: 42168 - DNA, 321 bp, Homo sapiens
gagtccaggagaaacaagacacaggcttccatgtgtcctttcctagtggagtcaaacaaatatgcttaattcttccagcaatgatttgtgacaacatgggcgaagtatttgccaatctgggaagctcacctgagctttagtattcaggatttgactgggatcagtcacacagacatgcaatatctgcatgactgacctcagctactcaaactccaggctcccagggcaaaaataggtgttcaccataaatcacattgttggcataaagtgtctcatcatactagtattgtgggcccaaggcctctggcatgcaaaatactc

SEQ ID NO: 42169 - DNA, 313 bp, Homo sapiens
gcgcaagcacctcaccgaaaagttctacagcatgcgcagtagccggaaatgctcccgggccaccacggatacggtcactgaagtggttgtgccattcaaccagatccctggcaattccctcaaaaattagtccctgcttccaggccggaagtcttctcctccatgaacatcatggactgagctgggggaggaagggatatctactgtggtctgggcaccactctgtgggcactggtgggccattagatttggaggctacctcacctgggcaggatgatggcagagcccagctgttggaaaatccagaactcaa

SEQ ID NO: 42170 - DNA, 262 bp, Homo sapiens
  misc_feature (1)...(262): n = a,t,c or g
gaattattagtgggctttgtttgtttattgtttagaaaagaaagaatttggccagccaccgcgcctggcctgnnnnnnnnnnnnnnnnnnnnnnnnnnnnnnnnnnnnnnnnnnnnnnnnnnnnnnnnnnnnnnnnnnnnnnnatnacccaaactcctggccttcaactgancctcccacctcatcctcccangtacctgggactncnggntcntaccaccttgctcggntaatgnctntattntttanananacngggttt

SEQ ID NO: 42171 - DNA, 319 bp, Homo sapiens
  misc_feature (1)...(319): n = a,t,c or g
gctggaagaattattaaaaatcagagcgcttttgaaacgaaaatagaggaagatcccacacccagctcatgatgaggaacaaacttaacaaaggtgccaggctttagctctgcttagtgcatggtacaaaaggcagttggtcccttgagtgtgaagatgatccagaggctcagggctgcagaaggaagcagggccaagctgggagtggggctacaagggggaacaggcgagagattgacttcactccagcccgtctcagctagcggggtccataaagggcacagctagttggcctgnnnctgancccntggnantgccc

SEQ ID NO: 42172 - DNA, 314 bp, Homo sapiens
  misc_feature (1)...(314): n = a,t,c or g
ggagactgcatagggctcggcgtggtggaatgagactcgtctcaaaaaacaaacaaacaaaaaannnnnnnnnnnnnnnnnnnnnnnnnnnnnnnnnnnnnnnnnnnnnnnnnnnnnnnnnnnnnnnnnnnnnnnnnnnnnnnnnnnnnnnnnnnattaaggaaagggaaaaaaaaacaagtgnnnnnnnnnnnnnnnnnnnnnnnnnnnnnnnnnnnnnnnnnnnnnnnnnnnnnnnnnnnnaggccaccctgggccacntaaggagacctccnnnnnnnnnnnnnnnnnnnnnnnnnnnnnnnnnnnngggc

SEQ ID NO: 42173 - DNA, 318 bp, Homo sapiens
  misc_feature (1)...(318): n = a,t,c or g
gcccagatttagttgttttaacatttgttgcagctacttgaatgtaattagaatttttttttttgaaaattnggcntancataaaggganatctaaacnctactcantaaagctntanaaaaggtnttcnggtaaaaaanctatntccntngatnctcnttntgaggcaaatncaaacttgactccttntaaanaaaaaggcntaggatttgaanaggcagcaggacccanaggtctnaaaatcagcaaangggagggacnttccanatancaanggananaggnganatnccntanggtatattngaaatncagtaa

SEQ ID NO: 42174 - DNA, 353 bp, Homo sapiens
gcggcacgagaaatgttagccattattattatcaggtggacaaataatccgagtagaaagtagaacaagctaaccctgttcccctgtgaggaaagctgctccaggtcaggctagccagcggtgctgcctctttctttctgctctctctgtgactgcagtgggcaggtagtactggttactttctcagtcgtctccctttctgaattaaacttctgtatctttgtgtgctctgtgcacaccatgcaatcacgatggggttgaggccgcttgtggagctgagtgactgctaacaaatcactaacctttctgagcctgagttccttgatgccagctgcacatgggtattgtgagga

SEQ ID NO: 42175 - DNA, 155 bp, Homo sapiens
  misc_feature (1)...(155): n = a,t,c or g
gatgatctgtattttccttgttctctgtcacattacactagtacctaaaacagagcctgacagagggtgggccttaaaaaatgtttgcaaagatgaatagacaggcataaaagccctgcaagctactgaagtggtggctggtgggttgagngatg

SEQ ID NO: 42176 - DNA, 294 bp, Homo sapiens
  misc_feature (1)...(294): n = a,t,c or g
ggtggaaaagaatgtacacagaaggcctcactgaaggggtggcatttgagttcgctgacaagacggggctggccacagggctatctgggagcagagcattccaggagggaacagccaccaccaagcccctgaggtggtaacaagcttgttgactttgaggaacatcagggaggccagtgtgagacaacggagtgacaggtttgaggtgngtaggaagnanancccacagncttgctttgccccactgnnannganngcncannnatnnnncnnnnannnannnnnnnanntgac

SEQ ID NO: 42177 - DNA, 329 bp, Homo sapiens
  misc_feature (1)...(329): n = a,t,c or g
gactaatttaaacaagtcctcctttagtcttttgggtcgcgtagttgctgaaacctaagtacctgcagcctacaggataagggaagttcacagcctgcggggtgaatgaacccatgtgtgaactgcacagagcaattcatagaaaatgcatagaaatttgtaacactttggtcacatctgtctctagatggtcattgaatttgtttnnnnnnnnnnnnnnnnnnnnnnnnnnnnnnnnnnnnnnnnnnnnnnnnnnnnnnnnnnnnnnnnnnnnnnnnnnnnnnnnnnnnnnnnnnnnnnnnnnnnnnnnnnnnnnnnnnnnnnnnnnn

SEQ ID NO: 42178 - DNA, 328 bp, Homo sapiens
  misc_feature (1)...(328): n = a,t,c or g
gnnnnnnnnnnnnnnnnnnnnnnnnnnnnnnnnnnnnnnnnnnnnnnnnnnnnnnnnnnnnnnnnnnnnnnnnnnnnnnnnnnnnnnnnnnnnnnnnnnnnnnnnnnnnnnnnnnnnnnnnnnnnnnnnnnnnnnnnnnnnnnnnnnnnnnnnnnnnnnnnnnnnnnnnnnccaccgcacccagcctcttcaatttagttttttaaaactctttagattataacattaatgcatgtttattgaaaaatacagaaaatagagganaagaatttannaattactcataatcgctccattgataatactaaatttattttnccctgnttta

SEQ ID NO: 42179 - DNA, 169 bp, Homo sapiens
  misc_feature (1)...(169): n = a,t,c or g
gggcctactgtcactttcattaaggcataacaatgttgtaaatgccatgattttggatgtcctgtaccatcaggtgagaattaccattttctttaacataggttatgcttgtttgctgatggaaatgatccagaagagaaggacnngttgacgattganagggttaatg

SEQ ID NO: 42180 - DNA, 347 bp, Homo sapiens
  misc_feature (1)...(347): n = a,t,c or g
gaagtgagtctcctgcnnnnnnnnnnnnnnnnnnnnnnnnnnnnnnnnnnnnnnnnnnnnnnnnnnnnnnnnnnnnnnnnnnnnnnnnnnnnnnnnnnnnnnnnnnnnnnnnnnnnnnnnnnnnnnnnnnnnnnnnnnnnnnnnnnctttacctccaaaacttancttataaaactttaaacattantcntagtaattccaagtanggagaaaaaattcantggatgtattntctcttgnntaggcatangcccacattgccgtatanaatttggacaaggantacctgcccattgnnnnactggctnaatttttntanggcatctnctannnanccctggtgtggg

SEQ ID NO: 42181 - DNA, 334 bp, Homo sapiens
gggtgcttgaacaggtgatgagtctgatgggcagggagaggccagctcaagaagggccttgaaagccaggcaagagttgagactttagcctgagggccatggggagtcactgaaacatcctaaccaaggactgacatatcttgatttgcctgtgagaaagatcactctgctacccagatgaaaagggccacagaaaaagcaggagattgggcttaagtgaggtgctaacaccaccgtagtggagaagggagagaaagcttgggagatagatggattggggggtagcaggacttggtgattcactgagcctgggggatgacttgaagctgatggg

SEQ ID NO: 42182 - DNA, 342 bp, Homo sapiens
gaaaaaattgaaaaaaaaagtattgtgatatcaatttgcttttttccttaaaatgaattttctagaccacagttatgtaccttagaatggataaataaattaggatataaaaggcttctgattaaatttgtaagttaatcaaccttttttcctgtggacatctaacagtaggaataaatgatagttcccttaataggggaaaggttcaattcttacaaggtggctttagaaacatacgactctcagtccatgccctgaagtgacaatagagatctacagacgtgtctagtagttaaagttggtgctcctcgtgtgacgaagtctgcacctgtcttttatgac

SEQ ID NO: 42183 - DNA, 332 bp, Homo sapiens
  misc_feature (1)...(332): n = a,t,c or g
ggnnnnnnnnnnnnnnnnnnnnnnnnnnnnnnnnnnnnnnnnnnnnnnnnnnnnnnnnnnnnnnnnnnnnnnnnnnnnnnnnnnnnnnnnnnnnnnnnnnnnnnnnnnnnngctaagcattgggtacttatgaacataaaggtgggaacaggagacactagggactatttgggctgcagtacccaagcagtactgaaaaacttgggtactagagctgagtagtacctatagggctgaaaaattacctactaggtactgtgctcaccacctgggagacaggatcattcatgccccaaacttcagcatcatacagtatacccatgtaacaaacc

SEQ ID NO: 42184 - DNA, 341 bp, Homo sapiens
  misc_feature (1)...(341): n = a,t,c or g
ggtagccatagacaatttgaaaacatgggcagtggctgtgtgccagtcacactttatttatgcagaagcagccagggactaggtttggatcatgggctgtagttagctggccccagttacaaaaaataannnnnnnnnnnnnnnnnnnnnnnnnnnnnnnnnnnnnnnnnnnnnnnnnnnnnnnnnnnnnnnnnnnnnnnnnnnnnnnnnnnnnnnnnnnnnnnnnnnnnnnnnnnnnnnnnnnnnnnnnnnnnnnnnnnnnnnnnnnnnnnntgttgttgttgnnnnnnnnnnnnnnnnnnnnnnnnnnnnnnnnnnnnnnnnnnnnnnnnnnnnnnnnn

SEQ ID NO: 42185 - DNA, 330 bp, Homo sapiens
ggactccgtaccatgtcctgtagtgacaaaatcctacgctggaacgtgctgggcctgcaaggggcactgttgacccacttcctgcagcccatttatctcaaatctgtcacattgggttaccttttcagccaagggcatctgacccgtgctatttgctgtcgtgtgacaagagatgggagtgcatttgaggatggactacgacatccctttattgtcaaccaccccaaggttggcagagtcagcatatatgattccaaaaggcaatccgggaagactaaggagacaagcgtcaactggtgtctggctgatggctatgacctggagatcctg

SEQ ID NO: 42186 - DNA, 340 bp, Homo sapiens
ggagctagtgagcttcaataccctgtcatgagtattaaagatttatttagaggttttaatttcttttaaattattaaggcatggaataaagttggaaagtagctttttaagaagagaaaaaagataaaagcgatctctttcagtaattcatcttcacctttctttagcaaatgaagccctcagtatttcaaacagctgtttcaactactgaccactacccttctgacaaatccaaaattacctcccttgaaggctacaaactatcaacgtgaaaaacatgcaactagtagcatttccaaaagtagcacccaaagggatctgaaaatcaactatcctatct

SEQ ID NO: 42187 - DNA, 335 bp, Homo sapiens
  misc_feature (1)...(335): n = a,t,c or g
ggaaatttcacctttgatggtgagaatatgctgttctctataccgtgaccactacccctgcccggtatcagtgttagagatttcagggtgtatgtgtgtgtgttttgtttgtttgtttttgagatggantntcantcttgcttcccangctggagtgcatnggcacangctcagctnactgnaanctgtgnctnccaggttcnncaattctnctgnttnatcctncccagntnctggcattacnngtgcnnaccancacacccagctanacttcctangggatananagtaaccctaaatnnntaataccaggngtggtnnncatgcntgaaacc

SEQ ID NO: 42188 - DNA, 222 bp, Homo sapiens
  misc_feature (1)...(222): n = a,t,c or g
gagcacaatgcatgttaagggcttaatacaatgcctggcacctagtaagtgcccaataactactagctattatattgtattatnnnnnnnnnnnnnnnnnnnnnnnnnnnnnnnnnnnnnnnnnnnnnnnnnnnnnnnnnnnnnnnnnnnnnnnnnnnnnnnnnnnnnnnnnnnnnnnnnnnnnnnnnnnnnnnnnnnnnnnnnnnnnnnnanctgtnagcg

SEQ ID NO: 42189 - DNA, 339 bp, Homo sapiens
gataataatggctaccactattgggttaaactctttaaaaacataacttattaaattcagtaaccatatgagtgtgatattatccccatgtttcagatggaacttagactgattaagcaacttgcccaagaccattgagttatcaaaagcagaactcgtatgtgaacccagatttgagaccatagtaaccctgcattgttgcacacactttctacagtatgcatactccttttgtataataaatgtaaaattgacaaatgtgggaaaacttactcattcaataattcaataaacatttgttgagtagatatagttggtcaaattctggtaactgccatg

SEQ ID NO: 42190 - DNA, 329 bp, Homo sapiens
  misc_feature (1)...(329): n = a,t,c or g
gatagggctcggcgtgaggtatactttagaaaaaaagtaccaagtacactaaaacttttttattatccaacatattccttttttaaaaaaannnnnnnnnnnnnnnnnnnnnnnnnnnnnnnnnnnnnnnnnnnnnnnnnnnnnnnnnnnnnnnnnnnnnnnnnnnnnnnnnnnnnnnnnnnnnnnnnnnnnnnnnnnnnnnnnnnnnnnnnnnnnnnnnnnnnnnnnnnnnnnnnnnnnnnnnnnnnnnnnnnnnnnnnnnnnnnnnnnnnnnnnnnnnnnnnnnnnnnnnnnnnnnnnnnnnnnnnnnnnnnnnnngancngccatc

SEQ ID NO: 42191 - DNA, 330 bp, Homo sapiens
gcagatccgtggttgcctaagggtgggtacagggacttggccccaaaggggcacaagggagtgtggggtggtgggaatattctttatcttaattgtggcggtgttacacagccgtacatgtttgtcaaaactcaggactatattactacaaaggggcagtcatattgtatgtaaattataccttaggaaaaccataggtttttgagatgttccaaaaactgtattctgaaaacctagttttaaaactcggtttctcagagccctagcggtctccactggtgcccaagggatgggccaagggaagcaggctggcactccctcaccctgccc

SEQ ID NO: 42192 - DNA, 331 bp, Homo sapiens
gatttgataagtctctcctcttcgggtgttacagaatctgattacctcaacagttggttttcctgatttgttatttgcaagtagcaaatgtcatctacaaagacagtactgtttcctagactttcctaccactttcaagtctactgccagggaaaatgactactcgagagttaatggactttaagaacctcagaggctaaagaaatccagataaacaattaagcttggtgacaattactatagcactcctagtcatagagtatctggtaaatgttgattattatagtaggctttgtaaggggagagattacagattcattcagaattcatt

SEQ ID NO: 42193 - DNA, 331 bp, Homo sapiens
gagaaaacaacaacacactgtcaaaaataaagcagtcaacagaaccagaccccagatatgacagagatgttggaactatctgacaggaaattgaaaataactatgagtaatatgatatagctctagtggaaaaggagaacaacatgccagatcagatgggtgatttcaggagaaatggaaactataaggatcaatcaaactgaaatgcaaaaagtgaaaatcacagcaacagaagtgaagaatgccttcaatgggcacatcagaagatgtaacaaagaatcagtgaacttgagcatcagtttatagcaatcacccaaactgaaacacaaag

SEQ ID NO: 42194 - DNA, 330 bp, Homo sapiens
  misc_feature (1)...(330): n = a,t,c or g
ggcctgagataataaagtgtgacagaggaaaggcacgttcaaactaagggattgggcattttactttaataaaaggggaagttgctgaaaggttctaagtagcgaaagaaacatctgatttacatacatttcacaagaacattctggctattaaatggagaatactttgaagacccaagggtaagaaaaagatggacctggaggtcactgtagtcatcttggtgggagaggatagcatggtctanactatggctgnggcaaanacatggatgaaaagangccaacatgtngatatanacatgatcagnnctgctaatggntggggagggc

SEQ ID NO: 42195 - DNA, 331 bp, Homo sapiens
  misc_feature (1)...(331): n = a,t,c or g
ggagtgggtttggggtataaagagtgcaagnnnnnnnnnnnnnnnnnnnnnnnnnnnnnnnnnnnnnnnnnnnnnnnnnnnnnnnnnnnnnnnnnnnnnnnnnnnnnnnnnnnnnnnnnnnnnnnnnnnnnnnnnnnnnnnnnnnnnnnnnnnnnnnnnnnnnnnnnnnnnnnnnnnnnnnnnnnnnnnnnnnnnnnnnnnnnnnnnnnnnnnnnnnnnnnnnnnnnnnnnnnnnnnnnnnnnnnnnnnnnnnnnnnnnnnnnnnnnnnnnnnngtctaaagcaagtgaaatgtccttccttaatgagtacaaagacttactctccctctg

SEQ ID NO: 42196 - DNA, 319 bp, Homo sapiens
  misc_feature (1)...(319): n = a,t,c or g
gcttagggacatcatcatcaaactgtgtgcagaatctttatggcattatggggattgcaagaggggcaaggagacacaatgggcaactgttctggttttcaaaataacagagcaagtttttgagatgtgacttaagagtatttttaaagaaaagaggtcatttcttagagttagtgtgggttccataaaaccaggtcttgctggactagtttaatgcttaagtcctccctcccccatccctccatatagaaaagtttaacacattctacttgatgaattattgaaagtggagacacccatgtaaccaccacccanatcc

SEQ ID NO: 42197 - DNA, 326 bp, Homo sapiens
  misc_feature (1)...(326): n = a,t,c or g
gnnnnnnnnnnnnnnnnnnnnnnnnnnnnnnnnnnnnnnnnnnnnnnnnnnnnnnnnnnnnnnnnnnnnnnnnnnnnnnnnnnnnnnnnnnnnnnnnnnnnnnnnnnnnnnnnnnnnnnnnnnnnnnnnnnnnnnnnnnnnnnnnnnnnnnnnnnnnnnnnnnnnnnnnnnnnnnnnnnnnnnnnnnnnnnnnnnnnnnnnnnnnnnnnnnnnnnnnnggatnttanaaaaagttcggggacagnancnttnttgggaaggatttagtantactactcttggaatcatggggtttctgacgtancacagggcagtgaaaagagaaa

SEQ ID NO: 42198 - DNA, 314 bp, Homo sapiens
gagtttttctccatgtaaactgctccataaggctgcttgaatggcctcatgcatggtggcccacagagactgaaccaagagaacaaacaaggcagaagctaaaatttctttgataacccagcctctgatgacacatggtgccatttctacaatgtcctattggttaacacatatcagccctattgaatgtggtagtaggctgtccaagggcatgggtgtaggaggctggctcatgttgggagcatgattgcaacagtataccataatgaatacactggattatgggagaaatatcaattactccctcatgttcc

SEQ ID NO: 42199 - DNA, 321 bp, Homo sapiens
  misc_feature (1)...(321): n = a,t,c or g
gcttggtgagcagaaatgcttaattttgaggaagttgaattttattaatttttactttgtctaccccaaggtcactaagatattattttatgttttcttctagaagctttatgattctgggtggtatgtttaggtctatcatctgtctcagaccaactttttgatagggatgaaatggggttgaggtttattttattctatataataactggggttgaggtttattttattgatataaatatctatttattatatcaatgnttgtttaaaacactttctttttctcattggantgcccggccatngcatcaaagnccagtg

SEQ ID NO: 42200 - DNA, 334 bp, Homo sapiens
gattatccccattgtatagaagaggaaacagaggttccaaaaagtgaagaacttgtgtaaggtcacatacttagtaagtcacagaagtgggactgtaaacctaggcctgtttcactgattatacctcctactcttacctctacatcaagatcccttgagagctttggaattgtcactagaagtcttgactattctcatcctcatttttggtaaatatgaaactcatttgttctgttgttctagaaaagctcttaatgtttaaatcaggatcatggactactatccccctcttctaagagcttagattaataggggcagtataacatagtggtta

SEQ ID NO: 42201 - DNA, 328 bp, Homo sapiens
gatgatctacaattgagttaaaaccaccaagttttaaaatacaagcctaatcataattgtgatacaaaataactggtcgagctttgaaaattatattcaaaaataaaagcaatcgttactattaaaaaacatacacaaataatgcttaacttatatagaactgaaagttcaagaagtttataccaaataataaatgtaataaagttcacttgaattataagagacagttctgaaaaattacgaaacaatttgaaattactacttgaaatgactacttcagaatttaagaaacttataggttcgtttttattttgacttttatttgatg

SEQ ID NO: 42202 - DNA, 323 bp, Homo sapiens
  misc_feature (1)...(323): n = a,t,c or g
gacccagctctctgtccttgggaaaagggtcaggagagaactggggcccagctgggaagctggaggcttgaggctgctggtccatgttggaatgctgtctccctctgccatccagcacccaagcccggcgccaggctcagagcaggaactgaagcttttgctgttgttgttgnnnnnnnnnnnnnnnnnnnnnnnnnnnnnnnnnnnnnnnnnnnnnnnnnnnnnnnnnnnnnnnnnnnnnnnnnnnnnnnnnnnnnnnnnnnnnnnnnnnnnnnnnnnnnnnnnnnnnnnnnnnnnnnnnnnnnnnnnnnnnnnnnnnnnnn

SEQ ID NO: 42203 - DNA, 329 bp, Homo sapiens
  misc_feature (1)...(329): n = a,t,c or g
nnnnnnnnnnnnnnnnnnnnnnnnnnnnnnnnnnnnnnnnnnnnnnnnnnnnnnnnnnnnnnnnnnnnnnnnnnnnnnnnnnnnnnnnnnnnnnnnnnnnnnnnnnnnnnnnnnnnnnnnnnnnnnnnnnnnnnnnnnnnnnnnnnnnnnatctaatttgggaccatgagtggcactcacttgccatgtcctgttagcctggtccctggatgcctgtgtgaagggagacagcctcataaaccagtccactggcctggaactcatgccctagcaagaagtgcacttctgttgtatttgagccattacatttggaatctattggtcattgc

SEQ ID NO: 42204 - DNA, 323 bp, Homo sapiens
  misc_feature (1)...(323): n = a,t,c or g
gcaagaattccgaatgatagaattcagctaaaataacaacagaactttagattacacatcttagatctcccaagttatagactctcagagcatgagaattttggaaccatgggatttgagggtaatagaaacataggcacatcaaatttgagagtcttagacgtctagaatcatataagcttgaaaccatcgtaacctagaatcctggaaattctagactcccagaactttgaacaatcaaattctagaatccnnnnnnnnnnnnnnnnnnnnnnnnnnnnnnnnnnnnnnnnnnnnnnnnnnnnnnnnnnnnnnnnnnnnnn

SEQ ID NO: 42205 - DNA, 323 bp, Homo sapiens
gcttgaaccatttctttccaataataacatcttgcaaaactatagtacagtatgaagacaggatattgacatttatacagtcaatgcagaacaattctgtcaccataaggaccccttttataaccccactcacttcactctttatgctccacaccctagcctgtttgtaaatcctggcagctgcttatttgttctccatttttgtaattttatcatttctaaaatgttgtataaatggaatcagacagcatgtaactttttagtataggtttttcattcagcataattctctggtgattctttcaaatttttgtatatatcag

SEQ ID NO: 42206 - DNA, 323 bp, Homo sapiens
gcatgtggtttggaacatactccagagaaactttcctggtacagcaaatgaaatttaaagttcataccttggacactataaatataagggatcttagtacacaaagaaaatatttctctcaatcaaatttgcatcagttgccttaaagaatggggtagttataggaagctcacagagaggaaaaaaactcttcatgtctacattgcttcttgaactgattttatttataaaagaagaattgttgagctagtgatagaagtttcatgaattccctggtactaattatcagttaatgacctctctgaagtctctggagagcgttc

SEQ ID NO: 42207 - DNA, 322 bp, Homo sapiens
gggcgtggactttgtctgtctcgctgctgtctcttcagagtctaggacagaacctggtacacagtagacactcaacagatatttgttgaatgactaaattggataaaaagatgtgtgcattttaagagcagcacttgccaacctttgttcatcctttgtgggctgacgcagactagaactgtatttttggcttacatctgaaggagccagcaactttttaagttacgtattaaccagtcttttggatggttgtataaatgactcagcagtcctcaggaggtaacattgtaatcttaacttataaataataaatggacacctg

SEQ ID NO: 42208 - DNA, 329 bp, Homo sapiens
ggtagaaaaactttattagcttgaacctgcaatctaaaaaaacctcaaatattttatatatgttaggtacaatcctgtgaaaattacctattaccttggtgataagccaatatgagagagagaaaatatttccaattttaagtgttagagctagaagaagtttaagatcgtcttacggtgtgcttttcatctgtattcctcaggcagcctttgaagttccaagtaggtagacaccttggatggcccactgggtaaccatcagccttttttttccaaagtaaaaaatagtttattttttctgggtataaaagtaaatatgggccaggcgc

SEQ ID NO: 42209 - DNA, 325 bp, Homo sapiens
ggctcgggggtttgaggttagagtgagctacacaatggtatcaactgcactctgacatgggtgaccctgtctccaaaaaactggaataaacattcttagctaccacaagccatttaccaggccagaaaattagtaaatgccaccaatagaagccagacgagagaggcttcaactccaatcaaaaccatgagagtaaaaacaggagctctagcattccatacaacctagtcacaacatggctcaatatataattatcagaagctgaaagggccaaccttacttagaaaaaggagtaaagactgggtgttttcaagaacactgagaa

SEQ ID NO: 42210 - DNA, 344 bp, Homo sapiens
gaatccgccaacctggattatttctttatttatttgggatttgtttaatttacttttgcagtgttttgtagttttcagtagacaggccttgcataactttttttgaattcatgacaaaagtattttttggtattataaatgaaatggttaaaaatattttctaattcttagtatatagaaatgcaattgattttttaaaatatattcatcatgtatactgagactttgataaattcatttattagtagctttttggatccttaggattttctagatacacaatcatgcttcttgggagtaattatagttggtctaatctttatgcttttagttctttttattgg

SEQ ID NO: 42211 - DNA, 341 bp, Homo sapiens
  misc_feature (1)...(341): n = a,t,c or g
ggtgatattctaaggccagcagagtttcttttcctatgttcttaacttttacatttaggaagctggtctagataagagcagtgaatctaatggacatgaagaaggttgtttaagcatcttcacttatggtttgactgcctgtgtcagcctaaccttgagaggtgctgatcaagtcagtgaaggtcagcctttctcttcctaccttaatctctccatttaaagtttaaaatcttgcctattttcctaccacaggtactctttggagtgntttttgcctctctagtcatgaaacccagcaggaggttgtgcttagaagtgccaagcctcggtcgggcacagtg

SEQ ID NO: 42212 - DNA, 317 bp, Homo sapiens
  misc_feature (1)...(317): n = a,t,c or g
gctggatatatgaattgttgtatgtctgcacaaaagaacattgtacatcaagaatgatnnnnnnnnnnnnnnnnnnnnnnnnnnnnnnnnnnnnnnnnnnnnnnnnnnnnnnnnnnnnnnnnnnnnnnnnnnnnnnnnnnnnnnnnnnnnnnnnnnnnnnnnnnnnnnnnnnnnnnnnnnnnnnnnnnnnnnnnnnnnnnnnnnnnnnnnnnnnnnnnnnnnnnnnnnnnnnnnnnnnnnnnnnnnnnnnnnnnnnnnnnnnnnnnnnnnnnnnnnnnnnnnnnnnnnnnnnnnnnnnnnnnnnnnnnnnnnnnnnn

SEQ ID NO: 42213 - DNA, 316 bp, Homo sapiens
gagtttattaaagatataatcaatcatatgtaactgaacatttagaaaaattatatacaggtttgagtagcccttatctgaaacttttggggccagaagtgttttggattccagatttttccggattttggaatatttgcactgccaactagttaagcacccccaaatttgaaaattcgtttcctttgagtgtcatgtcaatgcccaaaaagtttcagatatttggatttgagatgctcaacctgtataaggattcagaaagttattctgattaatgattttaagattcagatatacagccgggtgcagtggctca

SEQ ID NO: 42214 - DNA, 343 bp, Homo sapiens
  misc_feature (1)...(343): n = a,t,c or g
gggcgacacctccaacttcggaacttaccccgagaatgactgggacacagccgcgaccgtgccgcagaagggtttagaaatcttcaagaatttctgaggacaggagctcacatctggaagaagcaggaaggctggaatctgcctgcaacaaagagctgctcctgagcagaccagtagcaatgtcttcttcacgtgataaggacatttccacttttctgtctttgtgcctgtatgtatagaaacagatcagagcacagttgaaattaatgtaactggcattatttaagcaactggaattccacactgtangaaggttttgaaaattgnttgcttgtagatttta

SEQ ID NO: 42215 - DNA, 310 bp, Homo sapiens
  misc_feature (1)...(310): n = a,t,c or g
gaagagtgctgactagaggctgtgccatgccaggctgtggtcagagagtttccctgtataaatagcaacctatgctaggggttgctagcaccagccatttcccctactcacacctgtgcagtgtgataaagatagtagaattagcctgcagttgtggtccaaccagataaaacttttaggcgggaagtcaagtgacaggcaaacttgtgtgtgtggttttttttttttaagggttaaatgtttttgatattttaaaaaagcntntaggntgnttgnggaagtcaaaccaaantancaggaaggtnttgca

SEQ ID NO: 42216 - DNA, 315 bp, Homo sapiens
gcagagcaactgattctggtgaattaaagcaagtatttctaagaacataagtggcaactttcagtctcaaatcaatttggccaccaatcagtttttgtaagggtacaaataggacataacatgctcagatgggacttggataaagtgtatacaattttacatcgaggaaattgtgtcaatgtgttaccttcaatgttagaaattcccaagttctgacaatagttcagagccttgttaaaagccagagtggaggcatgtagatccagctggaaagagaggcattatggtctaacttaggacaaattttaaagccag

SEQ ID NO: 42217 - DNA, 311 bp, Homo sapiens
  misc_feature (1)...(311): n = a,t,c or g
nnnnnnnnnnnnnnnnnnnnnnnnnnnnnnnnnnnnnnnnnnnnnnnnnnnnnnnnnnnnnnnnnnnnnnnnnnnnnnnnnnnnnnnnnnnnnnnnnnnnnnnnnnnnnnnnnnnnnnnnnnnnnnnnnnnnnnnnnnnnnnnnnnnnnnnnnnnnnnnnnnnnnnnnnnnnnnnnnnnnnnnnnnnnnnnnnnnnnnnnnnnnnnnnnnnnnnnnnnnnnnnngagaaagtcacttcaaagaacgatgaaggattgttcatctcatttgtaatccaaaaattgggcagccatgtcaacagggagaccatt

SEQ ID NO: 42218 - DNA, 333 bp, Homo sapiens
  misc_feature (1)...(333): n = a,t,c or g
gcgggagtaggctggggacatcagaggaggatgggggctttctcagagttcatctaagaagagtctgcactgagacggctcatcaagaaccgttctccaagactgggtggctttcacattctccgcccagcaaagggagcttttgaacagggcatcccaggggcagaaaagagcttgcctttggctttccccaggatttctgtcttctcttgggaaggctgggcccctggctcctggctttgataagtaaggttgtgacagaaggaccggncagggcttgccttggggacctgggttgggacactgacatnaggggagactagcctggaaaga

SEQ ID NO: 42219 - DNA, 327 bp, Homo sapiens
  misc_feature (1)...(327): n = a,t,c or g
gagggaatgaatgggcgctgggaacacgcccgcgagggggggacgcgccggccgtagcgaggtccttagcgtgtgagtggccggggtcgggtcgcttccccgcagcatggaggacgatgcaccagtgatctacgggctggagttccaggcacgtgccttaacacctcaaactgcagaaacagatgccattcggtttttggttgggacgcagtctcttaaatatgataatcagatccatatcatagattttgacgatgaaaacaacattataaataaaaatgtcctcctccatcaagcggnngaaatctggcatattagcgctagccc

SEQ ID NO: 42220 - DNA, 303 bp, Homo sapiens
gtggttttattatagtgtaggatttgaatgggccatgtgttctcagacctcagattaaaatgagaaaactgaggccagtggggagcgtgacttcacatgggtacacttgtgctagagacagaaccaggattcaggacttctggctcctggtcctgggttcatggcccaatgtagtctttctcagtcttcagggggaggaagggcaggacccagtgttctgagtcaccctgaatgtgagcactatttacttcgtgaacttcttggcttagtgcctctgccaggtggccataacctctggccttg

SEQ ID NO: 42221 - DNA, 327 bp, Homo sapiens
gcaaaggactagtctgactaatctatgatgttatatggtttaccttccctcccaaaagtaaccagccatactggcaaatgtcctctttatccattcactcagcatttattgtgcaccaagagcaccagcactacatactgcatgttatgtgtgtgtatctatatagtactataatacaggaattgtccctgtcctgatgaagcttacaatttagtgggaaagtcacaatagacaaaggatatacaaaaatataattacaagtagtgcaaagtgctataatttaaaaggggaaaaaaagaatgtactggtagagagcagaggaaaaac

SEQ ID NO: 42222 - DNA, 347 bp, Homo sapiens
  misc_feature (1)...(347): n = a,t,c or g
gagatttttaaaattgccagttattccttgttgccttcatactaatcacagccccgtatttaaggataaaaatggagattagagcccttttggaggaaaacgaccagaataattttcataaaaagagtatctaaatgttgcagaagagagaaactcaggtgacagaaattaactgttatcatcaaatattgcaatattttcatgtggaagagatagaataggactaatacatagacatttcgggaaaatttcatctgagcgnnnnnnnnnnnnnnnnnnnnnnnnnnnnnnnnnnnnnnnnnnnnnnnnnnnnnnnnnnnnnnnnnnnnnnnnnnnnnnnnnnnnnn

SEQ ID NO: 42223 - DNA, 345 bp, Homo sapiens
ggtgaaatgatattacaaaatgtttatagcttaaaagaaaatccatatatttaagaatatattattctactttataatttactctgatttttctgaaagtgctatggaaaacaaattagaaataacgtcatgtgaaagaactttaggctattattcacactttctgcattcagatctcaattacagcttttgctagccaagtgatcttggatatgttatctaacttctctattcttcagtcatttcatcagaaaaatagtgataattaatagcttctatattatgagcttgttgtgatgtcaaatatttaatacagataaagttcctaaatattattaagtccta

SEQ ID NO: 42224 - DNA, 345 bp, Homo sapiens
gggaaagtgaggagttgggggttgttggggttcatcttagaaccgcctcccagcggtgcccccatcctgccctgggttcaggcctctgaggagaaaccaaagcctgggctaccccaactcccacagctgggtcccttgaccctgggttggatttgaggctcagttaatctcagctcacgctcagctggcacaagccaggcgcaagcaagtgctgaaggcacagccttgctggggcgcagggagttcaggacttggtcacagtcagccctgaacagcagagctgggatctgaacaggcgctggagcccacacttgctctgagagagaatttatgtcttcacaatcc

SEQ ID NO: 42225 - DNA, 340 bp, Homo sapiens
  misc_feature (1)...(340): n = a,t,c or g
ggagagctagcaccatgagcttaataccctgctttaaatcttgattaaattccctaaatagccaacnnnnnnnnnnnnnnnnnnnnnnnnnnnnnnnnnnnnnnnnnnnnnnnnnnnnnnnnnnnnnnnnnnnnnnnnnnnnnnnnnnnnnnnnnnnnnnnnnnnnnnnnnnnnnnnnnnnnnnnnnnnnnnnnnnnnnnnnnnnnnnnnnnnnnnnnnnnnnnnnnnnnnnnnnnnnnnnnnnnnnnnnnnnnnnnnnnnnnnnnnnnnnnnnnnnnnnnnnnnnnnnnnnnnnnnnnnnnnnnnnnnnnnnnnnnnnnnnnnnnnnnnnnnnnnnnnn

SEQ ID NO: 42226 - DNA, 354 bp, Homo sapiens
ggtcttccaaagaggaaatccagcaactacttgacaaacataaggaatactttcagggcctggaatctcatatgatcttgactgaaacactcttcagaaagataatcagctttgcagtccaaaaggaaacccagttccatacagagctgatggctcaggcttctgctgtactgaaacgggctcacaagaggggtgtggagctggagtacattctagagacgtggtcccatctggatgaggaccagcaggagctcagcagacagctggaggtggtggaaagcagcatcccaagcgtgggtctggtggaggagaacgaggacaggcttattgaccgcataacactctaccagcatt

SEQ ID NO: 42227 - DNA, 336 bp, Homo sapiens
gatttaatggtaaatataacagtagcattcagtgaatatttactatgctgctggcattgtgcatattttatttcatggctcattttatttcatgcacgtgagccacatgccactattacttctatttcacagaggagggaactgaggcacagagattaagtcctgagcccaagaacgcagaagaaaggcgtgtgctaggcaggactccactccaggcattccacacatacggggacatcagtcagagtgacagacatcttcatctcttcctaaaccaaatgaagaggtacctggcccaggaagagtggcttcttccataacatgaaacccatagtg

SEQ ID NO: 42228 - DNA, 351 bp, Homo sapiens
  misc_feature (1)...(351): n = a,t,c or g
gctctaatgatctgaggaatatattaagggattccagagtcaaaggctgatcatggagggcattgatgagggaagacttcaggtaggaggtgcattctagcaggaactgaagagaatgaagtccagttggtagaaacggagggggtggcttggataaatcttatatgtaattaatcagaagtacctggcaggtggctggagaccagaagaaaggaacactggaagaatgaaaacggttgtgatgcactgcagtgtgaaaatatgcccttgagccttaaagaaaggggcttnnnnnnnnnnnnnnnnnnnnnnnnnnnnnnnnnnnnnnnacagatcacgaggtcaagagat

SEQ ID NO: 42229 - DNA, 336 bp, Homo sapiens
gcggaagcgaggcagtttggcccagactcactggacctgcaaatgggagtcagccagctggctctgagtgggcctgccctctgcacctcctgccaagtgagcgtgaacagtggctggctggtgggctggcccactttccctactccctgggagccctgctgggctgcttggcaactgagcgtggaggcccctccagagcacagggctgatggcacaacagagacccaactgctaaagtgcctgggatctgcagtttccggtgcaaaccccaggttaggtggtcagtttctcctatgcaaagattatccatggatatccaggatatccagagatatc

SEQ ID NO: 42230 - DNA, 350 bp, Homo sapiens
  misc_feature (1)...(350): n = a,t,c or g
gggagtttacactagtcaaaatcaaaaggacttttttgtgtttattcagaccttttattttgctgacattccaaacttacattagaaagtnnnnnnnnnnnnnnnnnnnnnnnnnnnnnnnnnnnnnnnnnnnnnnnnnnnnnnnnnnnnnnnnnnnnnnnnnnnnnnnnnnnnnnnnnnnnnnnnnnnnnnnnnnnnnnnnnnnnnnnnnnnnnnnnnnnnnnnnnnnnnnnnnnnnnnnnnnnnnnnnnnnnnnnnnnnnnnnnnnnnnnnnnnnnnnnnnnnnnnnnnnnnnnnnnnnnnnnnnnnnnnnnnnnnnnnnnnnnnnnnnnnnnnnnnnnnnnnnnnnn

SEQ ID NO: 42231 - DNA, 335 bp, Homo sapiens
  misc_feature (1)...(335): n = a,t,c or g
nnnnnnnnnnnnnnnnnnnnnnnnnnnnnnnnnnnnnnnnnnnnnnnnnnnnnnnnnnnnnnnnnnnnnnnnnnnnnnnnnnnnnnnnnnnnnnnnnnnnnnnnnnnnnnnnnnnnnnnnnnnnnnnnnnnnnnnnnnnnnnnnnnactgaggtctggtcattgtcgccatcgctccgtgtgagcgcagacaccttctccccctgatgttccgtgccgaggactagtattgatgcataacctcttttctttattctagtttgcaaaatgttttttcaaaaaagctgctcagcggggacaaatacaggttctcgtaagtattattcgtcagtgaaa

SEQ ID NO: 42232 - DNA, 334 bp, Homo sapiens
  misc_feature (1)...(334): n = a,t,c or g
gatttaatgtacagtcagtcctccttcacagttttcaggaacctattgctgatattaagtgaggactgactatatgtgtggatagtatattctctctgtctctctgtcttctaatctaaaatccattaactggcaaatgccagcaaagagaaaagcagatcatggctattttgacattcttgtttcaacctaatcatttaaaaaaaatctaagtgtcattactaaggacttaaagatatttaagaagtcttgaaattannnnnnnnnnnnnnnnnnnnnnnnnnnnnnnnnnnnnnnnnnnnnnnnnnnnnnnnnnnnnnnnnnnnnnnnccaa

SEQ ID NO: 42233 - DNA, 350 bp, Homo sapiens
  misc_feature (1)...(350): n = a,t,c or g
gacccctgattttattgaatcatagaattcaagagttctgactaagacttctctggagccttagagctctggcacatcttctagaatggcannnnnnnnnnnnnnnnnnnnnnnnnnnnnnnnnnnnnnnnnnnnnnnnnnnnnnnnnnnnnnnnnnnnttgaggccaggcgcaatggcccacacccagaatcccaaagtgctgggattataggcgggaaccatcacgcctgccctgccaaagtatttttgtggaagaccaagactgaaaactgtgtaannnnnnnnnnnnnnnnnnnnnnnnnnnnnnnnnnnnnnnnnnnnnnnnnnnnnnnnnnnnnnnnnnnnnnn

SEQ ID NO: 42234 - DNA, 349 bp, Homo sapiens
  misc_feature (1)...(349): n = a,t,c or g
gcatctatgaaaaaacccacagctaatatatatatatatgtgtttgtgtgtgtgtcacacacacannnnnnnnnnnnnnnnnnnnnnnnnnnnnnnnnnnnnnnnnnnnnnnnnnnnnnnnnnnnnnnnnnnnnnnnnnnnnnnnnnnnnnnnnnnnnnnnnnnnnnnnnnnnnnnnnnnnnnnnnnnnnnnnnnnnnnnnnnnnnnnnnnnnnnnnnnnnnnnnnnnnnnnnnnnnnnnnnnnnnnnnnnnnnnnnnnnnnnnnnnnnnnnnnnnnnnnnnnnnnnnnnnnnnnnnnnnnnnnnnnnnnnnnnnnnnnnnnnnnnnnnnnnnnnnnnnnnnnnnnnnn

SEQ ID NO: 42235 - DNA, 329 bp, Homo sapiens
  misc_feature (1)...(329): n = a,t,c or g
gggtgggcagacatgcaagaaaaaacaaacctgtaatgttcttatatgaaataataaacttcatggtttgtctacattaatattgtactcnnnnnnnnnnnnnnnnnnnnnnnnnnnnnnnnnnnnnnnnnnnnnnnnnnnnnnnnnnnnnnnnnnnnnnnnnnnnnnnnnnnnnnnnnnnnnnnnnnnnnnnnnnnnnnnnnnnnnnnnnnnnnnnnnnnnnnnnnnnnnnnnnnnnnnnnnnnnnnnnnnnnnnnnnnnnnnnnnnnnnnnnnnnnnnnnnnnnnnnnnnnnnnnnnnnnnnnnnnnnnnnnnnnnnnnnnnnnnnn

SEQ ID NO: 42236 - DNA, 337 bp, Homo sapiens
  misc_feature (1)...(337): n = a,t,c or g
gaagaatttgattgcagtgaagttcaaggaaaaaggagtttagggaagctggttagtgtatggaaatatcatctcttaggactaggtacaagagattccagagtatagaatgtaaaggagcataacaacaccaaatggcnnnnnnnnnnnnnnnnnnnnnnnnnnnnnnnnnnnnnnnnnnnnnnnnnnnnnnnnnnnnnnnnnnnnnnnnnnnnnnnnnnnnnnnnnnnnnnnnnnnnnnnnnnnnnnnnnnnnnnnnnnnnnnnnnnnnnnnnnnnnnnnnnnnnnnnnnnnnnnnnnnnnnnggctaatttttacattttgtgtagagatgggg

SEQ ID NO: 42237 - DNA, 327 bp, Homo sapiens
  misc_feature (1)...(327): n = a,t,c or g
ggaatctgttgcccaggtcctgcaaaggagccatgtgccatggcatataagtcagtgtacactggtgccatttgttgtcagactataggtgtggaggtgaaattacaggttcaacagtaattgggacagaaactccaggtaaatggggagtggagaagactgcagtaaattagatggaatgactcttctaaaagttcatctacaaattttccagtgaatatggttgtgtaggatcagtgcatacagaaattctcaggatcttctgtttactatcgctganatcattatcagaaaatantctggccgggcatggngtaatcctaacac

SEQ ID NO: 42238 - DNA, 326 bp, Homo sapiens
gctggaactccaaaaagagctatgaattaataaatttctattataaaactgataaattccacagtaagacaattaaagtggcaatattaatagtataccctttattgaatacctatgtgcctggccctttgctcatttcatccttataacctgcaaggtaagttaatctttttactgataaagaactggatggcaaaggctaagcaacttgccaagcaccacagaatttggtaaatgctagagatttgaagtccagtgtgactcatttcaattctgtttttatttgctaatatagttaaacatttgagtatattctcatgtttcca

SEQ ID NO: 42239 - DNA, 335 bp, Homo sapiens
  misc_feature (1)...(335): n = a,t,c or g
gcggcacgagcgtgtgtgtgttatctatttctatacagctttatcatgtgtaggtttgtgtatctgccactgcagtcaacatacannnnnnnnnnnnnnnnnnnnnnnnnnnnnnnnnnnnnnnnnnnnnnnnnnnnnnnnnnnnnnnnnnnnnnnnnnnnnnnnnnnnnnnnnnnnnnnnnnnnnnnnnnnnnnnnnnnnnnnnnnnnnnnnnnnnnnnnnnnnnnnnnnnnnnnnnnnnnnnnnnnnnnnnnnnnnnnnnnnnnnnnnnnnnnnnnnnnnnnnnnnnnnnnnnnnnnnnnnnnnnnnnnnnnnnnnnnnnnnnnnnnnnnnag

SEQ ID NO: 42240 - DNA, 302 bp, Homo sapiens
  misc_feature (1)...(302): n = a,t,c or g
gaaatactttgttatatgttttgcgaatattttctcccattctctggtgtatcttaacagtgtcttttgaagagcagaagttgttattttttttttctctgaaacaggtcttgtgctgtcgcccaagcttgagtgcagtggcnnnnnnnnnnnnnnnnnnnnnnnnnnnnnnnnnnnnnnnnnnnnnnnnnnnnnnnnnnnnnnnnnnnnnnnnnnnnnnnnnnnnnnnnnnnnnnnnnnnnnnnnnnnnnnnnnnnnnnnnnnnnnnnnnnnnnnnnnnnnnnnnnnnnnnnnnnnnnnnn

SEQ ID NO: 42241 - DNA, 324 bp, Homo sapiens
ggacatatactgaataatagtctgtatattttaagcccatcagttgtgttgaaaaaagctccagccccactctaggatagagagtgctgcagatacgatgagaaaaattagatttctgttcagactagctacagagacaaagatttatgtttatattatacaaacataatcaccacactaaaaagataatttcagaaattaaacatctctttttatcctgtcatcctctccaaacctcatcatttttaaaaaaagtgaatacgtttttatttgcatgggtatcagttgacagtgaatattcagcaactcagaattttgcaaatg

SEQ ID NO: 42242 - DNA, 330 bp, Homo sapiens
  misc_feature (1)...(330): n = a,t,c or g
gggctgtagtaggggaggggacnnnnnnnnnnnnnnnnnnnnnnnnnnnnnnnnnnnnnnnnnnnnnnnnnnnnnnncttaaggctgattgtaccaacgattgcagctgtaaatatgctgaaaaccattaagttgcattctttaaatggataaattatatggtatatgnnnnnnnnnnnnnnnnnnnnnnnnnnnnnnggagtctcgnnnnnnnnnnnnnnnnnnnnnnnnnnnnnnnnnnnnnnnnnnnnncaaacaaaaagaaattgcataggaatatgtagttttgtttttgtggggntttctgntttgttttgnttttttgagaca

SEQ ID NO: 42243 - DNA, 331 bp, Homo sapiens
  misc_feature (1)...(331): n = a,t,c or g
gagggaattctagagaacaatccctactgacttcacacaacttaagaaatgcaggtnnnnnnnnnnnnnnnnnnnnnnnnnnnnnnnnnnnnnnnnnnnnnnnnnnnnnnnnnnnnnnnnnnnnnnnnnnnnnnnnnnnnnnnnnnnnnnnnnnnnnnnnnnnnnnnnnnnnnnnnggnnnnnnnnnnnnnnnnnnnnnnnnnnnnnnnnnnnnnnnnagaaagatagagnnnnnnnnnnnnnnnnnnnnnnnnnnnnnnnnnnnnnnnnnnnnnnnnnnnnnnnnnnnnnnnnnnnnnnnnnnnnnnnnnnnnnnnnnnncagagcaaga

SEQ ID NO: 42244 - DNA, 331 bp, Homo sapiens
  misc_feature (1)...(331): n = a,t,c or g
gataggcacataccacctnnnnnnnnnnnnnnnnnnnnnnnnnnnnnnnnnnnnnnnnnnnnnnnnnnnnnnnnnnnnnnnnnnnnnnnnnnnnnnnnnnnnnnnnnnnnnnnnnnnnnnnnnnnnnnnnnnnnnnnnnnnnnnnnnnnnnnnnncctgaccctgcctcttttgcatttgtaaaagcaaacctagatgtataatttcacttttgaaaattttaatgtgtatctgtaaaagataaggatgctgtagcaccaattcctttgtcatacctttaaaaggttaacagtgagtcttcctgtatccagtaagaattcacattgccttg

SEQ ID NO: 42245 - DNA, 343 bp, Homo sapiens
ggagagctagcaccatgagcttctaccctgggggtaagatatgtctcggtctctttcttcatctctttttctcctcattcttcattcctaaccccctttaaactactgtaatataactaaagtttctttgaaaatgtttgtcctatttattaaaagtatttatgttctctagaataacttgaatgtaaacaaaagtatatcaactagggaaaatatacgcaatatgagacaaatgttactattatgaaaaaacagcaagaagaaaaagattaacattaatatacataagcaggcaaaaacagacagttaatcaattttttaaaaagtaatgcccaagggtcag

SEQ ID NO: 42246 - DNA, 343 bp, Homo sapiens
  misc_feature (1)...(343): n = a,t,c or g
gcaagtagagaaatctggcaataaaaggcaaatgtaagcatgctttctttaagacgcatcataaatggttttctttaagtgaatggaagagtttgacagagatacacctttgtaagaaaacattaagaannnnnnnnnnnnnnnnnnnnnnnnnnnnnnnnnnnnnnnnnnnnnnnnnnnnnnnnnnnnnnnnnnnnnnnnnnnnnnnnnnnnnnnnnnnnnnnnnnnnnnnnnnnnnnnnnnnnnnnnnnnnnnnnnnnnnnnnnnnnnnnnnnnnnnnnnnnnnnnnnnnnnnnnnnnnnnnnnnnnnnnnnnnnnnnnnnnnnnnnnnnnnnnnnnnnnn

SEQ ID NO: 42247 - DNA, 344 bp, Homo sapiens
gcggcacgaggggaaagccaagctgagaataaacccagagacaaagaaccctcagactcaggcaggacatggcaggatgttctggcacagcagactggagactgaggcagggcctgtgagtggacagagcacccctggctgggaagaagaagatggggtaggaggaggtcaggttccaaggatgcaggtctggaaaatgatatcggaggccctggagtttgtgagcttggctctagtcccaagaagggtgagggagaataagggtaagggagtattctaggcaaggaactaaggaaggaatccccttcttagagcagaggcacaagttagagcaggcccagcat

SEQ ID NO: 42248 - DNA, 342 bp, Homo sapiens
  misc_feature (1)...(342): n = a,t,c or g
gnnnnnnnnnnnnnnnnnnnnnnnnnnnnnnnnnnnnnnnnnnnnnnnnnnnagcagtggactgnnnnnnnnnnnnnnnnnnnnnnnnnnnnnnnnnnnnnnnnnnnnnnnnnnnnnnnnnnnnnnnnnntctggggctgtaggcaggtaccaccttggctaagttttaaattgttttggaggcaannnnnnnnnnnnnnnnnnnnnnnnnnnnnnnnnnnnnnnnnnnnnnnnnnnnnnnnnnnnnnnnnnnnnnnnnnnnnnnnnnnnnnnnnnnnnnnnnnnnnnntgggcttgntnttattttattattttttgaaacggaattttgntgtgntgccc

SEQ ID NO: 42249 - DNA, 333 bp, Homo sapiens
  misc_feature (1)...(333): n = a,t,c or g
ggctattcagaatagagttctcttaatttcagtttattgctagtatatagatatatagttgattttaatcttgtatccgattacttccttaaactttgttatagtagttttactgtgaaattcttaggttaagaataaggatttcataatagaactacaaataggatcatttcatatgcaaataaggacaattttatttcttctccaatctcattgtctttaattttttttccttatttactgcctagaactcctagtacagcgttgactagaagtggtgagaaagctnnnnnnnnnnnnnnnnnnnnnnnnnnnnnnnnnnnnnnnnnnnng

SEQ ID NO: 42250 - DNA, 336 bp, Homo sapiens
ggtggtgttaatgatgtgacctcgctgatggggctgtggggatgaactgcatgagctgataaatgtaaagtgctcccggagtgcctggcacagcctaagctctcagcaaatgtttgtggagtgtgccagtgaggggatggcagggaatttggggccgctccagctctgcccacggtgcctgtgcctgaggtcagccccagagcaggaagcacccgttgttccccaactctgccctctccatccccacacacagagctttgaatgaacaggatccagaatgttccgacaacagtgcccccctcccctttcctactgacaaagccatctttgttactc

SEQ ID NO: 42251 - DNA, 328 bp, Homo sapiens
gggaggatgtgctgctcatcatggatgtgtacaaactggcactgagcttccagttgtgccgcctggagcagctgtgccgccagtacatcgaggcctccgtggacctgcagaacgtgctggttgtgtgcgagagtgccgcccggctgcagctgagccaactcaaggagcactgcctgaacttcgtggtaaaggagtcccacttcaaccaggtgatcatgatgaaggagttcgagcgcctctcctctccactgatagtggagattgtgcggcggaagcagcagccgccccctcgcactcccttggaccagccagtggacattggcacatc

SEQ ID NO: 42252 - DNA, 335 bp, Homo sapiens
  misc_feature (1)...(335): n = a,t,c or g
gcttaaaattatgcatgtggctcgcatgatatttttgttgaacaatgctgtttgctgaagcagggctggcagcccttgccagaggtttgaatctccattgtcttggtggctgcagatggatggatgtgggggtaccagcctggtgtgttgggaagatttttctttgtgaaggggaacttgccctttactgttggggatagtttcttctcagcctatccagggacacacataccagcattttggggttgtgaaacttttgtgtggggaacttcccttttttttttccacatganccantaagataaaactgacctaanggcattctcggngcaact

SEQ ID NO: 42253 - DNA, 327 bp, Homo sapiens
gtttttttttagagctatcaggaaagatccttttgagaggggattgttgactgttaaaatgacataaggcagagctgctaatgaccttctctgccatgacgtaaggtcctaattgaaaaaagccaacacaagaaagtagagaaaaagagaaggtcctgatgacatcacttaattccttccatccagacttgccctgagccagttgtagctttggacttcccacttacaaaaggtaataagttccaggtttgcttatactggtttgagttgcatttctacacttgcagccaaggagtccatgactacacacatcaagaatctatcttc

SEQ ID NO: 42254 - DNA, 324 bp, Homo sapiens
  misc_feature (1)...(324): n = a,t,c or g
ggtcattttgctggtgtgtgtaaaatatataaaatatcccttaataaggttgtttaaaaattaataccaaatgccttttacatatccttgaagatgatcatatatcatttcactttggtctatttataaggtgaattgttttgatagtataagatcctcatgttctnnnnnnnnnnnnnnnnnnnnnnnnnnnnnnnnnnnnnnnnnnnnnnnnnnnnnnnnnnnnnnnnnnnnnnnnnnaaattattccttgaaagtttgttagaattctccctctgaagctatctcatcctgattttgcttatttgtatatttatttattgg

SEQ ID NO: 42255 - DNA, 336 bp, Homo sapiens
  misc_feature (1)...(336): n = a,t,c or g
gaactggccgggtgcagtggctcctgnnnnnnnnnnnnnnnnnnnnnnnnnnnnnnnnnnnnnnnnnnnnnnnnnnnnnnnnnnnnnnnnnnnnnnnnnnnnnnnnnnnnnnnnnnnnnnnnnnnnnnnnnnnnnnnnnnnnnnnnnnnnnnnnnnnnnnnnnnnnnnnnnnnnnnnnnnnnnnnnnnnnnnnnnnnnnnnnnnnnnnnnnnnnnnnnnnnnnnnnnnnnnnnnnnnnnnnnnnnnnnnnnnnnnnnnnnnnnnnnnnnnnnnnnnnnnnnnnnnngtctcaaaaaaaaaangaagaaccaaaactgattntgaaactgaaaaaag

SEQ ID NO: 42256 - DNA, 318 bp, Homo sapiens
gtagcccattagtctatttgccattcctttttactatcttagaggaattcataatcatagccatgcacctcctcccccagctcctcttccatatctcagagaatggcaccacaatgtattatgcaaatcagaaatcttggtgtgatgcttaatttactccctctcttcatgtctgaaccaccttgagtgcaaagaattttatctccaaagtgcttcttactacttccctccatctttcccaacaagaactgaaagcagtctgccccttcttatgtgaataattaacacgaagccaaaactgtgaatgtggaattagtt

SEQ ID NO: 42257 - DNA, 321 bp, Homo sapiens
  misc_feature (1)...(321): n = a,t,c or g
gggaaagcatatcctttttaatactattactatgttaagaaatttaaatgtaaactaaactctttaattagtgatagaattgagggcatgcttttttgtttgggggttattatttattaacccaatgttgatagaattagatgtttaaatacatttgtcaaaaatggaagggtgaaaaaattttaagggcgaattctaaaagaagaaaatggggtatacaatttccaaactactacaataggggtcaacaaactatttctttttttctttttctttntttttttttggnnatanggccnggccctgncncccaggtnggac

SEQ ID NO: 42258 - DNA, 325 bp, Homo sapiens
  misc_feature (1)...(325): n = a,t,c or g
ggctgcttggagaaaatgaaggatggagggcagggagtgggtaggggcgtctggcccgggcaaggccgctgccttcctggagcaggacagtcagggagctcactgctttctggaggaggaatgtaggtgagaccgggacaggaaggggtatgggtgcccagaaccggctgatgngaangagtcccacttanggatccaggaacagtgggaatagcactgcngggggccaanaggggcncttgctccatgggcccaagcagtctagacaccttgggggatgagggagcctcccctggtgtcaggagagcctgggggtcccccacac

SEQ ID NO: 42259 - DNA, 327 bp, Homo sapiens
ggcggacctaaggagtcgcagttgtgaacaggttagagttacttgttattggtaaatagccactatggagactaaggaccagaagaaacacagaaagaaaaacggtggacccaaagctgcaaagaaaaagaagtggcatctgcaggatctccagctaggagactaagaaaatgcccagaagagaaatgccaatgcttttgcagttcagtctgctgtgtggatgtctcgatcctttcacaggactctggatttgaagacacaaaagcatcatattccagtggttgatggaactccactagagccgcaccaataccggtagtggtgacg

SEQ ID NO: 42260 - DNA, 331 bp, Homo sapiens
gcggcacgagattgtatattctgatattctcactccacacatttgagcttttgttctcagcatcatttaaaatcattcaaataaaagtgatcattttcaatggctggatcatattctgttctggagtgtgacataattcggtgtatccacaattaaaggcttaggttgtttctgattttttattgtcataattcacatattttgaatatctatgcacaggtagttttatttccatttctactatgatctttcttattttgcagatgagggatcagagccagggaacctatttgacaaaagaggaaactgaggctcagatctgcccatagct

SEQ ID NO: 42261 - DNA, 345 bp, Homo sapiens
  misc_feature (1)...(345): n = a,t,c or g
gttttttttttgaagaaaaaaaaggagggaagagatgggtcttttcctaaatcacacttacagactgcccctcccagacccagggagattccagaagtgagtgctcaaagcaagcagagacactatccctgtaattcaagaaaaatagcaaaaacagtatctgtgtgcatgcatgtatgtgtgcacacttatcagggctttaaagacaggctactagagacaggactgcagacattcacacagccacctctgaaagggtgaagaatgtgcaaatttactgcagtggggccaggcacagtgattcacacctcnnnnnnnnnnnnnnnnnnnnnnnnnnnnnnnnnn

SEQ ID NO: 42262 - DNA, 344 bp, Homo sapiens
ggctcatctgggcatctgagcctccttcgaagtttcctgtcacaactgtcctcttgacagcatggatgaggaggaagacaatctgtctctgctgaccgcactgctggaagaaaatgagtcagccttggattgtaattcagaagaaaataacttcttgacgcgggaaaatggcgagcccgacgcatttgatgagctctttgatgccgacggcgacggtgaatcttatacagaagaggctgatgatggagaaacaggagagacaagagacgaaaaggaaaatctggccactctctttggagatatggaggacttaacagatgaagaagaagttcccgcatcacagc

SEQ ID NO: 42263 - DNA, 336 bp, Homo sapiens
gttacgaactgctggggtcggggtggatctgcgccattgctgggtgtgggaatgtcgatgccttgtacatgattgcttatttgaactgattctgctgttgccctgcttgtcagctacagtcagtccctcttgggctggcgggactgggagggaggggggactgggattaagaaagaagggatctaacagagacagtctggagctcctagaactttgggggctttgggggtcaaacttgcttgcttccctctggggttattttcctcttaatctactctcccttcattgggagtcactttagaaagctgcttttggcccgccataatatatcagctt

SEQ ID NO: 42264 - DNA, 336 bp, Homo sapiens
  misc_feature (1)...(336): n = a,t,c or g
gaactgggcaaaaggcataaaactgaaatctttgcctgcttatgcttgcatatctgaaactaatttttctcccaaaaataaattagaaagatatgacatgaccagctcttatctcttgatacttctatgcaaaatgcaaagagaagaacagagaaacgaacataaaattgttagctaaaaggtgaacttagcttataattctctttttcaaaatcacctattcaagaaatatttactaggcaagccactatgtgccaaccatggtgttctgactgactggacataatcatgatttgagatatctgaaaatccanaaaacatcattattttgaaatt

SEQ ID NO: 42265 - DNA, 333 bp, Homo sapiens
  misc_feature (1)...(333): n = a,t,c or g
gnnnnnnnnnnnnnnnnnnnnnnnnnnnnnnnnnnnnnnnnngcgagataattacccagtttttggtgaatcagtgagtgatggcaattttagtggtggtgagttaagtcaaggaataaatgtttacaacttgaacattgtcagaagcacctcctacctccattcagttccaacacaataataaagatggtaaactcaccacttttggactatgctgtttattttcatgcatttgtatgattatcatatgctttacagacttttatttnacaatnattncattgnaanatacaatatattcattcctttcagcctncttattcagntcacggc

SEQ ID NO: 42266 - DNA, 330 bp, Homo sapiens
gctggaagagctaggacacctctggctgtctggtcagagtttcttttctaaaagatgctttaaaattgccccacaattataagctgaaagggcaaaaatgaagcatcactctggaaaaactggataatccagtacaattagaattctggtcctgataatgggtgcgttttgcttccgtgcttgcacctatttttatgagtctggcctgtctgtgcctaatggtcaggtcagggctactcagtaaaaccaaacatccctgccctccacacactaaaacatactctcggggagtggtaagaacaaaatatatccaagatgagggtgagtctt

SEQ ID NO: 42267 - DNA, 330 bp, Homo sapiens
  misc_feature (1)...(330): n = a,t,c or g
gcgctctgcaggggcgatacgcagctcctgaattggaggtaagttcatttccttttcctgtcctgcttcatctcagaagatccatttctcaggagggccttttgtgtttgtgtctttatcagtctgcattccgtgatcctgtttttctgctgaggaaagatttttgtatagaaaaataaannnnnnnnnnnnnnnnnnnnnnnnnnnnnnnnnnnnnnnnnnnnnnnnnnnnnnnnnnnnnnnnnnnnnnnnnnnnnnnnnnnnnnnnnnnnnnnnnnnnnnnnnnnnnnnnnnnnnnnnnnnnnnnnnnnnnnnnnnnnnnnnnnnnnn

SEQ ID NO: 42268 - DNA, 331 bp, Homo sapiens
ggtaaactaatacataataacatgcttacttgtaagcataatggaataaatgagagaaaaatcagagtaaatgaccaagatgatcatcatcaagtagctcttattaagaaccattaaatgcctggctcaggtttccacgcacaaggtcctttaacaaactcagtttatatcatatgctcttgaccagagaagcttgactcactgcagttgtttaaaccctaaaacccagacatttccaagccaggcccctccacccccaacactggactcctactgcatagagcttttctgtttacatttgctactatagagatttagtttgtttccgaag

SEQ ID NO: 42269 - DNA, 342 bp, Homo sapiens
gcaatgctttgacaaataagggcttgccctgtcccatatggatttgtcacattggatagaaaggagtcaagcaaacagatgattaggacacatgctaaagattaaagagaccacaactcatggcccatgcttgagattttgaatcttacaattgcacagtaaataaaaggtttccacatagggttaccccttaatagctgtaggggagcactgagagtctgacaggcctgggtttgaaacatagtgcttctacttgttgaatgatgtcggacatgttactgaacttccaagaatcatatttttccttagcatgttatacatttgatcttacagcatcatctg

SEQ ID NO: 42270 - DNA, 326 bp, Homo sapiens
gccgctacagcatgttctctgaggacactaaccacgctggaccttgaactgggtacttgtggacacagctcttctccaggctgtatcccatgagcctcagcatcctggcacccggcccctgctggttcagggttggcccctgcccggctgcggaatgaaccacatcttgctctgctgacagacacaggcccggctccaggctcctttagcgcccagttgggtggatgcctggtggcagctgcggtccacccaggagccccgaggccttctctgaaggacattgcggacagccacggccaggccagagggagtgacagaggcagccc

SEQ ID NO: 42271 - DNA, 325 bp, Homo sapiens
gcagacaaagcgaaagccctcaatttctcactcctctctttagttagccttttcttcccccactgccctttccaccaattaatcaacaagccaataatcagcttatcatctgaatgcctatcaccatttccccaagcctggaaaacttggaaaagaacttttatttctctgtctagcttaagctcttttatcctttacaaccccacagttctcaccttagattagcacatgtcatttcctctgtgggccatttagataatgtccaaatcagaatttatcccttgaggatcttccctttggttgtccccagccatttcctaagggg

SEQ ID NO: 42272 - DNA, 326 bp, Homo sapiens
  misc_feature (1)...(326): n = a,t,c or g
gaaagaagaagcatgtcgaattttagtggacaatctgtgtgatatggagatggtcaacaaagtgggccaaacagcctttgatgtagcagatgaagacattttaggatatttagaagagttgcaaaagaaacaaaatctgctccatagtgaaaaacgggacaagaaatctccactaattgaatcaacagcaaatatggacaataatcagtcacagaagacctttaaaaacaaagagacgttgattattgaaccagagaaaaatgcatcccgtattgaatctctggaacaagaaaaggttgatgaagaagannaaggaaagaaggatg

SEQ ID NO: 42273 - DNA, 340 bp, Homo sapiens
gcggcacgagaactggatgccataaattgatgatgaaattttcaaagaaatttcctctaatatcttcatttctttactcttaattttgctacattagaatcctttacccttaaaaacaatgagccatgctataggactctcagccccacagtaacaataatgatgcaaggaaatacactggttatgcctcaaatttcatcatccaggtattatgagaaggttggaaaaagccctggttgcagaatactacccttttgaaatattagagaagctatgcagaaggcttatttgctttggtggctttctaatgtgcaacttggccaggctgaactgcatttcc

SEQ ID NO: 42274 - DNA, 342 bp, Homo sapiens
ggaaatgtgttttggtgtgcctgtataggacctcaaattgtattttatcatagaaatagtattaaatgcagatattattattatcaataataacttcttttgtatatgctttataatttcccaagcacttgctatgcatttgatgctcaaaaaactctgaggcagatagggcaggaattactgatttcattcattcagtgaatattcattgaatatcaggtactattctcaatgtttaggatatgttaaaggacaaaggtaagattctcctctccaatagggtttacattctagtgagagaagcaagacatgaacagtgataattaataagttctatagtat

SEQ ID NO: 42275 - DNA, 962 bp, Homo sapiens
  misc_feature (1)...(962): n = a,t,c or g
gctggacatgatactgaagaggccgtgtgttatcatggaagagcctttgacataagcagagaatcaaatcttagctcagcctcatgcagtttgcttattgctttgcctaacttctacttccatttccattagcaaaaaagaaagaaaaagccatttgttcctagtcacctcttcttctcctataaatgttggtatccctacagattctgaacgatgtccttttctcccttctcagattcttactcgatgatttctcctatcctgccacgacttcaattacctttatatgccagaaactctaaaatctgaatctcctgccaagatcaccttccatccaattactcaacctctctcatgtacttgaatactgccaagtcagaacccatcaactttnccttgtctcaaacctgcattttctgttccctatctcagcatcatccagtaggccatacaggccagaaatcttacagccattcctaaattcttcctgatcctccagatctagccaatagcagtagtanatancaacaacagtaatcaaatagctggagnantaataacagtaattataagagctaccatctattaagctattttactacatgccaatactggactgagctaannacctttacacattcaaccccattttaataactcaccaactncccaacggagggnnaaacccngaangattnataccnatctttacaaanattnaccaatnnccntcgnngnnannnnccccccnntggggnnnaaaancctncngnttnntnaancttaanaaanntcanttttaaanccccttttttnaanagggaccnttnttttttcanggggtttcncnatttttntnntnttanccttcttttttgtannatnggnnnncctttgtaaggaaangnnttnncnnccngcccccnnaaacccnccnnctntnaagggnnntnanaaacccc

SEQ ID NO: 42276 - DNA, 1003 bp, Homo sapiens
  misc_feature (1)...(1003): n = a,t,c or g
gcatatcttgggattaactgcttcagaacacctggagagcttctataaatatgactgtcagatactcacctacctggtaagtcagttcttgagggtgagtttggacccagggcactccaggtgatcctgagccctgtgacttggatatggccaccaagttggtcattgcaaagcagcatggtccacaccttgtgagggaatggaggcaatagggagcaataaaagcatgtaggggggatccctataccagcctggaatgccacctggaagaggtgacttctaagttgcaaactgaaggaccagcaaaacttgagcgagtaaagagcgaggagaaaagtgtgctagacagaagaaagnttttatatggtaaatttatattattttgctcctgcatcttagtcacccatctcttangacaccgtagatgtgtgaaagtgctttggaaaggtgtaaacccctctaangatggaaaggtatgactggnttatggattctggttgaggggaacttcagctggantgatngctganaanggtggaanatcctggatnggccnnggnacgcctcgtttnatggcccagnnaatggnnttttccaaggaangaaancttttnntagnannnacnggnnaaacctattnannccacnatnagncccaanangggncctaannntaaanttggaannatntanccattgnaaactggnnnggnnnnanctgnnaananctcnttnaataannntanggggnnnnattttnnccggntntnggacaaannnnngnnttttncnannnngggggccntnntcntggnntnntntnnctgnannnnnnnnnatccnnggaagacaagnngntnagnnnctnnnnnngngnnnnnnannncnntnntnttttttcccttnttnncttnnntcnnnatnnnnnnnnnnnntnttttcctctttcccccccccctctccntctccccccccnnccttccccctcccccccccccccccc

SEQ ID NO: 42277 - DNA, 325 bp, Homo sapiens
ggacgtattacctgccaatcatcgttcctggcactctacagaatgaattttaatttaaataggtctagtagacgttgccttcatattctgagctaccttaggctcagaaaaaaaaaatcacacaaagtcatatggtaagatgagtgtattggggttcctaaagattccttaatgggaacaatttatttcatttttggtgtaatgtttcataacatattccttggagcagaggtgctttaacagtgtgtgcagaattccttctcttccctcctccaagtttgttgaaattaaacttttttccagctcctagagatgcggtctggtc

SEQ ID NO: 42278 - DNA, 333 bp, Homo sapiens
gggccccttcccagtagacagtctccttccaccaccagccttggagattagactttattgaggaaagccagcaacttttcatccaacgcctcctgaggactgtattgctctagatgctggagttagtgatgaatgagacagtccttgcccttcaggagcttctgatccagtgaggaaatgcccttccttctctttctttcggtctttcatagacaactttcaggagacatgtctctctctatgtgtattactcagcattcagcctcccttgcttcatccgtggtacatgttgcttattctttccttgggaagatgcatgctctcttccagacc

SEQ ID NO: 42279 - DNA, 321 bp, Homo sapiens
  misc_feature (1)...(321): n = a,t,c or g
ggtgactcacgcctataatcccagctctttgtaatcaacgagaaatataggactggggctactnnnnnnnnnnnnnnnnnnnnnnnnnnnnnnnnnnnnnnnnnnnnnnnnnnnnnnnnnnnnnnnnnnnnnnnnnnnnnnnnnnnnnnnnnnnnnnnnnnnnnnnnnnnnnnnnnnnnnnnnnnnnnnnnnnnnnnnnnnnnnnnnnnnnnnnnnnnnnnnnnnnnnnnnnnnnnnnnnnnnnnnnnnnnnnnnnnnnnnnnnnnnnnnnnnnnnnnnnnnnnnnnnnnnnnnnnnnnnnnnnngtctcaaaacagaaac

SEQ ID NO: 42280 - DNA, 331 bp, Homo sapiens
gagtatacgtttttcaaaacaaatatttgtcattagatgtaagggcatagagtaccttgtggtaactgagttagttcaaccaggtatggtagtcagaagcttgtaagagcagcagcaacttcccatttactgagcacttataatggaatgctagactttaaaaatgttatgtcattgaaatcacacagccaccctgggagtgatatcttccaatttttaggatggtaaaaatgtccacctttgtgccctcagtcattctttaactgaaaactagctcaacctttgaggtctatgtcattaacaattatttcttaagggtttttttttggtg

SEQ ID NO: 42281 - DNA, 319 bp, Homo sapiens
gagtaagaattaatttgcacacagggcttctaaaaagtgggccacttcttattttgagaaaaacttcaaaattatgtaataaatttcactgagaaataaaatattgacataaataacaatagaacaatatcaagtttttggtaaaataaaaagttattcatgtgaaaaataaaataatagaacaatactaggtgctggggaggatgtggagcaaccagaagaattatacactgctagcaagaatgtagaatttgaaagtgtcaacctcagtcactttggagaacagtttgacaatttcttaacacgttaaacatacgtg

SEQ ID NO: 42282 - DNA, 318 bp, Homo sapiens
gattttttctcccttattcactgatatatattaagcacctggaacagtgcttggagcatgataaacactcagtatatatttatattggtcaaacaaatgaatgaaagtgtaggttctcacatcatttgctctcctaaactttctgcttgccatgggccttgaaactcttagagccaaataaaaatataagaaggggaaatgagaagatataagaatgataactcagtaccattgggcacccatgtgtttctgatatattaaaagagtctttgttaactggtccctttcatggtctgtattagtttcttattgctactg

SEQ ID NO: 42283 - DNA, 326 bp, Homo sapiens
gagagaggttaagaactcccccagagccacatggacagagctgggatcgaaccgaggctccaagtcccagtgttctttccagtacctcatgcatagaccagccttttcctcatcaggcagatcctgcagaactggcacctgggttgcactcagtggcctctctgacgccccgcctgtgtggacctctccaccccctgccttggcagcaggccttgggagctcagatggcttatgattagctgcttggtattttatagcgcgtgattggctgcttggtgtttgttttatagcttttggttggctgctttgtgttttatagtgtgtga

SEQ ID NO: 42284 - DNA, 326 bp, Homo sapiens
gcagagaatttgagtcaatccgttatgaaacagatcatttgggtagggtcagcccagggaagtgggattggactggtgaggaatagggtagagggagctattaagaacatttggttggtttcatgtctgtcattattaaactgatgtttaataggtacctacctaccctagcaggtgctacactaggcactaaaaagactgaacggaatgcatagaacttttactatctgcctttttcttgatcactacctttcttacagaggaatttcatacatggtgcttagaggatgacacataagaagactggctgcttttttatcagaggt

SEQ ID NO: 42285 - DNA, 326 bp, Homo sapiens
  misc_feature (1)...(326): n = a,t,c or g
gtgcacatttcacataaaagctcagaaatatagtagttttatcttatttttacagtaattatcaattattagaagaaaatatnnnnnnnnnnnnnnnnnnnnnnnnnnnnnnnnnnnnnnnnnnnnnnnnnnnnnnnnnnnnnnnnnnnnnnnnnnnnnnnnnnnnnnnnnnnnnnnnnnnnnnnnnnnnnnnnnnnnnnnnnnnnnnnnnnnnnnnnnnnnnnnnnnnnnnnnnnnnnnnnnnnnnnnnnnnnnnnnnnnnnnnnnnnnnnnnnnnnnnnnnnnnnnnnnnnnnnnnnnnnnnnnnnnnnnnnnnnnnnnnnnnn

SEQ ID NO: 42286 - DNA, 317 bp, Homo sapiens
gaaaggtggaaaaggagagaaagcgcttgcaatagatgggacaaatagaaatcaaaataatagatttcaacttaatatataaataatcacattatttttcagtggtttaagcaccgcaattaaaaagcagagactgtcaaattgtatttaagggggaaaaagcaagacacaaatataaactgcctgtcagaaacccacatgaaatttaaagaaataacctaaaagtatgtactctgctaatagtaaccaaaagaaagctggagtaactgtatgaacatagaacaaaatagattgtggaacacggagtattactgggg

SEQ ID NO: 42287 - DNA, 314 bp, Homo sapiens
  misc_feature (1)...(314): n = a,t,c or g
gatttgaaggagcgttgtgacagaagtcaggtgaccgagaattttatgcgatggcgtttcagccactcctcttgggttagcagttggagcttttttcttttcnnnnnnnnnnnnnnnnnnnnnnnnnnnnnnnnnnnnnnnnnnnnnnnnnnnnnnnnnnnnnnnnnnnnnnnnnnnnnnnnnnnnnnnnnnnnnnnnnnnnnnnnnnnnnnnnnnnnnnnnnnnnnnnnnnnnnnnnnnnnnnnnnnnnnnnnnnnnnnnnnnnnnnnnnnnnnnnnnnnnnnnnnagctggcctcaaactgttgacctcagg

SEQ ID NO: 42288 - DNA, 312 bp, Homo sapiens
gctagggacccactgttgattcctaagttgtgggtgggtgatatcagtggcctcagtgcctgcataaccctcacctgtttatgactgatctactgtaaccttcctcaggttgagagtgagctgctgtgagccagtgacaactactgctacaacttgctgttacttgaaattcgtgtgctatgttggtagcacaggagtaggcgggcgggggttttggtgtgggcactaggtaagtgggtggcaaccggctctttgggaccattggtgctgacctttgcctggtcacctgcctgtgcctaggccaagtgaatg

SEQ ID NO: 42289 - DNA, 353 bp, Homo sapiens
gccagaggcaaaactgtgtccctttagcacaggtacctgggttgctaagggggcagtgggctcagagtatgggtttgctttgcggttataattttccccattataaaaggaagatatgtgtagaaaatttagaccagagaatagctctgaagttgagggtcaagaatcagagaccttgtctccatgcctgtgtgttgggctttgacttggcaccacactgcttgttccctgcctaactcactgagtgctgctctgggctacagcgcatcctcatggggctcttggctgcctcctctctgcacagcctctgcttccttagatagcagtgtgaggactgtggagaaggatctttg

SEQ ID NO: 42290 - DNA, 343 bp, Homo sapiens
gcctgcagggcctcagagaagcatgggaaagcccttcaggtgttaggggaaggtgattttgagttgttccttcactttgttgaatgtctctgaaatccagttctggggcttggcaggaatgttgccgcttgcagtggctgccgttcagcttatctgggatgtgtcccaagatgctggagttgtctggggccatccagactggggctgggatttccacacccatggagccacgactaggactgggagtgacagaacgagtttgggggtgctgccagaggggcactctagattgttcttgggatagcacaggttcccagatacagttctaaccattgaggggcta

SEQ ID NO: 42291 - DNA, 346 bp, Homo sapiens
gggaggaggggcacttaggatgactagtggaagccccattgagaggggatttttgaataatgaacttcaaagtggttagggaataagccacttattccagacagaaggaataatcaatgcaaagttccttctgttgaaaaaaatgcttttataattttatttttcatcttctaaagcccttcagtctcctttggtcatcttttttttgtagttggttatgccttaacaacagtactttgaggatactagttacagtatttaaaaaataccgtcactatatgctgagttattttttcagtgttagcatttatgtttatcttgttctcattctcttcatccccccttt

SEQ ID NO: 42292 - DNA, 352 bp, Homo sapiens
gggaacgtctgaggttatcaataagctcctagtccagacgccatgggtcatttcacagaggaggacaaggctactatcacaagcctgtggggcaaggtgaatgtggaagatgctggaggagaaaccctgggaaggctcctggttgtctacccatggacccagaggttctttgacagctttggcaacctgtcctctgcctctgccatcatgggcaaccccaaagtcaaggcacatggcaagaaggtgctgacttccttgggagatgccataaagcacctggatgatctcaagggcacctttgcccagctgagtgaactgcactgtgacaagctgcatgtggatcctgagaact

SEQ ID NO: 42293 - DNA, 344 bp, Homo sapiens
ggtactcttgctttgggatgagttgaaggaagattgttagtttttatagatttcaaagacttgggaaaaaatattcagggaatatctaggtgagtatcatagatttgatcccatctgctgaaaaaccagataattagaaaggtatatctatttcttttgctaactctggggcttctgcttacaaatagcttttattacccctcacacctcctgagctttattttatagtagaggaaggtcagtgtttcataagcataggtttgttaagtggttaagtacaattgtcccccagtatcatgggtgatcggtcctaagacacccctctggtaccaaaatccagggat

SEQ ID NO: 42294 - DNA, 344 bp, Homo sapiens
gggttcacctggggccttgtcagccctggacagaggttcaggtgacctgagcccctgtcaacccaggacacaggggtcagggtcagtctggggcctcatcaggccaggacaaaggggtcaggtgacctgggccctcatcagcccaggacacaggggttgggttcacctgggaccttgtcagtcctggatacagaactgggggttcctgggctcgctgagggtttcctcaggccctgtcaccccccacacatagggttcattgtcccctgaattctcccagcccctgaatacggggtctggatctccacgttgtcagtgctctgaaatgggttttagggttcatt

SEQ ID NO: 42295 - DNA, 334 bp, Homo sapiens
  misc_feature (1)...(334): n = a,t,c or g
gggagaccagcccgtcctcagcacgcgtttccnnnnnnnnnnnnnnnnnnnnnnnnnnnnnnnnnnnnnnnnnnccgctctatatgtgtgaatttgagttgtgtgactttgttggatgtgagagaattatgagactgtgtgtatatgtgtgtgtacacgagttaantgtntgtnnatgatntnattgtatatgtatgtaaatgncnnnngcataagnngatnngaaatnataganngtatgagaaanatgnatnntanannnanttatgaangatgntnttcntgntaannttcnttaaattttaacttttnanaatnatnatgattgnnttcc

SEQ ID NO: 42296 - DNA, 346 bp, Homo sapiens
gggacctggtgttgggtgagcagattggacgggggaactttggcgaagtgttcagcggacgcctgcgagccgacaacaccctggtggcggtgaagtcttgtcgagagacgctcccacctgacctcaaggccaagtttctacaggaagcgaggatcctgaagcagtacagccaccccaacatcgtgcgtctcattggtgtctgcacccagaagcagcccatctacatcgtcatggagcttgtgcaggggggcgacttcctgaccttcctccgcacggagggggcccgcctgcgggtgaagactctgctgcagatggtgggggatgcagctgctgcatggagtacctg

SEQ ID NO: 42297 - DNA, 349 bp, Homo sapiens
  misc_feature (1)...(349): n = a,t,c or g
gcccgaccccccagagtagcagggagggtcccaggagtaaatctcaggcgtggagcctggcgctttgtaaataatcaattgtgttgttgnnnnnnnnnnnnnnnnnnnnnnnnnnnnnnnnnnnnnnnnnnnnnnnnnnnnnnnnnnnnnnnnnnnnnnnnnnnnnnnnnnnnnnnnnnnnnnnnnnnnnnnnnnnnnnnnnnnnnnnnnnnnnnnnnnnnnnnnnnnnnnnnnnnnnnnnnnnnnnnnnnnnnnnnnnnnnnnnnnnnnnnnnnnnnnnnnnnnnnnnnnnnnnnnnnnnnnnnnnnnnnnnnnnnnnnnnnnnnctgacctcgtgatctgccacctt

SEQ ID NO: 42298 - DNA, 345 bp, Homo sapiens
  misc_feature (1)...(345): n = a,t,c or g
gctggaaattatcttgcagctaatattgctgatcctaaaacaccaataaatgatgctttctcagtatttctcatattgatttctgagacttatatttttgaaaccttaatctagagctgtggcaagccatgcaaatgggagcttactctggtattggttttccttcatcttatttgaagcagcaagaggtatattcctcagcacttagaaagtagctgtagcnnnnnnnnnnnnnnnnnnnnnnnnnnnnnnnnnnnnnnnnnnnnnnnnnnnnnnnnnnnnnnnnnnnnnnnnnnnnnnnnnnnnnnnnnnnnnnnnnnnnnnnnnnnnnnnnnnnnnnnnnnn

SEQ ID NO: 42299 - DNA, 349 bp, Homo sapiens
  misc_feature (1)...(349): n = a,t,c or g
gggaagtgctgtgtcacttagctatttttgttgtcactgtgcagaggcctggggtgggtgaaggtttatagagagagggaacacacagccctttccctccaggagcccaaagaggtgacctctgtgtaaacatcagtatcgtataaggaagaaaaaacctggtgttatcatagacgggcacgcggcgtgctggggcttagaggaaggacggattcactccgactggggagtcattagggatgcttcctggaggaagtaggctttggaggaaacagcatgtcagtaaagggaggaagggcactcaggccccagtcgtancccaggcagaggcacaaatggggaggcactg

SEQ ID NO: 42300 - DNA, 351 bp, Homo sapiens
ggaggggttcaaaatacattcatgagagttaagttccacctttgccctaaagggtggtcacagggcctgttctgtttgcgtttggtagggacaagtcagtgtggcgcttatttccattactgtagcagaaatggctagtgtccgtggcaggggagagcatctgaggacagcaaagagaaatttatatttttatcttcatggagcagctcattgttcctgaatgtcttctgttgtaaaggacagaaatgggtggactttttctgtctttatttttctgccagttgatgttatgctagcaggtaaacatgtggtactgacacctttaaagacatagtctcaagataacaggtg

SEQ ID NO: 42301 - DNA, 318 bp, Homo sapiens
  misc_feature (1)...(318): n = a,t,c or g
gagcttacggtgggtgctggaccacggctggatgatgggagatggcaccaggtggaagtcaagatggagggggactctgtgctgctggaggtggatggggaggaggtgctgcgcntgaaactngnatctgnnnantggnnagaacangnctttnnatnatgaggattgngcttgttngctggnatnncccgttccaacctttgntgccgnnnttnctgccntgnatggntgcctnncngaantnntggntggacaaacagccgnnatntnatcatntncngnnntancntnataagctgtgangtnnncnnnnntccc

SEQ ID NO: 42302 - DNA, 351 bp, Homo sapiens
gttcagagagtagtacgtgctgtgtagataatgaaacagcatgatgtgctctgggttggggtgctggggaggattcttttttagattggcaaccagggcagacctctttgagtgggtaacgtttaactaagacctgaatgataggaaagagccagtctctggaaggtctagggatagagcattccaggtggaggtcttggacaccaggggtaggtctaatcttgggaaaggtcccatttaagcaaatgaagatgttgaccagcaaagagagagacaggaaggagggcagggactgtgctggcttcactcgccagcacagtgagcactttacacagaggtaagtgttcatgg

SEQ ID NO: 42303 - DNA, 324 bp, Homo sapiens
  misc_feature (1)...(324): n = a,t,c or g
ggtgataagtactattgaaaaaataaagtggaatgaggacacgtagagcactggagatgggctggggctgctcttttaaatacgattttcaaagaaggtctcactgctaaggttgactgtgagcagagatgtgaaggaaatcataaaggggccatgggagacatggagaagaacatttctggaagagaagacagtgaaaatgaaagccatgaggggaactgtgtttggtgtgtcggaggacaaagccgattaagcaaagggaggtgttttctgcggnttattaaaggccananaancnnnnnangccanatcacatanggctta

SEQ ID NO: 42304 - DNA, 125 bp, Homo sapiens
gatctgcagataaacttatttataattcattacttttggttcattaaaagaaaactgcttgttctcttattggcaacattattgtggccttcaatagaatttttttctttctttttttttttttt

SEQ ID NO: 42305 - DNA, 341 bp, Homo sapiens
  misc_feature (1)...(341): n = a,t,c or g
ggctgctaacatgaggaacatattgccctctgcctaggattatgagtaaatttgataaattctagactgcagtctcattttagctcattttatgaggcagcttgacaactgggatagtgtctcttttttttgtcgggggtgttgaggcnnnnnnnnnnnnnnnnnnnnnnnnnnnnnnnnnnnnnnnnnnnnnnnnnnnnnnnnnnnnnnnnnnnnnnnnnnnnnnnnnnnnnnnnnnnnnnnnnnnnnnnnnnnnnnnnnnnnnnnnnnnnnnnnnnnnnnnnnnnnnnnnnnnnnnnnnnnnnnnnnnnnnnnnnnnnnnnnnnnnnnnnnnnnnnnnn

SEQ ID NO: 42306 - DNA, 342 bp, Homo sapiens
  misc_feature (1)...(342): n = a,t,c or g
gtnnnnnnnnnnnnnnnnnnnnnnnnnnnnnnnnnnnnnnnnnnnnnnnnnnnnnnnnnnnnnnnnnnnnnnnnnnnnnnnnnnnnnnnnnnnnnnnnnnnnnnnnnnnnnnnnntgtctagtcttacacttcacatcctacaagacacgtggagagcttatgcaggttgaagggagagccataaagaatgatcaagatccctaaagaaatgctctgccttctaaggagactcagcataaagcaggggaggcagaaaaaagctgagaagtggaatgcaggccctaagaaaaagccatatgagtttcataatgatatccattccaatgatagccctcacagat

SEQ ID NO: 42307 - DNA, 345 bp, Homo sapiens
ggaaaaactcagcaagcgtcagcttttctttcgcaaaaagctgcttcactcatcccagatgcttcgggcggtctccctgggtcaggaccgctacagacgtcgctactgggtattgccgtatttggctggtatctttgtagaaggaacagaggggaacttagttcctgaggaggtgataaagaaggaaactgactccttaaaagtggcagcccatgcgtcactcaaccctgccctcttctctatgaagatggagttagctggctccaacaccactgccagttctcctgccgggcccgaggccgacctcgaaaaactaagcccgggtctatgcacctaagcatctta

SEQ ID NO: 42308 - DNA, 319 bp, Homo sapiens
  misc_feature (1)...(319): n = a,t,c or g
gggagtgagacaaaatacctcataaaaggccacacactgcccctgggtacatctnagactgntggctntccngntatnnanntngggcangananangncttctatnngncnttttatntggatcggctttntgntttggattatgtnngtgnaacntatacactnttngnanttatcntatctnngggatttaacanggactntgctcngtggntcncgcntgtnatnncangctttngtaggntntgtcnnttggaacctntgagcnnagnatntantgannantctctnctatntcacnttccatgggttgntaca

SEQ ID NO: 42309 - DNA, 338 bp, Homo sapiens
ggatatttagaataaagataaagcctaaaagacaaacgagaaagagaaaattaacatagtaatttataaagaggaaaactaaatgcccaataaaattataaaaagatgcaccacatcattagaaagcagaggaatgcaaattaaatccataatgacataccattcacacaccccatgatggcagaaattcacatctgataataccagctcatgccaagggtatgaagtggcaggagctcccaggtactgctggtgactgtgagattaggaataaccacttgggaggaaaaattggcaatgtctaataaagttagagatatgcctattctacaactcag

SEQ ID NO: 42310 - DNA, 334 bp, Homo sapiens
  misc_feature (1)...(334): n = a,t,c or g
gacaatttgataaaagatggtctgtctgtgttttccttgtgtgccatggaatggctatttttctgtttaattttattgttaagtggcttgaaaaatagtgttttggacctggggattctcatctggagacaaataggaagtgatcccaggagttttggaaattcctacaatagattgtcagcttcttgagagcagacatgttgcctcttttagttatgctagatattcttaacgggtaccaaggcacatagtagatgcataaaatatttggtgactgaataaattaataaattaccnataagggaaatggtctttgagnantaaacctttaaaa

SEQ ID NO: 42311 - DNA, 349 bp, Homo sapiens
  misc_feature (1)...(349): n = a,t,c or g
gtcaaggtgtggtggctcacacctgtaatcccaacnnnnnnnnnnnnnnnnnnnnnnnnnnnnnnnnnnnnnnnnnnnnnnnnnnnnnnnnnnnnnnnnnnnnnnnnnnnnnnnnnnnnnnnnnnnnnnnnnnnnnnnnnnnnnnnnnnnnnnnnnnnnnnnnnnnnnnnnnnnnnnnnnnnnnnnnnnnnnnnnnnnnnnnnnnnnnnnnnnnnnnnnnnnnnnnnnnnnnnnnnnnnnnnnnnnnnnnnnnnnnnnnnnnagcaagaccttgtctctgtaaaaaataaaagttaagcaaaaccatctgagtttctctttcancagaaaaaggtcaggcacagtgcct

SEQ ID NO: 42312 - DNA, 344 bp, Homo sapiens
  misc_feature (1)...(344): n = a,t,c or g
gcagctagctgcgagaattaatgtgagctcttgcaggactttgtaggctctctaaaagtgcaagggaatgtggtcaacagcagatctttgatgtgatccaatttacattttaagtggctactctaacatctagtaaaggtactattggatcagtgggagaaagantgaagnaaattttgatcanataattggntaaactattagaaaanaataaaagctgtagacttttctggannnnnnnnnnnnnnnnnnnnnnnnnnnnnnnnnnnnnnnnnnnnnnnnnnnnnnnnnnnnnnnnnnnnnnnnnnnnnnnnnnnnnnncnggccaacatgggcganacccc

SEQ ID NO: 42313 - DNA, 344 bp, Homo sapiens
  misc_feature (1)...(344): n = a,t,c or g
ggaggttattttaaagaaagaaagtaaatgctcttatgattggcagatttttatttgtgggatacaagcaagatgagggagcagtatatgcctgcagtattcatctgtcattaatttgtgtcaaataatgtgattctgtattcctcaaatgttgtaaaataggtaaacattttgtctttcacagaaagatacaaaatcagatctccaagcagcttactgctatgatcttagcttccttttcaaatcccttaggcattttaaacctaagtctttatatttacaatggccctcttgtagacagcatatattngngncttgccttctttatcnactctgacantctc

SEQ ID NO: 42314 - DNA, 313 bp, Homo sapiens
  misc_feature (1)...(313): n = a,t,c or g
gattaattcaccaccctattaggtaggggctgccagggaataagcgaggactccaaattttctgtaggaggggtgttgggagttggcanctcggtctgggagagaaggctntnncnctngtgnanagccctttgcactaccctgncagcagnctganctgtcctcctgcnctgcncanctcncnnatncccctcntaagntacngcacttttcnnccncctgcnttccnagnncccccctncgaccccnnggncncagncnncnnccnttcanggccncctgtcncccnantcnncgacncnnganttnctct

SEQ ID NO: 42315 - DNA, 345 bp, Homo sapiens
  misc_feature (1)...(345): n = a,t,c or g
gagaggaatattaaaaaattttaaatagnnnnnnnnnnnnnnnnnnnnnnnnnnnnnnnnnnnncttggttattttttattctattttattttatttttgacatggagtatcactctgtccccaggctggagccagtggcannnnnnnnnnnnnnnnnnnnnnnnnnnnnnnnnnnnnnnnnnnnnnnnnnnnnnnnnnnnnnnnnnnnnnnnnnnnnngngggccccactacacccngctaatnnttgtanttntannacncanngngnctnctcntactgcccgngnttgccccgaactcccngacttcngacgancngctnctntngcctncnnagngcttg

SEQ ID NO: 42316 - DNA, 322 bp, Homo sapiens
  misc_feature (1)...(322): n = a,t,c or g
gaaaggatgcctttttctatatagcgttacatcctgactctcaatacctgtttgccttcgaagatccctctggccagatgcccagttaacatggacagtgctgcctcagggattttgagacagtccccacttgtttggacaggtactgtcaaaggacctctctgagttttcccatcctcaggtcagggtcttgccatatgtagatgacatactgttttgtgccccaactgaggaagcatctcaggaaggcagtgaagctcttcttaatttcttagccaacagaagatataaggnttcaaaatctaacatcaagctttgccaa

SEQ ID NO: 42317 - DNA, 350 bp, Homo sapiens
gacacgttatgttctgttttacttaattataagggcctcatttactactgaaatcctattggcactaaataaatatttgtcaaattttctttacatctgttttaaatttccttttattgtagtagtctttacagttatgagacttgcttgatacattttcttgagctctttgtcttagactgtgtttcttaactctaacataacattatagtcacctgaagagattttaaatgctacctgtcatttgggctctacctctggcccagttaaattagtatttttaaagtttcccagttgacttttgtgtagttcaggttgagaagcactggtcggagacatgactggatact

SEQ ID NO: 42318 - DNA, 347 bp, Homo sapiens
  misc_feature (1)...(347): n = a,t,c or g
gtatatatcgcgtgctataaaactctattagatattttgtagctttagtagagatcaatatgctagtaagtngtcttgcacaatatttacagatttctgctgttttataagtttttatcacttccacgtgcgccatcattaaagattcttctgattcttgcgtaactgtatcccatccaatctttgatctatattgccagtgtagctttctaaaacatgccattatcctgtcagtaatccttcaatgactccttataatcttcaggataaaatccanactctaacatggctttccatgcatantntagtgtactgcttactattttacccaatttatctccatgccc

SEQ ID NO: 42319 - DNA, 345 bp, Homo sapiens
gagatgaaatcaggaaaaataaatcaagtaattgctatgcaagtgtttcagccacattttaatgcttgaacattggatctttgaggcaataagaagtgacttacagatttgtgcaccatattccttccattgaggtgattggtttgacagccattatgctgggccaattgtaaatataaggagggtggtggcagggagtttttctctaatgtcattcaatttctttagcaaaaatgcttcttcattttgcctgagtgagggaaaggggttggggtacatacctaagcattctagatatgtgatgtatgtgtgttgaggggagaggttgtggccattggtacatat

SEQ ID NO: 42320 - DNA, 338 bp, Homo sapiens
gcacgcggtaataaacaccgtgtcacagcaacactgtcacacaccttaaatttactggcaaatccatcccacgatatcaggtttacacacaacctcaaagtgacacaagaacatccaaacactcttgtcacaactgtcacacacttcatagtcacaggcaaaccccaattatacacgcggcacacataaaatcacagtcacataagtatatcccagccaggtaagcaaacagtcacaaacaccctcagagtcacaactcacactcatacaaatgctcatacacaaaaccacagccacacacgtccagtcgtgtatgcacaggcagtcgccaataccag

SEQ ID NO: 42321 - DNA, 341 bp, Homo sapiens
  misc_feature (1)...(341): n = a,t,c or g
gcaacaaccgctgaagaaaagattgatagctacctggagaagcaggtagtaacattcctggattactcaacagatttggacacaacggaaaggtagaattttatttgaaattttcatagaggaacagagcaaatacatttaatagcaccttgacagggtaaggccctgattttagcagttgagaaaccttgccttatattttactcaagactcatggtgtaccaagtaatctatgtaaaaactcatccagaagtccatccagaatgaagaagtaaagtggtgcangataaaatggtttcatatatganactggccatantttggngnactgnnnangctta

SEQ ID NO: 42322 - DNA, 344 bp, Homo sapiens
gtcataacccagtactaaacaaaggaataaaacactgaaactgtatcttctttcttctcggtcatagaaatcttctactatccagtaaaaaaaattgattacatataaaatagatgccagtactataaagacaaagagggcctaacccttactgtcaagttgctaatgatccccccagaggagaaagacataaataaatgctatatatgtgcttaattagaagtctttacaagttatagtgaaaagatcagttcttcccatgtagcaaaaaagactctggagatggtaaccgtggaatgaaatcttgaaagatgagacatatatgggaagggctgtagaaagaa

SEQ ID NO: 42323 - DNA, 344 bp, Homo sapiens
gtgccaacgaggaggagaagaaggccgcagcaaccactgcacaggaatacctcaagacccatcccagcgggcgtgaccctgagacccccatcattgtggtgaagcagggacacgagccccccaccttcacaggctggttcctggcttgggatcccttcaagtggagtaacaccaaatcctatgaggacctgaaggcggagcttggcaactctagggactggagccagatcactgctgaggtcacaagccccaaagtggacgtgttcaatgctaacagcaacctcagttctgggcctctgccatcttccccctggagcagctagtgaacaagcctgtagaggagc

SEQ ID NO: 42324 - DNA, 346 bp, Homo sapiens
  misc_feature (1)...(346): n = a,t,c or g
gnnnnnnnnnnnnnnnnnnnnnnnnnnnnnnnnnnacaannnnnnnnnnnnnnnnnnnnnnnnnnnnnnnnnnnnnnnnnnnnnnnnnnnnnnnnnnnnnnnnnnnnnnnnnnnnnnnnnnnnnnnnnnnnnnnnnnnnnnnnnnnnnnnnnnnnnnnnnnnnnnnnnnnnnnnnnnnnnnnnnnnnnctgctgttctgtgcagcctcgggacatggtgccctgtgtcccaggcactccannnnnnnnnnnnnnnnnnnnnnnnnnnnnnnnnnnnnnnnnnnnnnnnnnnnnnnnnnnnnnnnnnnnnnnnnnnnnnnnnnnnnnnnnnnnnnnnnnnnnnnnnn

SEQ ID NO: 42325 - DNA, 334 bp, Homo sapiens
gcctggccaaactattgtacttctttggtcacattcatttatctctctggtaaacgtgtcgaacaaagttctaggcccagcccattgtttttggaagcaaagaacaattcatttatgaaaaaaaagcaactcatattgctaattttggccaactaatgtttttctggagaaaagattatttcctaaaaatctcaacatctttgtaaagtatggaccagaaagagtagctgttaggaaccttttgtttgcagtgatgtgtgcccatctgagagtttattctgcttaatttaaaactgaattttcgctgggcacagtggctctagcctttagcact

SEQ ID NO: 42326 - DNA, 336 bp, Homo sapiens
  misc_feature (1)...(336): n = a,t,c or g
ggggtacagtttagttctttactgctgtgattgctgaggtataatactgctattagaatgtatcatgggtttcactaagtggcctctttgggtcatgaaaggccttctaaaggggctgatacattccaagaggctaatctacagtactggagaatttttggaaataatgaaaaattttcgtaaaggtacatagtggctgggcatgnnnnnnnnnnnnnnnnnnnnnnnnnnnnnnnnnnnnnnnnnnnnnnnnnnnnnnnnnnnnnnnnnnnnnnnnnnnnnnnnnnnnnnnnnnnnnnnnnnnnnnnnnnnnnnnnnnnnnnnnnnnnnnnnnnc

SEQ ID NO: 42327 - DNA, 335 bp, Homo sapiens
  misc_feature (1)...(335): n = a,t,c or g
gnnnnnnnnnnnnnnnnnnnnnnnnnnnnnnnnnnnnnnnnnnnnnnnnnnnnnnnnnnnnnnnnnnnnnnnnnnnnnnnnnnnnnnnnnnnnnnnnnnnnnnnnnnnnnnnnnnnnnnnnnnnnnnnnnnnnnnnnnnnnnnnnnnnnnnnnnnnnnnnnnnnnnnnnnnnnnnnnnnnnnnnnnnnnnnnnnnnnnnnnnnnnnnnnnnnnnnnnnnnnttgtctttattgtcttaatttgcatttctgtcatgaattaggccaaatatactttgtaagagctatgtgtgttttccttgcctgtgaactctaccctttgtccatttttcattt

SEQ ID NO: 42328 - DNA, 348 bp, Homo sapiens
  misc_feature (1)...(348): n = a,t,c or g
gggatttttaaagtgaattctcccaagtttgagatgttagcctctaatttagaaaaacacagaggctaaataaaacttatcttcagtccaccagttgacaaactttggcctggcctgtctcttttctatcgtttatcatcagggcagataatcttttaagtttcaggtgttacactttcctgggatatactcctcttaggggataatttannnnnnnnnnnnnnnnnnnnnnnnnnnnnnnnnnnnnnnnnnnnnnnnnnnnnnnnnnnnnnnnnnnnnnnnnnnnnnnnnnnnnnnnnnnnnnnnnnnnnnnnnnnnnnnnnnnnnnnnnnnnnnnnnnnnnnnnnn

SEQ ID NO: 42329 - DNA, 337 bp, Homo sapiens
gaactggaagatgtaaaagtcaaagaaaaggccagggaaccacatttccctccaaattttatgtggaacacagtttgaaaaacagtgttattatgtgattggtttttcataggcatcacttccaccctctgagacgagactcagactgcaagctagtcagggaatctccaagataaagagagcaaaagggagatctggagttgttaagaaagaccaatacacaaaagggtaaggaacaggtatcttaagtcctggagaacatagcagccctcagggggctaggaacattttaactgccaggccaagagaaagaaaaaaaaatgaatttctttaaaaa

SEQ ID NO: 42330 - DNA, 335 bp, Homo sapiens
gagtcatttccctgaggtgacgttcacctctgggagcggaagccaaggctttcctcagttccagagaatgaggctcctttgtcttggaggaacaccaggccttgactggacagcatcccagctttacccccaccggtggggagagcccctcagggggtgcccctagccccctgctctaggtacatctggcatctgctgacagacccctccagggagctccttcctggcactgccctgtccatagtctgcccattagagtgggggtggcttctcgcctcccaagctgtctcccctccctgaccatctacctcaaggcagcagcccccatctgctct

SEQ ID NO: 42331 - DNA, 346 bp, Homo sapiens
  misc_feature (1)...(346): n = a,t,c or g
ggtccctagtgtgtgtctggcacagagctgagtgcagagtatggggtgctgaatactgcagccacgcatcctgccctctgggaccgggtgcagcttgggattgtgttatatttgtagcagttctgatgacaacaggaataaaataaaacacctggatttgtttcatgagcatgaccctcaaatctgcactcccctattacgtgtttgggcaactgagttttggaacctacatatcagactcaaatgttttcttctggggggttacagtctggggaagacccttgtgtaaagcatgtagcatagtgcctgtggacaggagagcccagtccgtgacggnngtaacaat

SEQ ID NO: 42332 - DNA, 260 bp, Homo sapiens
  misc_feature (1)...(260): n = a,t,c or g
gcttccatattgaaataaatacaacctcaaaacttttatgctctgtgttccctttagttgttatctacatagaaaattatgaaacaagagaggaacttaccttcttccctattaaatatatggctaagggcacaagaaaataagaggaaaacttatccttcagggcctaaacaaggaaatgaaagaaatctcattcccaatagaataaaaaccagaagcttgaaatgactctggtgcaggaggctggntggnngggagga

SEQ ID NO: 42333 - DNA, 335 bp, Homo sapiens
gggacatttgcatgtgtcgtggcccctgcacactgtttcctcagctcctggcctgcttgttcccttcccattacccttgtctctgcttaagcatcagctcctcagaggtcctcctgaccagcccattgcaagtaccctttccccttcctccttgcggttctgttgctccctccaccttgcagctctgcagcttcccgtgaatgtgattgtttacatgctgactatcatgtcccccacctggctgttcaccccttgacaccagcaccagctttctttctggctgcgttgctgcctgtgcctgcagtggtggctccgtaagcatctgctgaacaaac

SEQ ID NO: 42334 - DNA, 333 bp, Homo sapiens
gagaaagtaccacagggtgagtctgtggactgactgggtctgctatgggtcaaacttgtgttaagacttcacccatcacctgatttctttaagtcttcactttgatgtgttgtgtcatagtagcgtgttgtgccccaagagttggcatcacttccctggaatcagtatagagtatttctgaaaggtctggatattaatttttctccatgacataatcattctagtacgggggtgcccaacccccaggccataccagtataggtctgtggcctgttagaaccaagctgcaacagtaggacgtaagcggcgtatgagcaagcattacacctgagg

SEQ ID NO: 42335 - DNA, 346 bp, Homo sapiens
  misc_feature (1)...(346): n = a,t,c or g
nnnnnnnnnnnnnnnnnnnnnnnnnnnnnnnnnnnnnnnnnnnnnnnnnnnnnnnnnnnnnnnnnnnnnnnnnnnnnnnnnnnnnnnnnnnnnnnnnnnnnnnnnnnnnnnnnnnnnnnnnnnnnnnnnnnnnnnnnnnnnnnnnnnnnnnnnnnnnnnnnnnnnnnnnnnnnnnnnnnnnnnnnnnnnnnnnnnnnnnnnnnnnnnnnnnnnnnnnnnnnnnnnnnnnnnnnnnnnnnnnnnnnnnnnnnnnnnnnnnnnnnnnnnnnnnnnnnnnnnnnnnnnnnnttttaataagagaatgctacagttattagacggcaatcatgtcaaagtctggatggaa

SEQ ID NO: 42336 - DNA, 335 bp, Homo sapiens
  misc_feature (1)...(335): n = a,t,c or g
gcggcacgaggagactgcataggnnnnnnnnnnnnnnnnnnnnnnnnnnnnnnnnnnnnnnnnnnnnnnnnnnnnnnnnnnnnnnnnnnnnnnnnnnnnnnnnnnnnnnnnnnnnnnnnnnnnnnnnnnnnnnnnnnnnnnnnnnnnnnnnnnnnnnnnnnnnnnnnnnnnnnnnnnnnnnnnnnnnnnnnnnnnnnnaaattaaactcttgatgcaggtactggtgactttcaggcatggttggaacaacttgggcatgtgaatctgctttttcaacttccctgctttttcttatctttccaggaaaaatttaccatcagagttgagaactgtt

SEQ ID NO: 42337 - DNA, 346 bp, Homo sapiens
gcggcacgagcttaaaccaaatgccatttaaatgaccacagactaaatacaaagtaggtaaatgcttacagggaaaggggaaagtggatcaaggtagaaaaaagacaatttgttttaaacactcttaatacaacttgttctctctccccttaaacatgtttaaaacaacgtaaagcacagatgattgtctgaaagaaaaagaaatcatttgcacagcccctgttttccagcttggtgccctttgatgggtggtgagtggtagcgatgtggcccagtgagacggcacagtcgctcttcctgcaggtcagaatcttcctaggctgttgctcttccaaggtactctgag

SEQ ID NO: 42338 - DNA, 333 bp, Homo sapiens
ggaggagtgtgagaccacagctgggaggaggtcagggatcaggtccagggggtgtcaattaaggttctttggaagtaacggagcctgaaggggcagctatttgggcagagcctggagaagctcatggaatctaaggaggagctggatacaaggtccagacaggcatggggcagggcagctctaggcatatcaggagcagaggctcacagccatgtctcccaggacggccattgagccacctctggttcccttgcttcagattcccagaagaggaaatctgattggcctagcagggtctgctcccagaccagtcagtggttccttctgtgtagc

SEQ ID NO: 42339 - DNA, 324 bp, Homo sapiens
  misc_feature (1)...(324): n = a,t,c or g
gcggcacgagcagctacaaaccagacgagaaacaattagcaaaatggtaataacaaatctttgtctgtaattactttaacaaaaaatgaggccaaatacagnnnnnnnnnnnnnnnnnnnnnnnnnnnnnnnnnnnnnnnnnnnnnnnnnnnnnnnnnnnnnnnnnnnnnnnnnnnnnnnnnnnnnnnnnnnnnnnnnnnnnnnnnnnnnnnnnnnnnnnnnnnnnnnnnnnnnnnnnnnnnnnnnnnnnnnnnnnnnnnnnnnnnnnnnnnnnnnnnnnnnnnnnnnnnnnnnnnnnnnnnnnnnnnnnnnnnaggngaggtg

SEQ ID NO: 42340 - DNA, 333 bp, Homo sapiens
gattcactgtctgtgtttttgttttgatggttgtaggttggctgcctgggcattcatataaagaactgcagacattttatgcctaagagtatcctttcttttgatttaagaatcataggaattatatctcactgtttcagttatccattgctgcattacaaaccattccaaaacttagtggcttagcacattgaccattttatcatcaatcactactgatcattcactatttgcttcttctgcttcatgatataaaagcttgggctgttgtctgacagttcaaaagggctataatatctgaagtggcccatttacatgtctagttgctttagt

SEQ ID NO: 42341 - DNA, 347 bp, Homo sapiens
ggtagtctacagggtctttgagatggaaatgttctgaatcttgactgatggtgaccacatgaatctgaacatgtaataaaagagtatagaatgagatacacaaacatacaaattagtgcaagtaaaactggggaaatctgaacgaggtcagtggattagatcaaggtctgtttctcttcagaatctcaaatcttaaaaggttttgtattttctaaacacaaataaaagctggaaagccaatcagtagtaatctgaaagttcacaatgtcagtagacgtctcatggtattgggaagaaagataagcattgaggctaatatcaccctatgcttgattaagtttttgttt

SEQ ID NO: 42342 - DNA, 337 bp, Homo sapiens
  misc_feature (1)...(337): n = a,t,c or g
ggaaggttggtggtggtggggggccgggaaatggccagtaataatgaacaacacagattgacatgtagacaagtagtaggatcatgctgggattaacaggcgtgagcccggcctttttttaaaaaaagcaaaatatgataagaagtaatagttcccnnnnnnnnnnnnnnnnnnnnnnnnnnnnnnnnnnnnnnnnnnnnctacctgtggtcnnnnnnnnnnnnnnnnnnnnnnnnnnnnnnnnnnnnnnnnnnnnnnnnnnnnnnnnnnnnnnnnnnnnnnnnnnnnnnnnnnnnnnnnnnnnnnnnnnnnnnnnnnnnnnnnnnnnnnnnnnnnn

SEQ ID NO: 42343 - DNA, 333 bp, Homo sapiens
  misc_feature (1)...(333): n = a,t,c or g
gatcattagttgttgttttggcctcccacgacccaagaaatagtgggaggtgaaaattaaagagattggctgtcatcaggcttcctgtgtgctagggagcttattttactttatgatttcaacagctnnnnnnnnnnnnnnnnnnnnnnnnnnnnnnnnnnnnnnnnnnnnnnnnnnnnnnnnnnnnnnnnnnnnnnnngagttgtgtgtccatcaccacaaacagccttttnactgcctagaaaagaaaccccataaccataantagccattcttcacttctttccccgctacctacctatcctctcccctagcccaagcagtcacctatct

SEQ ID NO: 42344 - DNA, 332 bp, Homo sapiens
gctgacagtggaaacagcgaggcgtttagaccaagagtgtgaaggactttttctgaattccatgttgtcttctctgtcttttcattcctctctcacctttttaattctgctactttctctgaacactcggccctctgaaccccacctgcaggaattaatgagtagatctttcccttataaccccctttccagttctcagtgtgattaaatgctttcctgatgtggcaaaatacatttcaagaaatacagcaagtcttttgggctgcaaaaagactggttctcattacttagcagtcttcatatgtgtgcatagctctttgatgttggaaaag

SEQ ID NO: 42345 - DNA, 335 bp, Homo sapiens
gcaagcctagatttctgttaacaggtgaaaatggccatccttaccttgaatcactgaatagtattttctaggaagactcatgggagatttcccagttcctgtaactttgaaactatatttgcatacggtactatctctttttcaacctgtttcagaaatttaatgacagaaatttatttagtatttgaactaaaaaataaaacattttattgcatggaatctggcaaagctcttgctgtgggtagtgaaatagacagcaaatgttgtctagtgttgacacattgatttcctttatatttttacaccctgataatgtgcactgcctttagaaaaag

SEQ ID NO: 42346 - DNA, 332 bp, Homo sapiens
  misc_feature (1)...(332): n = a,t,c or g
ggcaatgaggaggggaaaagtggccttttgggttggctgtgacctccctgtgtgtatctgcccccctcatgctaggtggcactagagaagtgttggagaatatggagccagtctcctggcttaggatttttgttaaaatacggggctccattcttgatatttcttttttttttaaagagacagggttttnnnnnnnnnnnnnnnnnnnnnnnnnnnnnnnnnnnnnnnnnnnnnnnnnnnnnnnnnnnnnnnnnnnnnnnnnnnnnnnnnnnnnnnnnnnnnnnnnnnnnnnnnnnnnnnnnnnnnnnnnnnnnnnnnnnnnnnnnnngccg

SEQ ID NO: 42347 - DNA, 271 bp, Homo sapiens
  misc_feature (1)...(271): n = a,t,c or g
ggttctgtgacttaatgtagataagtgagagaacaaagcggaaaaggagattaaaaataagtaacaataaaacttctggatatgaaataaatacagggaacactaagaaaggtaaagaaactaggcaacataaatacaacctcannnnnnnnnnnnnnnnnnnnnnnnnnnnnnnnnnnnnnnnnnnnnnnnnnnnnnnncanaccactngactcanggnnaaanactannagnnanaaagatgnntnnttcgnncnatcnntatctcact

SEQ ID NO: 42348 - DNA, 187 bp, Homo sapiens
  misc_feature (1)...(187): n = a,t,c or g
ggatttctgtttactagggcccaagagaaggtccaaaacattcatgtcttgtgatggcctgtcttagtcttactgggctgccataataaacagataccacagacctgtgtgggtttaacaacagaaatttatgtctnnnnnnnnnnnnnnnnnnnnnnnnnnnnnnnnnnagtccancagggtttgg

SEQ ID NO: 42349 - DNA, 332 bp, Homo sapiens
  misc_feature (1)...(332): n = a,t,c or g
gggcaggaaggaagagttgatgacatgtcttgtgtaatttttgatcatctgctaagagtgaagggaacgtggtagaataggagttttttaaacaatgtatgtgaggccaannnnnnnnnnnnnnnnnnnnnnnnnnnnnnnnnnnnnnnnnnnnnnnnnnnnnnnnnnnnnnnnnnnnnnnnnnnnnnnnnnnnnnnnnnnnnnnnnnnnnnnnnnnnnnnnnnnnnncacacacacaaacaaaaaagccaggtaaaattaatccacccctgtgaaaggaatggaaaaaaagatagtctgtagtttatacatactctttgtaaacggcttcc

SEQ ID NO: 42350 - DNA, 351 bp, Homo sapiens
  misc_feature (1)...(351): n = a,t,c or g
gaaatctatgcctatttaaatctcaaaaatagaaataactgatcaatactgaaaggtaacagttataaggttgagcagagttctaattgaatatctattctgtcttctctatacctctcatgacccctgtatttggggagagctgagggaggaaactataaattaaatgcctttcnnnnnnnnnnnnnnnnnnnnnnnnnnnnnnnnnnnnnnnnnnnnnnnnnnnnnnnnnnnnnnnnnnnnnnnnnnnnnnnnnnnnnnnnnnnnnnnnnnnnnnnnnnnnnnnnnnnnnnnnnnnnnnnnnnnnnnnnnnnnnnnnnnnnnnnnnnnnnnnnnnnnnnnnnnnnctct

SEQ ID NO: 42351 - DNA, 344 bp, Homo sapiens
gaactggaagaactgaaatttattaacagcttccatatttcagtgctcttagtagtgagcacagtctaggtttgtttaaatactcttccttgtgaactttggctgctgagcagcttgtgcattcaagccccacaactggaaagctggactcatgattttaacaattagtatattattctaattactcgttttttgccttcagccttgaggggaaaattaccgttgtttcctttgcctttaaagaaattggacagaaatagtatctataacagatattctttaatccttcttttggaaacaataaaattacattctgaaagaattgctcttgaatcacaaaaagg

SEQ ID NO: 42352 - DNA, 344 bp, Homo sapiens
  misc_feature (1)...(344): n = a,t,c or g
ggccactagccaaaggtcacacagcaagttgaaggcagagctaggatttgaacacaggtggcccgactatgcagcccggactcataatcatggcactgctttcatttctgcccctgtaaaatgggaaagaacccctgcccttctgatttcccgagggatgtggccaggctcacagaaggagggagctgacatcaagctaatagttttcctacttggatactctgggtacactatagcattaactcctccaataactcagggaggtaagataatgggtatacatacactcttcatgaccttcaacttcattggtctctccttctgcaggcccttggaagngacct

SEQ ID NO: 42353 - DNA, 360 bp, Homo sapiens
  misc_feature (1)...(360): n = a,t,c or g
gctggaagaattaattatagtcttcaaattatttttcttctgttctgtcctcctcttccaaattaattttgtgatgatttgtattaccttttataaagttttccccattttagcatcttcacctttagaagggagtttatttgtctaagtttagaatccaagttcttnnnnnnnnnnnnnnnnnnnnnnnnnnnnnnnnnnnnnnnnnnnnnnnnnnnnnnnnnnnnnnnnnnnnnnnnnnnnnnnnnnnnnnnnnnnnnnnnnnnnnnnnnnnnnnnnnnnnnnnnaaaaaagggaaannnnnnnnnnnnnnnnnnnnnnnnnnnnnnnnnnnnnnnnnnnnnnnnnnnnnnnnnnnnn

SEQ ID NO: 42354 - DNA, 361 bp, Homo sapiens
ggagattgccccacttgcactccagcctgggcgacaaacattcctaaaagtagttgtgagtggagtaaatgtacagagacaagatctctgtatactggattccatattcctcttctcctttctttctgtgtgacaggctctcattctctttcactggtatttttgagcacctcttttgaacttagaggcgtgcctcatactctctgatgttggggggactgtgtgagcctgttggcttctctgtctacgtggctttccaatggacagagctggggcaggtcagccctgaatgaggctttgagtcttacctgcttgagttagagagaattttgggaacctcagactgctagctcagcagttc

SEQ ID NO: 42355 - DNA, 345 bp, Homo sapiens
  misc_feature (1)...(345): n = a,t,c or g
gcggcacgagggtggggtttattgttttgaactgttcattaaaaacgcaacctcttcaaagactcagcactgccacatcatatgagtggacttgtcctcatcagctaactgataggagaacaatgccctaaagtaatggatttatccacctactcaggccagtttcatgcaggagggaactttccagatggcacattgccccatttccaagaccttccgctgacaaatgcatcatattaattatgatggaaaacaagtaagaaggcatgctctacaaaaattaggtcacttgcccaaggtgncnggnctcacacctgnaattccagcantttgggaggctgatgg

SEQ ID NO: 42356 - DNA, 342 bp, Homo sapiens
gttagacataaagaaatgcttgcatattgaatacaaattgaaaaaaagaataatgtaaaatgagatgtagattatgcttctagctagaatgttacaagataatatatacacatatacatagaaaagggctgcaaggaaataaaccaaaatgttgacagtgattatctctgggtggtgggattatgagtgatttttcctttcaagattttttttgtatttaatcttataaacatatgtgattcattgaagtaaaataataacaaccaccaccatcaccatcagatactttattttgaaagtaaggacagggctgggcgtggtgctcacacctgtaatcccagc

SEQ ID NO: 42357 - DNA, 355 bp, Homo sapiens
  misc_feature (1)...(355): n = a,t,c or g
gggctcnnnnnnnnnnnnnnnnnnnnnnnnnnnnnnnnnnnnnnnnnnnnnnnnnnnnnnnnnnnnnnnnnnnnnnnnnnnnnnnnnnnnnnnnnnnnnnnnnnnnnnnnnnnnnnnnnnnnnnnnnnnnnnnnnnnngaccgtgctgctgaacgaaatttagatgtacagaccaatggaacagaatgagagtccaaaagtccagaaacagacccacagtatatggtcaactgattttcagtaaaggtacgaaggcaattcaatagagaaaatannnnnnnnnnnnnnnnnnnnnnnnnnnnnnnnnnnnnnnnnnnnnnnnnnnnnnnnnnnnnnnnnnnnnnnnnnnnnnnnn

SEQ ID NO: 42358 - DNA, 335 bp, Homo sapiens
gttagaggaaaaagggagggaggagagaacaaaaatgaacaagaacaaatgtgtatctctttgtgtttagcctaatgctaatggagttagttgggatcgtcaattatggttgtgatttttaaaggtgatggatggtaaaataggaaatttagccctagatcttcaacagccttcttgctgcctctaattgggatggacagtaagctggtagtccctcacttggcagtaaattgtatcctttaaccataaacaaattgatctgacatctggcatttaccgaaatagccagagttgctcattcagaaaatgtaaccaaagttacatttctaacatat

SEQ ID NO: 42359 - DNA, 354 bp, Homo sapiens
gggaaattctcatactttaatgtgctaatgagcattgtgaaatgttatttgaccatgaaaacatttttggtgtggaatgtgtcatgggactttaaaaagatactcttctagctcaagcagctcaactgcaacccctagcaaatttgtggaaggcttttattaaatagatgttttgttggcacttagaaaagtaagttgtgatcaccacagcttaatatgaaagcagtaagaacagattatatcaaattatcctcatctctgctattcatagcgtttttatcagaatgtcattctattagaagtccatagtgatggtattttttcatagcaatgaggctttgagctggctctatc

SEQ ID NO: 42360 - DNA, 351 bp, Homo sapiens
  misc_feature (1)...(351): n = a,t,c or g
gatccatatgtatattctgtgtgtgtctgtgtgtatacatccatttatctatatacaaacacactttccttaaaaagtaattctggaagatattctgtttttctgtaggtgtttctagtgtccaccgcagaagctggtacatattgagtgcccccataagtgtttattgagtgaatcaaagatgagaaggcatactcaaaaacattaaaaaactttcctaagtcacttagagtgattttaaaacttttttttaactgtatcacactgcttctcgatagttcaagtaattatcttatttgnatctctagacttggnacnnngnctgngtcccangnggctgannctangccg

SEQ ID NO: 42361 - DNA, 336 bp, Homo sapiens
  misc_feature (1)...(336): n = a,t,c or g
gcaccattgaaaatttgcacatagaatatagactcacttgtacatagaattatttcttcaagtataattcaaaataatatggacattatcatgttctgcattacaataatgggatgtcatcaccattgctagaatactggcatgattcttctgagcggaagttgaaactgtaaatttaaaccttttaattatcaccttacctggaaagaggttatgtaagatattcacacagtatgtattatattaaccatatcacacttaagttattaaattcagactatttgnaacttattggtataggggcctgccgnatggcttaaggatatttgagnaatc

SEQ ID NO: 42362 - DNA, 353 bp, Homo sapiens
  misc_feature (1)...(353): n = a,t,c or g
gttttttttagcaaacattgaattaaacatgaattagcttctttatagatgggactcaggattcaaaacggtctaggacagaaatgggtatgtctgaaacataaaattaaattaatttcatttatttgtctaataagctattttgagccattcatacttacaaaagtttattaatacagatacagagaaacagcacctacctgcccatgggaagtaggcctttgcctacagcttgagaaggtgggctttctcctactagtgttggcattttgatttcaaaatctcttggcacattctgaatatttggttctggaaaggntattcgtcctaaaatcaagcagaataaagacata

SEQ ID NO: 42363 - DNA, 333 bp, Homo sapiens
gcactcactccttattttcagcagtagcagatcaattattatgaccttttgatctgctactgctgaaaataaggagtgagtgttttcagttttaactgttggaaatggcagtttgtgtttttccttgtggaatacaattttgttttctcatctggttgtgggaagtggaaataatgggctgttttctaggaggataaacatctgaatttgcatgaaaatagaatggcttagatttaatatttatctaggagtggtgctgaaatcagcaaaatttttccagggaaagactctctggggacttgaatttctttttaaatagacatattttataat

SEQ ID NO: 42364 - DNA, 355 bp, Homo sapiens
  misc_feature (1)...(355): n = a,t,c or g
gtgctttctaaatacagtggtagcatattttacactttactcgtatacttggtgttatatctcggcagtcattccacatcgatacatactgacttgcttcattcttttcagtggctgcataatattccattatatgcatgtgttatccttttaaaaactagtnnnnnnnnnnnnnnnnnnnnnnnnnnnnnnnnnnnnnnnnnnnnnnnnnnnnnnnnnnnnnnnnnnnnnnnnnnnnnnnnnnnnnnnnnnnnnnnnnnnnnnnnnnnnnnnnnnnnnnnnnnnnnnnnnnnnnnnnnnnnnnnnnnnnnnnnnnnnnnnnnnnnnnnnnnnnnnnnnnnnnnnnnngtcagtt

SEQ ID NO: 42365 - DNA, 353 bp, Homo sapiens
ggggccatgggaccctggaggcagagctggagccacggctgttggaggcgttgcagggcctagtcatggctgaggtggccgcggggggctggcattctgtgtgtgtgagtgagactggggatatttatatctggggctggaatgaatcagggcagctggccctgcccaccaggaacctggcagaggatggagagactgtcgcaagggaagccacagaactgaatgaagatggttctcaggtgaagagaacgggtggggctgaggatggagcccctgcccccttcatagctgtccagcccttcccggcattactggatctccccatgggcccagatgcagtcaaggccagctgt

SEQ ID NO: 42366 - DNA, 351 bp, Homo sapiens
gactggatgggttcataagaagacaaatgctaaaggttgatgtacacacaaaagtgattagaaagagagcgaatgttaaaaaatttttcattgacttgatcattctaattgctgtttataaacctaataaaatgttttacaactgaaaagatggccattctcttttcaaaattgttagctgtcagttttcaaaaactgatatttgcatttgatgattcaagtgcagaagaaccagaagtagtgataagctggctgggtgtggtggctcatgcctataaaaaaattccagcactttgggaggctaagagaggcagatcatttgaggccaagagtttcaagaccagcctggcc

SEQ ID NO: 42367 - DNA, 91 bp, Homo sapiens
gacaggattttgaaagatgtataggagtttgcataggaagagctcaataaacttagtcattattattatcttttttctttttttttttttt

SEQ ID NO: 42368 - DNA, 342 bp, Homo sapiens
gaactggttcaacagaaaagatatgataagtgtggacagagccagatttcagataggactcataatatacacacccatgcaactgaatggtagcccagggtgccagccacgcacaggctatcaagtcctccaggcttcaatgtcaatacccctgccagtgactgggaagttcagcaccatgcccaagacttgcaaggtacacttaatgctctagggtcacttctgagcctcaatcttcagttttgatatctgggagtgttcccttctgtgtgtacagctttaactctccccagcctgccaccgaggtcaattctcccatctcacttcccaactagaagaggg

SEQ ID NO: 42369 - DNA, 341 bp, Homo sapiens
gaacgcagatctgagactattatattatcctgtgaaggagggtctgtctgtctgcacagttggtcctaggctggcttctgaggacttgaatttcaagagggttccctaactggtaatcatggtttactgtatctagactatggaaataatgtggcttatcctgctattctttttgtgagtctggaaatttcacacatgctaggcagagtacacatatgtgaccagccaagataaaaactgtgtttcttgggaagtcacataggttgttgtattttcattaagggggaaagaaggtagtctgtgtgatcctcatggaaggcacagcacataaggaagccggt

SEQ ID NO: 42370 - DNA, 333 bp, Homo sapiens
  misc_feature (1)...(333): n = a,t,c or g
nnnnnnnnnnnnnnnnnnnnnnnnnnnnnnnnnnnnnnnnnnnnnnnnnnnnnnnnnnnnnnnnnnnnnnnnnnnnnnnnnnnnnnnnnnnnnnnnnnnnnnnnnnnnnnnnngcgcctggcctactttgtcatatttaataaagaatgttttacttcaaaaaatttatacatgttggaacttttgtggtttgnnnnnnnnnnnnnnnnnnnnnnnnnnnnnnnnnnnnnnnnnnnnnnnnnnnnnnnnnnnnnnnnnnnnnnnnnnnnnnnnnnnnnnnnnnnnnnnnnnnnnnnnnnnnnnnnnnnnnnnnnnnnctatctctactaaaga

SEQ ID NO: 42371 - DNA, 341 bp, Homo sapiens
  misc_feature (1)...(341): n = a,t,c or g
ggcatattatgtcatagcttgtctcttttatgttctaccaataggaacagtcgttgccattataggaggatttgtccactgattcctactattttcaggttatacacctaatttaacttgagtcaaaatttattttacaattatatttgtaggtgttaacnnnnnnnnnnnnnnnnnnnnnnnnnnnnnnnnnnnnnnnnnnnnnnnnnnnnnnnnnnnnnnnnnnnnnnnnnnnnnnnnnnnnnnnnnnnnnnnnnnnnnnnnnnnnnnnnnnnnnnnnnnnnnnnnnnnnnnnnnnnnnnnnnnnnnnnnnnnnnnnnnnnnnnnnnnnnnnnnnnnac

SEQ ID NO: 42372 - DNA, 352 bp, Homo sapiens
  misc_feature (1)...(352): n = a,t,c or g
gattgaccatatatgaccaggaaacacttctgagtttacagctccgtggagatgacctcaacactgcctcttgatttgtttgatgcatgtcactttcattaattttccccctcctttttgaaagtcctgtggcagtactaatattttcattttatgtaatctctggtgctgctttccagtcactgtatgaagtgtctccccaacactagcaaatctaggtcctactaaatacaaatctctgggtggatgatcttctagtactgnatttttaaattaaggagttttagttataatgaaattgatttgtagctggtttgccgaaacttggtttctttaaatgggcctacaggga

SEQ ID NO: 42373 - DNA, 365 bp, Homo sapiens
  misc_feature (1)...(365): n = a,t,c or g
gcggcacgagctggttaaacaagtcagataagccacaaagttagaaataaacattactgtgggtgagacattaagtggctggtctgtgcagaaaaggcattttctgataggaattactaaaggaaaggttgtctaaataaggtaagatcggatcatgcaggacactgacagtcattgaaggcctttctttttaatttaacctgacataacttattttaagaatagcacgtgtcatggagaaagtaaatgttttaggacaattcaatggtccgtaagtttacagagtggaatagagtagcaaaacaacttctaagaatagtcccaatgcctgacacaccagtatggaaaaatatgaaggnccccaa

SEQ ID NO: 42374 - DNA, 293 bp, Homo sapiens
ggaagagaccagcatgttaaatcattggggatatttattaaagtttgaaggtctgatgcagtctgattgcagtgaggacttaaatttatgctgtcatagagactattgactaatcctcaaataaatataattacttcgatgtgtttttttgaatgaaaatatatatagtgtcattctttatttgtgctgtgtgtatgcccaactaacagctgtgaagtatgtacaaacttttcatttatccaatatgagtgttttggaattttaacctaaacactcctatttttttttttttt

SEQ ID NO: 42375 - DNA, 354 bp, Homo sapiens
  misc_feature (1)...(354): n = a,t,c or g
ggtggggagctgacctgccctagggtacagcttaccaaccaggtgctggagtgcacagactgttacatctccagaacctctgttagctagctgacactgtgtgacaggttgaaattggccataataggagtttttacattacagaaatccacaaatcaaggctggctacacctatgtaacagtgaggcgtgctatagaataggcttctgtgtcagggatcatgagagcaagttttcagttgctctctgtgcttcattcatactttgataaagaggccatgggtcccaattgctgtgtcacatgtggtgcctgctgcaaaacattaaaggaactgcttaactctggngcattaaa

SEQ ID NO: 42376 - DNA, 354 bp, Homo sapiens
  misc_feature (1)...(354): n = a,t,c or g
gctggaaaattaaacctccctagggtttattgttgttgctgtttgttactgttggtaggttgtttagtaacttttttgactaattctataaagtctgtatctttgtcacatgtgggcactgaagtctctgctctgttagttttgtggttaatgattggaaagaaatttccttaaatgctgggtagtagtctcccagtctacgggtgaataataatcataaataaaaataaaagttggggcaagccctcagttcaacacttagccatgcaatttacaagccttagccttcatttcctgctcgcacagagcctccaggtcatgcagaggtggggagctatgggnctctgagcatgt

SEQ ID NO: 42377 - DNA, 363 bp, Homo sapiens
ggaacaggtaaatacatcattagaacacagtagaaaattcagaaatagacttcgatatatatgaactttttcatatgtgaaaaaggtgaaatctgaaaccacaggggaaaagagtagtttacttaaaaagaattctggaacaagaaccttttaatcttaaaggaagaaaatttggattaacagcacaaaaataaattctgggtggctttaagacgtaaaattttaaagcaacagaattcttaaaagaaaatcaaaggagcctatgtgtacaatctaggagttgggagatattaactttaccaacacaggacactcagaagctatttagaaataagcagttgaaggctgggtgcagtggctcat

SEQ ID NO: 42378 - DNA, 366 bp, Homo sapiens
  misc_feature (1)...(366): n = a,t,c or g
ggnnnnnnnnnnnnnnnnnnnnnnnnnnnnnnnnnnnnnnnnnnnnnnnnnnnnnnnnnnnnnnnnnnnnnnnnnnnnnnnnnnnnnnnnnnnnnnnnnnnnnnnnnnnnnnnnnnnnnnnnnnnnnnnnnnnnnnnnnnnnnnnnnnnnnnnnnnnnnnnnnnnnnnnnnnnnnnnnnnnnnnnnnnnnngaaaantancnggctttantaaaaaattntttntntngnagttttnatttttnanctancntnnncccaaatntaattttttagnactttaaggcntattnaanattcncgttnacngggnccntaanttaaatcccantacccaaccccaanttatagttnataanccngctgg

SEQ ID NO: 42379 - DNA, 349 bp, Homo sapiens
  misc_feature (1)...(349): n = a,t,c or g
gccatgagcttcaataccctgttatgtctcttaggtaaaatgtgtacatgatgaggttcaaatcctcaatatccttactgactcatggtggttgttttgtcagttactttagaggtatattaaaatctcctggccaggcaaagcnnnnnnnnnnnnnnnnnnnnnnnnnnnnnnnnnnnnnnnnnnnnnnnnnnnnnnnnnnnnnnnnnnnnnnnnnnnnnnnnnnnnnnnnnnnnnnnnnnnnnnnnnnnnnnnnnnnnnnnnnnnnnnnnnnnnnnnnnnnnnnnnnnnnnnnnnnnnnnnnnnnnnnnnnnnnnnnnnnnnnnnnnnnnnnnnnnnnnnnnnnnnn

SEQ ID NO: 42380 - DNA, 361 bp, Homo sapiens
  misc_feature (1)...(361): n = a,t,c or g
gcggcacgagctgacaaagaaataaccccgaagcacgttcctatttcccacctgcttgtagtttccgggataacctaaactccagagagctatagcatccactctgtcctttctgctttgcacacagggaggagggagaaccagcgagggtagctcctggggccggtgcactgagcagtgatgaatgtttcatgtagctgaagtaagagtgactggaatatgctgcagacaatttacgagagtgactcctgtttttcctcagatggggtggctggacgagagcagctcttggctcatcaaagaatgcacagtatgatcagctcagtggatgtgaagtcanaagttcctgtgggcctggagc

SEQ ID NO: 42381 - DNA, 350 bp, Homo sapiens
  misc_feature (1)...(350): n = a,t,c or g
gtgcataggnnnnnnnnnnnnnnnnnnnnnnnnnnnnnnnnnnnnnnnnnnnnnnnnnnnnnnnnnnnnnnnnnnnnnnnnnnnnnnnnnnnnnnnnnnnnnnnnnnnnnnnnnnnnnnnnnnnnnnnnnnnnnnnnnnnnnnnnnnnnnnnnnnnnnnnnnnnnnnnnnnnnnnnccanntttnatcccatagttgggttnagggaantnttncntatnggaanatnaannacctgaatnccattcccncctgttancagcanttagnaancctttggaggaaananaagggaantcccnctgnannagcgnggcccttgttcccnaanacntgcntccnnttccacgg

SEQ ID NO: 42382 - DNA, 335 bp, Homo sapiens
ggcctggacttcctaacatctgggtgtccatgaacatatggtcactcttcctcctcttgcgtccacctggaagccatctacatccccagctccaatctgcctttcatggctgtgcttattcatgaattttgtgatacacatgctgcctgggggcctccttttcagaagatgggtgtctcctagttgggccatggcaggaacaccaccactgtcctcactgggggccatcttttctgttctctgaagctcagggaggttgaagactaacagaacttgaatgagagacaccctgataatattagctcccatttgcttttcccaccccctccaccaag

SEQ ID NO: 42383 - DNA, 343 bp, Homo sapiens
gaacaaaggccacatacccatttactaaaggtcttggctgtttattggcatgccatctattgggaacctaatggaatctggacacatttttgttaaaatagagtaattcttttaataaattgaaataattgtttaatgtttactggtaagataccactacaaattagccacaggttttaaataaatgttggtttttcctgtctcctaatttgcccttttgaatatagattggttattacggaaatgaagacatattttatcccagggtgataatgtgaattaggaatatgaaggattcctcagtatttctcatatttcttttcaatacttcttaaggttgtag

SEQ ID NO: 42384 - DNA, 335 bp, Homo sapiens
gggcgtggggtgggagaagcatgctttgtaataacagtcatgcttaaagcactgtatgtttcaggcctcaatgactattactcatcatagcagatgggctcacatgcttctgctcacagtttcaaatataacctatctagaacaatgctctcaacagggacatctgaaaaatcttctgaaagtgaatttgacaaagttatttttatattaaaaagaattattttagtagttgttttagcagttgatggccttattttcaacaatcaattctatgagtttaaaaagacaacaaaaacagaaacagacttgcattagaagacacacactcacctgcc

SEQ ID NO: 42385 - DNA, 345 bp, Homo sapiens
gctggaagattaagtgacatggatacaaaggatgggaaaatcctgcaaagaaagattgaagtcattgttgatttattttttctttccctcattctttcttcttttcagtccctgtgggttctccctgagatctctcttgggaattcctctcattcatttcttcccttgcgttactgatctaattcaggcccatagtatcccttgctaggactggtgcagtagtcttctggtttccttgcctcctgcctcttctccatcctgtgcatgttctcccagcactgatctggcccagtcactctctctgttacacatagtaccttcttcccattactgtcaatggcatac

SEQ ID NO: 42386 - DNA, 343 bp, Homo sapiens
  misc_feature (1)...(343): n = a,t,c or g
gagagagctttcaataccctgaaataaaaattacaaaagagatgccaagtgggaattagctttcctactacctcttcctcagngnattgntttgnnntgnnttnnngagacagnagncatgntnngtcagnnaggccnggagngtagaggngccatatnagcncactgnnancncagcctncnaggnnnaagcgantcccnntgccnnacnnnnnnnnnnnnnnnnnnnnnnnnnnnnnnnnnnnnnnaccnggataatnnanngcatttcagcnaaanncagggncgtnaccangcnggcncanaatggnntngataatncagaccatnnngantgcngccc

SEQ ID NO: 42387 - DNA, 347 bp, Homo sapiens
gcagcgtttggagcagctgctggcgctctatgtggcagagatccggcggctgcaggaaaaggagttggatctctcagaattggatgacccagactccgcatacctgcaggaggcacggttgaagcgtaagctgatccgcctctttgggcgactatgtgagctgaaagactgctcttcactgaccggccgtgtcatagagcagcgcatcccctaccgtggcacccgctacccagaggttaacaggcgcattgagcggctcatcaacaagccagggcctgataccttccctgactatggggatgtgcttcgggctgtagagaaggcagctgccgacacagccttggcct

SEQ ID NO: 42388 - DNA, 326 bp, Homo sapiens
  misc_feature (1)...(326): n = a,t,c or g
nnnnnnnnnnnnnnnnnnnnnnnnnnnnnnnnnnnnnnnnnnnnnnnnnnnnnnnnnnnnnnnnnnnnnnnnnnnnnnnnnnnnnnnnnnnnnnnnnnnnnnnnnnnnnnnnnnnnnnnnnnnnnnnnnnnnnnnnnnnnnnnnnnnnnnnnnnnnnnnnnnnnnnnnnnnnnnnnnnnnnnnctaaaagagagtatttctttggaatgcaatcagcctcaaagggaaacagtatcgtgcagcaatccactgattccgtgaatgacaaaaatgagctatttcaagagcatattcttaactatgagattcccaaacatttcagaagg

SEQ ID NO: 42389 - DNA, 324 bp, Homo sapiens
  misc_feature (1)...(324): n = a,t,c or g
nnnnnnnnnnnnnnnnnnnnnnnnnnnnnnnnnnnnnnnnnnnnnnnnnnnnnnnnnnnnnnnnnnnnnnnnnnnnnnnnnnnnnnnnnnnnnnnnnnnnnnnnnnnnnnnnnnnnnnnnnnnnnnnnnnnnnnnnnnnnnnnnnnnnctttctagcaggttttttcttatcctcactctgatgaaataatagctagccgttggtcaatggtagctgcattatctcaatcttcacaatcctatgagaacacataggtcccgttatcattgcatcttgatgtacaaatggagaaacacttggaggtttaaaaacatgcgtaagtt

SEQ ID NO: 42390 - DNA, 326 bp, Homo sapiens
gctgtaactgtgctaatctatctagagacctcaaacactgctaaaggccttgcaattgctgctttacccacgcatctcttgctttcaagatggactacaaaagttccttatccttttgaaaaggtcttctgacacacttatcttgcacaaagaaaaagaaaatttcttttactgtgtttaatgttcagtgatatcactgaggaaatggtgaaagctcctatcagaactataggatttcttctgggaaatacagatggaaatacagaatgaatatgtttttttgaggtcggaaactgactttaaaagcctccttgaagttttttacg

SEQ ID NO: 42391 - DNA, 314 bp, Homo sapiens
ggatttttatttaaagtttttttctaacttttctaaaatgaaagtaataataataataatttttattttaacaaatggacgaggaaagaaaggagttggtttcagtcatggatttaagtttggcaaaggtaagaagtagcatagtatattgagggaaaaagaatcaaacgttgcttttaatacatattaatattgaatattaacttggatgttttcaataataagtatattcctagtattatataattctgttttattttcattcgttctttctttttttaagagacagggtcttactattgcccaggcaggag

SEQ ID NO: 42392 - DNA, 263 bp, Homo sapiens
gcccttagattttgagtgtattattatgtcagtgcttgttttacatctctctgttcacgcagtatgtccccttttctgccttgcagctgtttcttaaattctttctttctttgcttgtcttgcagcacaaaacaggcttcagtatagggggaaatgcacagaaacactgccttttcctacaggaaatcagtaactttttactgattttgtttttatttacttattttatttgtttaaatttatttttagtttttttttttttt

SEQ ID NO: 42393 - DNA, 315 bp, Homo sapiens
gcggcacgagactggagacaaaaagctttttgatcagcagcaatttcaattatttcctcctccaaatggtacttatggactgaacatcgtttgctattcccttttgtccacaatatcctgaaaccccttaacaaacctcaggagcgtatggtgtctcgagcgccaaactcacagccaaatcacagctggaagagggattttctgtccttgtctgccttacatcaccccccatcttcaattcacaatccatattttccctgaaactctaggggcatgtggtttggagatcctggctccatccccaactccaactcc

SEQ ID NO: 42394 - DNA, 316 bp, Homo sapiens
gggcaaaataaaccttattaaatgatggttgttgttgttattctttattagattcaaattgtttttataaatcagtaatcaaaattgataaaaaatacaagatgtaccaaatgtataatacctgaaaagcaaacgctattttccaaagcaacctgagagttttttctctgtgcctatccacaatatccttagatagaattgtatttcctataaaagaaaaggttgtccattagcataatgtacgcacatatcaatattcagtgaggagaataagttttacctctactcagtttttaccatgctcatcacttaattc

SEQ ID NO: 42395 - DNA, 317 bp, Homo sapiens
  misc_feature (1)...(317): n = a,t,c or g
gaataaaacaagcttaacttgtaggaagtaaccagagcgatgaagtaaacttccactttcagaattggttccagcatctagagataggtcaagactgtagtgcctggggaacaatctaagaatagagaatcaggaaggccattaaatattacaggggtnnnnnnnnnnnnnnnnnnnnnnnnnnnnnnnnnnnnnnnnnnnnnnnnnnnnnnnnnnnnnnnnnnnnnnnnnnnnnnnnnnnnnnnnnnnnnnagannnnnnnnnnnnnnnnnnnnnnnnnnnnnnnnnnnnnnnnnnnnnnnnnnnnnnnnnnnntg

SEQ ID NO: 42396 - DNA, 448 bp, Homo sapiens
  misc_feature (1)...(448): n = a,t,c or g
gcggcacgagccttgcccgaagtcacacagtagttcatgacagccagacagaggcttgtccaactccaaagccatcctctactccacagcaccaagcnnnnnnnnnnnnnnnnnnnnnnnnnnnnnnnnnnnnnnnnnnnnnnnnnnnnnnnnnnnnnnnnnnnnnnnnnnnnnnnnnnnnnnnnnnnnnnnnnnnnnnnnnnnnnnnnnnnnnnnnnnnnnnnnnnnnnnnnnnnnnnnnnnnnnnnnnnnnnnnnnnnnnnnnnnnnnnnnnnnnnnnnnnnnnnnnnnnnnnnnnnnnnnnnnnnnnnnnnnnnnnnnnnnnnnnnnnnnnnnnnnnnnnnnnnnnnnnnnnnnnnnnnnnnnnnnnnnnnnnnnnnnnnnnnnnnnnnnnnnnnnnnnnnnnnnnnnnnnnnnnnnnnnnnnnngcccccccgctttttttttt

SEQ ID NO: 42397 - DNA, 467 bp, Homo sapiens
  misc_feature (1)...(467): n = a,t,c or g
nnnnnnnnnnnnnnnnnnnnnnnnnnnnnnnnnnnnnnnnnnnnnnnnnnnnnnnnnnnnnnnnnnnnnnnnnnnnnnnnnnnnnnnnnnnnnnnnnnnnnnnnnnnnnnnnnnnnnnnnnnnnnnnnnnnnnnnnnnnnnnnnnnnnnnnnnnnnnnnnnnnnnnnnnnnnnnnnnnnnnnnnnnnnnnnnnnnnnnnnnnnnnnnnnnnnnnnnnnnnnnnnnnnnnnnnnnnnnnnnnnnnnnnnnnnnnnnnnnagtaggaaagacttctgaaaaagattttagagtttgagtgaaagtaagacaaagtaaggggaaaggaagaaaaaaacactgggaaaacaaagtaatttgaaactctacaatctaatcctagttctctaatccagaccatcagcaagaatctttcaattttcttttaattttgtttgggggggtggggaagggctnattactntgcccca

SEQ ID NO: 42398 - DNA, 456 bp, Homo sapiens
  misc_feature (1)...(456): n = a,t,c or g
atgcaatattcttattgacatagcatctgatggagtggtccaagtggcccacggtgaaaaatctacataatttccaggttcatgtttaatcttgttacgtggtgcattctgatagagccacctaaacactggtcattcctgaaaatctataattataaattagcacaaactgaatttagcagtaactatgcatagaaaaggaagactttttcgttttggacttagatgttcagttcaaaactttttttttgtttgtttttttcgttttggacttagatgttcagttcaaaacttttctttttttttttctttttganatggagtctcactntgnnnnnnnnnnnnnnnnnnnnnnnnnnnnnnnnnnnnnnnnnnnnnnnnnnnnnnnnttcaagngatctcctgctcaaaccctgagtnctggactacagatgctgcccccacccactanntttg

SEQ ID NO: 42399 - DNA, 462 bp, Homo sapiens
  misc_feature (1)...(462): n = a,t,c or g
atagcacccagtgcctgctggagaacacgtaggtgctaatcatcatcctattcctctctcgttcttttgataaattggacttctttcctagattggtgggaatctggaaataatgctgttgaaataatctggaaaaacacagcacatgtgggttgctgctcttttggaaacagatgaaagatcagagaaaaaagaaattttaatcagggagaaagtgaattctcagagttcaagagtgacacaggattttttaaagtgccatcaattgtctcagacagtctatttattactatgtgaataccaagtcgtaaaaccctttggaaccatgaaataagatcatgggtcaattatagagagaagattggaaagcatgcctgatatttttctatttagacattgatgctccaattctcctgcaggggaaactgtgggagngcccagcncttagnagctctggtacaa

SEQ ID NO: 42400 - DNA, 468 bp, Homo sapiens
  misc_feature (1)...(468): n = a,t,c or g
taatgaaggnnnnnnnnnnnnnnnnnnnnnnnnnnnnnnnnnnnnnnnnnnnnnnnnnnnnnnnnnnnnnnnnnnnnnnnnnnnnnnnnnnnnnnnnnnnnnnnnnnnnnnnnnnnnnnnnnnnnnnnnnnnnnnnnnnnnnnnnnnnnnnnnnnnnnnnnnnnnnnnnnnnnnnnnnnnnnnnnnnnnnnnnnnnnnnnnnnnnnnnnnnnnnnnnnnnnnnnnnnnnnnnnnnnnnnnnnnnnnnnnnnnnnnnnnnnnnnnnnnnnnnnnnnnnnnnnnnnnnnnnnnnnnnnnnnnnnnnnnnnnnnnnnnnnnnctgaaatggggtctcattatgttgctgatctcgaacccctggactcatcatcaataaacactgttcagcaaaaaaaaaaaanaaaaaaaaananttttttttaaggngcgggactttttctttttgggggggaatttanctggcccggc

SEQ ID NO: 42401 - DNA, 316 bp, Homo sapiens
  misc_feature (1)...(316): n = a,t,c or g
nnnnnnnnnnnnnnnnnnnnnnnnnnnnnnnnnnnnnnnnnnnnnnnnnnnnnnnnnnnnnnnnnnnnnnnnnnnnnnnnnnnnnnnnnnnnnnnnnnnnncctctcactattattcaactttttctgggatactgctgaggcaggagaatggcgnnnnnnnnnnnnnnnnnnnnnnnnnnnnnnnnnnnnnnnnnnnnnnnnnnnnnnnnnnnnnnnnnnnnnnnnnnnnnnnnnnnnnnnnnnnnnnnnnnnnnnnnnnnnnnnnnnnnnnnanncgggggnnntnccccaaattcngggaacttnncancccc

SEQ ID NO: 42402 - DNA, 315 bp, Homo sapiens
  misc_feature (1)...(315): n = a,t,c or g
gnnnnnnnnnnnnnnnnnnnnnnnnnnnnnnnnnnnnnnnnnnnnnnnnnnnnnnnnnnnnnnnnnnnnnnnnnnnnnnnnnnnnnnnnnnnnnnnnnnnnnnnnnnnnngtctgaaaaaaaacgtaacagtacttaactacttgctgaaatgacatggatgggatttcaaannnnnnnnnnnnnnnnnnnnnnnnnnnnnnnnnnnnnnnnnnnnnnnnnnnnnnnnnnnnnnnnnnngtagaaaagaccaagttatagtgacagaacacatatcagtgttgccagttgtcagggaggtggaagaagagaagta

SEQ ID NO: 42403 - DNA, 313 bp, Homo sapiens
gagctgaatcacaccttgtgaacatgatggaggtgttcaaaaatttttgatgatttctgtaagttgataatagagactgagattcccatttgaaatacctaagtttctatctcacctggttcttaatcatacaaggttatatattgatttattgatctaaagttatttctgcatcacttttgaccaaaaatcaaggatacacagacaactgatgaaatttttcacttatgacttgaatgtttggagtcactataatacactctctcagccttaagttacttggcacacattttttttctactagaataaagag

SEQ ID NO: 42404 - DNA, 313 bp, Homo sapiens
gtcaggactcactatgcccattggttgtcatggcaggagggtcagagatcctgttgtcagagaccagtcatgaccctgaatctccctgtggcccttggaaagtcacttgtccctcaggggctgagttttctcgtttgtaaaaatgagtgatttggacccagcaatctgtagatgagctcacactgctcacaccatctacctcagaagaaaggcaagtgacagtgctgatgacagtggccttgcttattgggcagtgacaatcaacaggcattgtgctgagtgctttgcatagtttcttctttaacaggctgca

SEQ ID NO: 42405 - DNA, 314 bp, Homo sapiens
gctgatgccctgtacacattgtagtggtggtagcttagcaaagcgctcaggaagaaattcaagagttggtagccaaaggctggtaagtacaaattatttaagagccagtttttggtagcaggaaggccagttccttccatctgtcttctattccctccctctgtgaaagctactgcaagttagcataacatatataccacaaaaataaataatacacaaaaataaatagtaagtaggcagaagcttggcacctgtttttgaaaggatttaacctgcctacagaaaaggccgtatctcagacttgctggactata

SEQ ID NO: 42406 - DNA, 312 bp, Homo sapiens
ggtgaaaaatatagaagccaggggcagaaacgtgtatgtattacactcagactccaggagcaatggattgcctgaacagtttcccagttcatatttgtaggattttgatgtcaccaccttctgagggagggggagccgttctagaaagactctggaacttcctcactttccctctgagcatggcctcctttcttttctgctcatattttttcttttacttttgtttctcctcttttctaacttccagagtctcatgaggatgtagtcagagtttcaggggcattaacagtggagtagatccattgttcaggt

SEQ ID NO: 42407 - DNA, 189 bp, Homo sapiens
  misc_feature (1)...(189): n = a,t,c or g
ggcggatgcttcccgcccaaagaaggaaccagaagcaggcaggatggggaagcagctggtggagaagccaaattgtttccttaagagaaagggatttannnnnnnnnnnnnnnnnnnnnnnnnnnnnnnnnnnnnnnnnnnnnnnnnnnnnnnnnnnnnnnnnnnnnnnnnnnnnnnnnnnnnnnnnnn

SEQ ID NO: 42408 - DNA, 310 bp, Homo sapiens
gggagctgcttaatgtccttttgttctatttttggagataataaatttgagctttttggtaggatatagcctgccatatttcttcattgaaagtactcttcccctttgtaattaataaataataatgaggtccaaatcctgtgataaagccaaggatgtataagcacagaagcttttgctttggtgattgcgacgtttatttttgctttaatgaatacaactgtttttgaaaatagtttttgtagagtgtttgtttttgtattttgagggtgggtctcattctgccacccaggctgggatgcatttctgc

SEQ ID NO: 42409 - DNA, 313 bp, Homo sapiens
gctgacctcacatgatgggaagaatgagggggtcatgcatgcctcttgtttaaggacactaatcccattcatgagggttctgccctcatgacctaatcgtccctcagaggttctaccacctaacaccatcacattggtaaatttggggggacaaaaacattcagaccatagcatttaatgtattgtcaatgactaatttcatggtctaatggcagagttgagtagttatgacagaaactttggccttcaaagcctaagatatttactatctggctctttacagaaaaagtttgctgacccctgccctattatg

SEQ ID NO: 42410 - DNA, 312 bp, Homo sapiens
  misc_feature (1)...(312): n = a,t,c or g
ggggaagacagagtactattattgttttttacctttttttgtttttgttttttgagacagggtctcacaaggggnnnnnnnnnnnnnnnnnnnnnnnnnnnnnnnnnnnnnnnnnnnnnnnnnnnnnnnnnnnnnnnnnnnnnnnnnnnnnnnnnnnnnnnnnntatagtcccannnnnnnnnnnnnnnnnnnnnnnnnnnnnnnnnnnnnnnnnnnnnnnnnnnnnnnnnnnnnnnnnnnnnnnnnnnnnnnnnnnnnnnnnnnnnnnnnnnnnnncaagctaaagcaatctgactgccttgcctcccaaa

SEQ ID NO: 42411 - DNA, 312 bp, Homo sapiens
gccaccataatactgaaagttttatggaaatatttcctctctaaagcacaccgttgtatgttagaatgttttcctggtgtacttttttactatgtgtaatttaaaaagtaattctagactatcaagatagaattttattataatattactgcttaatatgacactttcttctaattttattgtgccaagaatttgtgcaaaagttacacaggcagatagttaccttcttttttcctttgggttttcaatacgtactctaacaaaggaaagatgaaagaaatcagggagaagatctggcatttagaaacacac

SEQ ID NO: 42412 - DNA, 341 bp, Homo sapiens
  misc_feature (1)...(341): n = a,t,c or g
ggctgtctcaaaaaaaaagcaatttcctctccacttctccactcctcactatgtgcttatgctaggcccagctgagctgggaccttcgggctctttctgtcccagttacaaggaggaaatggaaagcaaatgagaaaactgctagatgccaggagttgctgctgccttcggcaacacccccctctcatcctccccgcctcatagatgctaggaaatgggaaagggagnnnnnnnnnnnnnnnnnnnnnnnnnnnnnnnnnnnnnnnnnnnnnnnnnnnnnnnnnnnnnnnnnnnnnnnnnnnnnnnnnnnnnnnnnnnnnnnnnnnnnnnnnnnnnnnnnn

SEQ ID NO: 42413 - DNA, 351 bp, Homo sapiens
ggattacaaaaggcacaaacccttcaaccatactcccactggctgcctttcctgtaccttctgtgtggtttaagtacacctgaaaaaacaaaacaaaacaattacagctcagtttatgtaacttgcatatttaacaggagcatcttttttggttgttatgaatcttccatttttgtcatcataggaacttagtttatgtaaacaacgatttgtgggtgtgtctagatgcatatggtttatgtgtttgtaaagtaaaatacataaataagctgatcacgtaaaagtgattgtgactatagtagctcttttggtgcaccctatcaaagcttttagagtggagtcattttagaa

SEQ ID NO: 42414 - DNA, 339 bp, Homo sapiens
ggagtgcagtggtgtgatgatgacttactgcagtttccaactcctcggcacaggagaattgcttgaacctgggaatcagttaaactaaaatacaggtgactgttttggtaggaaaatattttcccaccttcttcttaccttactgatttcatgtctgagagctaagacactttctccaagtgtcttagaggcatgctgtcttcttctggattcaaattgaggtcatctctggggaacctctctacgtggatacaagtggagaaaaacacattaaaatatctgtgggcgtttgagagctgctcacattttcagggaggctgccaacatttatgtttgtgc

SEQ ID NO: 42415 - DNA, 339 bp, Homo sapiens
ggtatcaaaggacttttcaaaggtggcgacatgtctaagaatgtgagccagtcacagatggcaaaattgaaccaacaaatggccaaaatgatggatcctagggttcttcatcacatgggtggtatggcaggacttcagtcaatgatgaggcagtttcaacagggtgctgctggcaacatgaaaggcatgatgggattcaataatatgtaaagaaaatgccttaatataaactgactcagttgaatacctaatttgctgagacctcagcgtttcccttctttttgcgaattggggggaaagtgtatttttcttgcttatcatgcactctttccttttctt

SEQ ID NO: 42416 - DNA, 338 bp, Homo sapiens
  misc_feature (1)...(338): n = a,t,c or g
gnnnnnnnnnnnnnnnnnnnnnnnnnnnnnnnnnnnnnnnnnnnnnnnnnnnnnnnnntatgacccagcaatcccagcaatttttagcacgtatatacccctcaaaatgaaatcagtctgtctaagagatatctgcactcccnnnnnnnnnnnnnnnnnnnnnnnnnnnnnnnnnnnnnnnnnnnnnnnnnggttgtccaaatggatgaattgataaagaaactgtttcatgaatagaaacatgaatagaaaatgtttcatgcaacattattcagcctttaagaaaaggagaccttccttttgccacaacatggatggacctggaggacattaaaggg

SEQ ID NO: 42417 - DNA, 346 bp, Homo sapiens
gacctctaatgcttgtagtaaacaggccaattcatagctatgcctatttattttagttaacacttaactactttgtgacaggcactattgtaagtgcttaaagctattaatccatttaatctgataactcattgttctgatagattctccttctttcccagatatctcctctaatgggaaagtaattacacactaaatggtaaaaggtagaatacagtataacttttgaaaagagagagaaactgtgtgggcagaaagattgcactgcagtttatttgaaatgtcctcctggattgggaaaatctctgcagcctggcacacttactgggcttttcttccattcctc

SEQ ID NO: 42418 - DNA, 347 bp, Homo sapiens
gggtgaacttaaaagatattggaaccaagaaaagagggcttttaagacaaatgaaggaatgaacagaatcagaatgagttacactattgccagctttgcctccctacacatatactatagataaggcgatgacttcatgaaaccaaagtgttggcaacttaggaatggttctgtatatgaggcccttctacaaacaagcacatcactggaggctgagctgaattgaaaacaattaggaaatataagttagacttatcaatgaggagtgaatattggtgttcctttaacatcattttttagcttaaaatacaaaaggcacaggaaggtgtttatcagaaaactcatag

SEQ ID NO: 42419 - DNA, 302 bp, Homo sapiens
  misc_feature (1)...(302): n = a,t,c or g
gaaacacttgagacattacactaaagtgctgagtatagaaaataaaactaaagttgttaaattatttgtatataacttttaaaagagtggaagatattttgcaaagttatattcaaagtgtacnnnnnnnnnnnnnnnnnnnnnnnnnnnnnnnnnnnnnnnnnnnnnnnnnnnnnnnnnnnnnnnnnnnnnnnnnnnnnnnnnnnnnnnnnnnnnnnnnnnnnnnnnnnnnnnnnnnnnnnnnnnnnnnnnnnnnnnnnnnnnnnnnnnnnnnnnnnnnnnnnnnnnnnnnnnnnnnnnnn

SEQ ID NO: 42420 - DNA, 335 bp, Homo sapiens
gagagtattacctttgggagaaacagattatgaggaaatatgttcatattaagtttattttaatttccagattttattatagacttgtcttcatctcctagttctgactactaaataataatcagttagagatcattcgtcattaccaattaattttttacattataatgttagccaactactgttgcatcacagagtccaaataaataaataaatcttactgaggctggaaagctaacattcttactcagaattaaacaaacaaggtcttgtcctgctacgtgggctggatggagtgtggtggcgtgatcatagcttgctgaaaccttgaactc

SEQ ID NO: 42421 - DNA, 337 bp, Homo sapiens
ggggcaatgatagagggctgacaaaggcagcataaaaaaaggcagaatatagacaacctatttctcttaggctcaccccatccacccctacttcacccccttacctaccactgttttcagggttaaagcaattttagcaaccctttactaggaactgtggggagatagcttgtattttcagtaagttggcggtggggggcagggacaaactccaaacaaactctggaaaacgaatgtaggaagtttttatgttccttgtcatttggctgtcccttttctccttcctcgcacaaccctgtatcagtggggcagcacttccttctcagaccgcttgtcc

SEQ ID NO: 42422 - DNA, 344 bp, Homo sapiens
  misc_feature (1)...(344): n = a,t,c or g
gcggcacgaggctagcaccatgnnnnnnnnnnnnnnnnnnnnnnnnnnnnnnnnnnnnnnnnnnnnnnnnnnnnnnnnnnnnnnnnnnnnnnnnnnnnnnnnnnnnnnnnnnnnnnnnnnnnnnnnnnnnnnnnnnnnnnnnnnnnnnnnnnnnnnnnnnnnnnnnnnnattctttatccccacttcctgttcttctctctctctctgccctcacttccgctaagccctgctcaatgtccagcccatcagcttcttcctattcaccccagtctttcttcctctcttactcacttgcccgagtagaagaaagatgaatgaagctccttgcatgctggaactgtgt

SEQ ID NO: 42423 - DNA, 343 bp, Homo sapiens
  misc_feature (1)...(343): n = a,t,c or g
gagaattttcaaactgctttgagttctaagctgggctatggtagcatgaggagagagcatccctgcctgccacccttcttttgccactttttggctccatcctatacttggaagcctttgataccttaatcagtgtttccacctaatatgcctaagagtgctcacaaaatctaggatagttgtacagaaaatctagnnnnnnnnnnnnnnnnnnnnnnnnnnnnnnnnnnnnnnnnnnnnnnnnnnnnnnnnnnnnnnnnnnnnnnnnnnnnnnnnnnnnnnnnnnnnnnnnnnnnnnnnnnnnnnnnnnnnnnnnnnnnnnnnnnnnnnnnnnnnnnnnagg

SEQ ID NO: 42424 - DNA, 359 bp, Homo sapiens
  misc_feature (1)...(359): n = a,t,c or g
gcttcaatgaagaatacacttcttaatgctgaaaatattttttattatttccctatagctnnnnnnnnnnnnnnnnnnnnnnnnnnnnnnnnnnnnnnnnnnnnnnnnnnnnnnnnnnnnnnnnnnnnnnnnnnnnnnnnnnnnnnnnnnnnnnnnnnnnnnnnnnnnnnnnnnnnnnnnnnnnnnnnnnnnnnnnnnnnnnnnnnnnnnnnnnnnnnnnnnnnnnnnnnnnnnnnnnnnnnnnnnnnnnnnnnnnnnnnnnnnnnnnnnnnnnnnnnnnnnnnnnnnnnnnnnnnnnnnnnnnnnnnnnnnnnnnnnnnnnnnnnnnnnnnnnnnnnnnnnnnnnnnnnnnnnnnnnn

SEQ ID NO: 42425 - DNA, 346 bp, Homo sapiens
  misc_feature (1)...(346): n = a,t,c or g
gaactggtttcaaattaataaatacaaaaacaatataaaaatatacaaccagttgataagactgtactgcagatgctcagaaagttaaatctcgctctcatatgtatgcaggtatgtcttgagtgtcaggatttctgggtagctgcggctggtctttcggaagaagtccaggctggtgagatgttcaatgtcacgcaccctagctgtgtgcatcttcatgagttcttctacccattttgattcgtcctctgagctattgcagctctcctcgttgtcaggccggtgaggcaggatgaaggaggacncaganagagggccgcacacttgtcggcaggctgagaaaacc

SEQ ID NO: 42426 - DNA, 340 bp, Homo sapiens
gtcattgttcagtgaagttgtgctgccatagcaactgatgcagagtgaattttaattattaagatcaaaataggcttatgataaaaactatttaacaacatcaaatatataaactgaattgtttttactttctcactaatcatttcttgactgctatagaaacagcacaacataactctacttcacatttgattctttatattgttttaaaaaattcattgtttgaaactccagtaaatattttagaatatcaattagtatgttgagataaacattgtgttcaaaattaaaatggcgtgtgaataatctagctttcttatcctctagacatctgatttaa

SEQ ID NO: 42427 - DNA, 346 bp, Homo sapiens
  misc_feature (1)...(346): n = a,t,c or g
ggatatcactctgtcaccatcaaaaaatacttatttagtgtcaaatcctactgtgaaatagcagaactgtgggatttgtaaagtggaaatgcagaattnnnnnnnnnnnnnnnnnnnnnnnnnnnnnnnnnnnnnnnnnnnnnnnnccaccacacggnnnnnnnnnnnnnnnnnnnnnnnnnnnnnnnnnnnnnnnnnnnnnnnnnnnnnnnnnnnnnnnnnnnnnnnnnnnnnnnnnnnnnnnnnnnnnnnnnnnnnnnnnnnnnnnnnnnnncccctttcttacccgttttacaaaaatcaactcangatgtatcanagacttaaatgtaagacctatgaccat

SEQ ID NO: 42428 - DNA, 335 bp, Homo sapiens
  misc_feature (1)...(335): n = a,t,c or g
gtcnnnnnnnnnnnnnnnnnnnnnnnnnnnnnnnnnnnnnnnnnnnnnnnnnnnnnnnnnnnnnnnnnnnnnnnnnnnnnnnnnnnnnnnnnnnnnnnnnnnnnnnnnnnnnnnnnnnnnnnnnnnnnnnntagtatcatattcttttttgttagaatgagcctttagggggcttacaatgaattaaataagcaaaacaaggagtaaaattgaaaacccttagttttcttcttttgtgtaaaagattactataatgcaataaagaagaggtcactccttaaagttgcttggtgactaatcttcagatctaatcttcaattattttacacttaaaa

SEQ ID NO: 42429 - DNA, 334 bp, Homo sapiens
  misc_feature (1)...(334): n = a,t,c or g
gtgtgacacctccaacttctccgactacatccgtggaggcatcgacagtcaggtcaaagtacctaagaagattagctttaaatccttggtggcctcactggcagaacctgactttgtggtgacggacttcgccaagttttctcgccctgcccagctgcacattggcttccaggccctgcaccagttctgtgctcagcatggccggccacctcggccccgcaatgaggaggatgcagcagaactggtagccttagcacaggctgtgaatgctcgagccctgccagcagtgcagcaaaataacctggacgaggacctcatncggaagctggcatat

SEQ ID NO: 42430 - DNA, 345 bp, Homo sapiens
  misc_feature (1)...(345): n = a,t,c or g
gaactggatagatagatggaaaaggcagatggataaaagtgcaataaagtaaaatatagcaaaatgttaagtgttgaatccagctggtagatacgcatatgaggcgtgataccaattcttttatcttctctgtatttttaacaactttcttaatataatattggtcatagtaaaacaaataaaaacaaaaattgaagagcaaggacttctgcttccaagaagatgaaacagacttannnnnnnnnnnnnnnnnnnnnnnnnnnnnnnnnnnnnnnnnnnnnnngtaaatgaggataaagatttttttcttaagagtgangaaagtnccgttcaaagggccctcgg

SEQ ID NO: 42431 - DNA, 340 bp, Homo sapiens
gattgtttttgcactcccgcttgaaagcttatttggttggctggatataagtttcaaaatcattttccttataactttgaagccagtgctccgttgtcttctggcatctgtgctgctgatgaaaagtctgatactgacttttatgtgatttatgtatctttataggaattcagttttttccttatgatatcttgaaatttcaataggatgtgtctaagttgtcttccccttctctgctgaccgataaacactgttcagcccttagagtaacctgatgattggtgtcttccctttccccaaggaaatttctggaactaacataagaaggtgggccttctgg

SEQ ID NO: 42432 - DNA, 333 bp, Homo sapiens
ggagtatccaacccttacaaccttcttcgaaggagaaataatcagcaaaaaacaccctttcttaactcgcaagtgggatgcagatgaagatgttgatcggaaacactgggtgagtaaatctgatctgtgctgggtcatctaggggctgctagagaattgaagaaatgctgggagccagagaccttgtcccttattgaggattactggggctttgcaaccaagtaaaaggttgcactgcacacagacctcagttgttccatcttccttatgaggacagtttaaatacgatctgacctgctgcttaaatagcaaatggttgtctgatgatagcaa

SEQ ID NO: 42433 - DNA, 338 bp, Homo sapiens
ggccgcgctccgcatggagcgccaggccgcctcggaggagaagaggaagctggcccagttgcaggtggcctatcaccagctcttccaagaatacgacaaccacatcaagagcagcgtggtgggcagtgagcggaagcgaggaatgcagctggaagatctcaaacagcagctccagcaggccgaggaggccctggtggccaaacaggaggtgatcgataagctgaaggaggaggccgagcagcacaagattgtgatggagaccgttccggtgctgaaggcccaggcggatatctacaaggcggacttcaggctgagaggcaggcccgggagaagctggc

SEQ ID NO: 42434 - DNA, 351 bp, Homo sapiens
gggcaatccagaaacgcagacagtctcaagaaaaaattgatgacattctccaaactttactagatgctacatacaaggatgggcgtcctttgactgatgatgaagtagcagggatgcttattggattactcttggcagggcagcatacatcctcaactactagtgcttggatgggcttctttttggccagagacaaaacacttcaaaaaaaatgttatttagaacagaaaacagtctgtggagagaatctgcctcctttaacttatgaccagctcaaggatctaaatttacttgatcgctgtataaaagaaacattaagacttagacctcctataatgatcatgatgagaa

SEQ ID NO: 42435 - DNA, 352 bp, Homo sapiens
  misc_feature (1)...(352): n = a,t,c or g
gcagattaattggagacaaggcatataaatttatcaacatgcacgcgggggagtactgcagagttaccctaacctcccagtggggtataggagcttacataccnnnnnnnnnnnnnnnnnnnnnnnnnnnnnnnnnnnnnnnnnnnnnnnnnnnnnnnnnnnnnnnnnnnnnnnnnnnnnnnnnnnnnnnnnnnnnnnnnnnnnnnnnnnnnnnnnnnnnnnnnnnnnnnnnnnnnnnnnnnnnnnnnnnnnnnnnnnnnnnnnnnnnnnnnnnnnnnnnnnnnnnnngtggnnnnnnnnnnnnnnnnnnnnnnnnnnnnnnnnnnnnnnnnnnnnnnnnnnnnnnnnnnng

SEQ ID NO: 42436 - DNA, 350 bp, Homo sapiens
gctggcacaaccaaccaacagaacatagcccaaaaaacacacagacatatatgtacacataattgatgacaaatatcacaatgtaaaacagtggggaaaggatggtgttttcaaaaataattctacattaaccacatgaaaaaaggaatctgacatctacctcatacagaagtagacactcattccaatgaaagagatgtaaatgtgaatgccaaaacaagaaatattttaaaaggtaacaagagtatcttcataaccttgaagtaggaaaagtcatctagactagtacacaccagcaacaaataaacgtaataaactaatctagggattggtaaacttcttctgtaaaa

SEQ ID NO: 42437 - DNA, 342 bp, Homo sapiens
gcggcacgagaactgggagaaggggcacagcctggaggggcgagggagagtccaggatggcgctgtgtcccggagacacaggcctccccgttgccagccaggccagtggctctgtccacccatgtcagggcttcgtgagacatggaaagcaggtgccctgcagatgtttgttgggtgggtgatgatgggactcaggacagggacgctgcgggaggctgaggaagccacttcagcccgggaagcattctgacgcctgggttccagcctggacttgcctgctgtcctttggggtccgtaggaggatgggagtgtgacaggtggctctgcctgcctctgccacag

SEQ ID NO: 42438 - DNA, 328 bp, Homo sapiens
  misc_feature (1)...(328): n = a,t,c or g
gnnnnnnnnnnnnnnnnnnnnnnnnnnnnnnnnnnnnnnnnnnnnnnnnnnnnnnnnnnnnnnnnnnnnnnnnnnnnnnnnnnnnnnnnnnnnnnnnnnnnnnnnnnnnnnnnnnnnnnnnnnnnnnnnnnnnnnnnnnnnnnnnnnnnnnnnnnnnnnnnnnagaaatgaggttttgccatgnaggncangntgnacttgaacttctaancttaagtgatntgcnacctaagcnttccaaatggntgngattnctgnccttagacgcttataaactggtnnagaatggcaagtgagaagganntatnnntancanctgacnngtgtt

SEQ ID NO: 42439 - DNA, 344 bp, Homo sapiens
  misc_feature (1)...(344): n = a,t,c or g
gattctttttaacctatgcgacttttgccttcttccatctcaaccttttaaaatcttacctacctgtcccttacttcatcaaatgtttctaattatttagaaacaacttctaaatttcctaatatatatgtatatctgtgttgtgtatgtatgtgttataactaaattagagctaaaatattcttttattagtatgaaaatttgtggaattangttgatttatcccttcatatatctctgtgagaaatctcttgttcagcctgttagcctcagagaacttaaagttttattgattttattgcatgtatgtatgtatgtatgtatgtatgtatgtaatgtatgga

SEQ ID NO: 42440 - DNA, 343 bp, Homo sapiens
gcataatccttgatgagagtttgctgcgtgcctactcagtgccaggcgctgggggacacagccgtgttcaggacagccttggtcctgttctccgggagccgacattccagggggagagaagtttcctgaagacttccatgctgcgttccctctgctcctgctcctggcgccatcctaggagccagccatgcacgcaagcgtcatgcctccagggctctgactgcccagcccctcaccgcaactccacctcagctgcacacacccttggcacatcctgaacctcattttcatgacggacacacaatttttgctctctcctgtccaagcctcatcctctggccgc

SEQ ID NO: 42441 - DNA, 343 bp, Homo sapiens
gcttcatagcagtatgaaaatggactaatacataatgattcccttgtttggaggattgtcagatactatatgaaaagcggtttcacatgtgcttaaaaaaacctgtatatgtgccttatggtgtcattatttctaatttatagatgtagaaataataatatttagagaaataaaatgctttttctaatcacatgccagtaggagatcagcaagctgggactagaactcaggttattttgattgaaattcttttttacgaagccctgagggttctaaaaagctcgagtttcactgtgaaccattgtatggaaaacttaaatgtagccagaaaccacatagagaa

SEQ ID NO: 42442 - DNA, 339 bp, Homo sapiens
ggtagttccagtctcagtctcaaggcctgagaaccaagagggctgacagtagcagttttaacccggaagctgtcgggcgggcgggagatccaagaagagccagggttttagtccaagtgcaaaggccagaaaagaccatgccccgcccacaggaggaattccttcttacccagccttgcctttcccttcaggtcctcagcagattgggcagggcccctccccaacggggaaggctgtgggctttcctcagtttacccattcagatattaatcccatcccagaatgctctcacagtcacacccagaataatacttggccaaatgtttgttggggaacctg

SEQ ID NO: 42443 - DNA, 350 bp, Homo sapiens
  misc_feature (1)...(350): n = a,t,c or g
gcttcattgatctccttgtctcactttcccacttccctcaccccattgccccgagctgacatctgctgagcagagtgtcaacacttcagttcattcctcaggctcttctttcacgacagaagtctttatatttctggtttcaggatctactcggtctgntctaatgacttntatttttntttcattngggcaatgannnnggcatganngagngagatnangatgaccnngnngnnggnnancagcaanntgnntngnnnangnantcgtacacntantannnngactcaggnngaacgtantncntngcnannannnacgtngtannaagatgnaaanncnnacccgaa

SEQ ID NO: 42444 - DNA, 341 bp, Homo sapiens
  misc_feature (1)...(341): n = a,t,c or g
ggcccagtgcactccgggtggctgccgacatcctgggcattcacggttccgttacctccccttccacatcctcccagcattggtcttcctcctgttggctttttggccccctaccccatcccaccagggctctcagcatcaacttttgctggcatgcttaggctgagggtgatgtccctctgttgttcctgaacctctttgngttggaatggtcctgtttgcagattcagctcccaaatcatcatccttccctgagtgctcggcctgtgctncctcgcctgcctgnctgctgantggctcttgctcttaatgngcacacatgctgngntacacttacccta

SEQ ID NO: 42445 - DNA, 343 bp, Homo sapiens
gagcttcacctgaatcacagctgtagtccaaaaccttgttaaaatacctctctcaaaagatgaacaaaattcaacttaccttcttttctccactttgattttcttacaaggggtaaaccgacctaaatatttttgcagagatacacctcagttacaaagtttacctcttctagtaaattacactttcccagaaactatgggaaaatgttgtttggtgaatgaggaattaatggtaaaaggatattaaatgaagaatgcccacaaagtagttgcttaccaaagatacctagtacattagactgctctcaactcataccaaaaccaaggaaaatgggtaaaactt

SEQ ID NO: 42446 - DNA, 342 bp, Homo sapiens
  misc_feature (1)...(342): n = a,t,c or g
gcggcacgagggtgcatactgtttaattttctatgcttcataacgtacacagaagtgggttttcaaaattttgtgctatcaaaatgttaggagnnnnnnnnnnnnnnnnnnnnnnnnnnnnnnnnnnnnnnnnnnnnnnnnnnnnnnnnnnnnnnnnnnnnnnnnnnnnnnnnnnnnnnnnnnnnnnnnnnnnnnnnnnnnnnnnntgtctctataannnnnnnnnnnnnnnnnnnnnnnnnnnnnnggctgccctgaggaccagggcctcctggatctccaggacctcagggtagcactggtcctcagggaattcgaggccaacccgggtgatccagaagt

SEQ ID NO: 42447 - DNA, 336 bp, Homo sapiens
gcgcttgtcacacttctggccacatcagaatcgtctgagggacttgttcactgcaggttgctgggtcccatctctagcctctgatccagtagcctggggtggggcacaggatgtcctgctgctggggtctgggcagcgctatgagaactgctgacgttggagctcgatcaggtggtccctcactccctgacccagggcatttgctgcttcctgtctctgccattcttttctcaacctggggcacttgcttttctcgctatgctgccctgccctttgctgaggcctgggctatccctggcagggtgcagaaaaaaaaattttaagttacttttctca

SEQ ID NO: 42448 - DNA, 366 bp, Homo sapiens
gcatagggctcggcgtggagcacagacagaagatcactggggcgaacaccgagtgtggcggggagcactgagagagagaagatcactggatcaaaccccgagtgtggcgtgggtgaggtgcaggagcctaaccaacggtaaggggtgctcccaaaggaggtggagggcagaaaaaaatacgtgaaggaataaagcctgaacatttccacattttgatgaaaactgtaaactctagtgatccaagaagctcaacaaatcccaatcacaaaacatggagaacctgaccaaggcacatcacagaggtgaaaagaaaatcttaaaggcagtcaaaggtgagaaactaggtaaagaagaacaggcaaaagg

SEQ ID NO: 42449 - DNA, 352 bp, Homo sapiens
gtgcagttataacttcccatgttaactgtctcctatatggaagacacttggttttctctgtcaacctgtcatcaacactaaaccactgagtgctcctaaaagctgtgtgctgggcattcagatgaaaccaggaaaaactttgaaacagcactaaggttgcaagagtctcttagaaattgtgtacttgttagctctatgatatctagaaaaagctctgaacaggagaatggcctacaccagattccttcaataattctaggtcataactgacctacaggtttcagaacgcataaaatctttctttgtactccaatacctcctaatcatataagacgccatgcttctatatttt

SEQ ID NO: 42450 - DNA, 252 bp, Homo sapiens
gaatcactattagtgaatggagaatacacttgaaagggctgtgttttaaatctggatgaaaagagttctttggaaggacagattgtatggggtgttctgcagggcgttcaatagggcagttacttccagggtgtgggccgaggacccttggagggttcccaagaccctttcagtggatccaagaaaactcccccctttcagctaaatatctgtgagaggccagatttacttcacataatttttttttttttt

SEQ ID NO: 42451 - DNA, 362 bp, Homo sapiens
gagaaagtgttagcttactcatttaacaacaggtaagatgaggtcactattatatacaaccatagtgtaattttttctcatattacgttttccaactttaaagaataacttaattttcatactcaccccacccccctatagattctgacctctatgaaggcagagattgtgtctttcatgttcatcattgtgtccccagcactaacacagtttccaaactgtgttaccttggtaacatgtaggtgttcaatagagccttgtttaaggattcttctttgtacaatatacaacacacatgcacacaggcatgtgcacacatagtgtagttgatcgaatgggggtcctgccagcagatttgtccc

SEQ ID NO: 42452 - DNA, 351 bp, Homo sapiens
gatttttcccattgattattgtgatcactttgcacagtttcaggttgcatagtaatttttataatctcatactaccctgcaaagtgaggactgtctgtgcttaacttttcactcgccaaaattctcaagttgaattgcttttctggaaagtcacaccagtttatctggagatgtatacgccccattgtgagaagctcagggctggactgagatgggcgttcttaatgcatggtctcccaaagactgaggacatgtctttgcctttcttagtagaacactcagtgggccttgaaatccgtatttcatatgtaaataccataaaatgagttctttccacttagtattaggact

SEQ ID NO: 42453 - DNA, 361 bp, Homo sapiens
  misc_feature (1)...(361): n = a,t,c or g
gctactcacaagttcgattgtttcaatttttagcccctattctaatttttaacttaaatttaatttttagctctcattcttctcacannnnnnnnnnnnnnnnnnnnnnnnnnnnnnnnnnnnnnnnnnnnnnnnnnnnnnnnnnnnnnnnnnnnnnnnnnnnnnnnnnnnnnnnnnnnnnnnnnnnnccatccatgttgttgcagatgacaggnnnnnnnnnnnnnnnnnnnnnnnnnnnnnnnnnnnnnnnnnnnnnnnnnnnnnnnnnnnnnnnnnnnnnnnnnnnnnnnnnnnnnnnnnnnnnnnnnnnnnnnnnnnnnnnnnnnnnnnnnnnnnnnnnnnnnnnnnnnnnnnatat

SEQ ID NO: 42454 - DNA, 351 bp, Homo sapiens
gagctgcttcatggaaccattagaatagaatgtcaaggatcagaggggagagaggcttcacttatactaatttatatcttttaaaacagaactgcaggaatgatttccctgttaaaatttgtttatataacataaggctattactagcccttctcggggctgttgtaaggatcgagtcagaaagcagatgtaaagctctgcacacagcaccagtgctcgcttattgctattttacaagggggagaagttcagcaagaccagcctgggtaaggtcagtgattgcaacggcacctaactcaggtgttcagatcttaagtctgcccctttctagcccactacaggtatgcattt

SEQ ID NO: 42455 - DNA, 350 bp, Homo sapiens
gatgcactcaagaatctctctgctcattactgtatgaccatctttgccattaacttaccttgtaaccttgagcaggagctctatcaaaactagttagttcttccacatcgtgcgcccctcagtgctggctgagctcagtggttctttgttcacatagaacaacgcgctgtcacactttgtcaaacctactccttgacacctttgtacttctgatcagaacttagaaaaggagagccaaaagggaatgaggaggcagccgagggagaagggctctgccagtggcagagtaaggaggggccattgtcctctgactccccataagcctgagacccaggagaggtaccaggtgg

SEQ ID NO: 42456 - DNA, 361 bp, Homo sapiens
ggacgatgttgcagagccctgcttttcaccctgtgtcttgttttacatcattttctttctttcttttttaaattggagttggagatctgacagatttgcaagtatagtcttttctctatttcacctaccctgcaagtgcatatggcaggagaacttgttgcttcctgttgggtagtatgcataaagaataggaaaagagatataaaatttatttatgtaacctgtaatttattgatttgataacctgtagaaaggcagtgtgaagctgcactgattgtcaccagtggaatagggtggcttgctctagcaaatacagacacaggacacccagtgaaatactgcatggaatatacttatactg

SEQ ID NO: 42457 - DNA, 350 bp, Homo sapiens
gcggcacgagagcatttcatgttgtttcagtagagaacaatttgcctcgttctgctctttgcatctgaactgatctcagtcttaatggctagaatctgatggggtggtggatgaattctttagattgttgctttttaatcccagcagatgcctgtatttttaattgaaacaaacccctgggaagagcatcctcctgaccatttaggttgaatctctttctcttaaaactgctttccggagggtgctttggagagcatttcctgttagcttgaactcttacacctgaggccttatttgtcatgtgtagttattcatgcattcaataattattaagctccagcaggcagagg

SEQ ID NO: 42458 - DNA, 332 bp, Homo sapiens
  misc_feature (1)...(332): n = a,t,c or g
ggtgagtggctggagtgggcagagactctccctggggcagagagggctgtggtgatatgatagacggaattaactttggattcagagagacctcggcttggacctctgcttggcaaatcgcttgagccctccaagctctgctttctcatctgtactatgagcctgttcctacctacccacaggtcgnnnnnnnnnnnnnnnnnnnnnnnnnnnnnnnnnnnnnnnnnnnnnnnnnnnnnnnnnnnnnnnnnnnnnnnnnnnnnnnnnnnnnnnnnnnnnnnnnnnnnnnnnnnnnnnnnntccctctgctccgaggagctggggttacaggc

SEQ ID NO: 42459 - DNA, 329 bp, Homo sapiens
  misc_feature (1)...(329): n = a,t,c or g
gttttaatgctttatgaatgtttttaaagtattgttctaaaagaatattttaataattgcatagtatttttgttttgggagagttgtttggttttggtttttgttctttttgtttgtggggggcnnnnnnnnnnnnnnnnnnnnnnnnnnnnnnnnnnnnnnnnnnnnnnnnnnnnnnnnnnnnnnnncatgggctcaagcactcctcccgcctcancccccctancanctgnnactacnggcntgcaccaccatgcccanntanttnannnnnnntntttnnttatttntngnnnannnnangcntactgnnnnnnccannctgcctt

SEQ ID NO: 42460 - DNA, 335 bp, Homo sapiens
  misc_feature (1)...(335): n = a,t,c or g
gagactctggattctgttatttttattttatgagccacatttcctttttcttaggagacaattttctgagttaggcttgaaatgcattcagtttcttaactgggagctttgatctcctttcaaaccttttgtctttagctagatcctttgagtctgctccttgctttgttcaggaccagctagagatctgggtagactgagtttggggtgtccttactagctcttgcccttttgtggtcccccttattctttaatattaataacttcctaccttctcttttctagactcttatgctgaagcgttnanagggcnccctcccaacccctgttgcata

SEQ ID NO: 42461 - DNA, 345 bp, Homo sapiens
  misc_feature (1)...(345): n = a,t,c or g
gaactggaagtaagaaacgcaattctgagcgtgctgtctggaagaagcgctgtaatcaaatgaccaggtggtcactgcgttctatcaggatgtcagcctaagttagccagagcccaaagaggcacactggggtgtgcgctgggtccctgtgcaggcacaggaaccactgagaaggacacagtagttttgggggaaagttggctgtaccgggtttggtcaagctatccaaaaatcatcaggcctaaacacgccttgctcctccaataacatcaatttccgacccaaatttaaagttaacaaacgtanagtgctttctagggcctgtcaaagagacacactgtactg

SEQ ID NO: 42462 - DNA, 344 bp, Homo sapiens
  misc_feature (1)...(344): n = a,t,c or g
gcagaatgtgagcatgtcttttacaggactgactgtaaggctagtaaactgattcccaaggatactccaaaaggaaagttctaagcaatgacaatcaatcaatgaacatcattggagcaatgagtttgttgacaagtacatttggacattttaaaaaatattaaaataagtcnnnnnnnnnnnnnnnnnnnnnnnnnnnnnnnnnnnnnnnnnnnnnnnnnnnnnnnnnnnnnnnnnnnnnnnnnnnnnnnnnnnnnnnnnnnnnnnnnnnnnnnnnnnnnnnnnnnnnnnnnnnnnnnnnnnnnnnnnnnnnnnnnnnnnnnnnnnnnnnnnnnnnnnnnnnt

SEQ ID NO: 42463 - DNA, 333 bp, Homo sapiens
gctgtgttccgacatctacctaaagttctatgaacctcaagatagagatgatctctatttttacattgccacatacctagagcaccatgtggcggagcacactgctgagagctacatgctgcagtggcagcgtggacacctttccaactatcagtacctccttcacctcaacaacctggccgaccgcagctgcaacgacctctcccagtaccctgtgtttccatggataatacatgattattccagctcagaactagatttgtcaaatccaggaaccttccgggatctcagtaagccagtaggggccctaaataaggaacggctggagagact

SEQ ID NO: 42464 - DNA, 332 bp, Homo sapiens
gatgaaactggtttgtctcattgtttgtgagattaacttttgtcacttgtctgaggtagtgtccactagtctttttcactacaaaattattttcctttgtgatacgtaattgtggagagatgctttgatatcatgaaaataccctgttttcttacttgcatggcacaaatttagtatctgttgatgagtcttacctgaattaatttttcctataatggttgaaaaaatgatgatttttctaattccatcactccttatatgtttctctgaaagcattttatggtagggaaaaagctgcccttatttattgtcaacatgggtacatgacttcg

SEQ ID NO: 42465 - DNA, 341 bp, Homo sapiens
  misc_feature (1)...(341): n = a,t,c or g
ggaaaactgaggcttagacaggctcaatcatttgttcgggatcacatggctaacagtgagcagtgaggtttgagcccagctttgactggccctagggtctcagctgcaacacacctgtagagcctcttggcttcatccttgcatctgggacaacgcctggatcatagtaggcacgtgtctacctctgatcacatctagagtgaggtacagaccctgacaaatcaccagagctcaccagagggtggctgcatcaacaccgtttctagaggaggcactcacagatgtcaaagttgaaaacatgtctcnnnnnnnnnnnnnnnnnnnnnnnnnnnnnnnnnnnn

SEQ ID NO: 42466 - DNA, 342 bp, Homo sapiens
  misc_feature (1)...(342): n = a,t,c or g
gtttttttttacctgtatgcaccactgactcacatctgcccccagccacctgccatggcagctgttgccaacnnnnnnnnnnnnnnnnnnnnnnnnnnnnnnnnnnnnnnnnnnnnnnnnnnnnnnnnnnnnnnnnnnnnnnnnnnnnnnnnnnnnnnnnnnnnnnnnnnnnnnnnnnnnggaaacttacaatcatgatggaagtgaaagcaggcacgtcttacatgatggcgggcaagagagcatgtgtgtgggaagtaaaaggggaagagcctcttataaaaccatcagacctcatgagaagtcactatcaggagaacagcatggcagaaactatcccca

SEQ ID NO: 42467 - DNA, 236 bp, Homo sapiens
gccctggttgagaatcactgctctctaatctgttttctggttacctccagtgagaaatcatttctccccactcattactccacaacactttgcaactctgttaaaaacccctataactaaagcaacaacaagaccaacaataagcagcaacaactaaagcaacaagagcagaataatatttaatgccatctcctttgttctgttggttgcttatatgtctgaccctttccactggg

SEQ ID NO: 42468 - DNA, 442 bp, Homo sapiens
  misc_feature (1)...(442): n = a,t,c or g
gggaaacatttatttggaaataatgttgttattattttaaaaagcccaaccacattagctcttcatgtaagaaatgctagcctttgaagttgaaagtgtagtgtttgccacgctttcccacgagtcagaggcagactcctgtgcannnnnnnnnnnnnnnnnnnnnnnnnnnnnnnnnnnnnnnnnnnnnnnnnnnnnnnnnnnnnnnnnnnnnnnnnnnnnnnnnnnnnnnnnnnnnnnnnnnnnnnnnnnnnnnnnnnnnnnnnnnnnnnnnnnnnnnnnnnnnnnnnnnnnnnnnnnnnnnnnnnnnnnnnnnnnnnnnnnnnnnnnnnnnnnnnnnnnnnnnnnnnnnnnnnnnnnnnnttgccaactccngacctcaagggatntgccaccttggcctccaaantgctgggatacaggcgtnacctntgcncctggc

SEQ ID NO: 42469 - DNA, 437 bp, Homo sapiens
  misc_feature (1)...(437): n = a,t,c or g
gaatccactagaatgactcacagaactcaagaaagcactacagttatgattacagttttgctataaaaaacatatacaaattagaaccagccggaaagatagataggcagggcaagatctggcagtgttccagagcagaagcttctgatgtcctcagagacattaccctaatggcacatggctgcatgacaatatgcatagtattgacaacgagggaagtttccccaagctctagtgtccagagaggttttattggaggttcattacataggcatgactgatcgaatccttgcccaaatggttgaactcaatttccaatgcatcttctctccttggaagtggaactgatgccacctggctcaaagtcccaaccatctcatcatgnctttggtcttcctacatggccggcttcattctgatcatcacattacataaac

SEQ ID NO: 42470 - DNA, 442 bp, Homo sapiens
  misc_feature (1)...(442): n = a,t,c or g
gaatcacaagcctattgactaccttaacccacctaagtaaatgtggaaacatccgatataaatctcatagttaatggcataattagaaagctaatcattttcttaagcatagagttatccttctaaagacttgttctttcagaaaaatgtttttccaattagtataaactctacaaattccctcttggtgtaaaattcaagatgtggaaattctaacttttttgaaatttaaaagcttatattttctaacttggcaaaagacttatccttagaaagagaagtgtacattgatttccaattaaaaatttgctggcattaaaaataaggcacacttacataagcccccatacatagagtgggactcttggaatcaggagacaaagctcccatgtggaaggnactatgtgccatgncattcaaaaatgngatttttatataaacc

SEQ ID NO: 42471 - DNA, 165 bp, Homo sapiens
  misc_feature (1)...(165): n = a,t,c or g
ggtccatagatgtcaaccagtggtttattattagtcatgtgagtcctggggaacccagaggaactccctcttcaaacaaatgttttacctgagtctgcacgtgttggagagttctccaaattaactctcatgtagncatatgatgcgtannngnagggannactt

SEQ ID NO: 42472 - DNA, 305 bp, Homo sapiens
  misc_feature (1)...(305): n = a,t,c or g
gnnnnnnnnnnnnnnnnnnnnnnnnnnnnnnnnnnnnnnnnnnnnnnnnnnnnnnnnnnnnnnnnnnnnnnnnnnnnnnnnnnnnnnnnnnnnnnnnnnnnnnnnnnnnnnnnnnnnnnnnnnnnnnnnnnnnnnnnnnnnnnnnnnnttgctttccaataaaaaatttactttttatatttaataatttatcancattactatggagtactantatactgctactaattataataacttanttcnnaanatagtgttancatttanagctntatgngcntggnaagnannnnntatannnttat

SEQ ID NO: 42473 - DNA, 373 bp, Homo sapiens
  misc_feature (1)...(373): n = a,t,c or g
ggactgcatagggtcgcgtggcatctgtggttggggtaggaaatgctcatttgctaatctgtactttctcagtgaagtcgagcggtaaggagtgggcacagctgaggcagagtgaaggaggagcccactggggaatagaggagacaggacaccagagaccacggcagtgcttgctggaaccccacataaatgttgaacttccaaggacaagagaagctgacttgatgaggatgatcagaagtaaagtgtaaacattcatagtgattggagcattctgaatttctgccagaaaagcaaattttcttttttaaatttcaggtacctaggnagatgtactatcatangtaatatactacccaggagtntttttttt

SEQ ID NO: 42474 - DNA, 442 bp, Homo sapiens
gagagtttaggtctttgattcattttgagttaatttttgtatatagtgcaaattaagggtccaattttattttaacaccccctgcccccagaactatttgctgaaaagatcaactgactctttgtcacctgctcaccccagtggacactagctgttccatccaattgctgtcctggggccttgtcatgctactcttccactttgaacccaagcccacaccgttcgttgctcccctctgggatactgaccccactataaacttctctggggctacaaccttcctaccctttgtgcctcatgaccaccccctcccttgtccccgccatgcccatgatgagtctcttttcgaggcagctccccttgcctcatctcaccctcagcctatgcaccacagccacactggacatgggtccctctgagcctgagtccttcccattccacc

SEQ ID NO: 42475 - DNA, 435 bp, Homo sapiens
  misc_feature (1)...(435): n = a,t,c or g
ggatttttaaaataaagctgaagnnnnnnnnnnnnnnnnnnnnnnnnnnnnnnnnnnnnnnnnnnnnnnnnnnnnnnnnnnnnnnnnnnnnnnnnnnnnnnnnnnnnnnnnnnnnnnnnnnnnnnnnnnnnnnnnnnnnnnnnnnnnnnnnnnnnnnnnnnnnnnnnnnnnnnnnnnnnnnnnnnnnnnnnnnnnnnnnnnnnnnnnnnnnnnnnnnnnnnnnnnnnnnnnnnnnnnnnnnnnngctgaaggaatatagtacaaactgttaatagtaggtgtctttgggtggtatcattaatttttcccttttactatacacttttgnaatttttaaaaaaantcagaaatgggccangcacaagtggcttatgcctataatccacttttggaaggcnaggcaagaagattacttgagancnngagttggagaac

SEQ ID NO: 42476 - DNA, 143 bp, Homo sapiens
gcttttttcctcccccatcccctgcagctgcctttttttgggggcagggtgggggttgatgttgaactttaagagtttaaaagtttagcttattgagtagttgtcatttaaaatataattgcgaatatcaaaaaaaaaaaaaa

SEQ ID NO: 42477 - DNA, 243 bp, Homo sapiens
  misc_feature (1)...(243): n = a,t,c or g
gcggcacgagaccccttgttgggcccttgagatctggaaataaatcagttcatactttnnnnnnnnnnnnnnnnnnnnnnnnnnnnnnnnnnnnnnnnnnnnnnnnnnnnnnnnnnnnnnnntaaataaataaaataaaataaaacaggccaggcatagtggttcacntgtaatcccagcactttggtgggtggatnacctngaactnctaacctntggngatntgccgnctnanctncaaag

SEQ ID NO: 42478 - DNA, 282 bp, Homo sapiens
  misc_feature (1)...(282): n = a,t,c or g
gctctctctttctctccttctctctccttttttctttaaaaannnnnnnnnnnnnnnnnnnnnnnnnnnnnnnnnnnnnnnnnnnnnnnnnnnnnnnnnnnnnnnnnnnnnnnnnnnnnnnnnnnnnnnnnnnnnnnnnnnnnnnnnnnnnnnnnnnnnnctcctctctcatttcttagcttacttagcacttccatgccatcaaaaccgtctttgcacaggccacttaccaagtacatgatgctaaattcactagacattttcagtctttttttttttttt

SEQ ID NO: 42479 - DNA, 372 bp, Homo sapiens
ggatcactcatcagcgcatatggtatggaactggcctcacttttgtaagcggattgaaggcagatgatgtcatctatatcactctgcccttttaccacagtgctgcactactgattggcattcacggatgtattgtggctggtgctactcttgccttgcggactaaattttcagccagccagttttgggatgactgcagaaaatacaacgtcactgtcattcagtatatcggtgaactgcttcggtatttatgcaactcaccacagaaaccaaatgaccgtgatcataaagtgagactggcactgggaaatggcttacgaggagatgtgtggagacaatttgtcaagagatttggggacatatgcatctatg

SEQ ID NO: 42480 - DNA, 387 bp, Homo sapiens
gaatgcatgtagagatatatttaagatgattatattacaaacaggggtgggtaaataacgggaatgtaaagttttcatatttcaaccccatagggtaaaatgcccacaccactagactgtcacaagctgtgtatacgtaatgtaatacccacagcaaccattaaaaatgctgtatagagaaagacactcaaaaactttgcagatcaactaaaatggaatcgaaaaaacttttcaaggaacccacacaagatagggagaaagaaaacaaacaaaacaagtataaatataaaataaacaaaaatggctacaaattattaacaactatgtgaaatgaaaatggtaattgaaagtaaatttctgccatttcagtttgtgacttacactatt

SEQ ID NO: 42481 - DNA, 371 bp, Homo sapiens
  misc_feature (1)...(371): n = a,t,c or g
gcaataccctgacattttgatatgggaagcacaaaatctggccactcagtacagtaatcacctgaaaaggttttggacttgggttagttctgtctcaagtgctatagcaccctgctgctaaagtcctggaccagcagcacaggcgtcacctaggagcattannnnnnnnnnnnnnnnnnnnnnnnnnnnnnnnnnnnnnnnnnnnnnnnnnnnnnnnnnnnnnnnnnnnnnnnnnnnnnnnnnnnnnnnnnnnnnnnnnnnnnnnnnnnnnnnnnnnnnnnnnnnnnnnnnnnnnnnnnnnnnnnnnnnnnnnnnnnnnnnnnnnnnnnnnnnnnnnnnnnnnnnnnnnnnnnnnnnnnnnnnnnnnnnnn

SEQ ID NO: 42482 - DNA, 227 bp, Homo sapiens
gagccttctggctgtggcaagttgttgaacaaatctatatttgctgattaggagccaaatcccaactaaatggattgacataaaactcaaacgtatctttcctccaagttgagtgagtcagctcaaaactaggaggccagatttttactgtgagccacatctgagccattcggtctgaatgtcccactggatccctggggtttgtgtggatctgtggtggagagtgg

SEQ ID NO: 42483 - DNA, 330 bp, Homo sapiens
  misc_feature (1)...(330): n = a,t,c or g
nnnnnnnnnnnnnnnnnnnnnnnnnnnnnnnnnnnnnnnnnnnnnnnnnnnnnnnnnnnnnnnnnnnnnnnnnnnnnnnnnnnnnnnnnnnnnnnnnnnnnnnnnnnnnnnnnnnnnnnnnnnnnnnnnnnnnnnnnnnnnnnnnnnnnnnnnnnnnnnnnnnnnnnnnnanataananccaaatgtgaaattgtgtggtacacacggcaggtagggcagcagcccagacacaaggtggagggcaaactctagaaggcggcctggaggaggcggcagccacagctaagctcattaggcattttgtaatgaggagaacttactgaggagga

SEQ ID NO: 42484 - DNA, 368 bp, Homo sapiens
  misc_feature (1)...(368): n = a,t,c or g
ggaaaagcagaggttggaaagactaaaataaggcattctgtgtttttttcttttggagtgccatgttaagaaattaactttttacagttatcctactgcctgtcactttcaaacactagtcatagtttccagaaatatctgttggaagaattaagtaggtttttttgctgtcattttttattttcttgaattagcatttatgggaacatctacactatgctttaaaacnnnnnnnnnnnnnnnnnnnnnnnnnnnnnnnnnnnnnnnnnnnnnnnnnnnnnnnnnnnnnnnnnnnnnnnnnnnnnnnnnnnnnnnnnnnnnnnnnnnnnnnnnnnnnnnnnnnnnnnnnnnnnnnnnnnnnnnncagc

SEQ ID NO: 42485 - DNA, 378 bp, Homo sapiens
gggagagcagagcagtttttttaaggtccaagaacgctttccagaaggtgtttgctgggccgagctgctttcagctgcacccgccacctcagccctcatgtcagacaccctctgcctagattcattcttgggctgcctcacagaccgctcctccgtgcatgccgggggcagcctctgccttggtatctgcagttccaaagctgtcactgatggtgcatcctcatccagaactctgcttccctatccagagcacccatggaggccccactctccccactgtgcccagatgagggggagcccactctctctacactgaccctgcagtgagggtgagagatgctgtgtgcaaaacgcatttataaacccttgacagactac

SEQ ID NO: 42486 - DNA, 281 bp, Homo sapiens
  misc_feature (1)...(281): n = a,t,c or g
gggcaagcagaagtatctagatagaattgaataacaccattttgtttccattgtatttatttttacagttactttctatctctggtaagtgatactgagtttccatttccaacagtgatacagtgtcttttaaaaatacatttactgaacttaaaaataagttgattcaaaggaagtaattcaggaaactggaatataggcagtgcagatgtagcaaaattatagaggtggtgtataaaaatggctganattnggnaaccccangnccaactggctntgga

SEQ ID NO: 42487 - DNA, 383 bp, Homo sapiens
gggcacagtggctccagaagcagaggctgctgtggacgatacccagattataactttacaggttgtaaatatggaggaacagcccataaacataggagaacttcagcttgttcaagtacctgttcctgtgactgtacctgttgctaccacttcagtagaagaacttcagggggcttatgaaaatgaagtgtctaaagagggccttgcggaaagtgaacccatgatatgccacaccctacctttgcctgaagggtttcaggtggttaaagtgggggccaatggagaggtggagacactagaacaaggggaacttccaccccaggaagatcctagttggcaaaaagacccagactatcagccaccagccaaaaaaaacaaagaaa

SEQ ID NO: 42488 - DNA, 382 bp, Homo sapiens
  misc_feature (1)...(382): n = a,t,c or g
gggttagttcttctgttttggagtgcagtggggtgtggtgaaatgattaaaaagcaggaagcagtgatgtggaacgtctccaggccagtcaaacattggctgttgagaagtggttttcacgttattttgttgattgaaaaatatttaannnnnnnnnnnnnnnnnnnnnnnnnnnnnnnnnnnnnnnnnnnnnnnnnnnnnnnnnnnnnnnnnnnnnnnnnnnnnnnnnnnnnnnnnnnnnnnnnnnnnnnnnnnnnnnnnnnnnnnnnnnnnnnnnnnnnnnnnnnnnnnnnnnnnnnnnnnnnnnnnnnnnnnnnnnnnnnnnnnnnnnnnnnnnnnnnnnnnnnnnnnnnnnnnnnnnnnnnnnnnnnnnnnnnnnnng

SEQ ID NO: 42489 - DNA, 371 bp, Homo sapiens
gtgaaagatgccatgttgggcaagaaccatagtaagggactaaagggctgggggatggaatgaggagtttagaatcagggaaatagtagatcagcaggtcagaacaggagagtgcagtgaggtcccgagaggccaccatcccaccccagctaccatgcacggatttttctccatgagccatcccaggtgaactgtttgggtgtctagctgactgacccaaagggctagaagtgaagtggccaggagaaatagttgccagaaccgatggtaagaacggtggtagaaacaccagttcagtagctagttctatcccctaagagtttgttttatgtaggatctaacaaaacaggcaagcaatataaccaagaagt

SEQ ID NO: 42490 - DNA, 370 bp, Homo sapiens
ggaagctagcacctgaaattgtgactggcagccgagatggaactgtgaaggtgtgggacccaaggcaaaaagatgatcctgttgctaatatggaacctgtacaaggagaaaacaagagagactgttggactgtggcatttggcaatgcttataatcaagaagaacgtgttgtttgtgctggctatgacaatggggatatcaaactatttgatctcagaaatatggcattacggtgggagacaaacatcaaaaatggggtaaagtacattctgaggctttttggtttctctgagcatgtttccattcacctctgaactattacaaaaggaaaacacctctagtaactcatctgagtcaacccctctgccaa

SEQ ID NO: 42491 - DNA, 362 bp, Homo sapiens
  misc_feature (1)...(362): n = a,t,c or g
ggttttactccattgcagttgttatttttgatgctcatccattgagcttgtaatgtgaatgattatttttttttatttctgggtttctattttattatttttcaaatatgctcggtcttttaaaaaacaatctcttactccttgtgttttttaattcctcactttatttctttaatcatattaaacacgtttattttgtattctgtatccaataaatctaatatctaaagtatttgcaattatagttgcattgtttgatgcttctgctgacttccactcatgagggtgtcntccttaggnggncngnnnnangtnannncnnnncnnnnnantntntnnngnnannngnctgnnnnngaagg

SEQ ID NO: 42492 - DNA, 382 bp, Homo sapiens
ggggatctcagggtctttttctcaaactcctgggggatccctgggaagatagttgcctctgcaggagctgctggtccccactgtgggagcagcggggtgatcccaggcagacacaacactcagggcgggcccattctttactcatttggggagcgcagcatcattgcccccatcactgacctgtttaaaattatctgcatcctttgcctagtgatttaagccataggttcttggtgaagttcccctagcaacacttggcaacctgtaagttttaccaattgcttggtaagagagtgtttcaatggcagttcctggaatatcccgcctgctgggtggagcttagggacaagacttaatgcttgtggttgcttggtgagtctct

SEQ ID NO: 42493 - DNA, 425 bp, Homo sapiens
  misc_feature (1)...(425): n = a,t,c or g
gcccttttccaggcctcggtttcttggagtgaacccaaaagtnnnnnnnnnnnnnnnnnnnnnnnnnnnnnnnnnnnnnnnnnnnnnnnnnnnnnnnnnnnnnnnnnnnnnnnnnnnnnnnnnnnnnnnnnnnnnnnnnnnnnnnnnnnnnnnnnnnnnnnnnnnnnnnnnnnnnnnnnnnnnnnnnnnnnnnnnnnnnnnnnnnnnnnnnnnnnnnnnnnnnnnnnnnnnnnnnnnnnnnnnnnnnnnnnnnnnnnnnnnnnnnnnnnnnnnnnnnnnnnnnnnnnnnnnnnnnnnnnnnnnnnnnnnnnnnnnnnnnnnnnnnnnnnnnnnnncgtgaacgtctgtgcccagccagcttctggcgtttaaattctggtctctnagaaaanggcgttngggccangcggnttctgnngnnggtg

SEQ ID NO: 42494 - DNA, 442 bp, Homo sapiens
  misc_feature (1)...(442): n = a,t,c or g
gctggaaatctatctgtatttttacacaatttaattgaaattgtaagtgtaatccaaacttcaaaattacaaagctttctcattgaagtataaatacgatctgtaatcaatttgactgggcatttgttctctgaattgtcctttgtcccttcttccaatcagataaataaaatagcatttaattctgtaaactgctgaaatgcctaattatattaggtattgagtctacaaaagtggttgacacaattcttcaccgtttctaaattattgaatttttcatgtgaacctgggagatgaagtgatattattctagttcttctcttcttccacccaatcttcactccacctcttttttctttttgagacagagtctcgatccgcacccaggctggannnnnnnnnnnnnnnnnnnnnnnnnnnnnnnnnnnnngcaactggggtt

SEQ ID NO: 42495 - DNA, 437 bp, Homo sapiens
  misc_feature (1)...(437): n = a,t,c or g
gcaaacatttttctatatggtaccaattcttnnnnnnnnnnnnnnnnnnnnnnnnnnnnnnnnnnnnnnnnnnnnnnnnnnnnnnnnnnnnaccatgaataattgaaactcttttgccaagnnnnnnnnnnnnnnnnnnnnnnnnnnnnnnnnnnnnnnnnnnnnnnncttgttgtccagcactggtttgggagctctcatctctatcaagttgtcttctattaattcctcaggtatagtatcaattagctgtttaatttctcaaagatctatatcttgaaactcttcacccctcacctttttgccatattcatgatctcttccatgactggctatgtcataaatccgtgacgcatgtacacagctgaacagctttcttcacaggacttaactggttcagncttgatggtttcanggtttttctataccaatggagg

SEQ ID NO: 42496 - DNA, 453 bp, Homo sapiens
  misc_feature (1)...(453): n = a,t,c or g
gatttaatacattcacattgttgtgtacccagtttccagaactcttcatcctacagaactgaaactccatacccattaaatgagtccccattctctttnnnnnnnnnnnnnnnnnnnnnnnnnnnnnnnnnnnnnnnnnnnnnnnnnnnnnnnnnnnnnnnnnnnnnctgtaagtggaatcatatggtatttgtcttttagtgactgcctaatttaaaaaaannnnnnnnnnnnnnnnnnnnnnnnnnnnnnnnnnnnnnnnnnnnnnnnnnnnnnnnnnnnnnnnnnnnnnnnnnnnnnnnnnnnnnnnnnnnnnnnnnnnnnnnnnnnnnnnnnnnnnnnnnnnnnnnnnnnnnnnnnnnnnnnnnnnnnnnnnnnnnnnnnnnnnnnnnnnnnnnnnnnnnnnnnnnnnnnnnnnnnnnnnnnnnnnnnnnnnnnnnnnnnnnnnnatta

SEQ ID NO: 42497 - DNA, 450 bp, Homo sapiens
  misc_feature (1)...(450): n = a,t,c or g
gagatattctctgtgctttttctctctgcattccatcctcatgacttctgctgaagctcagcttccacagctctgtgctcactcagttgttagatttttgggttgaagattttgcatttcctggtgagttcctccttttcaggaagtatcgttttgctgatactctcagatttgctgttcataagggactttgatattctctttgcattttcttaattttaattgcttttccttttgactctgcagcagatttatgtgacctacttgttgaaaaaaaatggggcaattttttttaatcttctatattttgttcctaatttttccttgntgcattgnttgctgctcagaggaggaggagaaagagggtaaggctacctaccaatgtgctcataccnaaagaggnattatccgggntgctaatcagaagcctaatgcactctgaatctcatt

SEQ ID NO: 42498 - DNA, 314 bp, Homo sapiens
  misc_feature (1)...(314): n = a,t,c or g
ggatgagctaacgtgtgcatgtttgtttattctaattatctattctctattctggttacgcacgttgctctccatgaagattgcctttgccgctgataacagtgcctttcaaaaaactactttgttgnnnnnnnnnnnnnnnnnnnnnnnnnnnnnnnnnnnnnnnnngcctttatttcatcatcagtgaggttgaacatctgtttatagatttgcagcccattatttttctttgaaatngnctattcatatcctttgccaactttcttctacnagnattnnccttantntcttgngantntacanganccctt

SEQ ID NO: 42499 - DNA, 194 bp, Homo sapiens
  misc_feature (1)...(194): n = a,t,c or g
ggtcaactttataggaccctaagcctcagataaaggtaggggagatgaagaggaaccagtaggggctaaggtgaattggacagtaaaagaggaatggtgtgatttcctggaaagcaagtgaagataatattttaaagatgatagaatgacccanctgnnccgngnngnttnntantggaccattntggatttat

SEQ ID NO: 42500 - DNA, 90 bp, Homo sapiens
  misc_feature (1)...(90): n = a,t,c or g
gccctcgtatacctcacttggacaccagtggtgtataaaatgaaccaggcaagtagagaaaacagagaagtattttgtttggttgnattg

SEQ ID NO: 42501 - DNA, 423 bp, Homo sapiens
  misc_feature (1)...(423): n = a,t,c or g
gccacgtacctctgccctctcctcacagctggagagggaaagtcatggaatccttgtccttcctcttgtttccacctcttcaagattgggccaattgcaatggaatatccattggttgtgaggcctttgtactctgcaaggaaaagaaaagaaatgtgtgtatgtatgagtgtgtgatggagctaacttttctacaatgtctactaacatgtcctagcctttacttcattcgcctgtttccttctcacaaaaaccctgtatgggagnnnnnnnnnnnnnnnnnnnnnnnnnnnnnnnnnnnnnnnnnnnnnnnnnnnnnnnnnnnnnnnnnnnnnnnnnnnnnnnnnnntcactgcagcctcacctccgggtcaagcgatctctgctcacctcctgagaactggnannaaggctgcacaccat

SEQ ID NO: 42502 - DNA, 440 bp, Homo sapiens
  misc_feature (1)...(440): n = a,t,c or g
ggtgaaactgtcaacctcagttggatgaaaactgggaagaaaccaaaaaaatgagatagatacctttctggtgactgaatgtaccgttggtacttactgcaggctccacccacctgtgtgtcctcagtgcccctcctcctgactcagccagaccagtgtacctctatgggcacagtaagagttgctagcagtaggcatctggctgagcttttatcctccagtggaaggatattaatttggtctttcttgtcttccatcgttattagaaatagggctcatgactttaaattgaagctgctgtttgggaacatgttcacatggattggctaattgggaagagggttctagtgggccaacctgttctctnttgggggaaaaatgggtttaattctcatataaaactggccgcaccattctgnctcntatannaggggnccttg

SEQ ID NO: 42503 - DNA, 435 bp, Homo sapiens
  misc_feature (1)...(435): n = a,t,c or g
ggcccagttcatttacatcttgggaaatcgcagcaagcagcatcttcggttggtgttcgatgagtatctgaagaccacagggaagccgattgaagccagcatccgaggggagctgtctggggactttgagaagctaatgctggccgtagtgaagtgtatccggagcaccccggaatattttgctgaaaggctcttcaaggctatgaagggcctggggactcgggacaacaccctgatccgcatcatggtctcccgtagtgagttggacatgctcgacattcgggagatcttccggaccaagtatgagaagtccctctacagcatgatcaagaatgacacctctggcgagtacaagaagactctgctgaagctgctgggggagatgatgatgctgctgccagttcttcccggaggcngcgcaggtggcctatcaga

SEQ ID NO: 42504 - DNA, 436 bp, Homo sapiens
  misc_feature (1)...(436): n = a,t,c or g
gagatgaggaccaaatatttataaagatgtactagatttgtctgagttggaaacaccttttgtaattaaacagggaaatagaagggagtgggcaagtagaagtggggatttggtggctatgaatttctgcctccaccctgccttgccttgaagtgcttgcatatgttaactctagtgctttatagaggcaggcccatcccttagtgctgcagaacagagacagaacttgctcaaagggcagaactaaggcctggaaagagcccttcctggttaaagtgccacttttctaggaaaacatttctgtgagcatggcactggatgcaaacatttttaggcccttttctttgttgtggcttgatctcactgnctccttgggctgctgtaaatggcagtatttgctgcctgccttctccagtgcaccctgacgctataaagg

SEQ ID NO: 42505 - DNA, 237 bp, Homo sapiens
  misc_feature (1)...(237): n = a,t,c or g
gcggcacgagcaaatatttgtgaatcagtttttatatacacaatttgcattaaataaggtaggtgtttctactataaatctttctacataatggcaatataagaaatgtcatatcgtatactgattttacccctaaaataatgacatcagctgttttctaattttaaagaagtagtcttaccaaatgtttgaaatcaccatgattttggtatgaatttgaanatatggngnntacta

SEQ ID NO: 42506 - DNA, 432 bp, Homo sapiens
  misc_feature (1)...(432): n = a,t,c or g
ggcgtgggaagaggccaggagggacctgacgtctgggggcgataggggagagacacaaagcctaactgtcctatccctttgtcaaatgagcagcagatatgtgccaggtactgttttaggctctgggttacagtggtgaccaaagcagatgaaaccgctgcctccaggggatctgggagaaaagttacagcatgcagtctaatgaggggatatcaccccttggggtggcaaaatagcctactctttatatgcatacagcacaggtctaagtactgtaagtaaacagatactcagtgtttctgngntggttnangggaggggacaaattacgaancctnnntgtcttagaaggctnnacngtgggtngataatggataaaaggttgngacagncgntcacggtggctcangcctgtaatccaggactttggga

SEQ ID NO: 42507 - DNA, 437 bp, Homo sapiens
  misc_feature (1)...(437): n = a,t,c or g
ggaaccatcatgccctgctcttcctctgttgagtcacctggcaaaaccgcaaatgtgaccaactctaactgtccactcactccctgacagctgcttctgctgattctttttattgctcctccccgcttttttcttctcccttgtccttctcctcctccttgacttccatgtccaccttctactttctacctcttctctcgtcctccacctctacctcttctacctcttttttttgggagggttctttttatttctcttattcctcttatttttcttttcttttccttctcttcctcctcctcccctcaagttttgaaaaaagtgatgacagacaatattttttttttcatttttcgagattgcaagctaattgaggaccaaagtttgggntttttattacttggatttctggaaatttgccaaaaagnacctggggg

SEQ ID NO: 42508 - DNA, 342 bp, Homo sapiens
  misc_feature (1)...(342): n = a,t,c or g
gnnnnnnnnnnnnnnnnnnnnnnnnnnnnnnnnnnnnnnnnnnnnnnnnnnnnnnnnnnnnnnnnnnnnnnnnnnnnnnnnnnnnnnnnnnnnnnnnnnnnnnnnnnnnnnnnnnnnnnnnnnnnnnnnnnnnnnnnnnnnnnnnnnnnngatgtttcgtaagtatttgttgaatgaataaatgaatgaaacgggccaagtgtggtggctcacacctatgnnnnnnnnnnnnnnnnnnnnnnnnnnnnnnnnnnnnnnnnnnnnnnnnnnnnnnnnnnnnnnnnnnnnnnnnnnnnnnnnnnnnnnnncccacacacacctttttaccaaaaaaaaaaaaaa

SEQ ID NO: 42509 - DNA, 444 bp, Homo sapiens
  misc_feature (1)...(444): n = a,t,c or g
ggataagaataaccaaagaattttgaagaataaggagggcacgttgatcttactatgtaacgagacacactatcatggcatcttgaccagatgagaggagagcagtagagccgattgggagcctagaaacagactcccctgtaagtcggaagttggtaggtcacagatcgttaaggagagagtggactgcagtgagtgatgctggtgaaaatggtttttcatatttggagaagtaagttgttgtatcacactgagtgtgaaactaaggctgannnnnnnnnnnnnnnnnnnnnnnnnnnnnnnnnnnnnnnnnnnnnnnnnnnnnnnnnnnnnnnnnnnnnnnnnnnnnnnnnnnnnnnnnnnnnnnnnnnnnnnnnnnnnnnnnnnnnnnnnnccggcacaacattangcatggttgtgcatgcctgtagcccacttacttgg

SEQ ID NO: 42510 - DNA, 439 bp, Homo sapiens
  misc_feature (1)...(439): n = a,t,c or g
ggtgctttttcatgaggcctgcattcacccagcgctgggtcactgctgggggtccctgagaagtcatgtaaagccacctcttatttccagaatgatagacatgtttagagaagaagtggcttcccccagaccatgaggctggcccgagactacaagacagatggcttgcttcttaacccaggggtctttttataccaaaagaacaaagaaataaaaaagccacgaaagactcaaaggaagcagattttcgaccacagccaacctcagaacaattctgagttgctcattttaagatcaataaggcatttttttagggtgtgtatgcctgagagaggaaatcagtgtgaatatcaaacttgcctctgaaacagcctaaccaatgctaatcnaganggacaaagcaaggaaaccccctggngaatgactcatcttaagaaag

SEQ ID NO: 42511 - DNA, 285 bp, Homo sapiens
  misc_feature (1)...(285): n = a,t,c or g
gctggaagaattgcttgagcccaggaggtgagggtcaaagctgctgcacannnnnnnnnnnnnnnnnnnnnnnnnnnnnnnnnnnnnnnnnnnnnnnnnnnnnnnnnnnnnnnnnnnnnnnnnnnnaatgggctaaagctcaaagatgttaaacaacttgatgcagtcatacagccaggaagtagagcctggactagaacccacacctcctgaatttaaattctgtgtttttttncntnanntnatanntatnnnnncagannganattntnnannntanncttt

SEQ ID NO: 42512 - DNA, 476 bp, Homo sapiens
  misc_feature (1)...(476): n = a,t,c or g
gaactggaagagggaggcagaaggttaagaaccagagacggtgnnnnnnnnnnnnnnnnnnnnnnnnnnnnnnnnnnnnnnnnnnnnnnnnnnnnnnnnnnnnnnnnnnnnnnnnnnnnnnnnnnnnnnnnnnnnnnnnnnnnnnnnnnnnnnnnnnnnnnnnataaaaacaaaattcactgagtgtcacgatgcttnnnnnnnnnnnnnnnnnnnnnnnnnnnnnnnnnnnnnnnnnnnnnnnnnnnnnnnnnnnnnnnnnnnnnnnnnnnnnnnnnnnnnnnnnnnnnnnnnnnnnnnnnnnnnnnggcaaggtcctggttctggacatggtggcaccatgtctgtagtcccagcttctttggganaactgaatgagaanaccccttgagcccccagagtttgaaggtncngngaacntggncatgnccttggctggacctaacnccanncagaagcctntttgatnaaatgtg

SEQ ID NO: 42513 - DNA, 411 bp, Homo sapiens
  misc_feature (1)...(411): n = a,t,c or g
gattaaatcttgtttgtgactcagccacctgagtgattggctactccacaaagcaaattcatctcagtctttttccactgtttgagagcaatgatgggtcaatacctactgcatagtttcacagtatggattcgacggatgctcctgttttttccctctctctcttacaaagggacctgaatcttccctttatcaatattgagcaaatgccgatggcaaggaatttatttcaaacaactgaaaatccattttagtttttccccacttgcagattcagatcattgcttttgcattggctgcccctttgtgatggcattttctaaacagaaagnantctacttgcctgacacctnggatgngnncnntanannntaattanncggncgnnncttattcctttaanngagggta

SEQ ID NO: 42514 - DNA, 338 bp, Homo sapiens
  misc_feature (1)...(338): n = a,t,c or g
gactttactgaggtatgaaggattaataattgtgtagctaaatctatatctgtctatctttctatcaatcgatcatctatctatatgataaacaacatgacgttttggagacagtgtctcactctgtcagccttgacctcccaggcttgagattttcccacctcagcctgtnnnnnnnnnnnnnnnnnnnnnnnnnnnnnnnnnnnnnnnnnnnnnnnnnnnnnnnnnnnnnnnnnnnnnnnnnnnnnnnnnnnnnnnnnnnnnnnnnnnnnnnnnnnnnnnnnnnnnnnnnnnnnnnnnnnnnnnnnnnnnnnttacnngcntgaccntntnnctgg

SEQ ID NO: 42515 - DNA, 322 bp, Homo sapiens
  misc_feature (1)...(322): n = a,t,c or g
ggtagtccactggttcctagatctgagcattgcacaatgcagtattttactctttatccaaagctgtttttggctaagaataattactctcttaggtttcttcaccaccattacagttgactttcttttttctttccttttataagttgcttcatgaaagtaagtttccagtctcagtagggaggatgagatggcagtaatggctaagcccacttaccagccaggggattcccacagactgtccttgctgcctgctccatcacaactgtgcctgggcagatganagacacgatgtanannnctgangnnntntannanccta

SEQ ID NO: 42516 - DNA, 458 bp, Homo sapiens
  misc_feature (1)...(458): n = a,t,c or g
gagaaaatgtctactaagacctccactccctataatggcacattaagtatctccaaccaacccactcagtgagtaagataggaaagctggtcaaatgtatttttttaaatcttaagccattgtaatgttgaggaggtagtgaagaatgatgaggctacagcctgggagaagaacaaaaaatctggagaggtgagcccagcatttcaaactactttttcctggagttgtctgccaatttggaagaggtggatgaatgtctaaaaggctgagaaggctttcaacagccttgttgggctagggaacaattatttgaatacaggacctgccaaggcaaggggcccttattaaagtctctgccttttgagtgaaaccaaaaaaaatgctgcatcctaggaatcagaaatagaccagaaagccnggcacagtggctcacacccataatccanncttttggaggc

SEQ ID NO: 42517 - DNA, 473 bp, Homo sapiens
  misc_feature (1)...(473): n = a,t,c or g
nnnnnnnnnnnnnnnnnnnnnnnnnnnnnnnnnnnnnnnnnnnnnnnnnnnnnnnnnnnnnnnnnnnnnnnnnnnnnnnnnnnnnnnnnnnnnnnnnnnnnnnnnnnnnnnnnnnnnnnnnnnnnnnnnnnnnnnnnnnnnnnnnnnnnnnnnnnnnnnnnnnnnnnnnnnnnnnnnncaggcagtgggctgtatttgcctatgggctatagtctgctaccacctttttaaaacacaaattagataccaccccctcttaaaattctcagggactccctattgctcttaaagtaaaacccagacttcttactctggccttaaggncctacatgacatacattctgcnacctctgactttccntcaagtccacctttttttctagctcanttcattttaaccctactggcctntntttctcaaacttatnaagcttaataacccattangacctttnacttggtnatntgnccac

SEQ ID NO: 42518 - DNA, 473 bp, Homo sapiens
  misc_feature (1)...(473): n = a,t,c or g
gcaggggtgagccactgcgcctggcctatccttttgtttcttcacgttatattaatatatggtggtcatgccagcaccatactgttttgtaagacatgttacagttacactgctgtccagtttctctaacaacttgactttctgtgatataaacataaatgccttctctctttttaataaccgttacccgtaggaatatctgaaggactttttgacattttcaatagtatctttacaccacagagcagagaataagtaaaaaaacaaaaaaccacacacacacagtgagcaatgcacataggtcttggctccatgtggagcctgccattgcatgtcctgcctgtgtatgtgccattttggcaactttatgtgcaccatgtgtggggtaatctgggcgnattcagaaaaagatatattgcanttaaggggggctgaaaggncnttttttccttaaggttgctgaaaaactgggg

SEQ ID NO: 42519 - DNA, 450 bp, Homo sapiens
  misc_feature (1)...(450): n = a,t,c or g
ggacttaattcttattagaaatgagcaactccatcctctttccccatgcactttcttttttcaatcagaataaaaatgatttactgaattatgcaaaaaggtggatcctagaattttataagaagtttgaggaaaaggcttatgaaagatttctaaacctgcaactaggaataagattgtaggccattttgggaagttaagtaggttaatttgtagttccattggtttaatgatattttttgttgttgagtctgtgcatcttgatttattaacttcttaggaatattttagcatttggtgatttaaccaagaaatagtaatttttggtaagcctaaaatacaacccaactgaaattttgcttttatgatggtgaggntgggtgggggnnnnnnnnnnnntnnnnnnnnttnnctnnnnatgntgntttnanngtntgnnntgngnnccgt

SEQ ID NO: 42520 - DNA, 353 bp, Homo sapiens
  misc_feature (1)...(353): n = a,t,c or g
gcttagaaaatagtacaaaaagaaatgtcttgcaagtctgtccgcgtttttgagggcagtcacttatatatgttaaacatagctattttgaatctaaattaagatatttgctttttagcccaactcttaaagatgttattcaggaaatagagataactccaaatgaagatttttactgaatgcacgtgaactgttttatgtaatgggtgattttcaagaagacgttcacatgttgttctttgcaggccactgtaattgaagaaaggggccaatttgtgaattctctcaagcaatgaaatgtgtaaaatccttctgtcntttcagtnnttaagtantnacttatatgnnactta

SEQ ID NO: 42521 - DNA, 134 bp, Homo sapiens
ggagaaaagcctgctctaaaacttaaaaaccagacattgtgtatatacttaggaaattcttacattagagtcttcggaggttgaattgaattacctctgaggttctttgcactcttaaggtttttttttttttt

SEQ ID NO: 42522 - DNA, 417 bp, Homo sapiens
  misc_feature (1)...(417): n = a,t,c or g
gaagtgaaatggcatgtaatgacatgaaatggcatgctgtatttaggaaatctgagttctaatcctttctggccaaccaactatgtcaagtcaggtaacctccccgagcttcagttacttccctataaaatgggaaagtacccccccatctaatgacatgatatattgatgaacatatttgcataaagcctaagatatataaaatataatccattatgattaaataccttggaatatcaccttgtacctatttatgtttgccttggcatctggcaaggtaagactgcagggctttggggaacttgtagaaaccatagcaatcgcttagaagaaaacngattctataaaagnnnaanntgtgnaagcttggcncggggnttancccggaatcccaccntttggaagcccanannggcc

SEQ ID NO: 42523 - DNA, 244 bp, Homo sapiens
  misc_feature (1)...(244): n = a,t,c or g
ggaggcttaactttcttttagacttggcaaattgcacacattactgtctccagggtgaaatgttttactcccatcccaaatatctcttgatgtaatctataccttagctttgtggaacaactacctcagaggacaggtgggaagggtgtaagaagagagcctttttttttttttaacnaaantnnggnntttngnccnngnaaaaagnggnnaaaanctttnggggcnnctttaaaantttttc

SEQ ID NO: 42524 - DNA, 423 bp, Homo sapiens
ggttgattgataatcttttgttttcaaaattggtcaaatatagttagaggacatgatgagcataagctaatgggcagagacctgatctttttagctttttgttgcaggtaaaggacaggtttctcttaagcctttgaattactgaacaatagcctgccagaactacactcttcctgttgcaggtccctggcgtttcagatggtgaccaccagtagagtactgttcaagttatttgacagattgctaataccttttaccatctagactgacgtacagccttaaacacagaagtaactgaagaaagtgcaaaggaaagtgcaagcgtagtaagggaaagaactgtttcactggctctttatttttcaggagagataagttactcaaatcagagcccattcaaatacttttgtgtacagattaaag

SEQ ID NO: 42525 - DNA, 413 bp, Homo sapiens
  misc_feature (1)...(413): n = a,t,c or g
gcggcacgagcctttttatcatgtaatcagagacacctcacactgttttgttgcatctctgtgtgtgagtcagttcccaggcctggccagcttttcgtgccattcggcaacatctctggggactgtttttctttctgtctctgtggaactttctgagacaagaatgtatctatcctgctcggccttctacctggcttagggctcagtcctgctaagtaaggtgtgccttcagcctgctgttttagaaagtgcttcagcctgctgtctggaaaagttgtatctataacaattgaagtgtaagtccagtgtccaaaatttgatnnnnnnnnnnnnnnnnnnnnnnnnnnnnnnnnnnnnnnnnnnnnnnnnnnnnnnnaggnggnggataantnnnggnnagannnnnaaaaccc

SEQ ID NO: 42526 - DNA, 240 bp, Homo sapiens
  misc_feature (1)...(240): n = a,t,c or g
gagagaaaagactgaggtcccccgaggagaaaagaattcgtctctagaccaccttaggatttaaggccacaacataaacttctgctagaatttccagcctcctggcctgccctgaagatttcagacttgcctgaccagatcatcgcatgagccgattccttaaagtctctcctgctgtttttctggaaaacctgactactacagngcctgangtggnacccgattaccccattctgcctt

SEQ ID NO: 42527 - DNA, 391 bp, Homo sapiens
  misc_feature (1)...(391): n = a,t,c or g
gccctgaaggtcctagtggagcacggggctgatgtcaacgtgcctgatggcaccggggcacttccaatccatctggcagttcaagagggtcacactgctgtggtcagctttctggcagctgaatctgatctccatcgcagggacgccaggggtctcacacccttggagctggcactgcagagaggggctcaggacctcgtggacatcctgcagggccacatggtggccccgctgtgatctggggtcaccctctccagcaagagaaccccgtggggttatgtatcagaagagaggggaagaaacactttctcttcttgtttctcctgcccactgctgcagtaggggaggagcacagtttgtggcttaatagaggnttgtgnttnnngggggg

SEQ ID NO: 42528 - DNA, 418 bp, Homo sapiens
  misc_feature (1)...(418): n = a,t,c or g
ggatagtaaggtagaaagaggagaaatgggtgtaatcaaaggaagtggcagagagagattaaaaaaaaaaaacaggaaatgagaacaagaatatgactaacaatgcctgagccccacccacccatcctcaaaggggactccctctctcaaaggcttgtgggcacctgcccccgagctgactcaccctgttcagtcatcacagctcactgcagtgatgannnnnnnnnnnnnnnnnnnnnnnnnnnnnnnnnnnnnnnnnnnnnnnnnnnnnnnnnnnnnnnnnnnnnnnnnnnnnnnnnnnnnnnnnnnnnnnnnnnnnnnnnnnnnnnnnnnnnnnnnnnnnnnnnnnnnnnnnnnnnnnnnnnnnnnnnnnnnnnnnnnnnnnnnnnnnnnnnnnnnnnnnnnnnngcctcggctt

SEQ ID NO: 42529 - DNA, 320 bp, Homo sapiens
  misc_feature (1)...(320): n = a,t,c or g
ggattttgaatcttgttgacatcaaggcagcctgatattaaaaataatcacttaaggatacatttagttactatgagtcactcctagtattcattaaatcttgggcctatgataaagtagaaaggccactatggattatataaatttagagaaactggttggcgcataatggccattgttttatgatggacggttctcttctactttctcattttgtcaacctacatcttgtagtgggaactggaaagaagagaaccggtaagcggcagcaggaggagtaaatcttcanaagctncatttgcctgggntanaaggcttgg

SEQ ID NO: 42530 - DNA, 425 bp, Homo sapiens
  misc_feature (1)...(425): n = a,t,c or g
gnnnnnnnnnnnnnnnnnnnnnnnnnnnnnnnnnnnnnnnnnnnnnnnnnnnnnnnnnnnnnnnnnnnnnnnnnnnnnnnnnnnnnnnnnnnnnnnnnnnnnnnnnnnnnnnnnnnnnnnnnnnnnnnnnnnnnnnnnnnnnnnnnnnnnnnnnnnnnnnnnnnnnnnnnnnnnnnnnnnnnnnnnnnnnnnnnnnnnnnnnnnnnnnnnnnnnnnnnnnnnnnnnnnnnnnnnnnnnnnnnnnnnnnnnncagtttaataaattgtacgttacgtaaactaaacacattttaaacaatctgtaagagaaatgaaggcaatcgaggctgttttcacaagtccttggctttagtatgatagcttccaagttgaacctgatgagcctgacctccttggataatgtttccatacnctggattggaata

SEQ ID NO: 42531 - DNA, 422 bp, Homo sapiens
  misc_feature (1)...(422): n = a,t,c or g
gaatagatcataatagaaaatccagaaatgaattctaatgtggttaaggatttaatatataatgtgagtggcatttctaatcagtgggaaagaaaggactatttcataaatgatattggggcaattatcaaaaacacttggaaaaagatttttattcctacttttaaacatacatcaaaatctaaaataaaactaggcaccttcnnnnnnnnnnnnnnnnnnnnnnnnnnnnnnnnnnnnnnnnnnnnnnnnnnnnnnnnnnnnnnnnnnnnnnnnnnnnnnnnnnnnnnnnnnnnnnnnnnnnnnnnnnnnnnnnnnnnnnnnnnnnnnnnnnnnnnnnnnnnnnnnnnnnnnnnnnnnnnnnnnnnnnnnnnnnnnnnnnnnnnnnnnnnnnnnnnnnnnnnnnnnnnnnnnnnnnnnnn

SEQ ID NO: 42532 - DNA, 225 bp, Homo sapiens
  misc_feature (1)...(225): n = a,t,c or g
gcagagctaggaagggacgatgggctcaccttctggtagcagggaccatgtctttcttgttccttgctgtgttccccacacagcctcagtttccccagtcgtgaaatgggaataataacagttgatcctggctccaaggccaccangtccggnggtctngnnctanggccnntttnncncnnntnnggncncnnannnnnnnttnnnnacncttnnnggangctc

SEQ ID NO: 42533 - DNA, 205 bp, Homo sapiens
  misc_feature (1)...(205): n = a,t,c or g
ggtcaccttcacagcagacagagctgccaggccatgatgggctggcgacagcccggctgagcttcagtgaggtgccaccagcacccgtgcctccgaagaccgctcgggcattccgcctgcgccctgggacagngganagacgggttctctttaatctangnccattgggncttnnggnangactttnnnanngaccgnnanctat

SEQ ID NO: 42534 - DNA, 383 bp, Homo sapiens
  misc_feature (1)...(383): n = a,t,c or g
gcctaaaacattcctaatatatttaatggatctatttgttatgctttcaagaagtgtgctaaatacctgttaaaaacagaagagtattagaatagtaattgtggagatgcttttattttgagataaagaggcatttaatttgttggttaagtggacctggcagccacatgtcaaaaagaagtgaggaatcnnnnnnnnnnnnnnnnnnnnnnnnnnnnnnnnnnnnnnnnnnnnnnnnnnnnnnnnnnnnnnnnnnnnnnnnnnnnnnnnnnnnnnnnnnnnnnnnnnnnnnnnnnnnnnnnnnnnnnnnnnnnnnnnnnnnnnnnnnnnnnnnnnnnnnnnnnnnnnnnnnnnnnnnnnnnnnnnnnnnnnnnnnnnnnnnn

SEQ ID NO: 42535 - DNA, 342 bp, Homo sapiens
  misc_feature (1)...(342): n = a,t,c or g
gacttgatggaatgcagcaagagtcctaggtctgttactacctacctatgaccttaagaaactccttcacccctcagaacccttacagctttctttctgattctatcatgagttactctactccaagctgagacttttctgcttagatctatcccttcctcctaaacccccaacctccatttctcctggtgtctttctttacacacccctcagcatacacacacacctagccacaggaaccaatgagttaatatttgagggagtggctttcttttgtcctcaatgagatcctggtgaggccacttgagctggtcagctcccttgnggnattntgggnatgga

SEQ ID NO: 42536 - DNA, 392 bp, Homo sapiens
gggctaatttctgactatttggagtgctttttaaaaccaagaactaacaaccaaaggaaaattggtaaaggaatgaacagctatttcatcaaataagtataagtagtcagtacactcacacaaaaatggtcatctctactgagaatttaagaaatgctaataaaaacaaaaatgagatatttttacctgatatatttacaaagatgaaatcgtttgataataatgtctgttgttgaagaagtgtggtaaaaatatatatttattagagcatatttaaatcatttcaaaacattagaaaatgattaaaatatattctattcatataatccgtatggccaacccttccaaaatattctttggatatattttaatttcatgaaaaaatattggtg

SEQ ID NO: 42537 - DNA, 382 bp, Homo sapiens
gaactgggatgaacagcctcaaaagagggctggaggtacacagtcacagccattcctgaagaaatatagtgtgacattgcccacacaggtgtttgaaaacaaccctttgagtctaagacagaaagcgggttgaagggatttttttccagtccagtaaacctgtgactttgaattgggaaatactactaaggtcaacaggcaaggggccagtgcagagtgctgtgataaactgagaatgctaaggacgtgatggcattcattgtccaaatccatattataccccaaggccaggatggagccggggcaggtgaggctgcaggcattgagcactggcatcccctcaggggtgcagcagctgctcccctcccagatagtttctgag

SEQ ID NO: 42538 - DNA, 225 bp, Homo sapiens
  misc_feature (1)...(225): n = a,t,c or g
gataagnnnnnnnnnnnnnnnnnnnnnnnnnnnnnnnnnnnnnnnnnnnnnnnnnnnnnnnnnnnnnnnnnnnnnnnnnnnnnnnnnnnnnnnnnnnnnnnnnnnnnnnnnnnnnnnnnnnnnnnnnnnnnnnnnnnnnnnnnnnnnnnnnnnnnnnnnnnnnnnnnntacccggntnngggggntntcncctgaanttccagcantttgncaggcaaanngagg

SEQ ID NO: 42539 - DNA, 344 bp, Homo sapiens
  misc_feature (1)...(344): n = a,t,c or g
ggtgggaagtttgtgtgcatgcttggagaaggagtacgtaaaagaaactaaatcttaactttcattactaagaaatcagacattaagggaaaaagtaactagactgtaaaattaagagaaaaagtaactagtaaaaagactgtaccttagaaataggaagnnnnnnnnnnnnnnnnnnnnnnnnnnnnnnnnnnnnnnnnnnnnnnnnnnnnnnnnnnnnnnnnnnnnnnnnnnnnnnnnnnnnnnnnnnnnnnnnnnnnnnnnnnnnnnnnnnnnnnnnnnnnnnnnnnnnnnnnnnnnnnnnnnnnnnnnnnnnnnnnnnnnnnnnnnnnnnnnnnnnnnnn

SEQ ID NO: 42540 - DNA, 360 bp, Homo sapiens
gttctggagtttgtgtgcagccatgacagggagaagctccttggtttccagtggattccaaggagtccaggagaacttgaactgtgtattctctgaggctttttcagctctagaattatgttttggggtgggtagagcagacctatggccagaaactagagaaaagggaggtggtataatgaggcaaagagggaacttacctggtcaccccatggctagggatgcaccttggggcgcagctcatagggtggggaatcagtgaagggcccctccatgggggtgtgtagggacagtctctataccacaggattagggctactctcacacaggcatctgttcactcagcaaactttctcaagg

SEQ ID NO: 42541 - DNA, 358 bp, Homo sapiens
gggatattcttggtctcacatacttgtaatcaagtttttccagcctccaagtcacctggcctgggaaagtacttgcctcatgttgctctggtttgtgataataaaggctttacagtttaagccacatttaatcttggggcttcttcttatggtctggggtggattgaaaacaggctctgccaaactgaagacagcctttgtgcggtgcctccaactttgcctcaaatgggacagtgggttgagggagaacagttcttagtccagttttgatgttaacttccatagctgacaaagcttgttaagtaagaattaagatcttgtgtagacctgatttgtctggattttagagttatttgag

SEQ ID NO: 42542 - DNA, 356 bp, Homo sapiens
ggcagtttgtctcaaaaaatatttggaaataagcatatcctggatcagatacagtctcttttcaggttttacttgccaacatcacctgcatggaaaaaaagctttaggaaagggtaaaggctattatccccattcctccctacccccacttggattgaggccccccacgttcctcatcatgaaagtttttattgcagagtgatcttgatcagatgcacagtaactgatggactgtcatcaaatctgtttgtacttaaacagagcaccttgcttgtccttcttgaaattttcaccttgtcagtgttgagatctcattaataaagctcattgattgctgagaagcctcatgagaagtc

SEQ ID NO: 42543 - DNA, 340 bp, Homo sapiens
gcagactcagagagaacccaccatggtgctgtctcctgccgacaagaccaacgtcaaggccgcctggggtaaggtcggcgcgcacgctggcgagtatggtgcggaggccctggagaggatgttcctgtccttccccaccaccaagacctacttcccgcacttcgacctgagccacggctctgcccaggttaagggccacggcaagaaggtggccgacgcgctgaccaacgccgtggcgcacgtggacgacatgcccaacgcgctgtccgccctgagcgacctgcacgcgcacaagcttcgggtggacccggtcaacttcaagctcctaagccactgcctg

SEQ ID NO: 42544 - DNA, 339 bp, Homo sapiens
  misc_feature (1)...(339): n = a,t,c or g
ggcagtctgttttgctgaaagtggaaagtccccgtttgtggacagctcagttcacttcagcagaggaaatgggcagagtcctactcttcgtcagtgcgaagtggggaaggggagccatgcactccctagcacacattttgaatggacctgaatttttcaccctagggagattaggagcccataccagagccttgtcccacgtggcaccacaccccgcctcttcacccccacgctgtatggtactaacagaaaaggatgccatagcaacttgaagtaaataaaacatccgcagatgaaatgagtttggnggaaggtgagaggcatctggagacttggcaa

SEQ ID NO: 42545 - DNA, 338 bp, Homo sapiens
  misc_feature (1)...(338): n = a,t,c or g
nnnnnnnnnnnnnnnnnnnnnnnnnnnnnnnnnnnnnnnnnnnnnnnnnnnnnnnnnnnnnnnnnnnnnnnnnnnnnnnnnnnnnnnnnnnnnnnnnnnnnnnnnnnnnnnnnnnnnnnnnnnnnnnnnnnnnnnnnnnnnnnnnnnnnnnnnnnnnnnnnnnnnnnnnnnnnnnnnnnnnnnnnnnnnnnnnnnnnnnnnnnnnnnnnnnnnnnnnnnnnnnnntagaaggcatatgtttaacctattgttactgagttgcttttgtcctttgctttctttcaatgagcaaaagtgttcatttgattttcatcactggaaaaacttgctttatccaa

SEQ ID NO: 42546 - DNA, 339 bp, Homo sapiens
gtaggaagattctgcatgaagggaaatattttcgtaacttcagtgcccatagacttgcactgagtgaaaggtcacttactgctctcattgagtccctgaaaacaacaggaagcatcaagagaaagattgaactctgggcactgatcccagggatacacaaacaaatggctgggcagattttgcagaaattcctgtaattggtaaaatgctgagtaatagcctttgatgtaacttttcagtgggtttattcattacttagcctaaaacacttttaattttaattgcctcaattttttcccctaaatgggtatgttttgcaagttcgctagccagcctggg

SEQ ID NO: 42547 - DNA, 355 bp, Homo sapiens
  misc_feature (1)...(355): n = a,t,c or g
gactggaaggaaatagtattttgaagatagatccttggtaaagtgaaatatcaaaaacttctgaaaacttggaaagaaagctcgataaattaggacaaagaatgagcaaaatctgtgagaaattttatagatgtaagtcatataaagagatgacttcttttatgtaatacattttcttaaaagaaaataataaaccnnnnnnnnnnnnnnnnnnnnnnnnnnnnnnnnnnnnnnnnnnnnnnnnnnnnnnnnnnnnnnnnnnnnnnnnnnnnnnnnnnnnnnnnnnnnnnnnnnnnnnnnnnnnnnnnnnnnnnnnnnnnnnnnnnnnnnnnnnnntggngnggggtgtgcacct

SEQ ID NO: 42548 - DNA, 354 bp, Homo sapiens
gcggcacgaggtaactaataattgcatgatgttttacacttcacaaaatacttatattatcttaagtagtggccaaggctcggtgctatctcacatgagctactctcaagctaagaccctgaattaaagcaggtcttctgatctgatgtatatgtaactccttgcctagctttgacattgtccagtgtaacaagcatgccagctgttcttctcaggttagcccagtctatttgcctcagctaagctgatggtcaggatgcaaagcagggcaggccagtgccctgtggagtttgatgaacaccagcagagtttgacgatccctccttaggaagagcgcctctcagcaaaatgtcc

SEQ ID NO: 42549 - DNA, 295 bp, Homo sapiens
ggtttcccatgggggcatgggttaacagttctgatcctgctatacgttttactggaattgaatgattcagtaaatggatggtagatggtaggagccaggtttctcactgttggagttgggatttacagataatcaacgggaggaggctagagtgatctgtgttttgatagattcaagttggagacgtcattatgaactcatatttagcttaatatagatcatgtctttttccccccacaagtctatagccaatgtccagtgatgttattaacatccccatctttttttttttttt

SEQ ID NO: 42550 - DNA, 343 bp, Homo sapiens
  misc_feature (1)...(343): n = a,t,c or g
gaccatgagcttcaatacnnnnnnnnnnnnnnnnnnnnnnnnnnnnnnnnnnnnnnnnnnnnnnnnnnnnnnnnnnnnccttctaaattatcttaattccacctccttctatctattgctaccaccatagtctgcaacatcatcatctgtcacctgaactaaggcaatattcctaactgttttaatcatttcttctctggccagagtgttctctacaagtacattgttaaaaactcaaatccaatcatgtcactcccctgattaaagtccttcaccagtttcctagtgaacttagaataaaatttaaactcctcgtcatggcctacaaaggccctacactctt

SEQ ID NO: 42551 - DNA, 354 bp, Homo sapiens
  misc_feature (1)...(354): n = a,t,c or g
gcaagaccaattatttgttgaataaatgattagtacttggaaagaatcttagatgtttaggccacagccacaaatggaggccagggcttggtaatttgggaatattgattagccatcccgatatcagcaatcaggcagttcatagatcagaaatctacacagggaagatgagaattaaggaacctgcagttagcaaccagggagcatggcaggcagtggaagaatgggtcaagggaccgattgtcagagtttgagaaagtaaaaccatttgtgttcaagtgtttcctaaactctacaatgcaggaactcatccacagtgtgagtggccttgggccctaaagnccgtggttctca

SEQ ID NO: 42552 - DNA, 298 bp, Homo sapiens
  misc_feature (1)...(298): n = a,t,c or g
ggtgacagatataggactgcttggctgatttcatgtttttcctttacaaatgtaaataaaacattgtgtgttggaggtcagagggcaaaggagatataactgaggactctactcaaaaaaacatctcgcttcatgtgtcattaactgaacaggggaaagaaactcagttgtctaacaagatatttttaaaatatttatttctccaagagggttaaacctcattcacaccttggagtaaattactttaataaggntaccanatcacctaactgaatgtaactaannncannaanctgca

SEQ ID NO: 42553 - DNA, 118 bp, Homo sapiens
  misc_feature (1)...(118): n = a,t,c or g
gcgtgggtagcataactattgtaaattcatgaatagcaccttttgcatattaaaatatcttaaaatgggccggtgngggggtgtanncccagcactttggaagaccgaggtggntggt

SEQ ID NO: 42554 - DNA, 368 bp, Homo sapiens
  misc_feature (1)...(368): n = a,t,c or g
gggtgatttcgtgtggcttccttgagaaaggacaaacatttcttgccaggcagataatctaacttttgaggccctttccagcctcaggatttgatgtggttctgtagtgcagcagcnnnnnnnnnnnnnnnnnnnnnnnnnnnnnnnnnnnnnnnnnnnnnnnnnnnnnnnnnnnnnnnnnnnnnnnnnnnnnnnnnnnnnnnnnnnnnnnnnnnnnnnnnnnnnnnnnnnnnnnnnnnnnnnnnnnnnnnnnnnnnnnnnnnnnnnnnnnnnnnnnnnnnnnnnnnnnnnnnnnnnnnnnnnnnnnnnnnnnnnnnnnnnnnnnnnnnnnnnnnnnnnnnnnngtgatgggagcagtgacagatcat

SEQ ID NO: 42555 - DNA, 350 bp, Homo sapiens
ggggctcggcgtggtctagtctctgactacctccccaggccatcttacacctccctggcaccatgctccagacagattaatttttcttttctttgaactgaacacattacacatttgccctatttttgaacttcccacaagctgtccccttggcctagaataatcttcaccccactcttttcatcttccagatctcagggtatatgtcacttctttagaaaatgctcaattgttattttacctacctccccatgccatcaagtcagtttctatttttaatctcactgaactctactttttcattcatagtacaggttgagcattccaggtctgaaaatccaaatccaaaa

SEQ ID NO: 42556 - DNA, 351 bp, Homo sapiens
  misc_feature (1)...(351): n = a,t,c or g
gaactggggcggaggggtgtttcctggaccccagtcctccgaatcagctcctagagtggaaccaggaaggattctggagccacagaagatagacagatggaaggtggggaccaaagtgaggaagagccgagggaacgcagccaggcaggtggaatgggaactctctggagccaagagagcactccagaagagaggctgcccgtggaagggagcaggccatgggcagtggccaggcgggtgctgacagctatcctgattttgggcctgcttcctttgnnttctgtgcttttgttctacaacttccagaactgtggccctcgcccctgtgagacattcttggtgtttggatct

SEQ ID NO: 42557 - DNA, 347 bp, Homo sapiens
  misc_feature (1)...(347): n = a,t,c or g
gcacacttaggagaaagaggaagtctgagccacttatcaaaattgtctctgaaattggaagggtggggagtggtcaggagattggtagagcacagactaaggagccataaagagtgtctgaatgtatgcactgagtctcagatgaccgggagctattccaggagggtagaggggaggtgggaagctttgggaacttaaggaaataagaacgtcacctgttaatcatcttagatgtggtgaagtgtgagaatgagaatttatagcatctacctgggagcaggtttcaggggggaatgcatggatggagagatttannggagagacttcaggaaatgagaagcctctat

SEQ ID NO: 42558 - DNA, 363 bp, Homo sapiens
  misc_feature (1)...(363): n = a,t,c or g
gcttggctagagcacttaagctgaagcaactctgcttcacatatttctcataattttcctgggactattgggctacccggaacatgtccttcttgtgatgagagagggcaggaagaaatacacagtctcttgaagcctaggcttggaacttgtaaaccatcacttctgccacattcnnnnnnnnnnnnnnnnnnnnnnnnnnnnnnnnnnnnnnnnnnnnnnnnnnnnnnnnnnnnnnnnnnnnnnnnnnnnnnnnnnnnnnnnnnnnnnnnnnnnnnnnnnnnnnnnnnnnnnnnnnnnnnnnnnnnnnnnnnnnnnnnnnnnnnnnnnnnnnnnnnnnnnnnnnnnnnnnnnnnnnnnnnn

SEQ ID NO: 42559 - DNA, 346 bp, Homo sapiens
ggctgcattgcctgcggtcaaggccagcaaggtggagcggatgcctcagaacggacgagataatgtgaactagctggaattttttattcttgtgaatatgtacataggcagcactagcgacattgcagtctgcttctgcaccttatcttaaagcacttacagataggccttcttgtgatcttgctctatctcacaacacactcagcacccccttctctgcccattccccagcctgtcttcctatcccatcccatcccatcccgctcttttcctacttttccttccctcaaagcttccattccacatccggaggagaagaaggaaatgaatttctctacagatgtcc

SEQ ID NO: 42560 - DNA, 251 bp, Homo sapiens
  misc_feature (1)...(251): n = a,t,c or g
gtgtctttcttcaaactctgtttagtcagccagtatttctacagaattcaaacttaatatttaaaccaagtgtcttagggtgggtatacgtactgtatcccatcttcacaaaatcccatgtgtacctgccagagagtaatataaatggctcaaattaggctctatttggatgatggtccaactgagtgatttaagctatttttaacgcctctagtgtatttcttgnnaattcctcnnatggnnattntttt

SEQ ID NO: 42561 - DNA, 276 bp, Homo sapiens
  misc_feature (1)...(276): n = a,t,c or g
gaaattaagttagaaccatgttacacaccatatagaaatatattccagatgataaaaacattaaaaacataaagcaactttgatgaaaacataatacggtgagtattcatcaaatctcaggttgagacaggaattcctatacataaaagcaaataagccatgaaggaaaaaaatctcttgaatttaaatctaagtatgaaaatatgaaatcttaagcaaaaactaaaagggaaaaatattttgccacatagtagtanaaaagntaaatgntnaggg

SEQ ID NO: 42562 - DNA, 361 bp, Homo sapiens
  misc_feature (1)...(361): n = a,t,c or g
gcttaggctttaggactgggacttcggctagggaggaaggtagagtaagaggttgaagataacagagtgcaaagtnnnnnnnnnnnnnnnnnnnnnnnnnnnnnnnnnnnnnnnnnnnnnnnnnnnnnntttaaaaaaacatctggcnnnnnnnnnnnnnnnnnnnnnnnnnnnnnnnnnnnnnnnnnnnnnnnnnnnnnnnnnnnnnnnnnnnnnnnnnnnnnnnnnnnnnnnnnnnnnnnnnnnnnnnnnnnnnnnnnnnnnnnnnnnnnnnnnnnnnnnnnnnnnnnnnnnnnnnnnnnnnnnnnnnnnnnnnnnnnnnnnnnnnnnnnnnnnnnnnnnnnnnnnnnnnnnnnnnnnn

SEQ ID NO: 42563 - DNA, 360 bp, Homo sapiens
ggaattaatttatgcaatagtttttgtttatcgcaacaccctatcaggctcttcactggacaccaacgcagagaacttcaattacagtatatgctttggcttgaagtttcttaacgtgtttgtttccagttttaatgaggtaaattacaaagagaattttgtacacaaatatatacagctcaatgattatttccatattttgatatgtaatttagatcaaggtacataaaaacctctaaaatactaggacatgatcgcaagcatagaaaaaacataaataggaagtcctacctattaatccccccacagaaacattgatttaacaatgattggatccaaatacctctatgagatttccaa

SEQ ID NO: 42564 - DNA, 359 bp, Homo sapiens
  misc_feature (1)...(359): n = a,t,c or g
gtcatttaagcctcacaaagtcatgtgaagatgatctatgttttggagacaagaaaactgagctcacagaggttgaagaacttgctccaagataaagtcctgattcaaaccctgttctgactgttttcaaaatgtatgtttttttggtatttctatagcactcagtaatggttattggactgtaagcaacagaaattgtgcatttaaggtatgaggacactnnnnnnnnnnnnnnnnnnnnnnnnnnnnnnnnnnnnnnnnnnnnnnnnnnnnnnnnnnnnnnnnnnnnnnnnnnnnnnnnnnnnnnnnnnnnnnnnnnnnnnnnnnnnnnnnnnnnnnnnnnnnnnnnnnnnnnnntc

SEQ ID NO: 42565 - DNA, 144 bp, Homo sapiens
  misc_feature (1)...(144): n = a,t,c or g
gggctcggcgtggggacgcgtgggggctggccccacacatgagcagaggctgcaggtaccttcctctctgaggggcacccgggtgctgctggccgtggccacccacgaagctctccccgccccctccgtcgnccaactcctgga

SEQ ID NO: 42566 - DNA, 157 bp, Homo sapiens
  misc_feature (1)...(157): n = a,t,c or g
ggaaatgttaatcctgcctttttcatgctaatctgagtctacctccagttttcctatttccaatcctttccctacaggcttatggatctggcataggcaggaggttctggtttcaggaaagactggctggtctcttgagatctgnaaagagaggatg

SEQ ID NO: 42567 - DNA, 314 bp, Homo sapiens
  misc_feature (1)...(314): n = a,t,c or g
gcacttatttgtaaagctaaccggtttgtattggaaatattataaatattctgggaatctcaaatgttgattttatactagctttttagttatttaagataaatttacattttattctattaacatctctttgaaaagacgtagtgcttttttaggtcgtctatgtgggnntgtgacnacattnncncttgggggattagtnngagactcncatttnngancaatctagtttgaatatggctcatganacacnggtctctgcgggagaanacnnnnngctnngtntggnncnnntcncctnnancttcnttgat

SEQ ID NO: 42568 - DNA, 353 bp, Homo sapiens
gggatacttcagaggctgaaggcagtaaaagaggtctttaaaaaaacggtttcaattttttgccagaacaatgtattcatatattaaaaaggagacataagtatttaaatacattgcagtctaggaatgattaagcttaaagataagtagctctgtattgctcaatggcttctcagagcactaatcagcaataattgttttgtatttaacttttatttttggccaagaacaccattttcttatatcaacacctgaaccagcagttggctttcttttttggacctctgtcacagcaaaacaatgttttattatcttataaggcaaccagtagaaatcatagctaaatcaaagtg

SEQ ID NO: 42569 - DNA, 384 bp, Homo sapiens
  misc_feature (1)...(384): n = a,t,c or g
gcaattgagtaaagagttaaagattatagtgtggttattgggtgatgatgatgcctttaagatagggaatgtataggaagaacagaatttgaggaggaaggtaatagagtatgactccagatgtgttaagatatctgggaatcaagaaaggtcaagtaagtacctgggtatttgggctggagctcaaggggacattgggataaattaggggatttgcattcatcagtataatgccatatagaaactgcagaaannnnnnnnnnnnnnnnnnnnnnnnnnnnnnnnnnnnnnnnnnnnnnnnnnnnnnnnnnnnnnnnnnnnnnnnnnnnnnnnnnnnnnnnnnnncncgntgngagaccctgtttctctaaaatttacaaaatt

SEQ ID NO: 42570 - DNA, 351 bp, Homo sapiens
gcacctgtatcatgactctgggcaggatagttgtgcctgacgcctggaggtgctgtatgtgtgtggtgttaggtacctatgttggatgtttctgcttctgggctcagcaaaattcttctctcaataaaaacaattctagatgctgtactttgtctagtgtcttctattagcagctgatagcactttttggctcttcaaaatatttttgcattcattgactcagtgcgttttataagtgcatatctgacaaattatttggactattttctttttgttcaatattaactaaatatgcatttatgagtgagaatttagggcatggattttctcactcatgaagaataacgtgcc

SEQ ID NO: 42571 - DNA, 384 bp, Homo sapiens
  misc_feature (1)...(384): n = a,t,c or g
nnnnnnnnnnnnnnnnnnnnnnnnnnnnnnnnnnnnnnnnnnnnnnnnnnnnnttgatcgaactatgggactttaaaacaatgcatatgcacaggcccagcctgggaagttctcattctgaaggagggctggggcaggggcacctatggctagggcaggagctatgttttaaaaagaatctgtgcaggtgactctgatgcacacacatataatagacaatcatggggctattgcatggatactaacaggtaccatctattgtacattttctacaggcccagtcctgtgatggatgcttcacatgctctatatttttcatttttacaactagccagctaataaataaggtgtttttagcattttaccgatgaagaagcgaattca

SEQ ID NO: 42572 - DNA, 349 bp, Homo sapiens
ggcttttcttgttagctggagctggtagatgagaaatgttacatctatcctttgttagtaatactacctgaaaaccattttagccaagtttttcttgaatttctttgactttgagtatttactaataatgatttagtggattgtggattagtggagctccttttaaaataaattttgtaggatagatgtattctgaaatgtttaacgtattggcaaaggtcattaacatgtgctgtttctttggcattctgattatccttttaaaatgttcactgtgtttttaaaaatataatgaataagtattctaggtttagaagtcagatctatattctgaatcttggtctgtcat

SEQ ID NO: 42573 - DNA, 341 bp, Homo sapiens
gtggaatatgccactgtcatatatattaagaagcaatatgccctgattcaagaaatataagagaaactgagaaaaataaatcattatatgtgccttgctacatttccttatgaatctgaaagagaaatggaaatttacaatcctactcataatatgttccatgtacaacacaataacctcatttcttttgtttttttaacaaataagtgcaagtagggacactgctttatctactcacagtgttcaccactagaggctttttcagtcattttgctgagacttactctttattcaaggagagttacatgtttagctttaaaacatctggactcacatgggaa

SEQ ID NO: 42574 - DNA, 164 bp, Homo sapiens
gcacactgaactgccgtgtaatctctgcccacaagcgggatgagacagctcatgtctcctagttcttgtaagcagaaacaaagcaggcataaataacactctgctccagtgcctggcatgagataagtacacaggtggttgggggaaatggagggatgaaaggg

SEQ ID NO: 42575 - DNA, 176 bp, Homo sapiens
  misc_feature (1)...(176): n = a,t,c or g
ggtgatatatgtcgcaaatatttatgcccagtttgtcgtttgcctatttactttatgatagttcagcgctgttgagaaaatatttagtatattttcctttttttccactctcctcccatctctgcgctccccagtttaattgcttgtatcatttctgntnngntnatgccttcatg

SEQ ID NO: 42576 - DNA, 345 bp, Homo sapiens
gaaaagttaaaatatgactcttgtacaatatagaatgaacacctgccaaagctttatctcacccatttatgaggaaaccagtaaatagtaaaactggttcaaaaaatgctttgacaaatgatgtatttgtagtcaacttataaaggcagtctgtgataagtttgctgagttaaaatccaaactggtaacatcctacaaggcaataaaactgtaacctttggtgttctccctttttacagaacagaaatctgcaggctggtatataacctcactgtgtctgatctcttcattaataccacataagtcaaacacagatacattcctctagacaattaactaatccat

SEQ ID NO: 42577 - DNA, 342 bp, Homo sapiens
  misc_feature (1)...(342): n = a,t,c or g
gagaagatttccttnnnnnnnnnnnnnnnnnnnnnnnnnnnnnnnnngatataccatgttttctttattcatctgccattggatgtgtgggttgcgtccacctcttaactattgtgagtagtgcttaagtgaacaggggtctgcaaatatcttttcaagaccctgctttcaattctttcagatgcatannnnnnnnnnnnnnnnnnnnnnnnnnnnnnnnnnnnnnnnnnnnnnnnnnnnnnnnnnnnnnnnnnnnnnnnnnnnnnnnnnnnnnnnnnnnnnnnnnnnnnnnnnnnnnnncaatattccgatcaacttctccacatctttgccaacacttgt

SEQ ID NO: 42578 - DNA, 341 bp, Homo sapiens
ggtcatatccagacttaaatctgccatgaaaatgagctcagtcatggttacttatggtatcttagatctgatcaagtacactgtcactcctaagtatttaagctaaatgttgaaaataatattttaatgtatagcattattttaaatctcttttaactaagaattttaatgcctttttaagtacaaaacttctaattttgtcttttcttaagtagccaaatattttggactattttggtaagtatttgttatctagtcatggtttctcattttagaaattcctaatcttcctgtttatgaaaggcctcaactaagctcattgcagcaaacataaatatagc

SEQ ID NO: 42579 - DNA, 333 bp, Homo sapiens
  misc_feature (1)...(333): n = a,t,c or g
gagggaaacgtcatatatctggaagttcagaaaggccagttcctgcggctcctctgtgctgctgacagccagccccctgccacgctgagctgggtcctgcaggacagagtcctctcctcgtcccacccctggggccccagaaccctggggctggagctgcgtgggatcctccagagaacctgagagtgatggtttcccaagcaaacaggacagtcctggaaaacctcgggaacggcacatccctccggtcctggagggccaaagcctgcgcctngnctgngncacccacagnanncccccaccaggctganctgnacccgngnnnacagaccg

SEQ ID NO: 42580 - DNA, 245 bp, Homo sapiens
  misc_feature (1)...(245): n = a,t,c or g
gcggacttaaatgtgatacataaaactagataactttgaaaaaagccacaggagaaaaatcttcaggatcttgggctaggtgacaagttcttggactttgccccgaaagcacatccataaaagacaaaatctgatatattggacttcttcaaaatttaaaaacttgtgatttaagaagaggaaaagataagctacagattgagatgaatttgcaaaccatatatctgatcaatttgnaatatata

SEQ ID NO: 42581 - DNA, 362 bp, Homo sapiens
gattgccatcagagtcactaagctaaatttaatcccaattccttctcattaggtgagtagcagccacctcaccttttccttcttttgtaaagaatatcttttatgtaccacaagtgaagggagtgctgaatatgatgccttcctttagcctcgcatgatagttttataaatttctggtgaagtcacacatgaagggaatatataaatccagcatcactgcccaagtcctttcagtccagcatatgttgaaaaatcctatttgaatggtgaaaagggaagaaaaagaattcttcctccacccacccagccattccacccatcaatcgtttatgacaatcttcagaccaaaaggctgttgttaa

SEQ ID NO: 42582 - DNA, 343 bp, Homo sapiens
gggtgggttaggtaggttggccagagggctcacatctggggttgaaggaaacgggataaaagccactgagtttcctgggccgggacctgagcgctgcccgtgtctccacctcgccctcccgtgtgcgtggctttctcctagctcttgggcacattctcacgtcccccccataacccgtcaccttcatttctgctggtgcttttgggagtcagacctacagactgcatcagcatcaccaggcagtttgctttctggagccttttccagaactgtcaagcagactctgggggcaaggcctcgggatcctcattttaaatacaaggtttaagcccttcgtttcagg

SEQ ID NO: 42583 - DNA, 360 bp, Homo sapiens
gctgatccacagggaagcaagaaacaggtgggagggtgaatgaccccgcccaattaggctaagtggctcaccctttctctggggacccttgtctccaaaggccactgtaggggctcacatagaatcatggaggggctgacatggactaatttgaggttccatctctagctgagctagagcaactataattctgccttcaacctggggttgggcactgatacccctactctggatggctccaaaccctatcatgtactggctatatgactttgagcaagttaccccttgaacctcactttcctcatctgtgaattgggttcactattacccacctcaccaaattcttatgggaattaaatg

SEQ ID NO: 42584 - DNA, 194 bp, Homo sapiens
gccagcacagtacctggtacataattggcattcagtaagtatgaatgaaagaataaattaatacataattttagtagattagttaactgcccttctttcgtcattgttcagttgaagaatacctgctatccctccaaagtgtataaaaactcatgttgcaatgggtaccttatatttgacaaaaaaaaaaaaaa

SEQ ID NO: 42585 - DNA, 344 bp, Homo sapiens
  misc_feature (1)...(344): n = a,t,c or g
nnnnnnnnnnnnnnnnnnnnnnnnnnnnnnnnnnnnnnnnnnnnnnnnnnnnnnnnnnnnnnnnnnnnnnnnnnnnnnnnnnnnnnnnnnnnnnnnnnnnnnnnnnnnnnnnnnnnnnnnnnnnnnnnnnnnnnnnnnnnnnnnnnnnnnnnnnnnnnnnnnnnnnnnnnnnnnnnnnnnnnnnnnnnnnnnnnnnnnnnnnnnnnnnnnnnnnnnnnnnnnnnnnnnnnnnnnnnnnnnnnnnnnnnnnnnnnnnnnnnnnnnnnnnnnnnnnnnnnnnnnnnnnnnnnnnnnnntttaaaaatcccttntgtaaaanaangttacttcncagntncnnttat

SEQ ID NO: 42586 - DNA, 344 bp, Homo sapiens
gcggcacgagaactgggccctacaaattagtttatatgaatccagataacagtaacaaataaatcttcaccccaaaaaaataaactatatttaagaagtatttgattatcttttacattagagagtcctcagtagacaggcaaatcaaagaatcactgcaggcctgtgataacattcgtttaaatttgctaaattatccatgctgttcccctcctttagccaaaaaaaaaactgaagtttttttagtttgctaattattctatacaacagagattcacctactttaaaggatcttcatacaatgtttacgataggcagtattaacaaaagtttaccctctcttt

SEQ ID NO: 42587 - DNA, 317 bp, Homo sapiens
gccgatatgtatctttggggctacagtagttgaaaaatgaatctactaattaatcagttggataatactataaaagcaaggaatttaaggatctttagaagaaatgagacacttttccatacactctgagcatattgtgagcctttagtataatctcagggtgaaagtgacctggctattgtgtattgctgtagacgtaactgttgattaagtgttagagattgctgtactagaggcatgcatggtggtccttttaaaaacagaaaaggctgttaagctcagctagtaagacaatcgaacatatctgaacggcagag

SEQ ID NO: 42588 - DNA, 316 bp, Homo sapiens
  misc_feature (1)...(316): n = a,t,c or g
gctgccaggcttgccgagtcctgggactgctctcgctccggctgccactctcccgcgctctcctagctccctgcgaagcaggatggccgggaccgtgcgcaccgcgtgcttggtggtggcgatgctgctcagcttggacttcccgggacaggcgcagcccccgccgccgccgccggacgccacctgtcaccaagtccgctccttcttccagagactgcagcccggactcaagtgggtgccagaaactcccgtgccaggatcagatttgcaagtatgtctccctaagggcccaacatgctgctcaagaaanatggaa

SEQ ID NO: 42589 - DNA, 230 bp, Homo sapiens
  misc_feature (1)...(230): n = a,t,c or g
gcatctaggactttcatagttagaaaaactcaatgcctggcttcaaaggacaagctgactcttgtcaggggctagtgcagctnnnnnnnnnnnnnnnnnnnnnnnnnnnnnnnnnnnnnnnnnnnnnnnnnnnnnnnnnnnntatgctgtataaacgcaacaacaaagcctggatgacgttggntctgnntacngnctgnnctactgannnnncccactgnnganaccta

SEQ ID NO: 42590 - DNA, 215 bp, Homo sapiens
  misc_feature (1)...(215): n = a,t,c or g
gcagtttgtagctaagtcagggatagtgctgtgtgtgacctcattccattacgtttattgaaaccagcttgaagccctaacatgtggcttgtcttagtgtacagcattcagttaaaaacaatgtgtgttctctagatgttggggtgttctgtgactgtcacgtcatggtggttgattannnananncnnnnnananncantgtgatttncctggc

SEQ ID NO: 42591 - DNA, 312 bp, Homo sapiens
gcggcacgagtgcttaactaatatttcattacttacattttgctatattagtatgtctagatttttgatgcaaaggctaggaattaataaaagtgatttattaatgagtgatatgtctaatgacagcccacagatgtgacttatgttactttttttcagccagggttgtttttagcagattgtagctgaattcatttttaaggaagaagagttctttctcatattgtacattttcttaaatctggtgttgacataagacatatgcagagctttgtgaggtttaaaaggatttctgcataatttgtgtaaaat

SEQ ID NO: 42592 - DNA, 312 bp, Homo sapiens
ggaaacagaaataatgtatgagttagtaaaagaaaaacccatattcagtgttgactcatctgaatttcctagcctggctattctcaagtattttggtctgaggacccacttatactcttacaaattgtatactccagtgaacttttgcttttgtggatactatcgatatttactatattagaaattaaagctgagaaattatacatactgttttaatttgttaacaaaacaattacatgttaatatataaaccattttatgaaaaataattgtcttataagttaggatacaaaaattcagtgtaaaaaggac

SEQ ID NO: 42593 - DNA, 321 bp, Homo sapiens
gtgagaaggaagcgttgaaaaggcgctggaggtggcagcagacacagcagaataaagaggtgggagagcgtgggtgggagcgccttgtttcctaaagttaccaagctgccaaagtcactgggtgcctgccagtagaaaatatttccaagtgtttaggtcagtgtgactccccttatgatcctgaaaattggagaaaatgcagttaacaccaatggggtaaatgccttctgatgtggtcatgagaactggtggtgggcatgagacctacagagaggttatctaacattgtgcttttcccccagtaggtgctttatagctttt

SEQ ID NO: 42594 - DNA, 310 bp, Homo sapiens
  misc_feature (1)...(310): n = a,t,c or g
gctttctttcacccctagacagaatgttcttgcattctgtgtgggggtgaatgttcttgcccaaatctctgtgtatctaaagcccatatacctttgcatcccctgcagcatcttgcacaggggcttgcataaagcagatcattgttttctcagttaggattaggtttggggcaggaaaacaaaaataatatttatttagcaagtaagaagtgatttttctctnnnnnnnnnnnnnnnnnnnnnnnnnnnnnnnnnnnnnnnnnnnnnnnnnnnnnnnnnnnnnnnnnnnnnnnnnnnnnnnnnnnnnnnn

SEQ ID NO: 42595 - DNA, 320 bp, Homo sapiens
  misc_feature (1)...(320): n = a,t,c or g
gcctggtaaggaattaaataccactgttctcaacagtatttccatattagaatcatccaaggagtttgtttgtttttaatgatgttgcttgggccctaccccagatctgaattacaacccctgggaagtaggacctagtatcagtatttaaaaaatacttccctgccgggcatnnnnnnnnnnnnnnnnnnnnnnnnnnnnnnnnnnnnnnnnnnnnnnnnnnnnnnnnnnnnnnnnnnnnnnnnnnnnnnnnnnnnnnnnnnnnnnnnnnnnnnnnnnnnnnnnnnnntaataggccaggcgcggtggctcacacctgt

SEQ ID NO: 42596 - DNA, 221 bp, Homo sapiens
  misc_feature (1)...(221): n = a,t,c or g
gcttttaaggaaaagctataaacagaaatttgctgttgtgcattagaaatgcaatctgaggccaggcnnnnnnnnnnnnnnnnnnnnnnnnnnnnnnnnnnnnnnnnnnnnnnnnnnnnnnnnnnnnnnnnnnnnnnnnnnnnnnnnnnnnnnnnnnnnnnnnnnnnnnnnnnnnnnnnnnnnnnnnttagccaggtgtggtggnnnnaccngnnngctac

SEQ ID NO: 42597 - DNA, 320 bp, Homo sapiens
  misc_feature (1)...(320): n = a,t,c or g
nnnnnnnnnnnnnnnnnnnnnnnnnnnnnnnnnnnnnnnnnnnnnnnnnnnnnnnnnnnnnnnnnnnnnnnnnnnnnnnnnnnnnnnnnnnnnnnnnnnnnnnnnnnnnnnnnnnnnnncaactttgggcctgtgccgaagggtctgggcagatcttccaaagatgtacaaaatgtagaaattgccctcnnnnnnnnnnnnnnnnnnnnnnnnnnnnnnnnnnnnnnnnnnnnnnnnnnnnnnnnnnnnnnnnnnnnctgcacactgacaaagatggtcgtattactaaaggtgaataaccagcgcggggggcacgtgga

SEQ ID NO: 42598 - DNA, 309 bp, Homo sapiens
ggagagagctagaataccctggcctgccaagtccctgttgatgatgaagctatgttccatctcaggagaggtggggcaggaaaaagcatgagaaccatgactctatagaatgtgttcaattctatagaattgaaagagttatgtgactctttcaattaacattttgcagtatattttcttggcaatatgttttcttctcagagttatcatggaccctaaccttacttcttcctgatttctatgaaaaaaatgaaatcatcccgtatttcttgcttttatggtttcttacgcattctttctcgaactcct

SEQ ID NO: 42599 - DNA, 310 bp, Homo sapiens
  misc_feature (1)...(310): n = a,t,c or g
gtatttatttaatttattttgagatggagtcttgctctggacttcacgttttagagcatccattttctcccctctgcatggggcagcatagcactacctacctcaaagggttgctcagaggaccgcatggtaagtgcatatgaagcactggnnnnnnnnnnnnnnnnnnnnnnnnnnnnnnnnnnnnnnnnnnnnnnnnnnnnnnnnnnnnnnnnnnnnnnnnnnnnnnnnnnnnnnnnnnnnnnnnnnnnnnnnnnnnnnnnnnnnnnnnnnnnnnnnnnnnnnnnnnnnnnnnnnnnnnnnnnnnnnn

SEQ ID NO: 42600 - DNA, 319 bp, Homo sapiens
  misc_feature (1)...(319): n = a,t,c or g
gatcttcctatctactctcctatctacctacctatttaccagtctattatctacctatctacctacctattatctatttatttatctatctaatctagctatcatctatcttccataaacttactcagaaactagcacttacagctgctcaagataaatgtctttttcttgtcctgccctcaatttgtatagcctatggctgggtgagtttccctttgccccatgcaccatgactgccctgtggacaacggaagtgtctggtccacccacatctctcagacaaggtcagtgaatatggtgtacccaaattgntggtggg

SEQ ID NO: 42601 - DNA, 351 bp, Homo sapiens
  misc_feature (1)...(351): n = a,t,c or g
ggcagtttgatactttgtatccctccccatggaatctgcccacaaaaattgttattgttgattcaggctttccattgtctgggaagaagagttgtgctttattaaattagaaatgagaaaagaactattgatcaaacaaagcaaaacgaaacattacttgaaggagtgaaaaaagtgttgagctttctgagaaatgaattaaacctctttgttcaagtcctaaacacaccatatacaggaaaaaagccttagcaagcgtcatagaaaatatttatgggacttggtgcagtannnnnnnnnnnnnnnnnnnnnnnnnnnnnnnnnnnnnnnnnnnnnnnnnnnnnatctaag

SEQ ID NO: 42602 - DNA, 356 bp, Homo sapiens
gcatggagctgggcatgcctcaacttcctcaagcctctaattcctcactcatgcatgaggccctgagtttcttccatggctaggggaggaagggtgctatgactacccaggatcatgtttataaagggcccagtgacagaatcccaggaacttaatggtgtttaatgatgtttctttcccttctcctcctgagtaaattcagggccccaggtcatctctgtgctgggctccagggctggcagcccgggcagtctccctgcctgagaagcgtgattcactgacaggtggcatccgcgaagatgagtcgagagccggctgcggaacctccatagcactctgcaggtgaaaatcccagg

SEQ ID NO: 42603 - DNA, 349 bp, Homo sapiens
gagaagacgtgtctgcctctgtgccgtccccgagaagccacccagttagccaagcagatggagctggagcaggccgtggaacacatcgcaaagctcgctgaggcctctgcctctgctgcctataaggcagatgcaccagagggccttgccccagaggacagggacaagcctgcacaccaagcaagtgaaacagagctggctgcggccatcggctccatcatcaatgacatttctggggagccagaaaacttcccagcacctccaccttatcctggagaatcccagacagatctgcaaccccccgcaggtgcacaggcgctgcagccttctgaggaaggaatggagacag

SEQ ID NO: 42604 - DNA, 347 bp, Homo sapiens
  misc_feature (1)...(347): n = a,t,c or g
gttcttaagatgttctaaggattatagtatgtagcaccttgaaaaagggagaagcatcaaaacttttatcattagtgatggaaaccaatcgctaggtaggcagatcaatttactagatactgatttaatcttgaaatgatgaattaagtaacatgatatgaaaactaacttaaaaacaatattttatgctttacagaaatacacggccgannnnnnnnnnnnnnnnnnnnnnnnnnnnnnnnnnnnnnnnnnnnnnnnnnnnnnnnnnnnnnnnnnnnnnnnnnnnnnnnnnnnnnnnnnnnnnnnnnnnnnnnnnnnnnnnnnnnnnnnnnnnnnnnnnnttcagg

SEQ ID NO: 42605 - DNA, 325 bp, Homo sapiens
  misc_feature (1)...(325): n = a,t,c or g
ggaaacctccaggagggactaagtgtgccccctgagctaattgtggaaggcagctggggagagggccagctccaaccagctctaccagttttccctaaggccataggcagatctcctgggaacgtctcctgagctcaaaccattggtggggggttggggactgcagtgaggacagagctttaatgccaactggacgagcatgagctgtaactatttggctgtccttctgaatttctattgctctgcaaatattctctgaagagcancaatgancaaggtgaancangcagatgtggntganactgnctgnnatnancccacccat

SEQ ID NO: 42606 - DNA, 326 bp, Homo sapiens
  misc_feature (1)...(326): n = a,t,c or g
gcggcacgagctgggggtgtggagaagggatattggccatagcagtcatgagttaggctgtaaaacataagttaaacgcagagtgtcctatattgaattacaccctaaaatgtgctatattttcgggtctaattcaagtaacaagtgctataatcacctttccataggctaacagaatgaaggctgtgtcaaatctatgcttttatttctcccaaatgcgttccagtcctggtactcaataaatagtcatnacaatggtgctgatgatgnaggngganggannnnntnnnnnnnnnnnnnnntntnnttnntannnnncnnntatt

SEQ ID NO: 42607 - DNA, 348 bp, Homo sapiens
  misc_feature (1)...(348): n = a,t,c or g
gcggcacgagnnnnnnnnnnnnnnnnnnnnnnnnnnnnnnnnnnnnnnnnnnnnnnnnnnnnnnnnnnnnnnnnnnnnnnnnnnnnnnnnnnnnnnnnnnnnnnnnnnnnnnnnnnnnnnnnnnnnnnnnnnnnnnnnnnnnnnnnnnnnnnnnnnnnnnnnnnnnnnnnnnnnnnnnnnnnnnatgaacttcaggtagtttttggtactagctagtaagattggctacttttttaactgcagtgacacaaatttacaatgctctaggacagtgtctccccaaatgatgttatgtaggccattaacagacaggctactcctcctgtaaaaaaagttctgagttcaaat

SEQ ID NO: 42608 - DNA, 355 bp, Homo sapiens
  misc_feature (1)...(355): n = a,t,c or g
ggcatctcctacattccagagcttgatgggtgctcttcattaattctctcatctcatccttacaaccatgctgagtggtgggttttgccagcttcatttcatgtgaggaaactgagtttcagagaagttaaagaacttacccaagggacacagttgatattcaaatccaggcctatgtgactccaagcccatgctctttccaccacactgcctaccaacttgtgtagcatttggcttttaaaagtgctattcnnnnnnnnnnnnnnnnnnnnnnnnnnnnnnnnnnnnnnnnnnnnnnnnnnnnnnnnnnnnnnnnnnnnnnnnnnnnnnnnnnnnnnnnnnnnnnnnnnnnnnn

SEQ ID NO: 42609 - DNA, 342 bp, Homo sapiens
  misc_feature (1)...(342): n = a,t,c or g
ggcatttaatagcttaatataatatatatataatatattaactcacacactttctctgcaaagaacctgtgtggggcacaggggtggggagggtggctactaagctactaataaaccaaacacatattgtgccttctagaagatatgtcatctatatcaattagcataatgtaagacagaaaatcataaatgnnnnnnnnnnnnnnnnnnnnnnnnnnnnnnnnnnnnnnnnnnnnnnnnaggtggatcacnnnnnnnnnnnnnnnnnnnnnnnnnnnnnnnnnnnnnnnnnnnnnnnnnnnnnnnnnnnnnngttgcttgcctgtagtccagctactcagg

SEQ ID NO: 42610 - DNA, 115 bp, Homo sapiens
gaaaatctgaaaagcaacagcaggttgcttgggaagaggggttagatgggattctgcgaagtctagggtctgtgtctctcttttctgtagctagtttgacctttttttttttttt

SEQ ID NO: 42611 - DNA, 314 bp, Homo sapiens
  misc_feature (1)...(314): n = a,t,c or g
ggctctctgttgacttctctggctgactttacagtttccagagtgcttttttaacacactttccagaaagtctggaaaggactttacactttccagaatgctttcgcccagtgtgatctcagcccagagatgaagagaattcaagtctactccatggtggatagatagagctgaacccttagttctctttgaacaaggttcccttctaacccctaaagtgtgcttgttttaagagaaaggagnnnnnnnnnnnnnnnnnnnnnnnnnnnnnnnnnnnnnnnnnnnnnnnnnnnnnnnnnnnnnnnnnnnnnnnn

SEQ ID NO: 42612 - DNA, 321 bp, Homo sapiens
  misc_feature (1)...(321): n = a,t,c or g
ggtgttaatactttttttagatttgtggtaaatattttcccctgattcgtagtctgcatagcttttaattgtcttatgttattgtgggttgaaacttttatttagtcaaatttgtacaactttctttagtaacttttttcctttgctgttgtgcctgcagtcacacaccatccagatattaatcacctagattttaaattttctatatatatacaaatttctgactatactatattccttctctatgaataacctcttttaacatttttttgangggcanatntgctgcaatgaatnccctcagnnttgnnngntnaaaaa

SEQ ID NO: 42613 - DNA, 256 bp, Homo sapiens
  misc_feature (1)...(256): n = a,t,c or g
gcnnnnnnnnnnnnnnnnnnnnnnnnnnnnnnnnnnnnnnnnnnnnnnnnnnnnnnnnnnnnnnnnnnnnnnnnnnnnnnnnnnnnnnnnnnnnnnnnnnnnnnnnnnnnnnnnnnnnnnnnnnnnnnnnnnnnnnnnnnnnnnnnnnnnnnnnnnnnnnnnnnnnnnnnnnnnnnnnnnnnnnnnnnnnnnnnnnnnnnnnngatgtaacttttttacaggaatcccctgggtgctganttganactangnggat

SEQ ID NO: 42614 - DNA, 339 bp, Homo sapiens
gactggaagtagacttttttcattcattaactattgaacatttggagattcaatggtgagcaaaacagacaaggtccttgctatcatggagaatttacattatctggatcttcgacaaaggtaaaaataacagggtataagaatatgatgctctaggactaggatttcttccctataaggtctccgaaaatagctctctcccttgcaagcttgataacacttttcaggaagaaaaattccttctatcacgccttccacatgagaattttatgactttgtgaggatatgtgagggatggggaccaaggtgggaagaaagatagatctaaaatctctcagg

SEQ ID NO: 42615 - DNA, 322 bp, Homo sapiens
gcggcacgaggaggaaaccaatatactagtaaacaacattaggccagggtatacaacctccactggcgttgggatctcctggggtttgtctaaaaagtctcattgtcctggctacaccccagtctaacttcattaggatctcagcgggtaaaccccagctattagaatttttaaagctcttcaggtgatttaaaaacaaatttgcaaaccacaacctagagtaccacttattaaagatcttaaacaagggatccagttcccagtagtaacagcaccagttggctttcacgaccctccagactatgccatacctttggatgtc

SEQ ID NO: 42616 - DNA, 333 bp, Homo sapiens
gagggaagtttcagagcatgggcgtcatttacagcagtatttcaacctgtttgtaatgtatgccaatttaggtgtggcagagaagacacagcttctgaaattgagtgtacctgctacttttatgcttgtgtctttagatgaaggtccaggtcctccaatcaaataccagtatgctgaattaggcaaattatactcagtagtgtcacagctgatccgctgttgcaatgtctcttcaagaatgcagtcttcaatcaatggtaatcctcctcttcccaatccttttggtgatcctaatttatcacaacctataatgccaattcagcagaatgtggc

SEQ ID NO: 42617 - DNA, 323 bp, Homo sapiens
  misc_feature (1)...(323): n = a,t,c or g
gggttagagtccttaaccagaacaacaggttatactcttagttaaatgtagaaaaacaaaaagacaaacaacaacaacaaaatcaatggtaaagtaaacaatattagtggcaaagtaatgagatgggaatctcagggtgtcagaattctggtacaagaattagcaagctgaagttttatacttttaacaccctttagaaacacttcaactatgatctttttttttttganacagcatctntgtcacccaggctanagcganaccttgtntcaaaaancaaagcaaaacgaaacgcctgtaagcccagccntgtccagcccggt

SEQ ID NO: 42618 - DNA, 333 bp, Homo sapiens
  misc_feature (1)...(333): n = a,t,c or g
gataagaattaagtaaattttattctcttttactttgtagttactagaaatttgtactgagattgggctgaaactttcaaagctttgaaggaatcattaaataatgtaatcaattttaaatgggaaattttatttaacagtacatatttattgaatgctnnnnnnnnnnnnnnnnnnnnnnnnnnnnnnnnnnnnnnnnnnnnnnnnnnnnnnnnatttgtttgctattgatcattttcatctgctttttaattttaagggacaaaaagtggcttaactgattatactgggagggatctttttttatttgtaagcaggccttttggaggtcat

SEQ ID NO: 42619 - DNA, 323 bp, Homo sapiens
gcgtggagaaccccgagtacttgacaccccagggaggagctgcccctcagccccaccctcctcctgccttcagcccagccttcgacaacctctattactgggaccaggacccaccagagcggggggctccacccagcaccttcaaagggacacctacggcagagaacccagagtacctgggtctggacgtgccagtgtgaaccagaaggccaagtccgcagaagccctgatgtgtcctcagggagcagggaaggcctgacttctgctggcatcaagaggtgggagggccctccgaccacttccaggggaacctgccatgccag

SEQ ID NO: 42620 - DNA, 312 bp, Homo sapiens
  misc_feature (1)...(312): n = a,t,c or g
ggaagctctatgagtttgttcacagttttcaggatgagaagcgtcagctggcttaccaggttttgggcctctcagaaggggcaacaaatgaagaaatacatcggagttaccaggagctagtgaaggtctggcacccagaccacaacctggaccagacagaggaggcacagaggcacttcctggagatccaggctgcgtatgaagtcctgagtcaacccaggaagccctggggatcccggaggtgaaangaaacttccccctgangactgactcttnctancnnanctggcnnctngnccananntanctttg

SEQ ID NO: 42621 - DNA, 373 bp, Homo sapiens
gggggccatcagaaggatggaaattttctatgtgcttccagaaatcaacctacagattgatcccttctcaaaagactaatttttattctagtcatgcccagctataagcatttgggcatttacagataatctttgttcctgaagggcatccgaatatgtccttcctccttttaatgcccatgacccttactatcctggaacagagtccacattgcagaaaggacaaggctcaccacgttcagggccccatcaagacccccagcctcatgtgtgctctccctgtcccaccccaccccaccttctgctaatcacagagtcatcttcacagtgtgaaccctgaatacagatgacccgggttcaaatcacacttctg

SEQ ID NO: 42622 - DNA, 370 bp, Homo sapiens
  misc_feature (1)...(370): n = a,t,c or g
gggaagagggttatggtggtcgctagcattctcattttcaagaccactctgttcctttcttagaccatgtttctcatcttaagcagtcatgcccgagctggagacaggaaaccagacagcagtctgccctgataagggacagcattgtctgaaggcggggaatagccctgcttttacccccaactcagctctctttgcttgaaatttagtagtcatagaagaggcacaatgctgttgacagtttctgaaccaaaactaggattcatttcttccaaagcaaaaaaatagtgtcctnnnnnnnnnnnnnnnnnnnnnnnnnnnnnnnnnnnnnnnnnnnnnnnnnnnnnnnnnnnnnnnnnnnnnnnnnnnn

SEQ ID NO: 42623 - DNA, 361 bp, Homo sapiens
gctgggttaactaaaaataacatttatccaagtattgatatattttgattttattatttaaatgattacaatctcctcatatatacaagtaaatcttggggcatttgataaatttcatgtttatgcattcattgagtcagccactacacttttgttgtgtgcctattaacgtgcaagtggccattctaagtggccatttggcaagtgcaggtgaatgagaccagcttctgcctcccagggaagtggctgttaagtagggacgatggcatgcaaatcggtaattataatacagattaataaaagccatcatgtgtttgtatacaaagtctcatgagtacatgggagaggaagacattcattg

SEQ ID NO: 42624 - DNA, 354 bp, Homo sapiens
  misc_feature (1)...(354): n = a,t,c or g
gtgagcttcaataccctgatttgatcactacacattatatgtatcacatcactatgtactctataaatagtacaattgttatgtgttcattaaaaacattttaaaacttaaaaaaattttaacatgtatttgaattctattatttcttattcttcttttactatgctgggtcagtcctccagtacaatgcagaaaataagcaaggataaagggcatcgnnnnnnnnnnnnnnnnnnnnnnnnnnnnnnnnnnnnnnnnnnnnnnnnnnnnnnnnnnnnnnnnnnnnnnnnnnnnnnnnnnnnnnnnnnnnnnnnnnnnnnnnnnnnnnnnnnnnnnnnnnnnnnnnnnnnnnnt

SEQ ID NO: 42625 - DNA, 353 bp, Homo sapiens
  misc_feature (1)...(353): n = a,t,c or g
nnnnnnnnnnnnnnnnnnnnnnnnnnnnnnnnnnnnnnnnnnnnnnnnnnnnnnnnnnnnnnnnnnnnnnnnnnnnnnnnnnnnnnnnnnnnnnnnnnnnnnnnnnnagtcaaaaaaaagaattcttagaatggtagatcaaattccattattggtatgtcctcattaaagttaggcatttgataatctcgcacagtggctttttggagaaatgtatactgaatgtttaattggttgaataaccatacccaaaggctacatgttagcaaaatgggttgaagttcccttaaccatggacatacaggcagtggttatcactcttggctgcacattggaataagctggggagcttt

SEQ ID NO: 42626 - DNA, 346 bp, Homo sapiens
  misc_feature (1)...(346): n = a,t,c or g
gcggcacgannnnnnnnnnnnnnnnnnnnnnnnnnnnnnnnnnnnnnnnnnnnnnnnnnnnnnnnnnnnnnnnnnnnnnnnnnnnnnnnnnnnnnnnnntctctactttttatagccaaaaaccaaaaaacaaaaaaacaggctcagtgtagttactggcccaaggatacactgctagaacatggttggaccaagatttggacctaaagatatttgacaccaaaatccttcatctttaacatatctcaaaacagtataattgcgtttttatagttatattttaataactttttctagaacattttttcctatatttagnttgngtancataatggctgacaacaca

SEQ ID NO: 42627 - DNA, 359 bp, Homo sapiens
  misc_feature (1)...(359): n = a,t,c or g
gaaaatgttcatgtttccagtgtccaaaatctcagggctgacaatgaatttacctgaatagtcattaggtgcacacattcacacatcactgctgagggcaggaactgccgtgtagcacaagaggctctggatacggagtcagagagctgagtctggttggaggattggctgctccaagatagctaattttccccagggcttcattattcatctgggaaatgatggcacccaccctgcctgccttagacagctgttgtggggttagatctgataggagtactgtgcaaactctaaagcctctggtgtgcatttaagctctcancagtcatactgaggatcanncancttctatgacatag

SEQ ID NO: 42628 - DNA, 351 bp, Homo sapiens
gctgtggagactttcataatcacatccttcttgtggtttgcttgaatttgatcacagtggctgatttcatgcattgataatgaaggcttaggttgcctgtttctcagcataaatccacctcagacttgtacattgacagtgcttctggtttcagcacacatggagatatagaattgaaattgctctgctttctttacaaatgactcagagtgtgcttgtccttccctaaaatgttgccagcatgtaaaggattttcaatgagcagtgcaataagccagcaactgggaaggcttggagcggcactgatataacgtggtgctgtcacacagataatcagggctggagccaagt

SEQ ID NO: 42629 - DNA, 353 bp, Homo sapiens
gctggggaagagaaaacctttttgttccttctcagaacagacctggaacaatcatcatcaggatacctcagtctgtccaccaagtccattggtgcgatcttaagagtcacatgacttcgggatgtttgaataaaaggggccttgacttggacctacagggcaggtaaaatggtcaacagtcgttccagctcttgctgctaaagaacagaacgtccctgtgaacacgggccacattctctcagcaaaccacaacagaaattgttcgggaaaagaataaactcaatccatcatgatttccttctgttttctgaaattctcccggcaagtcagtctgcatctgcaattctgcctgg

SEQ ID NO: 42630 - DNA, 309 bp, Homo sapiens
  misc_feature (1)...(309): n = a,t,c or g
gtatttactgtaaccaatagattacaaatgagcttctttgatctgggtggcctggagagattgttagaagtcatttgtttcctgccttgatttttcttggaatttggaagaaacactctaaagtttattgantnaacagcagatanaangtgcnnaaacactcgtgaaanangagaatgannanacctactcttncagttcngtnnnanttatananttnctantttgannatnnngnacatnngacntgntgcnngntcanncttnnnttnntctagnntggannatctnttntnaaananttcatat

SEQ ID NO: 42631 - DNA, 314 bp, Homo sapiens
  misc_feature (1)...(314): n = a,t,c or g
gaactggaccattttttgcatgtccactaacaagacacacttatgtaagcagcaaaaacaaaaatcaatatatttttaagaaattataaaatgtttttacaatttttttcttataaaatgtttttacaatttgctttcgtaattgcatttctcacaataattcctaacaaaataaaccaaaggaaagaaaaagatcacacataatgagacatcactatacacgtatcagaatgagcaacatccaaaaacgctgaaaacaccaactgctgaagaggatgtggaggaacaggaactctcattcattgctggnggag

SEQ ID NO: 42632 - DNA, 313 bp, Homo sapiens
  misc_feature (1)...(313): n = a,t,c or g
gctggaaaggatgataaattctcagcaattcacgtgaaaagaggaaagcagtcacatgaataatccaaaaaaaaggataattaaaaagactgtctaatgtggtcctgaaatgtgtttcacctgtacttaacactgaatcgatgaatttccactacattagacacacccagtcttcaaacaaagtaataaaataggcttgtgtgtatagggcagtaggaaaatgcatgcctcccctgcaaataaaccacaattctaagatggcgatgtctcatttcagattacttgcnnancannngcncangtngaantgttg

SEQ ID NO: 42633 - DNA, 305 bp, Homo sapiens
  misc_feature (1)...(305): n = a,t,c or g
gatatattcagctgggtttttggcagaggtagtaaggcaattcaacagagaaaggatggtggttacaacgaatggtgttgaaacaattctacatccatacacaaaacaaaaacaacccaaagtctgaaaataactcaaactttattaaaaaattaactaaaattggattatagacccaaatttaaaacaggaaactgaaatttagaggagaaaatccaacacaaaaagcaggatctataaagaaaaaactgatgtattggagggtgaacttaagntttgctctgtgntgngcactgttcanagag

SEQ ID NO: 42634 - DNA, 312 bp, Homo sapiens
  misc_feature (1)...(312): n = a,t,c or g
gctgggtttctctttcctggaaagttcaatcactttatctaatgtctgggttttgggatatttatactcctggccacctcacaccaagtcatcttccatctaaatggctggttaatggcttaatgtaaaaggngggaacctnccaccngaaaaagnccccnggaancnttttnncngccntcnatttnnacccntaaannagccccnaaaacccagganggatttctnccaantgnccgggggtnnaaattnacnnncccccttggtnaaaatnccaaanccnggcnngcctngggggnttanncccntaat

SEQ ID NO: 42635 - DNA, 269 bp, Homo sapiens
  misc_feature (1)...(269): n = a,t,c or g
gacatagaggcaactaaaaatcctctttgaggagttgggtcccaggcagtgcagctgctccctactccctccctaccacccgtatgctgcgccctctcccccacctttgtgcccaccctcctcctcaaactccaggccaagtcctttttctcctcttccttccctgcctaaaagattcctcggggcctccttccctgtcagatgccactgaagacnaattttgaggctgaacnaanagaattctagcatctntcccaatgngcctcttg

SEQ ID NO: 42636 - DNA, 182 bp, Homo sapiens
  misc_feature (1)...(182): n = a,t,c or g
gaacaggagcaatgaggcaaagatcaagtctttagatttaaatagctgtagtttaggtgaataagtggtgtgtaagttgtagtaactgtcccatctttttgtgcttccttgcatctgcattcttggggtantctnctnccacactcnttcttggttntntcnnatnacggggtttgncaatg

SEQ ID NO: 42637 - DNA, 274 bp, Homo sapiens
  misc_feature (1)...(274): n = a,t,c or g
gaaagcacttaggataatgcttggaatatggtaagtgggtaatacatgtctctattactattatcattattattattgctattatcaatctcatgataagtggcaggcacagctcttcagtgttctttttactttatcatcctgaactattttaggtgcacttttctcaccaattccagaataaccaatgtttacattgtcatgaaacattctttcaaatgagctcctttacttgatcaaatcantangaagctttcnntngnnnnaantattt

SEQ ID NO: 42638 - DNA, 314 bp, Homo sapiens
  misc_feature (1)...(314): n = a,t,c or g
nnnnnnnnnnnnnnnnnnnnnnnnnnnnnnnnnnnnnnnnnnnnnnnnnnnnnnnnnnnnnnnnnnnnnnnnnnnnnnnnnnnnnnnnnnnnnnnntataaggaaacaaaatacccccagctccttaccccagacccttgtccagatagaaatttagacttattaatatattgaattgttcaagtgtccatatactaagaattacatcagcgatgtggaactatggataggcttccttgggttcctggctccacactataaccaccgcccccaccccttaaatttctgatagcagacttaanagtgaatatcac

SEQ ID NO: 42639 - DNA, 293 bp, Homo sapiens
  misc_feature (1)...(293): n = a,t,c or g
gggagatatgaacagcctctgagatagtagaatttgtgttattttgcataagtccaaaccagtcatgacgttcagatattggatttatcattactataaattaatcgtatttccctctcatatctganatcnttttaaaggatanattnngccggnncntgtnctnatgcntgtacnccatcnctttntnaggcnnctatcctnntncnagncnttagtntnaacacctttcttgttcntccngtnttncnttntntnnaatnnttttnnntnntnctatngtnnccnttttt

SEQ ID NO: 42640 - DNA, 306 bp, Homo sapiens
  misc_feature (1)...(306): n = a,t,c or g
gagatactatcagataattgaggacaaaaggtctgccttatttcagctggcaaaaatggctttttagcaatttcacctagtgtttattaagcttgagaagaaaagctaaggatcttctggataaatcctgagatcatgggatcagttcagaaaacaagttctcttaaagggagaaaggaataaaaaatatgaatgtaataatatttaaactaacatcatttagggaatgatatgctgcatatatgtgattccatgtaattganaatacatanatactannacattgattnattgtcgacagaccct

SEQ ID NO: 42641 - DNA, 258 bp, Homo sapiens
  misc_feature (1)...(258): n = a,t,c or g
gccaatgtttactgtcattctaatgtctcaacctaagagttattttttattctttcccctcctggaattttatatcaaccaagtatcagatacctcctctattatgtctggattgacagctttcatggcctttactgaattaatctaaataaattaattatttagcctcccagctggttttcttacctccctataagatggagaatgagaactacatcacatgtganaaaaggaattaagtaaacatatttttgaatg

SEQ ID NO: 42642 - DNA, 390 bp, Homo sapiens
  misc_feature (1)...(390): n = a,t,c or g
tacnnnnnnnnnnnnnnnnnnnnnnnnnnnnnnnnnnnnnnnnnnnnnnnnnnnnnnnnnnnnnnnnnnnnnagcacgagnnnnnnnnnnnnnnnnnnnnnnnnnnnnnnnnnnnnnnnnnnnnnnnnnnnnnnnnnnnnnnnnnnnnnnnnnnnnnnnnnnnnnnnnnnnnnnnnnnnnnnnnnnnnnnnnnnnnnnnnnnnnnnnnnnnnnnnnnnnnnnnnnnnnnnnnnnnnnnnnnnnnnnnnnnnnnnnnnnnnnnnnnnccaaagtgctgggatgacggactgagtcactgcgtccggcctccatcattgtggtttgataagtggaaattaatttttatgatgtccattcgtatgngttttnttttanggnntangntnttgg

SEQ ID NO: 42643 - DNA, 313 bp, Homo sapiens
  misc_feature (1)...(313): n = a,t,c or g
gctggaagaagcaagaaagaatcctagaggctttggagagatcaaggccctgataccaccatgctttcagatgtctagcctccagaaccacgagaaaatannnnnnnnnnnnnnnnnnnnnnnnnnnnnnnnnnnnnnnnnnnnntacttgaaaccaagaaaacaacctaattagaataagaagtaaacctgctgtttctcatggagaacatcattagactttgcatccagtgttttaaagagaaaaaacaggaaggtgaaagggaatattttccacttttctctgcgcctactaaggtgaagctaaataaca

SEQ ID NO: 42644 - DNA, 293 bp, Homo sapiens
  misc_feature (1)...(293): n = a,t,c or g
gcttcaataccctgatattatatataaccacattaatctcagatataggaggcctaaagagaaagtatgcannnnnnnnnnnnnnnnnnnnnnnnnnnnnnnnnnnnnnnnnnnnnnnnnnnnnnnnnnnnnnnnnnnnnnnnnnnnnnnnnnnnnnnnnnnnnnnnnnnnnnnnnaaaatcccatctccacnnnnnnnnnnnnnnnnnnnnnnnnnnnnnnnnnnnnnnnnnnnnnnnnnnnnnnnnnnnnnnnnnnnnnnnnnnnnnnnnnnnnnnnnnnnnnnnnngagg

SEQ ID NO: 42645 - DNA, 283 bp, Homo sapiens
  misc_feature (1)...(283): n = a,t,c or g
gagccattactcttcttgctaagcagagcctctgacacccagcctgacagtccaagtcagggccaaatccgtcagggtgaaaggacaccttacatgacagatgggttcgttctcagtcaccaaaggactggggcaacgggaagcctatagacacccaggttcctgccgatgggagataaaccacacagctgcgagcttaagagganctgttcatgtgtggaanaannctantnttaaatnntatatatgggaatnannnnaagnagnntnccccnnnnncttg

SEQ ID NO: 42646 - DNA, 328 bp, Homo sapiens
  misc_feature (1)...(328): n = a,t,c or g
gcggcacgagtttccaaataagttcacactctgagggtggacatgaatttggggtggacactattcaacccactacattaaattatatatgctttaactttaggagagtagcttaatgagatggcagtaggcaagaactaccattgatcattattaattttgtgtattnttctgttatgtgacttaccacactgaattatatntattccactcatntcttgcactaaaccacaagaaggnaaagattcttttcctgtgacctgacataatgtacctaatagtatgtgtgngnattcataccananataaaaaattattgngtaagatg

SEQ ID NO: 42647 - DNA, 149 bp, Homo sapiens
  misc_feature (1)...(149): n = a,t,c or g
ggnnnnnnnnnnnnnnnnnnnnnnnnnnnnnnnnnnnnnnnnnnnnnnnnnnnnnnnnnnnnnnnnnnnnnnnnnnnnnnnnnnnnnnnnnnnnnnactcatggttttgggtttgtntgttttgttcttttngatanatgnnncntact

SEQ ID NO: 42648 - DNA, 345 bp, Homo sapiens
  misc_feature (1)...(345): n = a,t,c or g
ggnnnnnnnnnnnnnnnnnnnnnnnnnnnnnnnnnnnnnnnnnnnnnnnnnnnnnnnnnnnnnnnnnnnnnnnnnnnnnnnnnnnnnnnnnnnnnnactcatggttttgggtttgtttgtttttttctttttgagacagannttactctgttgcccacgctgtagtacagtggtgcaatntggcttancgcancctaccctcccatattcnacgatatttccntctctnncnngtgcgnntggctnacanctgtatttnnanntcttttnnaagccnacgtgnatntatnacatcntngnttnatcnnncnattttnnnatannnnaanttntnactgtnctaag

SEQ ID NO: 42649 - DNA, 300 bp, Homo sapiens
  misc_feature (1)...(300): n = a,t,c or g
gctggaagaattgaggcagatgcattcattaggatcctaaacaaagatggtggcagtgtagatagagaggagtacatgaatctaagagttatttatacagagtagggatgttgtggtgacaattatgacaggaaggaaggagttaaagatgattcccagacttcggctctaatgaccagcagaatagtcntacaggangaatagagtggggagctatnaanagatcaantctgnctggnacatganctttaagtncgtnnggncatcngannnnnnannatnttggntcctntttcggac

SEQ ID NO: 42650 - DNA, 295 bp, Homo sapiens
  misc_feature (1)...(295): n = a,t,c or g
ggggttccaatttttccacattcttgccaacacttttatattgctattattgttattatagtagccatgctacctggtgtggagtggtatcttatggttttgattcggnnnnnnnnnnnnnnnnnnnnnnnnnnnnnnnnnnnnnnnnnnnnnnnnnnnnnnnnnnnnnnnnnnnnnnnnnnnnnnnnnnnnnnnnnnnnnnnnnnagttctttatatattctggaagctataccctgatcagatatataatttacaaatttttctgattctgangtcatnttttgncaccttat

SEQ ID NO: 42651 - DNA, 255 bp, Homo sapiens
  misc_feature (1)...(255): n = a,t,c or g
gcatatactcacatccaaaatgagnnnnnnnnnnnnnnnnnnnnnnnnnnnnnnnnnnnnnnnnnnnnnnnnnnnnnnnnnnnnnnnnnnnnnnnnnnnnnnnnnnnnnnnnnnnnnnnnnnnnnnnnnnnnnnnnnnnnnnnnnnnnnnnnnnnnnnnnnnnnnnnnnnnnnnnnnnnnnnnnnnnnnnnnnnnnnnnnnnnnntcttgagctcagtagntggaggctgtagngagnnaggannntnnnnggtg

SEQ ID NO: 42652 - DNA, 300 bp, Homo sapiens
  misc_feature (1)...(300): n = a,t,c or g
gagtttgaattggtgagaaattgggacattttcctttggaaaaaaattagatatatatctatatataattctaaatggattaatgttctaaatgttaatatttgaaatcattagaaaaaaatgtaggaaatgggtttattgaattcatgtgagggaagggttagaaaaagaaattgggctggttttgtgatagctcatttaactaacatgttcatttaactgcntatttggttttaaagtanggnatcaaactgtggaatnnntaatggctcatantatagnccgnncnnntnatacgct

SEQ ID NO: 42653 - DNA, 314 bp, Homo sapiens
  misc_feature (1)...(314): n = a,t,c or g
gnnnnnnnnnnnnnnnnnnnnnnnnnnnnnnnnnnnnnnnnnnnnnnnnnnnnnnnnnnnnnnnnnnnnnnagacccctatctcaaataaaaaaaaaagaaaaaaaaaaanaangttccnnnnnnnnnnnnnnnnnnnnnnnnnnnnnnnnnnnnnnnnnnnnnnnnnnnnnnnnnnnnnnnnnnnnnnnnnnnnnnnnnnnnnnnnnnnnnnnnnnnnnnnnnnnnnnnnnnnnnnnnnnnnnnnnntncaaaaaaaanttacccgggngtggcggcggncncntgtagccctagntactnggnagtntgagg

SEQ ID NO: 42654 - DNA, 294 bp, Homo sapiens
  misc_feature (1)...(294): n = a,t,c or g
gacaggcgtgagccaccgtgcccagcctgataccttctttttaagcagcttaaaacaacatttatttgttagtattaaaatttgttatctgccagtgtctggcgtgncttnctggntnggtcgcangagtttaaagntggnannctcanaatttngntgctaganntanntgggnnaantgagnttctnnntcntanancatcttggctnacntgnagaaccgctattntttgcngnnnntncatnnntaatttncntnntgaggttgnaggnnnctgnancnanacttttatg

SEQ ID NO: 42655 - DNA, 273 bp, Homo sapiens
  misc_feature (1)...(273): n = a,t,c or g
gatttaccaaatgcagtgatagaatctttttaggagatatttaatttagttttaaaaatcttttctagattgggttagttctttggtagagggaaattgaaatgcataatttcgaagccttctcttttatcctccagaatagtctcccttgaacagcattcataaatggtaggattataacccacctgctaccgantgaacctgcnactttggattacnagcnaactnttnggccgnntgcnntggcncntgcntnggnnccccnncactttg

SEQ ID NO: 42656 - DNA, 314 bp, Homo sapiens
gcctgaggagaagggacgcagccagcaagtttctaccatggcgcctggaacccccaccatctgtgggtcccaggtgggcaagtcacatcatctgctgtgctggatgcccggtcccccttcctgggggacagcagggggagcccgtgaggaccggtggccatgaggccccagcattgccttgggcagccccacagcccatgcaggtgtaactcagcttccccatggggccgggtcatcctcctggctgcggctgcccaggcccacccctctctctgtggccccggctgcctgttgtgggaaggggcagcgttaaa

SEQ ID NO: 42657 - DNA, 354 bp, Homo sapiens
  misc_feature (1)...(354): n = a,t,c or g
gcaacaattctagaaaacttgaatttaagtatagtgtgtcttttaatatcttttaaaactagttttctaaaaatatggaacattttacacataccactttagtggttaaagttatgaaattgaatgttcatacaactggcagttttcctcatcaattcaaacaggcagtgagcttcggatgaaactacattcctaatattacaggactaatcataggcaacctaacttttnatanaacaggcccnnttntatgcttcccgatacantnngatncagtnaccaatcatatcagnncattagctgncangnnnnannnttttttntanantaggggcnnagatnnacttttaactc

SEQ ID NO: 42658 - DNA, 367 bp, Homo sapiens
  misc_feature (1)...(367): n = a,t,c or g
ggaaaagaggaggccannnnnnnnnnnnnnnnnnnnnnnnnnnnnnnnnnnnnnnnnnnnnnnnnnnnnnnnnnnnnnnnnnnnnnnnnnnnnnnnnnnnnnnnnnnnnnnnnnnnnnnnnnnnnnnnnnnnnnnnnnnnnnnnnnnnnnnnnnnnnnnnnnnnnnnnnnnnnnnnnnnnnnnnnnnnnnnnnnnnnnnnnnnnnnnnnnnnnnnnnnnnnnnnnnnnnnnnnnnnnnnnnnnnnnnnnnnnnnnnnnnnnnnnnnnnnnnnnnnnnnnnnnnnnnnnnnnnnnnnnnnnnnnnnnnncaccctagatctccatccttctctctctctaccatgtgaggatgatgggaaggcagccc

SEQ ID NO: 42659 - DNA, 160 bp, Homo sapiens
  misc_feature (1)...(160): n = a,t,c or g
gtatggatgtnnnnnnnnnnnnnnnnnnnnnnnnnnnnnnnnnnnnnnnnnnatgatttattttgttgcccagattgctccaacttagccattgggagctctttcaggctctttcctgtgtcccattcataggtccccatcatttgtttttttttttttt

SEQ ID NO: 42660 - DNA, 359 bp, Homo sapiens
gccacagactcagagagaacccaccatggtgctgtctcctgccgacaagaccaacgtcaaggccgcctggggtaaggtcggcgcgcacgctggcgagtatggtgcggaggccctggagaggatgttcctgtccttccccaccaccaagacctacttcccgcacttcgacctgagccacggctctgcccaggttaagggccacggcaagaaggtggccgacgcgctgaccaacgccgtggcgcacgtggacgacatgcccaacgcgctgtccgccctgagcgacctgcacgcgcacaagcttcgggtggacccggtcaacttcaagctcctaagccactgcctgctggtgaccctggccg

SEQ ID NO: 42661 - DNA, 212 bp, Homo sapiens
  misc_feature (1)...(212): n = a,t,c or g
ggtggaagatgaggagtgctaaagattggggaggtggtaggagtacaggagtggtcaaaaaaggatgttgtataaagaatgttcaaacatgggcctctctgaaggatataaaggagtaagccatgtgaattacctcggagaggtgacattatataggcagtgaggtgagtgtatacctgnnatgctcananaatagcaangaggccantgtg

SEQ ID NO: 42662 - DNA, 303 bp, Homo sapiens
  misc_feature (1)...(303): n = a,t,c or g
gccattgtgtagatttctatataatataaatacattttaattatttgtactaaaatgctcatttacatgtgccatttttttaattcgagtaacccatatttgtttaattgtatttacattataaatcaagaaatatttattattaaaagtaagtcatttatacatcttagaaaaaattacatagttttgtttttacaattctgaaatatntganaaacttanatagaatatgtcatatgttantataacagatctcttnctacatcttantnntctnctttgatcnntnntgcagntnccttc

SEQ ID NO: 42663 - DNA, 323 bp, Homo sapiens
  misc_feature (1)...(323): n = a,t,c or g
gaagagatattgctgttatttctccagcagaaatcccctagcctcatcccccgttcatgacatcacacacagctacttaaactcttcttttgctaactatgtgtaaaagggtaattcctcaggaaaacaaagtgatgagagtttgggaggaagaaaatgcatttctaaaatattggaaagttgagagggggccagaagccagaattaagaagagctggtcagtttcaaggcctagngctctcttaactacgngatctcaggcaaatcctncatgctnnctactnctcactttcttnttcatannnngagaatanccnnccctt

SEQ ID NO: 42664 - DNA, 320 bp, Homo sapiens
  misc_feature (1)...(320): n = a,t,c or g
nnnnnnnnnnnnnnnnnnnnnnnnnnnnnnnnnnnnnnnnnnnnnnnnnnnnnnnnnnnnnnnnnnnnnnnnnnnnnnnnnnnnnnnacaggcctgagccaccgcaccctgccataataatacatttgaccaagtggagtttgtttgcagaatcgttcattataagttgccatattactagatcatcatctctgtatgtgctaaaaggcatttgataagattcctgttcttgatcagattccttaataaatagacggggtcgggtgtggnggctcatgnatntaatctcaatactctggggangctnnggtaggaggatg

SEQ ID NO: 42665 - DNA, 324 bp, Homo sapiens
  misc_feature (1)...(324): n = a,t,c or g
gtaatgctatgtgaaaggtattcatgcttcaggagctgtaacagngactaagatgtgatccctgccctgaaacacattgctgaattccttccataacttctttgttgaagctgtcttccactggctgagtgtagctttcttctggtccctgctttttagcatcttaaaggtgaccttggcagtcccaggactgacatgagtcataattcagaaaaaggaggggaagatgatgttgacaatggcaggactgaaagttttgacaactttagcggagcaatcaattgngtnctctctaccattattccatcagaatgcttttaagaa

SEQ ID NO: 42666 - DNA, 249 bp, Homo sapiens
  misc_feature (1)...(249): n = a,t,c or g
gtgaatggagatgatgttgccaccattttcaggaaaagcttttgtgtacagattaaaattagataatcgtcttttatgttcccatcaatacaccctagctcaagagctacttatttttcaaatcctgcttcctaaacattgttaataactcttcaccctgtcaactacctagtttttatgtatacatccaacnagtaccngcananatacattgncctgggcnatnnatcangactncgtntnaaaaca

SEQ ID NO: 42667 - DNA, 314 bp, Homo sapiens
  misc_feature (1)...(314): n = a,t,c or g
gaaggacaggagatggtacctaaggtgggagtgacgtaaatgccatagaatagggtagggtgtgtggcccaggaagagagagaggcgtggaggggagggccatggtcccccagacatattgggtgctagacagcaaagctgtgggcactttcagtgaggtttggggtacaccgtacacctttcaacggatcaacgcagagagaaatatannaacatggatggtagtgagtatttactangtnctgccatgtnccanacaccatgctnnnntnantatnnncntgacccttttagnnctnntnnaaccntctggg

SEQ ID NO: 42668 - DNA, 245 bp, Homo sapiens
  misc_feature (1)...(245): n = a,t,c or g
gctggaagaaatgaagttagagaggcaggcaggggttgagtcatgtagggctctttaagccatttaaagaagccctcatcagactgtagttgttatctacttatctgcagtacctggcacagagcaggctgcccaaacatttgttgaacaaataggctaggggaagttctttctagtcataggactagagccattttgaaaccttcattaataaattacatgntntgntntacaannctcccctt

SEQ ID NO: 42669 - DNA, 249 bp, Homo sapiens
  misc_feature (1)...(249): n = a,t,c or g
gggaaaagtagttaaaagtgctatatattacttatgacttttatttagtattaactatggcatcaaaagtgtattaatatatcagtctaataaaatatattctgaaaatgagattactaaatgtttatgttgagaatatattgntttataattntattnanataatcngnggntntattnnnnnnnccngnnntnnnnnnntttnnntantnnnnggctntntttttanancctgnntnnnancnttat

SEQ ID NO: 42670 - DNA, 336 bp, Homo sapiens
  misc_feature (1)...(336): n = a,t,c or g
ggaagaatttagaggtgggggtgaagctggattgtataggctgccactgttttgcctctgtctgactctggctgggccttctcagctctgtctgtgttgctgtttttgctgttgtattatgttaaactgagatccaggctgcattgtgattagacaatgtaggagcagtgagtgaggtatatgtctgaagaggtgagtggggaaagtatgtntcatccttcctcaaacagtgtaggggacttctaacaaaagagccctgctcctgaatgttggcctgccggtcatcacanaaatcacanatgtctatngccatgaccgatgaccatntttatactc

SEQ ID NO: 42671 - DNA, 320 bp, Homo sapiens
  misc_feature (1)...(320): n = a,t,c or g
gcatatacaacgtactctacgaggtgccgctcccacctcctggccggtccttgaagttttctggggtctatgggccaataatctgccagagaccaagtaccaatgagcttcccctatttgactttcctgtcaaagaggtttttgaactgctcggggtggagaatgtgtatcagctttttacttgggccnttcnnnagttagtanaatcnngcnntantngcagnttngtntangnttnctnantccntcgnnctcttnnatnnactntnttntncnngtntnantnagnnattnnnnnnctatnannnttganttattat

SEQ ID NO: 42672 - DNA, 258 bp, Homo sapiens
  misc_feature (1)...(258): n = a,t,c or g
gaaccatgaaataccctgtccnnnnnnnnnnnnnnnnnnnnnnnnnnnnnnnnnnnnnnnnnnnnnnnnnnnnnnnnnnnnnnnnnnnnnnnnnnnnnnnnnnnnnnnnnnnnnnnnnnnnnnnnnnnnnnnnnnnnnnnnnnnnnnnnnnnnnnnnnnnnnnnnnnnnnnnnnnnnnnnnnnnnnnnnnnnnnnntgtcanaaaaaagnnannaaattgaangccanaccattaanntangccganntggnntatgt

SEQ ID NO: 42673 - DNA, 201 bp, Homo sapiens
  misc_feature (1)...(201): n = a,t,c or g
gcggcacgagaggaacctgtccaatcccagccctgtcatttactagctctgagctcacggaataagttgccatctctgagcttcagtatttccatttgaggagtaaagataatatatattttatatatgttnnnnnnnnnnnnnnnnnnnnnnnnnnnnnnnnnnnnnnnnnnnnnttgcttactttntannganattatt

SEQ ID NO: 42674 - DNA, 353 bp, Homo sapiens
gttttgttccacctttgtttcaccaggtgcgagaaccttgggacctctcatttataaagtagaaataataaggatgctgtgaaagtcattgagtttgcatgtgaactatttccaataatgtgagacacatagaaggcattcaaaaaccattaactactgctatatgcaaaaaacttagctaaaaatttcattataatttgaaggactgataaattaggaagacactactattaacatattaataccataatactaatgttataattgtattataaattgttaataaattaatattattcaaatttagagtagaattttgacatcttccatatgttatgaacattcatagtcaa

SEQ ID NO: 42675 - DNA, 351 bp, Homo sapiens
  misc_feature (1)...(351): n = a,t,c or g
gagtgtttaaaaaaaaaaagctagggaggaaaagaacaagaaagatagacttcgagagtgataagagaaaaatacagggagatggaatggaaactaccactgcgcccgatctacaattctgttttctgtgtcccatccataccaaattattgaaccctctgtgtgtatgtttttaaatcttgtatataattctacttccttgacttacaagtcaacaattagctattgagttctttatagaagttggaagtattttgaaatctgagatctannnnnnnnnnnnnnnnnnnnnnnnnnnnnnnnnnnnnnnnnnnnnnnnnnnnnnnnnnnnnnnnnnnnnnnnnnnnnnnn

SEQ ID NO: 42676 - DNA, 343 bp, Homo sapiens
ggcttaatagaataaactttcattcattcagcaaatatttttgagactgtattacatgccagaaactgttctgggacccagggaaataacaaataaacaatactgtgaacattccttgtattcaggagaacttacattctagcgattgaaggcagtaaatacaataaaggttaattatatgatttattgattcatttgtttttgcttcatttaaaggtggtaagccttataggaaaaaataaggcaaggaacatagtcctggacctgggtgtggagaaggccccatttatcaataggtagctttgttatacttaaatataaagaaaacttgctttcatttata

SEQ ID NO: 42677 - DNA, 105 bp, Homo sapiens
  misc_feature (1)...(105): n = a,t,c or g
ggaaaattgccaaagcagtggttttccaacttcagcctgagtgggaatcacctggggcctttggtaaaatgcggaggttcagncccggggncnnancctntgggg

SEQ ID NO: 42678 - DNA, 313 bp, Homo sapiens
  misc_feature (1)...(313): n = a,t,c or g
gcaaaccaaaatcatttcaggggaacaggatgaatgaaaaatcacatcttagggttgtagctgctgtaagtagaataagtgcaaatatcgtgggcactaaaagctaataaaaacatagggtacactatccagaggacagaataactctctggttaccagatgtgaggcaattaacattctatgtggggtctgattattgantgcttanagaatggctctagngngggnntnctggtcgnggncngtgnctttgcctgnattccngnncnnnggtggncgaggtggggagggtngcntgacctcaggatttgag

SEQ ID NO: 42679 - DNA, 203 bp, Homo sapiens
  misc_feature (1)...(203): n = a,t,c or g
gcagtatatcatgaacatttcttcaagttgttcagaagaatatgagaaaaaatattgaaatatatcattttattataaaattaatgtgttcattctgtaaaactgatataaaacagaagtatataatacnantgtccatagggnctacnggannttagncccnctatntnanactacngntcanangnagctanngnnnttta

SEQ ID NO: 42680 - DNA, 307 bp, Homo sapiens
  misc_feature (1)...(307): n = a,t,c or g
ggggactggtaattggccttcctggggactccagtcccctgcaggtagctatcaagaccctgccagaactctgctcgcctcaggatgagctggatttcctcatggaggccctcatcatcagcaagtttcgccatcagaacattgtgcggtgtgtggggctcagcctcagggccacccctcgcctcattctgctggaactgatgtctggaggngacatgaanagtttcctgagggncngncnnncanacntgattnancccntcannnnnggnnatgcgnnacctgctncanctggancnnnanagag

SEQ ID NO: 42681 - DNA, 174 bp, Homo sapiens
  misc_feature (1)...(174): n = a,t,c or g
gataatattctttgaaaattactaattacaggtaggttnggcataatattaactgtggagaaagaacaaagctaagtgtcctgcatgactcaagtggatgcagaangctgtgcntgagtgtannntcttttnctcnnanntncggnacnnncnngnnacngacnttcnnttttt

SEQ ID NO: 42682 - DNA, 294 bp, Homo sapiens
  misc_feature (1)...(294): n = a,t,c or g
nnnnnnnnnnnnnnnnnnnnnnnnnnnnnnnnnnnnnnnnnnnnnnnnnnnnnnnnnnnnnntgaataaaagaaaagaaaagaaaaaagaaagctactctgttacagtcaggagggtgtccccagaaagcaagaggaagaatgccctgtctttgtttaagttatttcttataaggggtcttgtctacgtaaaagctaagccaagcctgtgtctacgtgcgggnnncanacngcatgaccaannntattactctntngatnnanactatncttancattntagnnnntgangcat

SEQ ID NO: 42683 - DNA, 324 bp, Homo sapiens
gtgaccataacctcaatattcgctaagtgggcagaagaatggggttggggggtgggggcagtagatgacttcgggcagtaaaaatgtgtccagtcacaaaaaggcatgactccatcctcagtgctcacagccctcccatcctagctctaagctagacccttccacgagtctagagagtgaagttcagaggcaggcagctgccccctttcccttcctctttgaggcccacccacctgagtcctgtctgaggactgcctctcccctaggtaattgttaaaaggaatgtccagcatcttcagatggtaccctgctcgtttcaaagtt

SEQ ID NO: 42684 - DNA, 241 bp, Homo sapiens
  misc_feature (1)...(241): n = a,t,c or g
gggaaagagggattggggaagaggcagatttatcaagctgcagggaaggtggctgtggagagtggagttaggacagtgggggagaagttaaaactgtagggattggccaacctgggtgaggggatccaagcagtgctagacatgctcttgaatgcccctccttttcctgccctccccccaggnatgctctgcatcccatttcttctggngtctggnnccntnctncnncntncatgtccct

SEQ ID NO: 42685 - DNA, 319 bp, Homo sapiens
  misc_feature (1)...(319): n = a,t,c or g
gggcattcaaccagcatgctctgatgggattgtatttgctgttaaaataatgaaaatgttcagtcctagttgataaaaggcagctgctgtgagccctctaagtgtcccccacgactccaccaatagcctagttctcctctaagatccccaacancccaantaacnacaaccatggaagtaanngaggcantgctggtnccatanggagnctcctgtgctgcctgntcntgctgaattgnccnnngnncangnnngcncctatgnctnnantcntnnnanntcnncnatctnnggcnnnngnntacngtctgcaacgcct

SEQ ID NO: 42686 - DNA, 262 bp, Homo sapiens
  misc_feature (1)...(262): n = a,t,c or g
gcacacacatatattatttgcagtgcagtatagaataggcactttaaaacactctttccccgcaccccagcaattatgaaaataatctctgattccctgatttaatatgcaaagtctaggttggtagagtttagccctgaacatttcatggtgttcatcaacagtgagagactccatagtttgggcttgtaccacttttgcaaataagtgtattttgaaattgtttgacggcaaggantangttattnagagggaggactta

SEQ ID NO: 42687 - DNA, 243 bp, Homo sapiens
  misc_feature (1)...(243): n = a,t,c or g
gaatgtggaagggaactttgaaaactttttaggggtgtatttgtgaagtacttcaacatttaaatacaactagagaatactagaacaaaatacctgtgtgctcgtacctcatcagagaaattgttggatatatcagtccagagattaaatgtagagtgtgttgactataaaataggancctggctttggttncannattganacannagaactntgctggnngacaancnatatctanctctt

SEQ ID NO: 42688 - DNA, 238 bp, Homo sapiens
  misc_feature (1)...(238): n = a,t,c or g
gtgctagcactaagagacagcatggatcagggaaacaaaggtaaaagtattctttctcactctcattagaaaagatgagatgatttgaggcacatcagagaaattgctggatatatcagtaaagagataaaatgtagagtgttttgactataaaataggaacctggctttggnttcaaaatttcccagnctgaactctgctgnnngacnnncnntntntnnctctnantnngngctct

SEQ ID NO: 42689 - DNA, 202 bp, Homo sapiens
  misc_feature (1)...(202): n = a,t,c or g
ggatgcacagcactcagtacagcagcttaaaaacaggtaacaccatgaagcactacagaagcagtgatcaataaatggtttagagacagtaaacatccaaagacgcagaagagttttacagttttacagcctactattttatagtttaaatttggntacattttttgntgnntntantannnctnacntggananntttgta

SEQ ID NO: 42690 - DNA, 144 bp, Homo sapiens
  misc_feature (1)...(144): n = a,t,c or g
gttaaacccatagcgtgtattttctagtgtcctgccagggttggtttgtacgtgtggtgggtgggagtgggggacaggtttancancttgaaatctatccnaggacatntnttccanacagttttncctgcttttntgttcatg

SEQ ID NO: 42691 - DNA, 360 bp, Homo sapiens
  misc_feature (1)...(360): n = a,t,c or g
gaacagcagtctcacatgttaggagcacaaattcacatgacatttctggagggcaatttggcaaaagcctaaaaggggctgataccttttgattcaacattccacttttaggagctggccctaggacataatcagatgtatgttcaaagatctatgcagaaaaacattgactacagggttctttattactaggcaaaacactgaaaacagtaaatgcccagcaatggaacattgatcaaatgaactctggtaaatcatgtaatgacctgggtcaagcaatgaagtcatgtgttagtcatgaataacatgagaaaatctgcacaatgntnttcttttgtttgntttgagacagggtttcct

SEQ ID NO: 42692 - DNA, 339 bp, Homo sapiens
  misc_feature (1)...(339): n = a,t,c or g
gnnnnnnnnnnnnnnnnnnnnnnnnnnnnnnnnnnnnnnnnnnnnnnnnnnnnnnnnnnnnnnnnnnnnnnnnnnnnnnnnnnnnnnnnnnnnnnnnnnnnnnnnnnnnnnnnnnnnnnnnnnnnnnnnnnnnnnnnnnnnnnnnnnnnnnnnnnnnnnnngggagtgggattttaaatagggtggctagaggaggtctcacagagaaggtgtcctttgaggaaagacaaagacgttggcaaggaactttcttctggatatcagggtgtatttgnttgcgtggntgccacancanagtaccacgancttggangctnaancagcnnaaatttatnttct

SEQ ID NO: 42693 - DNA, 359 bp, Homo sapiens
  misc_feature (1)...(359): n = a,t,c or g
ggtccttgttagtcagcttttttcattatctcaagagaggagagtattaggagagcacattttcagacacactagaagacaacaataatacctgtgacaggtgtatgaccccggctcatggtggccttctcactcacctgactcaaagttgggcagcgggactaattttacataatcttaaatcttataaatgactttctgctctcttttccttacaccactgatttctcttccctggcacccttgctagtgagataaaacagggaacagagccaggaccagtgagctgcatgtggagtgctgcatctccctgaaggctgaccgngagctgngntcatgaangactcattgncncattg

SEQ ID NO: 42694 - DNA, 245 bp, Homo sapiens
  misc_feature (1)...(245): n = a,t,c or g
gcctccctcctctgggtcctcctctgagtcctcctctgaatcagatccaaacctgctggcccacaggatctggtccccacctccctctgggacctctcatgacactccttgttccccatgctccagccacttggcgaaaccacagtcctcaaactcctgccgcagggcctttgctcctgctgtgccctgtggggaatgcccttcccacagatgccccatggctgctcctgnncatnactgactcg

SEQ ID NO: 42695 - DNA, 337 bp, Homo sapiens
  misc_feature (1)...(337): n = a,t,c or g
gnnnnnnnnnnnnnnnnnnnnnnnnnnnnnnnnnnnnnnnnnnnnnnnnnnnnnnnnnnnnnnnnnnnnnnnnnnnnnnnnnnnnnnnnnnnnnnnnnnnnncttgagcctctttatggagctccccagatacactgctggcttcttggagaattaatttaggatatttcagctgccacggctgatggaattcatctttgggggtcagataaggaagccaagtgtcttcaaactcttcaaaatgctcagtttcttagctttgcactcttgttcctcggcaatcagggtgtgcttcatgcggccactaaagccaccttcctaagtcattaaggnttgg

SEQ ID NO: 42696 - DNA, 56 bp, Homo sapiens
gggtggttcaggtgacaggaggaacaagaatggaagaaaacctttttttttttttt

SEQ ID NO: 42697 - DNA, 358 bp, Homo sapiens
ggtcagttgtgtgtgggccatctgcccacttaggatgcaatttttgatgtgacagacattccggatgtccaattcccctgtgatgaggtatgagccttgtccagcccttttcctgagggaagcaatgtcagatgaaagacttagaattgcccaaactggctagccagctgccacatgcacagtattgctgataactgagaaaggttagaacatcgtgttgcattttgaatttctaccattgttggaaccaggtctagtattataagcccctgacccagcctgtgtgtgaggcctaaacaaagcctgagcacttcagctaagaccacccaccaaggtgacacctttagcctcacgcctt

SEQ ID NO: 42698 - DNA, 328 bp, Homo sapiens
  misc_feature (1)...(328): n = a,t,c or g
gaatggctgcgtatcttaagcaatctgaaaaaccttccagaaccttcatgacgtgaaggttctaggctttggagtaatggcaagcacttcccactgatacgtacacgtgtgcaactgagaggactcggttttctctggaatgagtgtggacaaacggttcccatgtggtaggtacttctgcatcctcaggtaccttttctcttcctcatagaccactgtacccttatgttttatcaagagttgtatattttgtcttttttttttttaaacngnttttggnctggnacngngacttacncctgnaatcccnnnnntttgnnaggctgag

SEQ ID NO: 42699 - DNA, 204 bp, Homo sapiens
gcataaataatataaagtgggtgggggtagtgatagaatagtttttgtatgcacttgaagttaagttgttatcagcttaaaatattttgttataattgtaaaatgttttgtgttagccccatggtaaccacaaagaaaatacctttagaagatacaaaagaaaatgataaaggaatcaaagcatgtcactaaaaaaaaaaaaaa

SEQ ID NO: 42700 - DNA, 351 bp, Homo sapiens
  misc_feature (1)...(351): n = a,t,c or g
ggtgaggttgaagatgtgttagttctgatgccctccctagggtaggtaaagaaactagacatacaggagaaactaaattaagactaagacaactaagaaaataagaaaggggaactctgaaacagattgagagagccttagcaactttactttttgagtgggttataaaaattgttttatcttctaagtattttgtataataaattaaactttagaaacagttnnnnnnnnnnnnnnnnnnnnnnnnnnnnnnnnnnnnnnnnnnnnnnnnnnnnnnnnnnnnnnnnnnnnnnnnnnnnnnnnnnnnnnnnnnnnnnnnnnnnnnnnnnnnnnnnnnnnnnnnnnnnnnnn

SEQ ID NO: 42701 - DNA, 286 bp, Homo sapiens
  misc_feature (1)...(286): n = a,t,c or g
gnnnnnnnnnnnnnnnnnnnnnnnnnnnnnnnnnnnnnnnnnnnnnnnnnnnnnnnnnnnnnnnnnnnnnnnnnnnnnnnnnnnnnnnnnnnnnnnnnnnnnnnnnnnnnnnnnnnnnnnntttattctgaagactaatagggattctaaggaaggaaccagcctgattgaatttgcatatgtgtccacatctgctggctcacggctgtgtgggaggctgagtgatggggaggaaggattactgagtanggatntgaangtgnnnnctnatgctttntttntaacc

SEQ ID NO: 42702 - DNA, 344 bp, Homo sapiens
  misc_feature (1)...(344): n = a,t,c or g
gctgctgggaggagactacattttgtcccctcctggggtcttgcacagtggcaggtgacattcgtgttacaggaatgactgccagggcctgggcctcgggcggtcttcagctctgctcctcctgcttgtcccaggctattttcctctgagccaccccatgaccgtggcgggccccgtggggggatccctgagtgtgcagtgtcgctatgagaaggaacacaggaccctcaacaaattctggtgcagaccaccacagattctccgatgtgacaagattgtnganaccanagggtcancannnaaaangaatgccnantgncatcannnacnnnnctnnnnaccta

SEQ ID NO: 42703 - DNA, 229 bp, Homo sapiens
  misc_feature (1)...(229): n = a,t,c or g
gcatgtattcgcccaaccaaaattttcatgcaggtgctgagaagataaactatgctttacagtgtggcaaaatgtgcatgattggtaatagattggaaatggagtaaaagcagaatgaacacttagcctgagactgtcctaatttatgcgatttactgaaaatttctaatagcactcaggtatttggtcactccanactcaggcagaacactgtatancancnccttgg

SEQ ID NO: 42704 - DNA, 338 bp, Homo sapiens
  misc_feature (1)...(338): n = a,t,c or g
ggtgacaaaggtttaagaagagacaagggatcagaataaatgattttattgttgtttcaggtattttggttacatgcagaaaacctgtacaactatttattgattctgttcccatctcctcataccagtgcttttgaatgttactgtttcactaaaaacagcgngaccatctgactcatgggtgcattcttgttcgctcactgcaatancctgtctcccacttctatttttttnagttaatatttgnancnnaacccnctncnttnnnnaactnnntngnnntgnttactnnggncnntnntnncantnncntngnnnnnnntnatgnnnacctctcg

SEQ ID NO: 42705 - DNA, 349 bp, Homo sapiens
  misc_feature (1)...(349): n = a,t,c or g
ggaggaagcagagaaactgattaaagatgttacagaaatgatggctcaagtagaagtgaaattatctgacacaacttcccaaagcaacagcacagccaaagaactggattctctacagacagaagccgaaagcctagacaacactgtgaaagaacttgctgaacaactggaatttatcaaaaactcagatattcggggtgccttggatagcattaccaagtatttccagatgtctcttgaggcagaggagagggtgaatgcctccaccacagaacccaacagcactgtggagcagtcagccctcatgagagacagagtanaagacgtgatgatggancgagaatcccag

SEQ ID NO: 42706 - DNA, 351 bp, Homo sapiens
  misc_feature (1)...(351): n = a,t,c or g
ggcaattaccatctcacctatacgtgcaagaaaggaacagttgcttgcggccagccccctgttgtagaaaatgccaagacctttggaaagatgaaacctcgttatgaaatcaactccctgattagataccactgcaaagatggtttcattcaacgtcaccttccaactatccggtgcttaggaaatggaagatgggctatacctaaaattacctgcatgaacccatctgcataccaaaggacttattctatgaaatactttaaaaattcctcatcagcaaaggacaattcaataaatacatccaaacatgatcatcgttggagcncgnaggtggnangagtnnnnncgctg

SEQ ID NO: 42707 - DNA, 260 bp, Homo sapiens
  misc_feature (1)...(260): n = a,t,c or g
gggagagattgtttctgaaccttgaatggagtccctttgaattcttctgattcactgtattctactcaccaaaattgaacctgtttatctttttggaagttgagtcttagtctgagagtatatgtgatttaagatatgctctctcctgactaacattttcaactggaaacctaactaatagttcttatagttagagagcccagtggatcggngatggaaagcatggaaatgttttgggacttgccctatgntaanactga

SEQ ID NO: 42708 - DNA, 349 bp, Homo sapiens
  misc_feature (1)...(349): n = a,t,c or g
gatcaagtagttagaagtgccccgggtttgggagcattgcaatttttttttttttctgngaagngggagagaatcagannnnnnnnnnnnnnnnnnnnnnnnnnnnnnnnnnnnnnnnnnnnnnnnnnnnnnnnnnnnnnnnnnnnnnnnnnnnnnnnnnnnnnnnnnnnnnnnnnnnnnnnnnnnnnnnnnnnnnnnnnnnnnnnnnnnnnnnnnnnnnnnnnnnnnnnnnnnnnnnnnnnnnnnnnnnnnnnnnnnnnnnnnnnnnnnnnnnnnnnnnnnnnnnnnnnnnnnnnnnnnnnnnnnnnnnnnnnnnnnnnnnnnnnnnnnnnnnnnnnnnnnnnnnnnn

SEQ ID NO: 42709 - DNA, 319 bp, Homo sapiens
  misc_feature (1)...(319): n = a,t,c or g
ggagtaggtctgggatggacaggaaagggcaaagtagggcgtgtggtttccctgcccctgtccggaccgccgatcccaggtgcgtgtgtctctgtctctcctagcccctctctcacacatcacattcccatggtggcctcaagaaaggcccggaagcgccaggctggagataacagcctcttgcccgtcggccctgcgtcggccctggggtaccatgtggccacaactgctgngnncccctgtctcnttnnntcttncncttgtntcnntgnnnggctatttgtncnttgnnctngtnccccnnnntncnnnnngtgtt

SEQ ID NO: 42710 - DNA, 345 bp, Homo sapiens
  misc_feature (1)...(345): n = a,t,c or g
gatttactatctgaccctttacagggaaagtttgccgactgctggagtagatcatcaatgagtacttactggttaaataattcattgtcttatgactctattctattatgaaacaagatagtctgaaagtactgttaattatgctgtcttgccttacataaagaaaaatagtaataaaagcaacctctggagaacagattatttttatcttttagttggtgaagtataaaaattttcattttctcattctctggtaaagtgacttatagtgcccttattagntttaaaccttttcaaatatgcanaacctnttnctgcnnagattttaangaacagggtnngcca

SEQ ID NO: 42711 - DNA, 293 bp, Homo sapiens
  misc_feature (1)...(293): n = a,t,c or g
gaataagtgatttttaggaaaaaaatcagggggacatatgcatgaccttgcaaaaaannnnnnnnnnnnnnnnnnnnnnnnnnnnnnnnnnnnnnnnnnnnnnnnnnnnnnnnnnnnnnnnnnnnnnnnnnnnnnnnnnnnnnnnnnnnnnnnnnnnnnnnnnnnnnnnnnntgtatcnctggtnngcanaggncttgnccatgntggccannatganctngatctctngaccttgngatccnccagcctnanccttccatggtgctgngattgnangnnntntancnnctgg

SEQ ID NO: 42712 - DNA, 225 bp, Homo sapiens
  misc_feature (1)...(225): n = a,t,c or g
gtgaacacctgacttttaaagaagggttataagagcttataaaccaaggttaaggaaaaaaaaaagtggaacaccggtggtaaaatattaatcttttgcagtagatatatattttgtgaattatcaaattctacctaatttatgttattttagtcacttattttctatttgtataatttgntttctagttttgcattcttgnttttataatangngctanntatg

SEQ ID NO: 42713 - DNA, 131 bp, Homo sapiens
  misc_feature (1)...(131): n = a,t,c or g
gaaattttgacagcaatacagtaggtttattggtgagacaatgagtgaaattgcattgaatggcttctgtgttgctcgtgaaatgtgaggtgtggagtgacannagaggaagggtttaagggaggatggtg

SEQ ID NO: 42714 - DNA, 365 bp, Homo sapiens
  misc_feature (1)...(365): n = a,t,c or g
ggggnnnnnnnnnnnnnnnnnnnnnnnnnnnnnnnnnnnnnnnnnnnnnnnnnnnnnnnnnnnnnnnnnnnnnnnnnnnnnnnnnnnnnnnnnnnnnnnnnnnnnnnnnnnnnnnnnnatagtgatcacctttggggagaggcactagaaaacagtagcaccaggagttttttattttttcatttcatacctttctatacaaggtggtttgataggagctattccactattactggaaatgaaacttctatattatttcaatttcttactctgagcataaactatatatacatatacatacacaaaacaaatataaatataaataaattgangtcaagganagaannagttttctcaattggctt

SEQ ID NO: 42715 - DNA, 278 bp, Homo sapiens
  misc_feature (1)...(278): n = a,t,c or g
ggtactttcagctccagtactctgggttctaattgactttgtttaatctttacttcagttgtataaaggggcttgaaattaacttgaaccataggtactttttctttaagtgccctttaacagttaattgtggccctctgattctgttnnnnnnnnnnnnnnnnnnnnnnnnnnnnnnnnnnnnnnnnnnnnncaagatattaatgctgccaccagctttttggntgatnntnttganatncnntnntacncnnncntacatttacnnnnanngattg

SEQ ID NO: 42716 - DNA, 133 bp, Homo sapiens
  misc_feature (1)...(133): n = a,t,c or g
ggattgtgtggggaaccatgactgtgagtggcctaggtatgctcatgtgagaaaaggtagatgtggttgtatgcatcattgcgtgggtggctgtgaagttgtagttgtgtgtggctttggttgtgngaagctg

SEQ ID NO: 42717 - DNA, 324 bp, Homo sapiens
  misc_feature (1)...(324): n = a,t,c or g
gggtggaagccacaggcatgacctgccaagcccggagctcctacatggatacagaggtgctctggggccaccgattcacaccagtcctcaccttggaaaagggcttctatgaggtggactacaacaccttccatgatacctatgagaccaacacacccagctgctgtgccaaggagctggcagaaatgaagagggaaggccggctcctccagtacctccccagccccccactgctgggggctgtgctgaggcagggctggatgcagaggctgagcagaatgagnannatgagcccaaggggctgnggggtccagggaggccagg

SEQ ID NO: 42718 - DNA, 226 bp, Homo sapiens
  misc_feature (1)...(226): n = a,t,c or g
gctcaattgtgttcacttagtaactaagacttcagtgacatttaaataaaatgttctgaccttttctttagagctttatcctcttcatggaagctgtcatacttgagactcttgagggtacttactgagcatgctcacaactcagtttgtggtacaggctgtccctgnccttgtcatgcatactatggcttattntatgtgattgnctttcaanncatcacattac

SEQ ID NO: 42719 - DNA, 208 bp, Homo sapiens
  misc_feature (1)...(208): n = a,t,c or g
gcaaatatcatcatgaattataatccccataatcccgatgtgtccagggangngcctagggnagnngatggctgaggaanctnnngcacanagtggncccntcctgcgcccngggctctgcgntggcacagggcagagctgtnctgtgaatcanggccgcttgctcttgctgcggtgttntgctgtgnntnntncnnanngangctca

SEQ ID NO: 42720 - DNA, 293 bp, Homo sapiens
  misc_feature (1)...(293): n = a,t,c or g
gaaacaggatatgagtcattggcacccagtaacaacttaactttctctgtagtgtcttaagtaaaaatcaataagaagnnnnnnnnnnnnnnnnnnnnnnnnnnnnnnnnnnnnnnnnnnnnnnnnnnnnnnnnnnnnnnnnnnnnnnnnnnnnnnnnnnnnnnnnnnnnnnnnnnnnnnnnnnnnnnnnnnnnnnnnnnnnnnnnnnnnnnnnnnnttaatttgctggccnnnnnnnnnnnnnnnnnnnnnnnnnnnnnnnnnnnnnnnnnnnnnnnnnnnnnnnnnnnnnn

SEQ ID NO: 42721 - DNA, 242 bp, Homo sapiens
  misc_feature (1)...(242): n = a,t,c or g
gccatgagcttcaataccnnnnnnnnnnnnnnnnnnnnnnnnnnnnnnnnnnnnnnnnnnngcacgccgtnnnnnnnnnnnnnnnnnnnnnnnnnnnnnnnnnnnnnnnnnnnnnnnnnnnnnnnngtgaaggctgcagtaagacatgatagtgatggtgccatggcactccagcctggacgactgagacactgtctcaaaaaaaaaancanaanaaaaaaaccccgnntngttnnantggg

SEQ ID NO: 42722 - DNA, 304 bp, Homo sapiens
  misc_feature (1)...(304): n = a,t,c or g
ggcaaaatggtgatttaaaacattttctttttcatttattggcttgaatatatttatagagaaagtttacctctattttcagctggcaccttacctgttcccctctctgtgccttgtatttcccttgattcaattccttgaaagaataaacgttccatattctgatgggatgtacaggataggagatgtgactcgngggttccaagtgtcttttttttcanacatggncttgctctgttacccaggctggaatacagnggctgggattacaggcatgcnccancacncctgactaattntgatt

SEQ ID NO: 42723 - DNA, 342 bp, Homo sapiens
gcttcatggataaaaagtagagacagagtggtgaagcacctgttgctttagaggcaataaactagtgaaatgttttaacagaagtcatcagctttcaaagatctcttttatccagttcacatcactcattgctcttaattcctttgtcacattttttactgcattacaagtaatccttgaaatccatggagcattttatatataactagaaccatgtggatggttctcatgtgttcagtatagccccaaatcccagcatttcttctgctcctctttttccatatatttagtagtagatgcaggtttgagaagcaaatcatggcaatagaaggaatccatccc

SEQ ID NO: 42724 - DNA, 284 bp, Homo sapiens
  misc_feature (1)...(284): n = a,t,c or g
gnnnnnnnnnnnnnnnnnnnnnnnnnnnnnnnnnnnnnnnnnnnnnnnnnnnnnnnnnnnnnnnnnnnnnnnnnnnnnnnnnnnnnncaacaacaacaacaacaaaaaacaaagcgcacacagagactgaggtcctctttggcattgagaagatggctatgcaagtcccaactagcaagtgcaaacttcccagcttcacttctgccagtgtcccttcaccccttctnaaccccactgngaggcaggangntgcttgacnatncanccttngnntnnctctgcca

SEQ ID NO: 42725 - DNA, 370 bp, Homo sapiens
  misc_feature (1)...(370): n = a,t,c or g
gtctaattaaactaaaagannnnnnnnnnnnnnnnnnnnnnnnnnnnnnnnnnnnnnnnnnnnnnnnnnnnnnnnnnnnnnnnnnnnnnnnnnnnnnnnnnnnnnnnnnnnnnnccagaatgtatagggaacttaaacaactcaacaagcaaaaaatatccccattaagtgggcaaaagtcatgaacatttcttaaaagaagaaattttttttttaagtggccaagaaacatgaaaaatgctcaacatcactannnnnnnnnnnnnnnnnnnnnnnnnnnnnnnnnnnnnnnnnnnnnnnnnnnnnnnnnnnnnnnnnnnnnnnnnnnnnnnnnngatgcttnggnggttacagggaaaaggaaacactt

SEQ ID NO: 42726 - DNA, 299 bp, Homo sapiens
  misc_feature (1)...(299): n = a,t,c or g
gccaagttactttcatggtcttaccctctgcttttcccctttttgcaaaaaaccactggccaaatccgaaccattgcccttgtttcccccacgttctctctcagatctttgtctcgaagggaaaacatagtggatgaaaaggtgtggcaggctttggcaccttgttaaaatttctagtcatctgtggatgttaccttgcttgnncacagcagccagtcaccctggccagncccacttctgnataantatntaccctnanccnaagagccatntanatncanaccaannctgnaagggga

SEQ ID NO: 42727 - DNA, 253 bp, Homo sapiens
  misc_feature (1)...(253): n = a,t,c or g
gttctttttgtcttcaaatttctaagcattggagtgttccaaggctcaggtctatttgccttaattccttggggatcttaactagtcccatgctttgaaacagtttctacactgatgactttgtctttagtatggacccanccactgaactacnangtatacatccagctgcttaactgacangnntacttgnacacctaatangnatcncanngctncgagngaccntgactacnnanattnnntntnccct

SEQ ID NO: 42728 - DNA, 218 bp, Homo sapiens
  misc_feature (1)...(218): n = a,t,c or g
gaatttcttagtgatcttttggtcttatggctttaaatttcatatatacgttaatgattcccacatttacatagctagcttgtgttcttatgcacaaatatctatttgacatttccacttggaaagcttactggactctcatatttaatatgtacaaagaggaagttttggtttcttatctcaagtctgnctcactttctttatttcannanttgctg

SEQ ID NO: 42729 - DNA, 214 bp, Homo sapiens
  misc_feature (1)...(214): n = a,t,c or g
gctgaaactccaacacagtatcttggagatctttccatttagtacatatggatttaccccttaattgtattggctgtgttgtatttcgtagtatagatgtgccttagtgnattnatgcatttncttancaacatctggattgnancttnttgctnaatgtgtnnannnntntttgnannatngntgnntggcgacnntntggntnancanactg

SEQ ID NO: 42730 - DNA, 294 bp, Homo sapiens
  misc_feature (1)...(294): n = a,t,c or g
gctttcttctgaggatgcaagaattccagtggctgcaggcctgtatggattcatcactggtaactcagataccttccaccacattataataaaagggcagaacattcagttagacctaaggaataagttcaagagatatattgcacaatgtggtgattgtagttaatatcaatgtactgcatacttgaaaaccactaagacagtagattttaactgttttcaccacattaaaaaaataagtatnnnnnnnnnnnnnnnnnnnnnnnnnnnnnnnnnnnnnnnnnnnnnnnnnnn

SEQ ID NO: 42731 - DNA, 349 bp, Homo sapiens
  misc_feature (1)...(349): n = a,t,c or g
gttaggatccaagcacagccaggcttttttccaagccagcgccgttaatgctaacattatcctttattggctattaaaaactagctctggttccccttagtgtgtggataatcataattactgtaggagtagaaagtatgtggcaatatagcatgacataaagtgccaaaatggtaaaaatatttccacaaaggtgttcttccctgaaagaacacacctatttagggaccacagatgatgtcctataatatagtctcttctccatgtgtctaaacccatgaaataaggcatgaaggnaagggttttnccagancacctnantgtncntntctgcnntcacagaatgagg

SEQ ID NO: 42732 - DNA, 351 bp, Homo sapiens
  misc_feature (1)...(351): n = a,t,c or g
ggctttttctaaagactaccctatggaccagcagttgtggctcacacctataatcnnnnnnnnnnnnnnnnnnnnnnnnnnnnnnnnnnnnnnnnnnnnnnnnnnnnnnnnnnnnnnnnnnnnnnnnnnnnnnnnnnnnnnnnnnnnnnnnnnnnnnnnnnnnnnnnnnnnnnnnnnnnnnnnnnnnnnnnnnnnnnnnnnnnnnnnnnnnnnnnnnnnnnnnnnnnnnnnnnnnnnnnnnnnnnnnnnnnnnnnnnnnnnnnnnnnnnnnnnnnnnnnnnnnnnnnnnnnnnnnnnnnnnnnnnnnnnnnnnnnnnnnnnnnnnnnnnnnnnnnnnnnnnnnnnnnnnnn

SEQ ID NO: 42733 - DNA, 337 bp, Homo sapiens
  misc_feature (1)...(337): n = a,t,c or g
ggggataataaagggacccccttgagttcccctgggtttgctcctctttcatcccatcttcccatatatgcacagctttgaattcttggtattggggttacaccctgagatgtttcctttacaggagaggatgaagatcagtatgagcagttcatgctgccactcacagcagcatttgaggctgtggcccagatgtttagcaccaatagtttcaacgagcaggaggcaaagcgaactctanttggcctantanganacctganagggatcgctttnnctttcaatgccnnnaccanntnnntgangctntntgaatgnatatatncatnctatatgc

SEQ ID NO: 42734 - DNA, 347 bp, Homo sapiens
  misc_feature (1)...(347): n = a,t,c or g
gaagtggggtttcctttagaaaaacccctatacgatggggtgatcttttaagtttgtgctttttatgagcaacacagaaaatgctttaaaaacagttcagtaagactgaagaaaagatctgtaagcataaaacaaataccatcatcattaccaaaaattcagtgcttaaaatatagcttgagaatgtgagtatttatttccttattcctaagattttgcttttgaatacactatctgccggcgcggngnctcatgcctgnnntcccannactttnnnannccnnngnnncnaatncnnnancnnnanatcnanactatnntgncncntggnnanccnnttnntacta

SEQ ID NO: 42735 - DNA, 325 bp, Homo sapiens
gagtgtctaaagcataaaagtccagttaggaactctaggtggcctctgttccttagagcaaagtatagcgtgctcacatctgcttttctggagtaatctgtgagaattaaagtctgatgcaaaagtaattttcatctctccctaccacccccctgttacatcacctctatgcgagtatattaagacataggagccaggcctgggctttgaagataaatctgagttcaaatcctaatttagctacagatactttggtgatcttggacaaataacctttcacattcacagtctcctcatcaggtaaaatggagataataatatacct

SEQ ID NO: 42736 - DNA, 325 bp, Homo sapiens
gactgcccaaggaccagtatttgtcactaccaaactcagcccttcttggaatacagcctttcaagcagaggacagaagggtccttctccttatgtgggaaatgggcctagtagatgcagaattcaaagatgtcggttgggagaaactagctctgatcctaacaggccacgttaaactgcccatctggagaatcgcctgcaggtggggccctttccttcccgccagagtggggctgagtgggcgctgagccaggccgggggcctatgcagtgatgctgtgttggtttcctagggatgctctaacgaattaccacaaacctggtggg

SEQ ID NO: 42737 - DNA, 335 bp, Homo sapiens
gctggattttttaataataggcctatcactgtattacatgcaaactatccctacttacaattttaaattttttatacaaactcaatttattcaaacaaacctattacctaattcttccctatttctcttcattgattgcatctaataagaagaagtcaaaccctgttccctcaggcaattcaaggtccctaattatggtagagttgtcggatgagttcagctccaggtcacacagtgcacaagccacttccaacaactaagttaaattagcagaaaagttttctcagcaacagtcaggcaggtgcctacaaatacgggacccccaaaaaggaaac

SEQ ID NO: 42738 - DNA, 325 bp, Homo sapiens
gctggaagaatattaaagatgtatgtataacacttatctggtggaaattttttgagagtcttttttaataatgcacacattttagaaaatttaaacactgcaaaagatacaggtaaatactaattctgtttcctaccctgattcctgattttcctctctagaaacaactttatcattttaaaatgtatttttccagagctattttgtacatacgtgtgtgcatacatgtgtatgtgtgtacatacatatttttcttctcagtggtactgtactgtgcatacagttttcattgatactttcttcacttgtaagtatatcttgtttg

SEQ ID NO: 42739 - DNA, 335 bp, Homo sapiens
gaaagtgtgttcctacccagcgaagggagcaatctgaccccagcacatcactacccagactttagatttaagacatacgctccattagcattccgatatttcagagaactttttggtatcaagcctgatgattacttgtattccatctgcagtgaacctctaatagaactgtctaaccctggagccagtggatccttgttttttgtgaccagtgatgatgaatttatcatcaaaacagttcagcacaaagaagctgagtttcttcagaagctactgccaggctattacatgaatttaaaccagaatccaaggactcttttgccaaaattttacgg

SEQ ID NO: 42740 - DNA, 325 bp, Homo sapiens
  misc_feature (1)...(325): n = a,t,c or g
gattaatctcatgatcaattaactaaaaaataccaaaatcttcagcaacttctacatgacctgtgttgagtttcagtgatatcctcagcattattgagaaatgggttgagggagaaaaatggcttcaccggaaactgggtcaggtacttggttgatgggtggggtgtgggggggttgtttgtttnnnnnnnnnnnnnnnnnnnnnnnnnnnnnnnnnnnnnnnnnnnnnnnnnnnnnnnnnnnnnnnnnnnnnnnnnnnnnnaacctnccanccttaancaatcctcccgctnggncttncaagtanctgggactacaggtacat

SEQ ID NO: 42741 - DNA, 335 bp, Homo sapiens
gattagtttgtgagattttgggcaagtcgctttaccattgagactcagctgcttcttgaatgtcacctgcaaatgtttcctcatctgcaaaactggaatgatgttattgtgagttacaggatctctgtgatgattaaatacaacagttttccatatactccatagaacagaataggcagtccatgttcagtaccttttacttatcagcctcaacccccactctattctcttttatttgggggaactcatttctgagaagctgccttcctttgcgtaagcttttaataaatctcttggaacttccttgctgtaatggcgagggctccttggtcagg

SEQ ID NO: 42742 - DNA, 326 bp, Homo sapiens
  misc_feature (1)...(326): n = a,t,c or g
nnnnnnnnnnnnnnnnnnnnnnnnnnnnnnnnnnnnnnnnnnnnnnnnnnnnnnnnnnnnnnnnnnnnnnnnnnnnnnnnnnnnnnnnnnnnnnnnnnatccagtgatacagatatgcctccatttatgatggggttatgtcctgataaacccataggtaagttgaaaatattnnnnnnnnnnnnnnnnnnnnnnnnnnnnnnnnnnnnnnnnnnnnnnnnnnnnnnnnnnnnnnnngcacaagagttcagggtgttaatgctgtatgccgaacaggtgttcacagtaagtttggtatcagtatggtgacttcccaggagcaggga

SEQ ID NO: 42743 - DNA, 326 bp, Homo sapiens
  misc_feature (1)...(326): n = a,t,c or g
gcatatatcaaaacnnnnnnnnnnnnnnnnnnnnnnnnnnnnnnnnnnnnnnnnnnnnnnnnnnnnnnnnnnnnnnnnnnnnnnnnnnnnnnnnnnnnnnnnnnnnnnnnnnnnnnnnnnnnnnnnnnnnnnnnnnnnnnnnnnnnnnnnnnnnnnnnnnnnnnncaaacaacacatagttggtgctcaataaacagtcacttccagcatgaccaccactttagcctatggttagttacttcagcatccccaactcccaacccccatgccccgcccaatgtgctggagacttggcaggtggaccagtcaggaagccaactgcccat

SEQ ID NO: 42744 - DNA, 325 bp, Homo sapiens
ggtagtatcttagtccattcctttatagtgtttatagtgttgctatacaggaatacgggaggctgagtaatttacaaagaaaaaagaggtttatttacctcaggattctgctgactataagactgggcatctggtgaaagtctcagcctgcttccactcatggtgggggagtagtgtgtggagatcccatagtgagagaaagcaaaggaaaaagagggggaggtgccaggcgctgtttacaagccagttctcttgggtcctaatggcaggagaactcacttattccctccaagatgacaccaaaccattcatgagggatctgctc

SEQ ID NO: 42745 - DNA, 325 bp, Homo sapiens
  misc_feature (1)...(325): n = a,t,c or g
ggtgaaggcttaagcagtgcatggcacatagtaggccctgaaccaatgccagttagtgttattattatcaccatttagccagatgcagtggctcatgcctataatcttattgnnnnnnnnnnnnnnnnnnnnnnnnnnnnnnnnnnnnnnnnnnnnnnnnnnnnnnnnnnnnnnnnnnnnnnnnnnnnnnnnntttagagaaaacaaacaaatcaccatttagagcacctaaccagtacctggcacgcgataggtttagctcaacaaatgttagcagcaattacccaaggagcctgtgctggaagtttctaggatgtaccaggct

SEQ ID NO: 42746 - DNA, 325 bp, Homo sapiens
gcatccctgacacattaacgtttatacttcaagtacagcacagcgccaagccctttctctagccccatctgtgtgcatcctactctgtctttccctgatgatggccactccagatgtcatgctccacttcaaacacacctctacacatcatctccaccactccctgggtggggtcaggacctcaccagctacaactccccaccttctttcccagggaccacagtacattgcttataccttcctctgttgagcagttactttatcctttcttgtgatagggagcttatatatctagctcaccaactaaatcataagctctttcagg

SEQ ID NO: 42747 - DNA, 353 bp, Homo sapiens
ggaggaccgttactatcgtgaaaacatgcaccgttaccccaaccaagtgtactacaggcccatggatgagtacagcaaccagaacaactttgtgcacgactgcgtcaatatcacaatcaagcagcacacggtcaccacaaccaccaagggggagaacttcaccgagaccgacgttaagatgatggagcgcgtggttgagcagatgtgtatcacccagtacgagagggaatctcaggcctattaccagagaggatcgagcatggtcctcttctcctctccacctgtgatcctcctgatctctttcctcatcttcctgatagtgggatgaggaaggtcttcctgttttcaccatc

SEQ ID NO: 42748 - DNA, 351 bp, Homo sapiens
  misc_feature (1)...(351): n = a,t,c or g
nnnnnnnnnnnnnnnnnnnnnnnnnnnnnnnnnnnnnnnnnnnnnnnnnnnnnnnnnnnnnnnnnnnnnnnnnnnnnnnnnnnnnnnnnnnnnnnnncatatttatataacaaaaactttttttcatttcagatgggcaatatgccaacgtcctaacatggtttgagggaggcacatttcacacatgagcatgaagacctaatcatcactcttataaactacgaaaggatcaaacaataannnnnnnnnnnnnnnnnnnnnnnnnnnnnnnnnnnnnnnnnnnnnnnnnnnnnnnnnnnnnnnnnnnnnnnnnnnnnnnnnnnnnnnnnnnnnnnnnnnnnnnnnnnncct

SEQ ID NO: 42749 - DNA, 357 bp, Homo sapiens
  misc_feature (1)...(357): n = a,t,c or g
nnnnnnnnnnnnnnnnnnnnnnnnnnnnnnnnnnnnnnnnnnnnnnnnnnnnnnnnnnnnnnnnnnnnnnnnnnnnnnnnnnnnnnnnnnnnnnnnnnnnnnnnnnnnnnnnnnnnnnnnnnnnnnnnnnnnnnnnnnnnnnnnnnnnnnnnnnnnnnnnnnnnnnnnnnnnnnnnnnnnnnnnnnnnnnnnnnnnnnnnnnnnnnnnnnnnnnnnnnnnnnnnnnnnnnnnnnnnnnnnnnnnnnnnnnnnnnnnnnnnnnnnnnnnnnnnnnnnnnnnnnnnnnnctggagtgagaactctcctcctctcataatcatagtatccacgttaggaaaatgcttctgagagtaactt

SEQ ID NO: 42750 - DNA, 343 bp, Homo sapiens
  misc_feature (1)...(343): n = a,t,c or g
gtttgttgattgtaacatttggatgacaaatatttcttactcgaattactacttttgcaaaatacatcttctctttcagttattgtagttgtaccaaagtaagtaatttagatattaggtaacttaacagaattgttaattgaaaccacattgttatgnnnnnnnnnnnnnnnnnnnnnnnnnnnnnnnnnnnnnnnnnnnnnnnnnnnnnnnnnnnnnnnnnnnnnnnnnnnnnnnnnnnnnnnnnnnnnnnnnnnnnnnnnnnnngggctggagtgctctttcgctcagcctcctgagtactgggctacnggcatttgccaccatgcccactaattttgta

SEQ ID NO: 42751 - DNA, 344 bp, Homo sapiens
  misc_feature (1)...(344): n = a,t,c or g
gcatggttctctcacctcctgggctcaacctgtctttccatctcagctttccttgctcttttaatttaggaaaatgttcctgtccatagccactcctgggacaagattaaacattgctttgttgaaatagtgtggaaacacttttaagttaacagaggagagaattagcaatgagatcttgtaaatgttttcactacaggaagattggagatattacaactcagaataacttgccactattgtatatatataagagggagaatcatgacaaaggtgattaataatatttttaaagntcttgactatcacatttgntntttaagaaanatttggagttnnaacag

SEQ ID NO: 42752 - DNA, 348 bp, Homo sapiens
  misc_feature (1)...(348): n = a,t,c or g
gatcaaatccttcccaagagtctcctgatctcaacagactgagccccaagatctggggaaggagagcgatggttctaggcgcacctggaaactgccctgcactcctgggtcccgaggtttctgtggggcggctgtcaagggggctgctctctctctctttctcaggctgcaggtgcactaggccgtccactctctctctctctcaggctgcaggtgcaccaggccgtccactcactctctctctcgggctgcaggtacaccaggccgtccactctctctctctctctctctcgggctgcaggtgcaccaggccgtccactctctctctctctctcaggctgnaggtgc

SEQ ID NO: 42753 - DNA, 176 bp, Homo sapiens
  misc_feature (1)...(176): n = a,t,c or g
gtggggccaagggtcaggactcaagactgcaaaacgctggtgaccggaggtcggttggtcatgggagttgtttctcttcctgttatttaatggcatcagtaacagtccttttattgaggactccagtgtaccaggcatcatgggtttactttanggaancatttgtgtgnancctt

SEQ ID NO: 42754 - DNA, 205 bp, Homo sapiens
  misc_feature (1)...(205): n = a,t,c or g
gaccctgaaagctcacttaacatgataggcagctgatgagggatgctggctaggaatttagctgagactgtcccaaggagtatcttctgtatgtggcctctccagtttgaggatttcaacacggtcaggcttcttacatgtcacctggtttcccaggcagagctacatggtattttctgacccaccctcanangncattntgctg

SEQ ID NO: 42755 - DNA, 343 bp, Homo sapiens
  misc_feature (1)...(343): n = a,t,c or g
gacctggaaaggggtgggtgttgtagtgagagactgaagacaaaggcctgtaacagatgggtatctttttagcttaatcaagctattgctggagtgttatgcttcagaaataagtcnnnnnnnnnnnnnnnnnnnnnnnnnnnnnnnnnnnnnnnnnnnnnnnnnnnnnnnnnnnnnnnnnnnnnnnnnnnnnnnnnnnnnnnnnnnnnnnnnnnnnnnnnnnnnnnnnnnnnnnnnnnnnnnnnnnnnnnnnnnnnnnnnnnnnnnnnnnnnnnnnnnnnnnnnnnnnnnnnnnnnnnnnnnnnnnnnnnnnnnnnnnnnnnnnnnnnnnnnnnnnnnnnnn

SEQ ID NO: 42756 - DNA, 348 bp, Homo sapiens
  misc_feature (1)...(348): n = a,t,c or g
ggagactgaaaaaaaaatcactgaatttcataatacttagcgtggcatttttctaaaagtaatttctcattgattacttgctaaagtaactaaattagcaagctggcatttagctcatttaaaccccattctggtacaaattcaccccttaagtttttctcatggtagcatcattattgcagctttacacatagaaatgttactagtttgggcacatggatttatgtagtttaaggaactctctagctcctcactttacttatgtatttatgtatgtatttaanaaatcacaagnnnnnnnnnnnnnnnnnnnnnnnnnnnnnnnnnnnnnnnnnnnnnnnnnnnnng

SEQ ID NO: 42757 - DNA, 303 bp, Homo sapiens
  misc_feature (1)...(303): n = a,t,c or g
gaataaacacacaggaaaatctttattgcatttctaaataacatggaaaaattataaaattaaaaagtttcaaaaatacatttgtaggaattgtgctttcccagcctccccatcctacacggtgcactcggtgtgtgcttcctcagtggtggttcaggactctgggctgcctcttcagggcctctgtctaaggtggcacactcgcctcctccctagccatttgggccgtcagcactgnatctgtgtggatttctgnctncatctttattttccnanangcngnnntagaatanctctggctcc

SEQ ID NO: 42758 - DNA, 340 bp, Homo sapiens
  misc_feature (1)...(340): n = a,t,c or g
gggattttatcttgaaatacttttgacagctggctggttgagggtatctgctcacaggaacgccgcatttgctggctttgtccactagtgctcgcccctggctgctgatgcggagcctcacgtggccgcagcccaagagtagggactggcttggccacctacaggctaagcttcgggctcccaggtggctgggagggccaggggtgcacaggtgcatcagagcaggtgctgccttgctggagggccagggctcttctggccagggtccaggtcatcattgtccccagccaggaatccaaggggcctttccaaacctgcagggcaganggaattcnggtat

SEQ ID NO: 42759 - DNA, 236 bp, Homo sapiens
  misc_feature (1)...(236): n = a,t,c or g
ggttcctgaggttaaaaaatgcttcagtaaaatctgatataagaaagaagttaatcacaacaacactttcggtagtgaaattgatgcaacatggtaagactttgagacagttcttgaagggctcaagaagacgagagcctaacaatttaggctcatacattgttggcaatgtgaaggatccagctgntgntgggaatcttaantttaaaatggtgccantanccangatatggctg

SEQ ID NO: 42760 - DNA, 345 bp, Homo sapiens
  misc_feature (1)...(345): n = a,t,c or g
gaaaattnnnnnnnnnnnnnnnnnnnnnnnnnnnnnnnnnnnnnnnnnnnnnnnnnnnnnnnnnnnnnnnnnnnnnnnnnnnnnnnnnnnnnnnnnnnnnnnnnnnnnnnnnnnnnnnnnnnnnnnnnnnnnnnnnnnnnnnnnnnnnnnnnnnnnnnnnnnnnnnnnnnnnnnnnnnnnnnnnnnnnnnnnnnnnnnnnnnnnnnnnnnnngaaatatgctacatggcttataaattataaactatggttttttaaagtttaatatgttttaaatataattttgtcatgtaaaatatatataagaaaacagctgcaagctgtcttaaatataatactctaaaga

SEQ ID NO: 42761 - DNA, 323 bp, Homo sapiens
  misc_feature (1)...(323): n = a,t,c or g
gnnnnnnnnnnnnnnnnnnnnnnnnnnnnnnnnnnnnnnnnnnnnnnnnnnnnnnnnnnnnnnnnnnnnnnnnnnnnnnnnnnnnnnnnnnnnnnnnnnnnnnnnnnnnnnnnnnnnnnnnnnnnnnnnnnnnnnnnnnnnnnnnnnnnnnnnnnnnnnnnnnnnnnnnnnnnnnnnnnnnnnnnnnnnnnnnnnnnnnnnnnnnnnnnnnnnnnnnnnnnnnnnnnnnnnnnnnnnnnnnnnnnnnnnnnnnnnnnnnnnnnnggaatctagagacatcagtgtgtgcacaagcatggtttgngaatttggaagngngtatg

SEQ ID NO: 42762 - DNA, 342 bp, Homo sapiens
  misc_feature (1)...(342): n = a,t,c or g
gactaaccaaaagcggtgggaaaaataaaaactgaatggtcataaccaacttgctaaagcttgtagatgaggtctctaatgcagaatgaatatgttctctggtggaaactgttgtagacagtgatactctctggacctttgagatacttatgtctggtctgattttatgcacagcccctcacataggagttttgcatggagagttgaggttttcagagtcattgcatttacaacatctctctgagcttttacagttttacaattagtagaactggggcaaagagaantatgtcttatcagttaacttagaactagttagggacatagccaggaatggaaccc

SEQ ID NO: 42763 - DNA, 323 bp, Homo sapiens
  misc_feature (1)...(323): n = a,t,c or g
gcctgcctaatggccttccaactagaacgctggctctatctgggtcttgagcctgccaactcacacagcagattcggacttgtcagtagcaataatcacacaagccagttccttatattaaatcttatacactnnnnnnnnnnnnnnnnnnnnnnnnnnnnnnnnnnnnnnnnnnnnnnnnnnnnnnnnnnnnnnnnnnnnnnnnnnnnnnnnnnnnnnnnnnnnnnnnnnnnnnnnnnnnnnnnnnnnnnnnnnnnnnnnnnnnnnnnnngngctggngtgngcctgtanncccanntacttgnnangncnnnnnnnnagga

SEQ ID NO: 42764 - DNA, 335 bp, Homo sapiens
  misc_feature (1)...(335): n = a,t,c or g
gggctgtctgcaagcttgcnnnnnnnnnnnnnnnnnnnnnnnnnnnnnnnnnnnnnnnnnnnnnnnnnnnnnnnnnnnnnnnnnnnnnnnnnnnnnnnnnnnnnnnnnnnnnnnnnnnnnnnnnnnnnnnnnnnnnnnnnnnnnnnnnnnnnnnnnnnnnnnnnntgctggaagctgattagattgtgcctaccagattaaagacggatctgcctnnnnnnnnnnnnnnnnnnnnnnnnnnnnnnnnnnnnnnnnnnnnnnnnnnnnnnnnnnnnnnnnnnnnnnnnnnnnnnnnnnnnnnnnnnnnnnnnnnnnnnnnnnnnnnnnnnnncagg

SEQ ID NO: 42765 - DNA, 160 bp, Homo sapiens
  misc_feature (1)...(160): n = a,t,c or g
gctactgcccagtagaggctgtggtaggttagatatgaatgtctgtgaattcagaataccttaaaagtgtgtgtacaaagagaaagtctttgataggaacttttttctgttgttgntgtttgttgctggngaatntngtanntgnnnntctntcttctgc

SEQ ID NO: 42766 - DNA, 343 bp, Homo sapiens
  misc_feature (1)...(343): n = a,t,c or g
gcggcacgagcaaaactgttcagaaagacaaccttgtatattctccctactagcatgaaatcatcccctatgtgagttagaagtcatccatctaattctgtttctgctttttggccccaggcttgtgctctccaaggcttgtgaatttcatatatgtttctcttccttcctgcatcttgagtttctgttattcataaatacataaggcatttggatgttatttcttgtagtaagtcactcgggctaatgtgttatcactgaaaactaacagtacctatggtggaaggtagggagcgngaggaaaangganngagctatcnnnatacttntacatttangctgg

SEQ ID NO: 42767 - DNA, 318 bp, Homo sapiens
  misc_feature (1)...(318): n = a,t,c or g
ggagatgagattggaaaggttctacatcatgtgggaccttgtaggtcctataaaatctttcacattttattttaagtggaacgattatttaagtatttaagcagagtcacatgatatggtttactttacataagaatcactttgacagagggtgtggtggcgcttacctgtagctccagctacttggagggctgacgtgctannancnctngngcntgncangtnnnctctnaatcntgantcanttanttcctgntnntgaancnagcctgncttancattcctggctctgctgnctnacagganctttcanggctt

SEQ ID NO: 42768 - DNA, 328 bp, Homo sapiens
  misc_feature (1)...(328): n = a,t,c or g
gagagttattcataacttccaggctgattgtgtggtcagccaggcagtgccttttatggaggccgtaaatctgggtaggtagagtgatttaggaggaaatatgtttaattttgggctcctatgtctgtgggatacactagtaagagatgtctaatagttgggtctgtgggtccaggggtctgggctgaatatttgagggtctttagcatttgagtgacacttcacctaagaaaactgactcanagccttccagagtgcanggcgctgngctanaaatgcnnaggtanatgccannactgntgnnangcattntntgacccctanacca

SEQ ID NO: 42769 - DNA, 256 bp, Homo sapiens
  misc_feature (1)...(256): n = a,t,c or g
gctttctgtcagatttttgaagaccacatagcaagtatgctcttagagtgaggggcagtacagtaaatacagtggctcgagagttacattgttgttacaacttgactccgaattatatcagttgtgtgatcttgagcaaattgttcaaactttcatttatttttctctataatgggcaccataataataccaagcaaatagggtattattatggngaanactanntcnngtgtcttgnatatattangcnttacta

SEQ ID NO: 42770 - DNA, 221 bp, Homo sapiens
  misc_feature (1)...(221): n = a,t,c or g
gccagaccttccttttctcagagcatttactttagccaacttccattggtgaatgtttcctctgaccctttgacatgtaaatctctccgcctcttgctgggttttacagcctggggatctttctcagggatctgtgaggcatccctttgaaatgtaatcatcaaggaaaaaagggtccctatctcctagtgtttgtggagaggangnncctanctntaata

SEQ ID NO: 42771 - DNA, 292 bp, Homo sapiens
  misc_feature (1)...(292): n = a,t,c or g
gnnnnnnnnnnnnnnnnnnnnnnnnnnnnnnnnnnnnnnnnnnnnnnnnnnnnnnnnnnnnnnnnnnnnnnnnnnnnnnnnnnnnnnnnnnnnnnnnnnnnnnnnnnnnnnnnnnnnnnnnnnnnnnnnnnnnnnnnnnnnnnnnnnnnnnnnnnnnnnnnnnnnnnnnnnnnnnnnnnnnnnnnnnnnnnnnnnnnnnnnnnnnnnnnnnnnnnnnttgtgccactgcaccccacccgggcaacagagcanaaccttgctcaataataattataatgntgcctttncaata

SEQ ID NO: 42772 - DNA, 331 bp, Homo sapiens
  misc_feature (1)...(331): n = a,t,c or g
gcactggcactgctgttttctgtctgttttaagggtagcaggagccatctagagaggtttactaggtgatccctgtgttcctattagacccagagcccttccctgcacgtgtagacgttgctggaaaggaaagataacttgaatttcctaaaaacctcattcatttgtaatcttgtttatttatagctgtcttattccaaaaggcaggtctctccattaatttggaatgtgtgactagtaggtcaaagcttgcgtgaagtttacctgggaactaacgacaggtaaagaacttggtagtgttgaaggctctggactgggaaagangagcctg

SEQ ID NO: 42773 - DNA, 343 bp, Homo sapiens
  misc_feature (1)...(343): n = a,t,c or g
gagggctcggcgtgggagttagtcacttagtgagnnnnnnnnnnnnnnnnnnnnnnnnnnnnnnnnnnnnnnnnnnnnnnnnnnnnnnnncagcaactgcaagtcaattatctgtattcaaaatttgggctttccaaagatctctagataagggtctgacatatatcagtaactcatattgctcctcaaagttctacttatataacctctaaataaccagagttctatctgaaaaacttgcacactactactttgggaattgaatttgtattggccttaaactaaaaaaaagaacacacttatgctaatttttttccttacatanggaaggtaactttatgtc

SEQ ID NO: 42774 - DNA, 331 bp, Homo sapiens
  misc_feature (1)...(331): n = a,t,c or g
ggtggagaagaactacaacctggagcagacgctggatgaccactcctcctccatcaccgccatcaagttcgctggcaacagagacatccagatgatcagctgtggggctgacaagagcatctactttcgcagtgcccagcagggttcggatggactacactttgtccgtacccaccacgtagcagagaaaaccaccttgtatgacatggacattgacatcacccagaagtacgtggccgtggcctgccaggaccgcaatgtgaggtaaggggtggccctggacccttagctggcctggnctgcttgncctaggctgnntgctttcctccct

SEQ ID NO: 42775 - DNA, 322 bp, Homo sapiens
  misc_feature (1)...(322): n = a,t,c or g
ggaaaagggtgatctggagggctggagaattggagacattcacatcatactttggtgacattcacatcatactttggtgacatacttatatgccacagctcaccagtattgtaactattctccttgactctttctaccatcgctattgaaattaggcttttcanantanagccaggnnaggccatatttgnagctttaaatactctttnntagctccancttntncnncttgactgtnatnnatncanngnntatcantgttnntgctnntnntcgagctattancnntnntnnangtcnctnannatgnnatnnntnttcc

SEQ ID NO: 42776 - DNA, 293 bp, Homo sapiens
  misc_feature (1)...(293): n = a,t,c or g
gggaagagaggggtcagacagaaaggatgagagacagaagggatgggagatgggtggatagatgaagcagcagacagacagacggacaggacaggtaagaaagcttatggctcaggcatctgagacaagcctggcaggggctgagaggggccctcatctgggtggccccaggctgctcgcagctcagccgtgagccctcggngcacacaccnccccgggnctgttcnggctctggaatccttnnggccantgnggacttggnanccctgggctgccngctnnccnccttgatg

SEQ ID NO: 42777 - DNA, 342 bp, Homo sapiens
gcagaaaggctttctcagatctgcaagagctcacagagtctgtaatacccatgtgccctgagtgaatagacctgaggtaaggttctggcagccccacatgcaaacggtagaaacccaagccagtttttaagctcttgaagccctagtttctttatttgtaaaccaagtaaaagtaaatgatttacttcataaaattgttataaaggttaaagggacagaatatatgccaagctctttgttcactgcttagtactcttttaaaaaaataatagaatttattggaacaaccaatcttagccaaccatgagaggaatcacaaacaagaagaaaagaaagccactg

SEQ ID NO: 42778 - DNA, 329 bp, Homo sapiens
  misc_feature (1)...(329): n = a,t,c or g
ggtacccaccgccttgtgagtgagcaggttgcgtggttcagtgcagcacattgtatcaagtaggtcaggagttacaacttcatgcacaaagagatggctcatttttagtcagtgaaaacctttcattaaccacagggcccaaggaggggtggatctggtaatcattgctaagcagacagagctagaggttcagacactgccgcttgtgtgccggcccctttcctctcacaccaaaccacatgttatgcacctgtttgtactccttgaaggcccttgaattattcttgtcatttttgcttactgatgttttcccccagctgtcanagttg

SEQ ID NO: 42779 - DNA, 340 bp, Homo sapiens
  misc_feature (1)...(340): n = a,t,c or g
gcactgctcctatttgccaggaagaaaatgtattccacatagtctctggtccaaggaggattagaggctgctggagctgacctaaaccccatgcacagcctccgtgggagctgcccagccagtctgtagacttgtgagtgagaaactacataatcgttttgtgagccactgaacgttaaggcanttttnttntnaatnnatagttnatncnatntnantntatttnntanagntnnngngttcanaatncnngngatnnnganatnttnncnnnaagntcttanannnnntcantngtnntgtnganntnantcntttnnncacntggactgttnncacc

SEQ ID NO: 42780 - DNA, 266 bp, Homo sapiens
  misc_feature (1)...(266): n = a,t,c or g
gcggcacgagacttggaaaggatgaaaactggctttttttcctaagtagttcatgaattcttttttggcttatactgttcatctgcttagtaaagcacttctttgtgggtagcataaggtaacttaaatgcccctcccaggccaaattacctccactaatgaattggttgaatcccnatcanngaanaattgnncccggntatgatggctnncacntgncntnnntnnctanggnngcnnnnctntnntgnnnncttnggcctttt

SEQ ID NO: 42781 - DNA, 337 bp, Homo sapiens
  misc_feature (1)...(337): n = a,t,c or g
ggacagtgctccttaaattaatctatagattcaatgcaacctatatcagaatctcagcagacttcttcgtagaaattgacaagctaactccaaaattcatatggaatttgatagccatatggttagccaaaacaatctttaaaaaaaagaagtaaaaatcacaggcaggagcccnnnnnnnnnnnnnnnnnnnnnnnnnnnnnnnnnnnnnnnnnnnnnnnnnnnnnnnnnnnnnnnnnnnnnnnnnnnnnnnnnnnnnnnnnnnnnnnnnnnnnnnnnnnnnnnnnnnnnnnnnnnnnnnnnnnnnnnnnnnnnnnnnnnnnnnnnnnnnnnnnnn

SEQ ID NO: 42782 - DNA, 333 bp, Homo sapiens
  misc_feature (1)...(333): n = a,t,c or g
ggtggaagggctggtgagaagtttaaaagtctgcattataagagaagatgcannnnnnnnnnnnnnnnnnnnnnnnnnnnnnnnnnnnnnnnnnnnnnnnnnnnnnnnnnnnnnnnnnnnnnnnnnnnnnnnnnnnnnnnnnnnnnnnnnnnnnnaaggctaaggattacgnnnnnnnnnnnnnnnnnnnnnnnnnnnnnnnnnnnnnnnnnnnnnnnnnnnnnnnnnnnnnnnnnnnnnnnnnnnnnnnnnnnnnngacagagagagagaagatgcagatcatctaattatgactctctctattangctggtggaattggcccctccatacg

SEQ ID NO: 42783 - DNA, 326 bp, Homo sapiens
gattattgaacacctcataggggcattattctgtatacagtagaattctagaactagaaatatatcttagagtttatcttaatgtttctcaatcatgtatgaaaagaaatagatatctagtttaaaaattaaaaattcagaagtgtgtgtcatagctcagacctgtattagaataatctccgggggtgggggcctggtattcgttattttcaaaaagctttttgggtgattgtatcaggcaactttggaactgatttatgtagctcactgtcttcattttgaagatgtacaaacaaagtcatggcttgagaagaaaaactgtccat

SEQ ID NO: 42784 - DNA, 332 bp, Homo sapiens
gaacactctaccagcatttaaaatctagccttaatgaataccagcccaaattatatcaagtattagatgatgggaaacgacttctgatatccatcagctgctcagatctagaaagccaactaaatcaacttggagagtgctggctaagtaacaccaataaaatgtctaaggaacttcacagactggaaacaatattgaaacactggaccagatatcaaagtgaatctgcagatctaattcactggttacaatctgcaaaagaccggctagaattttggactcagcaatctgtgacagtcccacaagagctggaaatggtccgtgatcatcta

SEQ ID NO: 42785 - DNA, 332 bp, Homo sapiens
gcggatcttcccggcgtggccgcgtcccgttacgcagcgtcagaaactcgatattcctggcgtggccgcctcccgtcacgcagcgtcagaaactcgatcttcctggcgtggccgcctcccgtcacgcagcgtcagaaactcgatcttcctggcgtggccgcctcccgtcacgcagcgtcagaaactcggtcttcctgccatggccacctcccatccggcggcatcagaaactcggaccttcctggcgtggccgcgtcccctcacacagcgtcagaaactcgatcttcctggcgtggccacctcccctccggcggcatcagaaactcggatcg

SEQ ID NO: 42786 - DNA, 325 bp, Homo sapiens
  misc_feature (1)...(325): n = a,t,c or g
gcattttccaagtaaagttcagatgtttcgatattcctgacactatttgataaattattttaaggaaagnnnnnnnnnnnnnnnnnnnnnnnnnnnnnnnnnnnnnnnnnnnagaatggtgcctgattcataattggcactcactatatatttgctgaatgaatacataagaaaataaatgcatttcctttttcatctttctctctctgagaatgggaactgctgcaggatttttttaaatggcaagtttcaatatatacctttcttcttaaatgtttgctttaagaataatttcagaaggagattattctaaaatatggagcat

SEQ ID NO: 42787 - DNA, 331 bp, Homo sapiens
  misc_feature (1)...(331): n = a,t,c or g
gccctcctctctgctttgcctgagtcatcaaaatttacacaagcgctggtgtgaggaaaccgcagtgcaatgctgattctacaccatcctgcactgggacggtggtgtctgctgttccgggattgagagagatgaagcacttactcacctcagtgactggtgtgcgcagccactccctagccggcttcttccatggcaggacctgcaaatgctggactcacagaaggctctgagaagtaaataacnnnnnnnnnnnnnnnnnnnnnnnnnnnnnnnnnnnnnnnnnnnnnnnnnnnnnnnnnnnnnnnnnnnnnnnnnnnnnnnnnnnnnn

SEQ ID NO: 42788 - DNA, 330 bp, Homo sapiens
gtaacaagaatccttttaacagcgagcagactttgagaatgagcttgcagtagactgccgaatggcttcatgtggatccagttgtgcactgatgccatatataattttatatgaccctcaaaaagccctcaattttgggtgtctgggggcttcaaaaataaccctaatccatttagtccttccagttaggtagaactaggtcatttggatccatgtagatgtaacattgttgggtatccattgggaagccggggctttagctgctcgctcttctttttaggcagtcaagtcccatgtgaaatagaaacattggcctgcttcctattatgc

SEQ ID NO: 42789 - DNA, 327 bp, Homo sapiens
  misc_feature (1)...(327): n = a,t,c or g
ggctcggcatggcaggtttggattcatggatcccagcacattgttcttctcattagactgaattgccattgaaggctttttataccctcactgtggttcatggctaaggagcttcaggaaaagatgagtgagcttttccccagttctttatctagagactctgaagttttgcatttttcacatagttcagacattgttccttgcggatggactagtactgactgcaagagcctaccttggggaacaagtgcaccccttcctggttggagaagcatttccaaanngnagtttnnngnacactgntntgtnaangcnaatnngagctcc

SEQ ID NO: 42790 - DNA, 305 bp, Homo sapiens
  misc_feature (1)...(305): n = a,t,c or g
gtttcccttctgaagaggcaaaaaattgaggaatgtgccctgctttcctaagaactgaagtgtgagtacactggtaaatcctttcatttgccttgttccttatctgtcaatatgtctgaatcctcgcttgttggttgcactaagaattgttctgttgtttctcatcacagaaatctgcagtcaactacctgntctcgtnaangtcttaanactcttatanaatagccnttnagncctttctgctanccncctgaatnctagantctcaggctgagcgngtttcttngntctntnaancttaagtg

SEQ ID NO: 42791 - DNA, 320 bp, Homo sapiens
  misc_feature (1)...(320): n = a,t,c or g
gggtgtggagtggttaaccaagttgcccaaacccacacagctatttagtgaagagccatggattcttacctctgaacccatcattttaccaactagaccacaccacctcaagaatagccttccggatgaaactatgagaggaatatagatattttacatgtttaaaacatttgtctgtannttgccaggacttaaaagtanntacaaattttaagtgctttactgatnnngatctnctannaaccaattttgcngttntctcatannntcactgtctnnnggnggnnnnnctattgnttntnctntatntgtantnaatg

SEQ ID NO: 42792 - DNA, 329 bp, Homo sapiens
  misc_feature (1)...(329): n = a,t,c or g
gcctgaaggtactattaataaacagtaaaataagaaagagaagctttcagagagagaaaaaggggaaagcagaggtcagaatgacccacaagagaaactaaatactcaagaaatcaatgatcaccctaattggcttccgagtgtgctcattatggaaccataggctttaaactttttaaataaacttttctttctacttcacacacttctccccactcatgacaaaagcaaagcaaaacaaaaacttgcattcttgctgtaactcccagcaacacattatcctgaataaaattgtcctagaggatgagcaatgntacaaatattgcagg

SEQ ID NO: 42793 - DNA, 335 bp, Homo sapiens
gcaagaaactaggaataggccagtatagttgttaaaagggccatccagtaaaacttatttatctttttactttttctttccatataataacttgcttctctagtctacagtcgaagtagaaaaataggggtaagaatgccatttcagacactgacctcaaagtgacagctaacaaaaacagaagaaaaagcaaaaccccaggaaactaacacacaagctcatgaaacacagcaattgagggccatttactgtgggatcagttagccccaaacactgtggtgtatctttaaggaagcacactgtttcatgagctgacaacaattaatgtgacttta

SEQ ID NO: 42794 - DNA, 330 bp, Homo sapiens
gaaacagttcttatattccatatgatgaataaattttagaatcagtgatcgcctcttgtgaataaattaatgaaacccatttctactcttttcttccttagtttttgtcttttttgatctgactgtagatgatcagtcagtttatcctaaggcattaagagatgaatacatcatgtcaaaaactcttggaagtggtgcctgtggagaggtaaagctggctttcgagaggaaaacatgtaagaaagtagccataaagatcatcagcaaaaggaagtttgctattggttcagcaagagaggcagacccagctctcaatgttgaaacagaaat

SEQ ID NO: 42795 - DNA, 325 bp, Homo sapiens
gtggaactgctaaaaactatgtttacaccttaagggccagaccaacccacaaaagccagagcagcactctaccgtcagcacttgacagcgaagaaactaaaaagaagatgaggaatagcggtcttagctatggccttggaaagaactattctctacagaaaagtgatgaaatatggctcctaaacaggagagaaaataagtttatcaaccagaatccacagctctgaggcacatattattcaggagaaaaactgagaacttataacagtaactggtgggacagctcttctaaacattcaggtgttttccttttcatgttgcattt

SEQ ID NO: 42796 - DNA, 324 bp, Homo sapiens
  misc_feature (1)...(324): n = a,t,c or g
nnnnnnnnnnnnnnnnnnnnnnnnnnnnnnnnnnnnnnnnnnnnnnnnnnnnnnnntacatttgttctattccacttaatacagctgtagaaagtctatataaattacatgtagattaaatccaacaaatcattattttttcttattacaaaaacaatatatatttctttgagaaaaatgagaaaatatggcataaaggagaaaattttaannnnnnnnnnnnnnnnnnnnnnnnnnnnnnnnnnnnnnnnnnnnnnnnnnnnnnnnnnnnnnnnnnnnnnnnnnnnnnnnnnnnnnnnnnnnnnnnnnnnnnnnnnnnnnnnn

SEQ ID NO: 42797 - DNA, 323 bp, Homo sapiens
  misc_feature (1)...(323): n = a,t,c or g
ggcagaacctgggcaaagctctaaagaaagatctgaaagagaagaccaaaaccaaaaagccaggtacaaagaccaagtcatcttcacctgtcaaaaagagtgatgggaagtctaagcccttggcagcttcaccaaaaccagcgggcttgaaagaatcctcggataaagtgtccagggtggcttctcctaagaagaaagaatcttgtggaaaaggcagcaaaacccaccaccactcctgaggtcaaagctgtacgtggggaagagaaagactaggagaccaagaatgctgccaatgcctctgcatccaagncggcaagaccgcc

SEQ ID NO: 42798 - DNA, 328 bp, Homo sapiens
gctttttttttgctaaatggagggtattggaatctattcctgatctcaaaggtgggcaacctgtggaaattataccagtgggtaacaccagggatgtagattagtggaagtcagccgactctcagagaggcaattatgtaataattataacattgttatgtaacaattataaaggggacttccagaccacttctgagacagacatcatgccaagtgctttatgcactatcccaattaatactcagaacaaccttgtgaggcaggtaccattattattcacatttcacacatggatggcaaaacggaggctcaaaggtcctaagggcct

SEQ ID NO: 42799 - DNA, 328 bp, Homo sapiens
gtttttacctgggctatcaggaacagatgagagattctgttgctcgaatttaccccttctggacacctgacatccccctaagcagctatgtgaaaggcatctactcttttggcttgatggaaaccaacttctacgaccaggcagaaaaactcgccaaagaggctttatctattaacccgacagacgcatggtcggtgcacaccgtcgctcacatccacgagatgaaagcagagatcaaggatgggttggaattcatgcagcactcagagaccctctggaaggactctgatatgttggcttgtcataactattggcactgggctttata

SEQ ID NO: 42800 - DNA, 321 bp, Homo sapiens
gctccatggacttcttccagctggaggccgcccaagctggctacctcatgtccttcttcgggctcctccagatggtgacccagggcctggtcatcgggcagctgagcagccacttctcggaggaggtgctgctccgggccagcgtgctggtcttcatcgtggtgggcctggccatggcctggatgtccagcgtcttccacttctgcctcctggtgcccggcctggtgttcagcctctgcaccctcaacgtggtcaccgacagcatgctgatcaaggctgtctccacctcggacacagggaccatgctgggcctctgcgcct

SEQ ID NO: 42801 - DNA, 322 bp, Homo sapiens
gattgtttgaataatctaataattttaagatataatacttttagaagtattttgtctatttttgatcctaagattatagcattttaataaaaacatcaactttgtcttattctcatgtaaaatgaattcatctgaatatcttgatcttctgactctttggttctacaacccgatagcctgaaaattagaatcacatagggagctttttaaagatactgtactcagaccttaaagcttcagaccttccaaatcaaaatctctgagaatggggcatagaaatgtacattcaaaacacaacaaaactggctaattcttatgagca

SEQ ID NO: 42802 - DNA, 322 bp, Homo sapiens
gggagacttcttgctggaatgaacagtgtgctcagggactatttggaactggatgtttttgaattattttatacttagagatattctgaattttttgagggccttttaacactccccgagctgattgtttgcaagtgtgtttgttccagagtgtggaagtataaagacatgggcatcacgtaaattggttttgtttgctattctgtgtgtcagaaccaacgagtgtaatggagagggcaggtcatctcttattgtttctaaaacaacttaaaaggtgtagattgggaagaggtgagtgatccagctttctccttttggattg

SEQ ID NO: 42803 - DNA, 324 bp, Homo sapiens
  misc_feature (1)...(324): n = a,t,c or g
ggnnnnnnnnnnnnnnnnnnnnnnnnnnnnnnnnnnnnnnnnnnnnnnnnnnnnataaggcacctcaaaaaaaaaacaaaaaaacaaaaaactatcaattgttgagttcaggaactttgcattttatattttccttcaccaaagtcattacaagttttttttttttcccntccntnangaaaaantnantnggnctaaanntnactaannatgtttnnnggngnnnnaagtntntaanntnnnnnggnaaacctttaantngncncanaatttcttnnnccggaatnnggcgcccnnaaaatggttgaaaanctnttttncagc

SEQ ID NO: 42804 - DNA, 330 bp, Homo sapiens
gctcggctggtgagagaggaattaggaatcgtggctttgggaaccaaacggaatatggtatcatctaccaagaacagagaagcaacaggtttcattcagtcaatacgtatctacagagtgctcctcaaatgcaaaacacttttctaaggccaagagtcaaatctgaaattatagtcatggttattagaatttattcttaagagcaaataacaaagcactaaaaaatataaggcatatttaaaattaatcactgctattaacagacttggcttagagtccagtgaaagcatgttgtactaccatttgttaaatattactacatgcaggcca

SEQ ID NO: 42805 - DNA, 333 bp, Homo sapiens
  misc_feature (1)...(333): n = a,t,c or g
nnnnnnnnnnnnnnnnnnnnnnnnnnnnnnnnnnnnnnnnnnnnnnnnnnnnnnnnnnnnnnnnttctgcnaaaaaaaaaccttttgaattcctgctctgcnaagcttgnncctatntnagggnnnaatgntggcagctganatnttaggctcanggtncctcancaaaaacngccnncanataagagcctttagtatagatggggttttgctattgttggctagactggncttgaanttntggtctcnnngngatccgcctgnctataattttttntaattgatnnngcnctgnncntannnccagnatnatntncnagggnnngtanaaat

SEQ ID NO: 42806 - DNA, 341 bp, Homo sapiens
  misc_feature (1)...(341): n = a,t,c or g
gagaggcatgcacatccagccgagtccaaatagtgtatgcagatatgccctcacagaggtgacctgaactttctgagttgtgagtgagcttcacctggggacctccttttaggtagcagggaaaaagaggagggtgagccacacccaggcacctccttccagagagcatgtgcnnnnnnnnnnnnnnnnnnnnnnnnnnnnnnnnnnnnnnnnnnnnnnnnnnnnnnnnnnnnnnnnnnnnnnnnnnnnnnnnnnnnnnnnnnnnnnnnnnnnnnnnnnnnnnnnnnnnnnnnnnnnnnnnnnnngacccggtgtggtggctcatgcctgnaatcccaatg

SEQ ID NO: 42807 - DNA, 327 bp, Homo sapiens
ggtaactagttgttctttcaagagaaatggtggtctgtaaaaaagcacagttcagcttgcaactctcataagatgctttttcttgagacagccatctttctacccatttaagtgcacagaatattaagaagttgtatacttaagggcaaagatttaatgtgtaatatttgcagctatatcaaggacattcttaagtgaaactggctttaaaaaatttggtgagtgtttggtaatgaagaatgtagtgactactactgtagttcggtgctactgctaatgagacaacagcagttttatccaatgttactttttaaattttttttattt

SEQ ID NO: 42808 - DNA, 337 bp, Homo sapiens
  misc_feature (1)...(337): n = a,t,c or g
ggactaagacatttggaactcatgacacaccaaagttaatgtacaaagagcattctcaagtgtaaacaacccagtagaaaaataacctcaggtagttaagtttattttaaaagaactatgagatatttttattcattatattggcaaaaattatgaatatagcattaatattataggctggtaggtatgtgaagaaacaattttttatatattgttgactggaggatgagctgctgtaattttgtgaaagtaatctggcagtagatcataaaatttaacataaaactctttgatctagcactcctacttttgggaatcccaaggaatanngcaccga

SEQ ID NO: 42809 - DNA, 310 bp, Homo sapiens
  misc_feature (1)...(310): n = a,t,c or g
ggtctgaatatcatctaaatcacatatgggtgagactttatgtataattcatcctaaannnnnnnnnnnnnnnnnnnnnnnnnnnnnnnnnnnnnnnnnnnnnnnnnnnnnnnnnnnnnnnnnnnnnnnnnnnnnnnnnnnnnnnnnnnnnnnnnnnnnnnnnnnnntanatgacagatgggnctgggctcggtggntnacncctgtacgncnnatcnctttgngaggcagngnnnnccnaatcncannnanncnacnntgatacnctcntggnngngatggagaacncttctcnctnctactnaggcta

SEQ ID NO: 42810 - DNA, 330 bp, Homo sapiens
  misc_feature (1)...(330): n = a,t,c or g
gttttaacattggaccttggaatttaggtgggtaaaaagggaagtgaggacacaagatagttgaggaatggtgaagagatattaggatcactggattataaggcccaggaagggatcagagaagtgttggagtcagggtgttgtaaggagtgagctgagaaacaggagatttataangatnngtaaanattattgttagattattattaataattggtnattattaaatggtaataggtnattaattggnnatngntaatgaattggnnncgtccntnntctgcntnctacttggncntntanntanttnnncgtnntctnntnnnttgt

SEQ ID NO: 42811 - DNA, 323 bp, Homo sapiens
  misc_feature (1)...(323): n = a,t,c or g
gcatgctccagaatacccacccaaataaaccatagctgtgtgccaggcactgtgctaagtatcctacaggttttatgtgatttattttannnnnnnnnnnnnnnnnnnnnnnnnnnnnnnnnnnnnnnnnnnnnnnnnnnnnnnnnnnnnnnnnnnnnnnnnnnnnnnnnnnnnnnnnnnnnnnnnnnnnnnnnnnnnnnnnnnnnnnnnnnnnnnnnnnnnnnnnnnnnnnnnnnnnnnnnnnnnnnnnnnnnnnnnnnnnnnnnnnnnnnnnnnnnnnnnnnnnnnnnnnnnnnnnnnnnnnnnnnnnnnnnnnnnnnnnn

SEQ ID NO: 42812 - DNA, 327 bp, Homo sapiens
  misc_feature (1)...(327): n = a,t,c or g
gattatatcttcataaataaggcatttagacttttcagtgtcttatgaaatattgtaaactacagttcatattatgtatgagacaagcatatcattaaagcaagatttagaatgtatatttttaatacactgttgagaagaaatggatcagaacagctgtgaaagcacgtttttcttaaattcagttccattcagtataagcacatacagttttaatcttcttttttttttttggaaaggaagccnnaaatnngtnncccagnnngaanngcagggggnnaatntgggttcctngnnncntcngtttccnggtttaagccaatggcc

SEQ ID NO: 42813 - DNA, 346 bp, Homo sapiens
  misc_feature (1)...(346): n = a,t,c or g
gggttctctgtggttaaacaagtgccttccagccatccagtaacctccccacgggggtcagtcccttatcttctagtgggaagggtactcgttacacagctgtgaggctgccttacctttgtggttggtgtcacggtgtcggtctcagctgtgttccagcagtgtgtcgaaatcatggagaagcttccagctttctgctctgagttaaaagaatacccttttgttgctgctctcccttgcttcattgtccacacttgttactgtatttttggaggcttacttagcctcanataacatttncagtnanaataatatgatggcagaccgtatgtnatactcactgcac

SEQ ID NO: 42814 - DNA, 325 bp, Homo sapiens
  misc_feature (1)...(325): n = a,t,c or g
gnnnnnnnnnnnnnnnnnnnnnnnnnnnnnnnnnnnnnnnnnnnnnnnnnnnnnnnnnnnnnnnnnnnnnnnnnnnnnnnnnnnnnnnnnnnnnnnnnnnnnnnnnnnnnnnnnnnnnaatgcatttttaacttagaatattttcaacttatgatgggtttatctggaagtaaccccatcataagaagcatttgtattaggtttttaggaaaaggaggttagttgctctttatttttatttttgtttgtttcttgacgcagagtctcactcactctgncacccaggctggaatgcaatnggcacggatctcggntcactgcaacc

SEQ ID NO: 42815 - DNA, 252 bp, Homo sapiens
gcaagttagtatgggtttattttggtgcaagaaatattttgaaatccacacatttttttcataatatgcattttccatgaagtttttgaaaactccttgtattaggaatattagtcctttgtccagtaaacagactgcaaatattttctcacagctcatcatttaccttttggcatttttttgcaatgcaatttttttccctttgtttttgttttttgtgtaatgaatcaatgttttctttttttttttttt

SEQ ID NO: 42816 - DNA, 326 bp, Homo sapiens
  misc_feature (1)...(326): n = a,t,c or g
gccaatatccacgtggtagagactcagtagttgcctctcaagtgggaattagacttcaaagactctgattaaatcctagagcaggggtcagcagactatagcctgtggagccaactccggtctgtttttatgaatatctgactctttttgtaaataaagttttattggaacactcccacactcgttcatttacatgttgtctatgactgctttcacattattatagaagtgagtnatcgcagcnnaaaccatatgacacncanaggctaaaaaatattggctctctggccncttacngaaaaagtttactggcttgggcatggtcg

SEQ ID NO: 42817 - DNA, 324 bp, Homo sapiens
  misc_feature (1)...(324): n = a,t,c or g
ggagtcgagagccagatactgttgtgagttatttatctttaaaacaactctatcaggtactcttctgttagtaaagatgaagacacagtaacttgtcttnnnnnnnnnnnnnnnnnnnnnnnnnnnnnnnnnnnnnnnnnnnnnnnnnnnnnnnnnnnnnnnnnnnnnnnnnnnnnnnnnnatattgcttcacaatttttttttttttanattttagtatantntttnnttttatatttaaatctttanttggggccaggnctgntaggctnanantngntattctaccnttgttnnangcccaggtggannggattatnttga

SEQ ID NO: 42818 - DNA, 336 bp, Homo sapiens
  misc_feature (1)...(336): n = a,t,c or g
nnnnnnnnnnnnnnnnnnnnnnnnnnnnnnnnnnnnnnnnnnnnnnnnnnnnnnnnnnnnnnnnnnnnnnnnnnnnnnnnnnnnnnnnnnnnnnnnnnnnnnnnnnnnnnnnnnnnnnnnnnnnnnnnnnnnnnnnaatcatctgtttttaaacaatcgtttttgagcagatagctattcattccagattttcgtgtacccattctgtttcaggagctcttctaggtaaagctgagatcacaggaacagcaggtgacaggcctagctatagttaggaatacacaagccgtaaaatcgagtccttacagccataccacaaggtacgtccatttggac

SEQ ID NO: 42819 - DNA, 341 bp, Homo sapiens
ggaaccctgaagtagttgtataaacatagctagtataaatttttacattatatttatacttataaggtaagtatatgcttaaggttaaagctgaggaagcaaacatttggttatagaccaaattataacaaaggtttaatcaccaaaccttttgtcatcaaatttttatttcattgtctatgtttgcttataaaccttcgagcacatttttcagtacttcagatagcacacatcacactaatttttcaagagtttttcattgtatttattgtatggaaaatattggtaggatgcttgtttgaaacttctggattatcacataaacttagacgcattacctg

SEQ ID NO: 42820 - DNA, 334 bp, Homo sapiens
ggggaatataattttatgaggaggaaagtcaagctcaaattggtcaagtggctagcgtatttcccccaggtgaatcagggatgaaacacactgacctggacaagctttgggttacttgggatcttttcagaatatggtcacgggttgaacgaactcaatgctttttgcctttccctgattactttccactgataaataggatgctgagaccgtgaaagctgaaaagatcccactggaaactgagaagtgtgatacttgagaaaaattatggctgctcaagggtttacatttcatgttctgcacaggtttctagaccttatggaaggaaactctg

SEQ ID NO: 42821 - DNA, 258 bp, Homo sapiens
  misc_feature (1)...(258): n = a,t,c or g
gagcacacacccacgcagagactttagctggcaagaagtggcagcttagccaagataatgcgtgaaccagaacttgcctttcctggctggaaggggcttggcattaagtgcagttcttgctcctgcttcctatagatcacttaagtgctccaggctctcttggaacagggggaattctctggtcccctcccagtttctcagggatggcatccaatgatgggagatggtttcagatgcnnngacttgnnnacaagggtg

SEQ ID NO: 42822 - DNA, 337 bp, Homo sapiens
  misc_feature (1)...(337): n = a,t,c or g
gcagcaactgtaggtttttttagacatcccattctcttggttaagaatgaaattgtcagatctagatccatattatcattcacctgtttttactggctgcttacattagagtttttaatcagtccctcctgtgtaaagtgctttgtgtcagggacggttctcagctatttacatgtagtaacttattaagtgttatatcaggctnnnnnnnnnnnnnnnnnnnnnnnnnnnnnnnnnnnnnnnnnnnnnnnnnnnnnnnnnnnnnnnnnnnnnnnnnnnnnnnnnnnnnnnnnnnnnnnnnnnnnnnnnnnnnnnnnnnnnngacagagcnagactt

SEQ ID NO: 42823 - DNA, 328 bp, Homo sapiens
  misc_feature (1)...(328): n = a,t,c or g
gctggtttctctggaggagactggaatgtgggtatgcaatcaacagcttctggactgtcactgtttcactgttttatttcttaaggtgaattattcattattctttatattcttttaaaatgttatataactttatagatcaattaactaatgtttggctccttttattttagagatctccagcattttaggttgcctcatcaatagttgnnnnnnnnnnnnnnnnnnnnnnnnnnnnnnnnnnnnnnnnnnnnnnnnnnnnnnnnnnnnnnnnnnnnnnnnnnnnnnnnnnnnnnnnnnnnnnnnnnnnnnnnnnnnnnnnnnnnng

SEQ ID NO: 42824 - DNA, 335 bp, Homo sapiens
  misc_feature (1)...(335): n = a,t,c or g
gaacggaacagaattaatgaattagaaattgatataacaaaagttctcatggctgatcaacgggaaaaggaaacacacatactannnnnnnnnnnnnnnnnnnnnnnnnnnnnnnnnnnnnnnnnnnnnnnnnnnnnnnnnnnnnnnnnnnnnnnnnnnnnnnnnnntgtgnnnnnnnnnnnnnnnnnnnnnnnnnnnnnnnnnnnnnnnnnnnnnnnnnnnnnnnnnnnnnnnnnnnnnnnnnnnnnnnnnnnnnnnnnnnnnnnnnnnnnnnnnnnnnnnnnnnnnnnnnnnnnnnnnnnnnnnnnnnnnnnnnnnnnnnnnnttttaaatca

SEQ ID NO: 42825 - DNA, 329 bp, Homo sapiens
gttttattgatcaaagagagaatttattcacagagattttcaaatacaaacaaaatagcacttttaaattttttacaaaatgaatatagaaataaatgtggtacagcacagtacaataatggacaaaagaaaacacgatccaatgactggaaaatgtctctcattactctcatatcttcggctgaattctctcctatagtggacagaaagttgccccttttcttcataagaatatcatagcagaagctactcagagaaatattgcatattgtggaataacatggaaatacaaaggcttaactctaaaggtctgcataaacactgaaaat

SEQ ID NO: 42826 - DNA, 328 bp, Homo sapiens
gatttttatatagcaaattcatatcctttggagtagtgacaatcatttcaaactgggagcaactaattgtgaagattttccttcttactcatccattttcttcacatccaaggctgaacgtgtgatgctgctgcttcagatgatttgttccaaagttaaattttgtgacaaaagacatggggaaaaccttcccatcaatatttacattcacaagtatttgcaataagcataaaatagattatagccagactatatgtatagttttcacatttactcccttctagacatacctgtacttatgtacttacaggctgttccaaatgtaatg

SEQ ID NO: 42827 - DNA, 325 bp, Homo sapiens
  misc_feature (1)...(325): n = a,t,c or g
gatcccattttactgtcttttaggtttacatttaccacgtttctcttctctgctccccttgcccactggggactcctctttggctccttgaagtttgctgcttagagttggaagtgcagcaggcaggtgatcatgctgcaagttctttctggacctctggcaaagggagtggtcagtgaaggccatcgttaccttgggatctgccaggctagggtgttttcggtatctgctgttcacagctctccactgtaatccgaanactttgccagngcactaatctctttggagataaaattcattantgcgtnactaaatggtaaatttc

SEQ ID NO: 42828 - DNA, 327 bp, Homo sapiens
  misc_feature (1)...(327): n = a,t,c or g
gaaaacttcagtgtaactgttaaataaatttgtgtctataaatcataacagcatcgatatatatttaagaatggagaagnnnnnnnnnnnnnnnnnnnnnnnnnnnnnnnnnnnnnnnnnnnnnnnnnnnnnnnnnnnnnnnnnnnnnnnnnnnnnnnnnnnnnnnnnnnnnnnnnnnnnnnnnnnnnnnnnnnnnnnnnnnnnnnnnnnnnnnnnnnnnnnnnnnnnnnnnnnnnnnnnnnnnnnnnnnnnnnnnnnnnnnnnnnnnnnnnnnnnnnnnnnnnnnnnnnnnnnnnctgagctnanntnatgccnctgcantccaac

SEQ ID NO: 42829 - DNA, 326 bp, Homo sapiens
  misc_feature (1)...(326): n = a,t,c or g
gaaaacaatgtcaaatgttagttataatgataggcatcttagtatgctatcccaatttaatggaactgttgcagatatttaatggttaactgttggtttgagacctttaatgtgttgagtatattcacctatttcaattttttttctgtttaagtttttttttttttaaaccanatatggttatnatatttcngnnaanngacatnttagcatcttttannatgatcntanacgttnccnccnncntgctacanatnactgacgnannngnatntnntngananatnnccgcnngannntatntngagtncccnttacatcccttc

SEQ ID NO: 42830 - DNA, 318 bp, Homo sapiens
  misc_feature (1)...(318): n = a,t,c or g
ggatggtctactgcctggagcagggcctcatccaccgctgtgccagccagtgcgtcgtggccttgtccatctgcagcgtggagatgcctgacatcatcatcaaggcgctgcctgttctggtggtgaagctcacgcacatctcagccacagccagcatggccgtcccactgctggagttcctgtccagtgagtccccgccctgcctgcgcatgcacccgagaggttcgggctgtgtaacctgtgcgggcttctctggtgccctctctcaggactccttggggaacctgggtgnntngncttctgctgcctnangncctg

SEQ ID NO: 42831 - DNA, 322 bp, Homo sapiens
  misc_feature (1)...(322): n = a,t,c or g
gcacagaaactgcctctgaggatgataactttggaactgcccagtccaacaaggcgatcatcactgccctgggggtagagcggcggaaccgggtgttggcagggctgtacatgggccgctcagacacccagctggtggtgcggcaggcgtccctgcatgtctggaagattgttggctccaataccccccgcaccttgcgtgagatcctacccactctctttgggctcctgctgggtttcctggccagcacgtgngcagataananaangaatgcantnagaacattggcanatcttgggctgaaanttangggagannattc

SEQ ID NO: 42832 - DNA, 139 bp, Homo sapiens
gatcccggcgagttccaagtgtaattgcgtttggacacttaaaaggaattgtgtgaagtgggcagaggctctgaagtccaccgccttatttggtgcttctgtggcctatggttgccctgctgctccctggacgaggggg

SEQ ID NO: 42833 - DNA, 326 bp, Homo sapiens
ggaaggcagctcccagcctgctgggtgaccgccattctgcgtgtgttccccagctgggcagggctggaagccttacgtatgaagcatggagaagcagccattgtccccactatgggcagaggggggacccggctggccccttgggtcagactggagccaacaccgccagccaccccctctggcctgctggcaatgccacaggtgcccaagaagatggaggatccctgtgccaggagccaacctggtcttcccgagggtcagtgccccagtgaagacagaagcgagagaataaagttccctgtaggtcctctgtcacctttgggttg

SEQ ID NO: 42834 - DNA, 332 bp, Homo sapiens
gaattttatggcacagattctatattgcatataatgtctaagtaatggcttccatttaagagacacatagcttcaggcaaaaaaatcagattttttttttaaattgatattataatgaagttccgaataagcactgtcatagacaaaattttatttgtgctacattgttttatgttctatcaagctgataagtctgcaaattttatgcgcagagaaatgttataataagccatatgttttttaagacactacaatttacataaagtaaaagatgctttttttggtaatgggatttggtattcccccaatggctgtgtctaacactttgcatt

SEQ ID NO: 42835 - DNA, 320 bp, Homo sapiens
  misc_feature (1)...(320): n = a,t,c or g
ggtccctcacactagaggcagctggtttttcagaacctgaagaatgagaggtgtccctttaaaggtgccaggcctcacagccaacataagccagtgtttctcttctctgcccttcttcccctcatgctcccctccacccccaccctaggggcacagtaatccaaaatcactgctggaggccaagtacaggttgctagtagcattttgtctccttcacaggagacagctgctgggaagctggctgtgactccacccctcatgggggagcatatgtgtggctnccctgaggagactggntgntctctggcaggnggngggat

SEQ ID NO: 42836 - DNA, 348 bp, Homo sapiens
  misc_feature (1)...(348): n = a,t,c or g
ggtnnnnnnnnnnnnnnnnnnnnnnnnnnnnnnnnnnnnnnnnnnnnnnnnnnnnnnnnnnnnnnnnnnnnnnnnnnnnnnnnnnnnnnnnnnnnnnnnnnnnnnnnnnnnnnnnnnnnnnnnnnnnnnnnnnnnnnnnnnnnnnnnnnnnnnnnnnnnnnnnnnnnnnnnnnnnnnnnnnnnnnnnnnnnnnnnnnnnnnnnnnnnnnnnnnnnnnnnnnnnnnnnnnnnnnnnnnnnnnnnnnttcgtattttggtggagatggagtttngccatgtttgntggccaggctgctcttaaantncataatagggaatatgnattgtatatgnttctncnggnctgtc

SEQ ID NO: 42837 - DNA, 348 bp, Homo sapiens
  misc_feature (1)...(348): n = a,t,c or g
ggatgagagatagagactaaacaaaatattgaacaaaagagatatgaaacaacttgatattagaattataatctgtgataaaggccttaaagaaaaataagatatttctaagagaataatgaagacctactttaaaatggcctaggagtaacccaggcatccaccgacgaatgaatgaataaacaaaattggtgtacccatatgattaggatgtttctcagccttacgaaggaaggaaannnnnnnnnnnnnnnnnnnnnnnnnnnnnnnnnnnnnnnnnnnnnnnnnnnnnnnnnnnnnnnnnnnnnnnnnnnnnnnnnnnnnnnnnnnnnnnnnnnnnnnnnnnnn

SEQ ID NO: 42838 - DNA, 342 bp, Homo sapiens
  misc_feature (1)...(342): n = a,t,c or g
gatttttcagtatcctcacttgttcttaaggttgtttgacccagtttatatcctttttttcccccttaagtagacatgaattgttggtagaagatttctttatagatgactttattatttttnnnnnnnnnnnnnnnnnnnnnnnnnnnnnnnnnnnnnnnnnnnnnnnnnnnnnnnnnnnnnnnnnnnnnnnnnnnnnnnnnnnnnnnnnnnnnnnnnnnnnnnnnnnnnnnnnnnnnnnnnnnnnnnnnnnntttccagctgactttaataacataaccagtctcctaacactcttaatatagttctgctgacctttgatgnctaattgcttcatctgga

SEQ ID NO: 42839 - DNA, 319 bp, Homo sapiens
  misc_feature (1)...(319): n = a,t,c or g
gggccattgaaaacatattgctgacattttgtcatgttattaaaataaaacaaaaattagccttaggtgtttcttagtactctgtaatagtgaacaaaatattaaaatcaagttcttgaaaattgtggaataagcagaatgatgagaggttgaagcaaaaatgtattaaatcagtgaagaggttacaatatgttacgtatttgcatataagtgtttgcctagtttatcttaaagttgattgtaggaagaaaggtacgttncttaatgctgntaaatangantctgnggantgnaatagctannnngtttagnnnatcct

SEQ ID NO: 42840 - DNA, 82 bp, Homo sapiens
ggttgttgcttggcctctcaccggccgtttgataagaactcagctcctggtatgatggctcatttgttaaaaaaaaaaaaaa

SEQ ID NO: 42841 - DNA, 321 bp, Homo sapiens
  misc_feature (1)...(321): n = a,t,c or g
nnnnnnnnnnnnnnnnnnnnnnnnnnnnnnnnnnnnnnnnnnnnnnnnnnnnnnnnnnnacaacgcttgaactcgggaggtggaggttgcantanatccccgattgctcattgcactccnncctgatcttnatagnccgaatttntgtctctnctttagtgganaacaacggcgagctggnttttacacatacgcnttngagnccnaatggngnatgnagntanntgcntncaantngagcttgnnccgnggaatgggcnttcntggccnnagggnnanctntttngntntatagnngnnnccnnncttnnnanngnggtt

SEQ ID NO: 42842 - DNA, 342 bp, Homo sapiens
  misc_feature (1)...(342): n = a,t,c or g
gcggcacgagccttctcctactgcattagcatttggggaccaccctattgtacaaccaaagcaattatcctttaaaattattcaggtaaatgataattaaaatgtttttttctatggcttctaagaaaccattgactaacttactaacaactaagatgtctgtttgttttatatgtagtcataaagcagaattacacatcaagaaagataacttactaaacaaaaacaacagaatttgtaggaaggagtgagaaactgaaacacacaatttactatcagctttttaaacaaccgttaacatgtcagttctgnttactgattctttctgaacttaatttccaa

SEQ ID NO: 42843 - DNA, 322 bp, Homo sapiens
ggccatttatatgtttttcatttactaatatccttttccgtgagcgactctatatgggtaccatttaaataagaagaaaggaatgttctcagcaactccccagggaggcatgtgcaccttctgccagcccagggcaggtcacagagctgggcaggagccagcaaaggtgtaaggcccatgcctggcccaggactcacccagtcttccactctccaaggtcttatttcacttcctggtacacactggccagtacggctgtccccgtaatgggagggttgtactgtttgattttaaataacagtttgctgttagtcatgaagca

SEQ ID NO: 42844 - DNA, 339 bp, Homo sapiens
  misc_feature (1)...(339): n = a,t,c or g
gggcaaatcacttaactcctctctgcctctttacttacctgctaataatgagactcacctgacagctgtgaaagttacatgaactaatatacaagctcctagaatagcattanngngtntgatantaactgnctnataantattaactgctttcacataaacccatcagacctgatctagtgaggatntctcttanattgccttcactgtcnnaagagttcngatntagggagttacagcaattctaaagangntangacttatttatgtgggntggtgataaaganagtgtaccatttactggtttttgtanagctaataccactctacaaantatga

SEQ ID NO: 42845 - DNA, 340 bp, Homo sapiens
gcggcacgagctcggcgtggatggtggctcccccaggggagcagacattgtccttaagctggcatggatgctgctccgagtccagcagcatcttggcagctcccagcaaagcctgggccccgagttggattgccaggcgccgtggcaaacccatcttcaccccaccatcagccaatgcgtccagagccatgaatgcataggcaggcccgctgccactgagccccgtgacggcatcgatgaggtcctcttccacctcagtgcagaagcccacgctgctcatgagctgctccaggagctgcccatcctccaccagggcatgggtgcccgtggcgtacactgg

SEQ ID NO: 42846 - DNA, 332 bp, Homo sapiens
  misc_feature (1)...(332): n = a,t,c or g
gnnnnnnnnnnnnnnnnnnnnnnnnnnnnnnnnnnnnnnnnnnnnnnnnnnnnnnnnnnnnnnnnnnnnnnnnnnnnnnnnnnnnnnnnnnatccccctcctcccaaaaaagagcacctgtgtggtgtctgtctaaaataggaaaacttaaaggaggtttctagaagtattagaaataagaaaacactgatggggggagtggaataaaacacctgattttgatctgtnactggctntagacaataccatactgttgncagnntgtggangcatgccctgtgntnccncactgcnactngactcctgtgttcaccccttatcctacntagggt

SEQ ID NO: 42847 - DNA, 339 bp, Homo sapiens
gccagagacgagagcaggatcaacagtgcagaaacaccgagacaaggggctgcttaagggaaatgctcaggaacagatattgtgtggcttcgggcaactcattctccctctcagggcctcatgtttgaagctagagagaaaggtctggacatctatctcatcattggcatatgtggaggaggcagcctcttgatggtctttgtggcactgctcgttttctatatcaccaaaaggaaaaaacagaggagtcggagaaatgatgaggagctggagacaagagcccacagagtagctactgaagaaaggggccggaagccccaccaaattccagcttcaacc

SEQ ID NO: 42848 - DNA, 339 bp, Homo sapiens
gagcctattcattaaagacaccaccaccagcacagagcagatgctgtcccatggcaccgctgatgtggtcttagaggcctgcacagacttctgggacggagctgacatctaccctctctcgggatctgacagaaagaaagtgctggacttctaccagcgagcctgcctgtctgggtattgctctgccttcgcctacaagcccatgaactgcgccctgtcctctcagctcaatggcaagtgcatcgagctggtacaggtgcccggccaaagcagcatcttcaccatgtgcgagctgccagcaccatccccatcaagcagaacgcccgtcgcagcagctgg

SEQ ID NO: 42849 - DNA, 337 bp, Homo sapiens
  misc_feature (1)...(337): n = a,t,c or g
gccagactatttcaagcactctaatctctaaccatgtcttagctttccagctcactcctccatgaacccccctatcaaattttcagcttaagggacttcaaatccattgatcctatgaacttttcattatatatcactatcttatgtcctgctgtctctcctcaccttatattccatggaccaacaatggaattactcccttgattctctctccctctgtcattcttgccttgttaaatcgaacccttggctgcacttggaataacaganaatggcangacaaaggcnnacnactatgccaactatgatnactgcctttnanccntgcccctgagct

SEQ ID NO: 42850 - DNA, 322 bp, Homo sapiens
  misc_feature (1)...(322): n = a,t,c or g
gctgctaaaggttgtctggtagcacttcgaaaatgttgtacaacagtaagagaaatgaaaatgcttaaataagaatgtggtttttttcttgaatgttgtatttaaatcagcttagttccaagctttttttttatcaagttcttttgctatttccacagaggcatgatatccttccataaagagccgaggctctagatttggacacacctggttttatttctgcctctnacagnttggtcatatttctttcttattgatagagatgacngacagnatttcncaattataatagntaaatgagccaggtgcagtggctcatgcc

SEQ ID NO: 42851 - DNA, 325 bp, Homo sapiens
gcacaatcacactcttactacttcttaaattcactgttgccaaatggtggttcagggaattcatattggactggcctcagctctaacaaggattggaagttgactgatgatacacaacgcactaggacttatgctcaaagctcaaaatgtaacaaggtacataaaacttggtcatggtggacactggagtcagagtcatgtagaagttctcttccctacatctgtgagatgacagctttcaggtttccagattaggacagtcctttgcactgagttgacactcatgccaacaagaacctgtgcccctccttcctaacctgaggcc

SEQ ID NO: 42852 - DNA, 338 bp, Homo sapiens
gactggggcagtgctgatgaatatgaagatagttaatttaagagctacacaagtacaacagaatttctgttccttatcattaaaaagcacatatttaacgcctaactgtccaaggcatatagtcaatgggcaaataaacctttcatcttttgcttttcagaattctcattcaacctaaaaatgcagttctccatggcctaaaactggttctccagaagagcaatttctgatacctctactggggacacagtgagaaccaacacaatctttttaaaataagtgttgttccaaatgatggcttctctttatttccaacatggcacccaagtatctggttt

SEQ ID NO: 42853 - DNA, 352 bp, Homo sapiens
  misc_feature (1)...(352): n = a,t,c or g
gcttaacctggaattttttgtcagaacagtgtgcacattaagttgccagtggtaaagcaacttcacttcttgatacaatcataggcagaaaactatttttccagaggtagaatctcagacataactgtacctgcaagttcagagagagaccttccacctgactatcttctcctgacggctttaccgagttctttctaattcccaagggtcagatctatgcaatatttccacaggaagttgtgggccttctctatacaaagcctgctttgttcattagtggcaggtttattttctgtaattttgccgaagntntctgaacctngctggttanagtcnctactnccntcttttt

SEQ ID NO: 42854 - DNA, 321 bp, Homo sapiens
gccttcttcaaagtccctgagacccgtggcaggacttttgaggatatcacacgggcctttgaagggcaggcacacggtgcagatagatctggaaaggacggcgtcatggggatgaacagcatcgagcctgctaaggagaccaccaccaatgtctaagtcgtgcctccttccacctccctcccggcatgggaaagccacctctccctcaacaagggagagacctcatcaggatgaacccaggacgcttctgaatgctgctacttgatttctttctcatcccacgcactccatgagcaccccaaggctgcagtttgttggatc

SEQ ID NO: 42855 - DNA, 321 bp, Homo sapiens
gcagtaaggtttctattctttctttgtgtgtctatctgtgtatcagggagtatattcaaacttcaggccaccatgttgcctgacctggcttttgctttcctccgggctcctctgtgtctcctgtgtgcatgaacatgcagaggctcagtcagtcaaggatgtgtggaggtgtgggccctgtccagaccctgtagcacgtgcttgcagtgtccgttcaactagtggagtgtggaaagtgtattaagcccccaacttgcagtggaggttatcacttaaattcacagcactccaaatcaattgtcaacaccctcacacacacac

SEQ ID NO: 42856 - DNA, 334 bp, Homo sapiens
ggtgttcacttacttccttttttctgaggttctgaaacaaaaacaaaacgtaggctctgcaacagctgaaggagcttttgaattctttctgaagaggaaattgactttacctaaccaatgcacttcctgtgtatgctatatccgctaaagagcaagacaggacctcagaggcacagtgctcaactgcagaatttcctcttggccattcgaaatgtattacagcgttctgacacaaggtcttcacttattctggtatctgtaatatgtatacaaagcaactgagggcctgttaaaaatacagatttggccgggtgcggtggctcatgcctgtaat

SEQ ID NO: 42857 - DNA, 338 bp, Homo sapiens
  misc_feature (1)...(338): n = a,t,c or g
gctgggtttctttgaggggagacnnnnnnnnnnnnnnnnnnnnnnnnnnnnnnnnnnnnnnnnnnnnnnnnnnnnnnnnnnaaaaacctctttattacttatgaattatgtctctgtaaagctgtttaaaaaagagtannnnnnnnnnnnnnnnnnnnnnnnnnnnnnnnnnnnnnnnnnnnnnnnnnnnnnnnnnnnnnnnnnnnnnnnnnnnnnnnnnnnnnnnnnnnnnnnnnnnnnnnnnnnnnnnnnnnnnnnnnnnnnnnnnnnnnnnnnnnnnnnnnnnnnnnnnnnnnnnnnnnnnnnnnnnnnnnnnnnnnnnnnnnnnnnnnnnnnnn

SEQ ID NO: 42858 - DNA, 286 bp, Homo sapiens
  misc_feature (1)...(286): n = a,t,c or g
gataccctgttttgaaatgtctataatgttcagcaaatggccatttggtaatttttctgtgaacaagttctgtgctcttgaaaagaatttgtattcannnnnnnnnnnnnnnnnnnnnnnnnnnnnnnnnnnnnnnnnnnnnnnnnnnnnnnnnnnnnnnnnnnnnnnnnnnnnnnnnnnnnnnnnnnnnnnnnnnnnnnnnnnnnnnnnnnnnctcagaaaataaaaaaattagctggtgtggcggcgcgcgccggtagtcccagccactggggatggtgaggtg

SEQ ID NO: 42859 - DNA, 317 bp, Homo sapiens
  misc_feature (1)...(317): n = a,t,c or g
gatctgaggcatatggagggtttgtccattcattcatttatacactcatccttttttcattcagcaagtatatactggatgcttcctgtgcaccagtcattgtgtatgagctagagatacagggtgaaggtgatagacaatgaacaagggtgaatttttaatgttactgttacaggaaggggtcccgatcnnnnnnnnnnnnnnnnnnnnnnnnnnnnnnnnnnnnnnnnnnnnnnggacgagtccataaagtgaaagcaaatttattaagaaagtanaggaatagccaggcgcggnggctcatgcctgnaatccca

SEQ ID NO: 42860 - DNA, 323 bp, Homo sapiens
gaagagtgtcgagagaaaaggaaaaaagaagaaaaaaaaaatagacatagaaaggatgctgttctgattttttttattcttgggggaagggaagttaatggattgatatatttttgctcaatcgatttttgcttaaatcggcctttttgactggctagggaaagaaggacaagataaatatgtaccttcccagaaggtcttacacgctgtatacaaagacttatttggagtaactgttcaccaggtatttaattgaaagtgtaagggagtattctgggtgtaaagtaaggatcacagtgagaggttgatttttggggcttgga

SEQ ID NO: 42861 - DNA, 314 bp, Homo sapiens
  misc_feature (1)...(314): n = a,t,c or g
gtaaaatttattctgtatgtagtgcaagatatggattannnnnnnnnnnnnnnnnnnnnnnnnnnnnnnnnnnnnnnnnnnnnnnnnnnnnnnnnnnnnnnnnnnnnnnnnnnnnnnnnnnnnnnnnnnnnnnnnnnnnnnnnnnnnnnnnnnnnnnnnnnnnnnnnnttttttgcatttttagcagaggtgncngnncnatatagattaccttttntgcacntntcntncncctnatttnanggagnatctctntgncctnnnactnccancntccantctngctnganacngcngangntnctccctccccc

SEQ ID NO: 42862 - DNA, 315 bp, Homo sapiens
gatcatatttgcagttttaggttttttgagtgcagaaaacattttagattatagagattatatcagtaaagattattatgtaatgcagtggttccaaacctttctggatggaaaaacagactcttgcctagagtttttcaaatagttgagaaagatgtcctaggaaagcacagaaagaatgtaatgggagagaaggttgagcttttatgcccttgtcttgtcccttttttgagggaagatttgaaagttcgaggcctggccagtttccaactcaagctacgacactgctgatttttctaccaattccagttatta

SEQ ID NO: 42863 - DNA, 315 bp, Homo sapiens
gattatgtttgttacttgtaagtttgtagcagctcttcctgttttcaaacagatgagtttttaaacagataacccagcatgtttcaattttttgtggaataatagatgactcacagtaaagttacaacatattttcttttaagtaaaaaacttaaggaataatgatacttgctttgccattcaagggcctttttttatctgtttactttgtggatcttacacatacaccagatacgagttttggtgagataaggtggttataattatttacttattgtcagcaattgctttgtggcctattcatttgacagtagg

SEQ ID NO: 42864 - DNA, 153 bp, Homo sapiens
  misc_feature (1)...(153): n = a,t,c or g
ggtttatagaaaatttcaatatnnnnnnnnnnnnnnnnnnnnnnnnnnnnnnnnnnnnnnnnnnnnnnnnnnnnnnnnnnnnnnnnnnnnnnnnnnaggagttgtggtcccacctacgcanaaggctgagttangangatngcntnancccca

SEQ ID NO: 42865 - DNA, 332 bp, Homo sapiens
  misc_feature (1)...(332): n = a,t,c or g
gtataaactaaactaaaaaaaatagctaaagccaaactaaaagtagcttgggcttatataatgaagggaaacttcttagataactatgtcttctgagtaaggtttaaaatatttaaaaattattttaaaattatatactttatatatatatatataaaatacacatatatacataccccactagaaacacatgtgaatcatacaaaatcaggtttataatttgcagcagtgtgagacacggcacatcatgtggaatcttgtagcatctcaataagagggcgttaaaaaggacttatgggacttgagtttatgttaggggatttgcanagggg

SEQ ID NO: 42866 - DNA, 338 bp, Homo sapiens
  misc_feature (1)...(338): n = a,t,c or g
gtttaaaattttatttttcaatttttggggatacttggtaggtatatatattgaaatnnnnnnnnnnnnnnnnnnnnnnnnnnnnnnnnnnnnnnnnnnnnnnnnnnnnnnnnnnnnnnnnnnnnnnnnnnnnnnnnnnnnnnnnnnnnnnnnnnnnnnnnnnnnnnnnnnnnnnnnnnnnnnnnnnnnnnatgtacnnnnnnnnnnnnnnnnnnnnnnnnnnnnnnnnnnnaaatggcaattaaccatagtaaatatagagcaaacaatattcataactctatagaagtgtagaagagctatgaagaagttcatgcatgcacctgcaaaaacaactg

SEQ ID NO: 42867 - DNA, 326 bp, Homo sapiens
ggctagatatcaggcaggtccccccaaatttctggtgtacactagagatcagcccagatgtttcttatccggggtgggggtaaagagagggtgaccctaatgatcatgctcaagagtgttatgtttggctgatccagtggttctgactgcctttgttccaggcagtgtgtagcagtttaacagctcctttgaatgtgttagtgaatgaatgagagagtaaaagttggggataaaagcagaaaggtggtggcatgataatactggagaacctgcgtgagcatattaattatatgggtgcagtatgccatgtcaaggcagctgctgac

SEQ ID NO: 42868 - DNA, 318 bp, Homo sapiens
  misc_feature (1)...(318): n = a,t,c or g
nnnnnnnnnnnnnnnnnnnnnnnnnnnnnnnnnnnnnnnnnnnnnnnnnnnnnnnnnnnnnnnnnnnnnnnnnnnnnnnnnnnnnnnnnnnnnnnnnnnnnnnnnnnnnnnnnnnnnnnnnnnnnncttttctttttttctttctttttttttttngaaanntctttaatttggtttaagggnangttaaatgnntcgttcacaaaattnttntcnttnncctntantgatnttcattccgantttgataanntnnntncttttactntnanccntnttntcctnntgnanatagtntattntccnnagtgtnnggtc

SEQ ID NO: 42869 - DNA, 314 bp, Homo sapiens
  misc_feature (1)...(314): n = a,t,c or g
gaactactccagcagtagctcccatgaattgagtatgtgatgtgcacaaagccgaggctgacaatatcaacacatttaagattcattataaaccagaaggaggaaatcccaccccatttcacagcagagagaacaaccgagagagattaaatgatgagctgctgtcacatagccagtcagcagtcttgcaagaattgttgctgactccaaagcttgtgctctttcccagcccaagaacttgggggctctgncaggaaagttgncctcccttgtgtgtcttcnggngtggggananntatgntcnnantgtggca

SEQ ID NO: 42870 - DNA, 336 bp, Homo sapiens
ggtggttccagtctggttgcagaatctgcacatttgccaagaaattttccctgtttggaaagtttgccccagctttcccgggcacaccaccttttgtcccaagtgtctgccggtcgaccaatctgcctgccacacattgaccaagccagacccggttcacccagctcgaggatcccaggttgaagagtggccccttgaggccctggaaagaccaatcactggacttcttcccttgagagtcagaggtcacccgtgattctgcctgcaccttatcattgatctgcagtgatttctgcaaatcaagagaaactgcagggcactcccctgtttcctaag

SEQ ID NO: 42871 - DNA, 330 bp, Homo sapiens
  misc_feature (1)...(330): n = a,t,c or g
gtggaagaattctcttgggtcacctgtaaaataaactaattataaatgatgagctaaaaannnnnnnnnnnnnnnnnnnnnnnnnnnnnnnnnnnnnnnnnnnnnnnacgggttggacaagcttgctttaaagcttgattatccttggctaacctgtcttaattgcctcttcatgaaaatattttgcttcttggactgctaaaccgtatgccatgactaaacttctgctgccttctttgttccaccaataatacccctactctgagacttgcaaataactattctcttcataanaattctctcctcagtcgggcgcagtggctcactttg

SEQ ID NO: 42872 - DNA, 327 bp, Homo sapiens
  misc_feature (1)...(327): n = a,t,c or g
gcggcacgagtatattgatcacctcaccagcttatcattatattctttctcgtacaatcgaatgaagataaagtgtttnnnnnnnnnnnnnnnnnnnnnnnnnnnnnnnnnnnnnnnnnnnnnnnnnnnnnnnnnnnnnnnnnnnnnnnnnnnnnnnnnnnnnnnnnnnnnnnnnnnnnnnnnnnnnnnnnnnnnnnnnnnnnnnnnnnnnnnnnnnnnnnnnnnnnnnnnnnnnnnnnnnnnnnnnnnnnnnnnnnnnnnnnnnnnnnnnnnnnnnnnnnnnnnnnnnnnnnnnnnnnnnnnnnnnnnnnnnnnnnnnnnnnaggg

SEQ ID NO: 42873 - DNA, 333 bp, Homo sapiens
  misc_feature (1)...(333): n = a,t,c or g
ggttataaattgcccaatctcaggtattttgttatggcagcacaaatggactaagaaacctaaattccaaatctcatcatgcccttaaggtccctccttactaagaacaacccaagcctaaactgacttccttcagaactcctagggtaaatatacacaattattttgggaatcannnnnnnnnnnnnnnnnnnnnnnnnnnnnnnnnnnnnnnnnnnnnnnnnnnnnnnnnnnnnnnnnnnnnnnnnnnnnnnnnnnnnnnnnnnnnnnnnnnnnnnnnnnnnnnnnnnnnnnnnnnnnnnnnnnnnnnnnnnnnnnnnnnnnnnnnnnnnn

SEQ ID NO: 42874 - DNA, 326 bp, Homo sapiens
gggaatgagccactgcgcccggcctccaatctgtgtttttatgacaaaggcatggattggccatgagcaatgggcagccctggggtggcaggctgtgaatgagggggaaggggctgcctcgaggggttcggtcccctcctcaggagctaacacacagcctgagacctgaaggatgagaaggagccggccacaccagggtctggaggaagccactctgcgcattggccgtggcccacgcaaaggctgcgggaagcaacatcctgccttgcttccggtcggcttcaggcctgtgaggctgggaagggccagtcgtggaggatggaggg

SEQ ID NO: 42875 - DNA, 335 bp, Homo sapiens
  misc_feature (1)...(335): n = a,t,c or g
ggcacagagacatacataaacatatgcatatacatgcccacatacaaacacatgtatatactcccttacctgcacatataaacagatccaggccctccctagctcagcagcacatacatacacacacactcaggctaatgggctagatgtacactcagtgccagacacagacccactgtagatgttacctggcactctcagggtgagttgctggtggcagttggctggtaaatgtccttcaggctggccagatctacaaaggaagagttgggggtggggtgcaatagcattccttggggncctgaggcactgggttatgagaagctgggctggca

SEQ ID NO: 42876 - DNA, 346 bp, Homo sapiens
  misc_feature (1)...(346): n = a,t,c or g
ggaaaaatctgaacttgaacagtagttaaaatagtacagttattccttacaatccatgggtgattggttccaggactcaacctcctgcccatnnnnnnnnnnnnnnnnnnnnnnnnnnnnnnnnnnnnnnnnnnnnnnnnnnnnnnnnnnnnggatgacttgtaatacctactgcaatatcctgtgtagatggtggtcatgctgtattatttagagaatcatgacaggaatctgtacgtgttcagtcgtggttggttaaatctgcagatgcagagctcacggaggaggctggccatgcatggcacacattcataggttctctttaagtaccttgctgtgcttctgt

SEQ ID NO: 42877 - DNA, 349 bp, Homo sapiens
  misc_feature (1)...(349): n = a,t,c or g
gaactggactcagctaaccacaaagtaagccctgaagcaagagaccacaccaggagaagagagcacaactgaacagcagagaggatcaaatgtcctttcacagtagccagagctggccccaagctatgcaggcactttcctcctccgagggccatggatggagaggaagctccacttgtttgagaaactgcacgcagagaaggtacctagatcctggggtcctctcaggtgctctgcccaaagtcaggatcttcccatcttcccgtggtgactatggaaataaacagaatatgaacatnnnnnnnnnnnnnnnnnnnnnnnnnnnnnnnnnnnnnnnnnnnnnnnnnnn

SEQ ID NO: 42878 - DNA, 347 bp, Homo sapiens
ggagaagaggtctggagagcagggcaagaagaagcacgtttgccacatccccgactgtggcaagacgttccgtaagacgtccttgctgcgtgcccatgtgcgcctgcacactggcgagcggccctttgtctgcaactggttcttctgtgggaagaggttcacacggagtgacgagctccaacggcatgctcgcacccacacaggggacaaacgcttcgagtgcgcccagtgtcagaagcgcttcatgaggagtgaccacctcaccaagcattacaagacccacctggtcacgaagaacttttgcctgaggcaaaatcttcaacttgcagttcggcttcctttgcttt

SEQ ID NO: 42879 - DNA, 335 bp, Homo sapiens
  misc_feature (1)...(335): n = a,t,c or g
gggctgcttttgatctaggttcatctccccaggccatccttagttggtgttcacgctnacnnnnnccntgaggtgcccttcctccccagntccattcacnngnntncnattagnggcnctgctagaactgcctggnactcntgnanncnnncanattggcgtngaaaggatgcctangtcccccanntnncnngnagntgacacatncttnganncncnccacggtactgannctanacnncttcnncntgtgagaagatgtatcagcnantatacngacagncttcaaantgggacaannnanttgcaanctatncatncgcntngggcnaata

SEQ ID NO: 42880 - DNA, 338 bp, Homo sapiens
  misc_feature (1)...(338): n = a,t,c or g
gcggcacgagaactggaagtcactgttatctactaacatggacattttagaaatgttaaaaaatgtattgattcattgtcaagaatgctttaattgcaatcagcagtgacttaaacatttacaaagactgctttcaagtttatcagtattgactataatatactaacttataatcttaaatgtggatctgtgtatatctgcatgtatatatgaagttcgggagaacatatgagtttatgtagaaatgccatgctccaggtatctaattctgcaggttatttctgnttntttttttncattancccttacacagggttttngcttcaaaantctttttg

SEQ ID NO: 42881 - DNA, 326 bp, Homo sapiens
gaggacagcttttgctggggattgagagcaccagatggtcaccagtgatggtcacctgcagcggcaagggtgcactggtcacagttgctggttgcagggccctggtcttcttcctgccagctctgtcctctcggccatgtgcactcaacccaaaagaacccattctgcctctgtgtctggccccagaatatgatgtctacacctcctgcctggtgtccctatacaacagattcttgactgtgggcactaaggcggctgctcatcaactctccgtcagccaaagaggggcttcaattcagtggattttaacccaaccatgccactca

SEQ ID NO: 42882 - DNA, 334 bp, Homo sapiens
  misc_feature (1)...(334): n = a,t,c or g
gtatctttatcttatttgatttttgtgtccttcattcttgaaatagttttttttaaaaaaaattctaggctatcacattgttataaatttttacttttgttttaatctttttttaacctcagtttttgnnnnnnnnnnnnnnnnnnnnnnnnnnnnnnnnnnnnnnnnnnnnnnnnnnnnnnnnnnnnnnnnnnnnnnnnnnnnnnnnnnnnnnnnnnnnnnnnnnnnnnnnnnnnnnnnnnntannanaanaaaaanangagagggntanangnggnggctcacgcatattaatcccagcactttcggaggccaaggngcatggacngcttga

SEQ ID NO: 42883 - DNA, 327 bp, Homo sapiens
gggcctttgtaagtggccagactagaatttctgtccaactccagaactttttaacactatatatgatctccataaattcacatttacctgactttgacattgtcttctgagtttaaatttctctcagttgttattcagtttccctgattctttggcctttatcctacacgatatgcctaacaaaaggctcaaactagaccctagctcaggagctttgagcatagcccacgaaaattaatagtctctttgtagcgtgattaatgacaggtcatctttggcactttggggcccagttgtggcagtgagtggggctgaagtccagcctgc

SEQ ID NO: 42884 - DNA, 322 bp, Homo sapiens
gatccttttgaatgacttttcagacactagacataaatctcttccctccagtgatgctctgcctttttaaccactgacatgtaaggaggactactgtctagcatcagcttatggggtcagctggctgtggggatagagtcctgaggaatgtggtcacagcaagaaggcggggagcagcagagccttgcctttgaatgaggcagcttgtgaggcaagcattctggagagaggtgctttgaaagtaaggtgcggcctttcacctcttccttgattactcacacatctttgcgttctcccctgccgccttcaactgtatcttact

SEQ ID NO: 42885 - DNA, 316 bp, Homo sapiens
ggtggtagactaacaatgcttgaaaatttgttgctacttcttccatttggagatggagtttaactccactcctcttgaatttgggttggctttagtgacacgactaacaggatgtggcagaagtgattttctgagactgatgttggctcagaacaagccttagagcagcatcagcttcttcccagacctttcggaacccagctctctggaagctctgagccaccatgaacaaagtctgactatcccaagaccactggaaaaggcatggacaaggggtctagccaagaatctcacttgaactcagtcttcaacccat

SEQ ID NO: 42886 - DNA, 306 bp, Homo sapiens
gggctcggcgtggaatggggtgatgagtgagcaagtggcttggggtaggcttagggaaacccagggcatctttgattgtgagtaaagatgaccaggaagacctcatacaagagatacctaacacacactctggcccatctaaattagaggctgataactcctcaggtggaagtaccctgaggcaatcatatagtcaacagagagtaagaactctgatacacaatacaatcttgagagttcatgcaaatagtgtgagtgcctacatgggaagcctgtgtggaggggggcaagggacctggggcggaa

SEQ ID NO: 42887 - DNA, 320 bp, Homo sapiens
ggttttgttcttaattgtattttaggttatttttgactgacttaaattctatcactattttaatatttgttaggtccgaataaaccatttacaagattttttcagtgtacaaaatgtgctgtaatttaataaggccccttgcttttaaaatttggcttaacctgtgaagcacaactgcttcagagttacagagaaacataccagttggtccactggatgagccctgtggttctacctcaggtaacctagtgataagctagctcagcagggagtgcttcaaggactccagctgatcctagtgctgagaccaaaacttcctg

SEQ ID NO: 42888 - DNA, 309 bp, Homo sapiens
gatgaataaatgaagtagcctggcaatctaaggttcaagagtgccaggctatttattcttactgatagagctagtaaactcctcgagggagcctctgccccttattgtccagtagaacagattctctgggtgaatgagcccaaaggtcaaacagatcaagcattttcaagaaaagataacccaataacctgaatcatagcaggaaccacgaggtacttcacttatattatctcatttaatcttcatggtaatcttgccaggagggtaatcatttgaagcaagaacaggtttaagatttcttaaaagacc

SEQ ID NO: 42889 - DNA, 330 bp, Homo sapiens
  misc_feature (1)...(330): n = a,t,c or g
gtttttttttcctttctcccttcacacgcttccctttttgttctggtgcaatataccaccaatatgctccatctatggctatagaaatttagaaatcatcctctgaatctaggacatacaaggatcaaaggataaattaaaagagggactaaagaccacagttgaggaggaaagacaactgggttgaggaggctctggagactgataggataaatacaagtgcagctgcgctggagtggtgaggttgagagtagttggagcaggagctgncccaacttcaccagggacgntgcctncatntagcctnctncgncccctanacccgactcc

SEQ ID NO: 42890 - DNA, 334 bp, Homo sapiens
gcatggaatgaatgaacatatctgtatgaacatgaatgaatgatccagctatgaaaacaactatggatgaatgaacatggctgtatgaacatgaatgaatgatcccactatgaaaacaactatggatgaatgaacatggccgtatgaacatgaatgaacgagctatgaaaactactatggatgaatggacatggctgtatgaacatgaatgaaagatccagctatgaaaacagctatggataaatggacacggctatatgaacatgaatgaatgatccagctatgaaaacagctatgaatgaatggacatggccgtatgaaaatgaatgatccc

SEQ ID NO: 42891 - DNA, 333 bp, Homo sapiens
  misc_feature (1)...(333): n = a,t,c or g
gtatcattctttttctttactgagttgtattccagagatcagtgggctttcnnnnnnnnnnnnnnnnnnnnnnnnnnnnnnnnnnnnnnnnnnnnnnnnnnnnnnnnnnnnnnnnnnnnnnnnnnnnnnnnnnnnnnnnnnnnnnnnnnnnnnnnnnnnnnnnnnnnnnnnnnnnnnnnnnnnnnnnnnnnnnnnnnnnnnnnnnnnnnnnnnnnnnnnnnnnnnnnnncangaatcnnaagccnaannnaggcngcnccatgtcngncaggctnngntngaactcnngaactcctgacntcacgggatccngccngccntgggctcccaaag

SEQ ID NO: 42892 - DNA, 329 bp, Homo sapiens
gccagggcatgctggcttcccctggggctgactcaggtcccgccctcttgtgtcagtgctaacaaggatcagattcgtccctgcccttctgtagagctggagggtgacctggagccaggggccctttagggctgagacatttgttagtcggagtgatgcatccctacccggcttcggggggagtcaggctgggctctgggcagtacagggagaggttcaccaggacccccatgccttcctcccccggtgcaggggcagtggtcaccatgctgactcctccctttgactccatgcacgggcgctggctggcctgtggttgcatttcccac

SEQ ID NO: 42893 - DNA, 330 bp, Homo sapiens
  misc_feature (1)...(330): n = a,t,c or g
gtttcagtagatgtcgggacatttcgatttttaagactggagataaagtgagagataggtaagtatgtagagatttttttttttttnganagggngttccgctctgncccccanacnggngngcgagggcccanncncannnnnnnnnnnnnnnnnnnnnnnnnnnnnnnnnnnnnnnnnnnnnnnnnnnnnnnnnnnnnnnnnnnnnnnnnnnnnnnnnnnnnnnnnnnnnnnnnnnnnnnnnnnnnnnnnnnnnnnnnnnnnnnnnnnnnnnnnnnnnnnnnnnnnnnnnnnnnnnnnnnnnnnnnnnnnnnnnnnnnnnnnnnnnnc

SEQ ID NO: 42894 - DNA, 346 bp, Homo sapiens
  misc_feature (1)...(346): n = a,t,c or g
gggaagatgacagaacaacagtgttaaatggccatttgcacaggcctttgccacaacagagaagtagtttggtcagctaaaactcagctgcagcctggacagtagagcgagaccccatcttaaaaatnnnnnnnnnnnnnnnnnnnnnnnnnnnnnnnnnnnnnnnnnnnnnnnnnnnnnnnnnnnnnnnnnnnnnnnnnnnnnnnnnnnnnnnnnnnnnnnnnnnnnnnnnnnnnnnnnnnnnnnnnnnnnnnnnnnnnnnnnnnnnnnnnnnnnnnnnnnnnnnnnnnnnnnnnnnnnnnnnnnnnnnnnnnnnnnnnnnnnnnnnnnnnnnnnnnnnnnnnnn

SEQ ID NO: 42895 - DNA, 360 bp, Homo sapiens
ggagaagtcgagtgtggcctaagggtggggctccagagccagcttctttaggtccaaatccttgttctaccaccttttgggaataattgtgtaaacttttctgtgattcagttgttctgtctataaaatgggaattaaaacagtacctaccttaaagagttattgtgaaatttaaatgtattaatgcatacaaagttcttaaaatggaacctcaggccaccagggaatatcagctatgctgttagcttctagccttattatctcttcagggtcattcaacctgtcatcaagcctgggtactcccttattgaaaatgtctctcttttcctttcttttcactcctactgccacccctccccg

SEQ ID NO: 42896 - DNA, 360 bp, Homo sapiens
gggtaaacaaatatgtatggaatacagagacctgacaagggggacataagccaccaagatagaaaaataacagcctctcaaagttcgcagaccctctagaataaaggcagtaaggcaaggtatcctttagacaaagctctataattacatcacaagtactgtgatttccctcttggctttccacaaagatcaacagccccttactaaggtaaccatgtacttgaaaagtgaaacacccagacctttctgggactataaaagctaactcttaaatctctaaaagacccagatagcaccaatgtggcacatttgtcagaaagaggaatgacagtggtcaaataataaagttttggcaaaagt

SEQ ID NO: 42897 - DNA, 344 bp, Homo sapiens
gaactactcccaggagtgtggcagctttctcctggctgagagcatcaagccggctccccctttcaacgtgactgtgaccttctcaggacagtataatatctcctggcgctcagattacgaagaccctgccttctacatgctgaagggcaagcttcagtatgagctgcagtacaggaaccggggagacccctgggctgtgagtccgaggagaaagctgatctcagtggactcaagaagtgtctccctcctccccctggagttccgcaaagactcgagctatgagctgcaggtgcgggcagggcccatgcctggctcctcctaccaggggacctggagtgaatgga

SEQ ID NO: 42898 - DNA, 145 bp, Homo sapiens
  misc_feature (1)...(145): n = a,t,c or g
gtgtgatttacattgaagccaacagtggggccgtgaaggtaatgccttccttgggacacagcattgtccctgatttgtttgccatgagaagacctaagtgacaagggagttgctttcttcagagggtgtggggtgtgtggngagg

SEQ ID NO: 42899 - DNA, 247 bp, Homo sapiens
  misc_feature (1)...(247): n = a,t,c or g
gnnnnnnnnnnnnnnnnnnnnnnnnnnnnnnnnnnnnnnnnnnnnnnnnnnnnnnnnnnnnnnnnnnnnnnnnnnnnnnnnnnnnnnnnnnnnnnnnnnnnnnnnnnnnnnnnnnnnnnnnnnnnnnnnnnnggaacccctggatttcaaggcgtgggggtaatatctgggcctagggtttagttctggtaagtatctgggcttagggtttagntnattancattgctangnnccaancnngtgcac

SEQ ID NO: 42900 - DNA, 341 bp, Homo sapiens
  misc_feature (1)...(341): n = a,t,c or g
gnnnnnnnnnnnnnnnnnnnnnnnnnnnnnnnnnnnnnnnnnnnnnnnnnnntgnnnnnnnnnnnnnnnnnnnnnnnnnnnnnnnnnnnnnnnnnnnnnnnnnnnnnnnnnnnnnnnnnnnnnnnnnnnnnnnnnnnnnnnnnnnnnnnnnnnnnnnnnnnnnnnnnnnnnnnnnnnnnnnnnnnnnnnnnnatatgtgtctgcgtccaaatttccccttatcaggacaccagtcnnnnnnnnnnnnnnnnnnnnnnnnnnnnnnnnnnnnnnnnnnnnnnnnnnnnnnaatcgagtctctaaaaacgtcacattttgaggtactggggagtaaaacttca

SEQ ID NO: 42901 - DNA, 212 bp, Homo sapiens
  misc_feature (1)...(212): n = a,t,c or g
gagaaatatccagaattaaaacacgagtctnnnnnnnnnnnnnnnnnnnnnnnnnnnnnnnnnnnnnnnnnnnnntttttttagttagccaggcatggtagcacgtgcctagtctcagttattggggaggctgaggtgggtggatcccttgacctgagcccangaggttgaggctncngngnnntatgatnacnccnntgnctncnnnctgg

SEQ ID NO: 42902 - DNA, 289 bp, Homo sapiens
  misc_feature (1)...(289): n = a,t,c or g
gatagggctcggcgtggttgttctgagcatgtttaaggtaggctaggctaagctatgatgttccataggttagatatattaaatgccttttccatttatattttcaacttacaatgagtttatcaggacataatcccttcgtaaatcaaggagcatctgtactaataattcactattttatgctttgcaggtgtcttttcaaagtctgtggcttgtatnttgatgnanntcannaggnnnnntgcnntncnaaattnnnanntgnncaannntatannnnntnnntctt

SEQ ID NO: 42903 - DNA, 341 bp, Homo sapiens
gcgaccttatagaaggttccatccaggctgagaaacagtgggctcatttcagagaggaagaaggttgtccaaattcactaattttaaatcttggccccagaacactcttcttgtcccagtgggtaggagagtttaccagagccatagatgacagctctcacttctagtttgaagaacagttacttgtgttcacacttctgctgtccctgccaaaccccaccctcgtctctacccctcacacgagccacacacatcttctcccttctgagtctgttctgacctcttcccaagacagttgaagtcaggtgtggcccatgggagagtactgagtttctgcagat

SEQ ID NO: 42904 - DNA, 342 bp, Homo sapiens
  misc_feature (1)...(342): n = a,t,c or g
gagaatttagaactgtagactatttgagcttctgcttacagttagggtggctgaggtgnnnnnnnnnnnnnnnnnnnnnnnnnnnnnnnnnnnnnnnnnnnnnnnnnnnnnnnnnnnnnnnnnnnnnnnnnnnnnnnnnaaccccatttctaaaaaagagaaagaaaaagggatnnnnnnnnnnnnnnnnnnnnnnnnnnnnnnnnnnnnnnnnnnnnnnnnnnnnnnnnnnnnnnnnnnnnnnnnnnnnnnnnnnnnnnnnnnnnnnnnnnnnnnnnnnnnnnnnnnnnnnnnnnnnnnnnnnnnnnnnnnnnnnnnnnnnnnnnnnnnnnnnnnnnnnnn

SEQ ID NO: 42905 - DNA, 326 bp, Homo sapiens
  misc_feature (1)...(326): n = a,t,c or g
gggcttaagacacagaaatttatttctcatgagtttggaaagtgggaaatccaagagcaaggtgccagccacattggttcctggtgagagccttcctcatggtttagcccagccatcttcctgccatgtcctgacatggtggaaacaggaacaggcaacgagctctttaatgtctctttttatgaaagcacaagncctattncnagtantcaacacccgtgaccgnantgtctnanaggccccatctgcannaacatnctattgnannattgaactctgnntatgncgtntntccactnannacnttcnnaccnnnnctnnatgct

SEQ ID NO: 42906 - DNA, 342 bp, Homo sapiens
gagaggtggtgtgaagcctctacctcaccgtcctggtgtatgccacatacttccctttaagaatcctactgccttcttcctgttggccactcttactcattcttcctcctgccagacctcccccgacccccactgccattccattcttcacatagaagctagcatgaacttctaggatacaaagaagatcatgtaattctcccagtcagaacactgcactatgaattacattgtgtctggaatttgtgtcagaataacctgtggttctccccctccctcacccctccacagagtaagtccgcaagtccccttgatgctaaaccccaaatatctctcgagtca

SEQ ID NO: 42907 - DNA, 350 bp, Homo sapiens
gaacggggggagaaacaaagaataaagagcagattggttttttaaagttcctttccttgtatatcaggaaaaggaaaacagaataacagaagaataactggttaacttcaggttactttttgttgtcaagattaaaacagagggagcttcattaccatactggttggaaatttaaactggcctgtttggaagttggctctctttctctcccaatttcttggaaggtgaattaacaagttagttttggtttgatgacatagaacttcagcacgagtgacttcattttgattgttagtctggtctgttggggcctagttcaggagcttagtccaatggcttgtaatttttat

SEQ ID NO: 42908 - DNA, 339 bp, Homo sapiens
  misc_feature (1)...(339): n = a,t,c or g
ggagacaatgaacagggaaatcaataaataatgtnnnnnnnnnnnnnnnnnnnnnnnnnnnnnnnnnnnnnnnnnnnnnnnnnnnnnnnnnnnnnnnnnnnnnnnnnnnnnnnnnnnnnnnnnnnnnnnnnnnnnnnnnnnnnnnnnnnnnnnnnnnnnnnnnnnnnnnnnnnnnnnnnnnnnnnnnnnnnnnnnnnnnnnnnnnnnnnnnnnnnnnnnnnnnnnnnnnnnnnnnnnnnnnnnnnnnnnnnnnangcttcantnggcctnnctgactcctntgatcntatnnntngacngcacagcctgantgncttgntgaaaggngnannattctgc

SEQ ID NO: 42909 - DNA, 337 bp, Homo sapiens
  misc_feature (1)...(337): n = a,t,c or g
gggctcatggactgtcaggagtgaaagccagtggtttctattgccttccttttttttttttaaatnagtngaccccantanctanttaaaaaaaggctgggnnnnncccagngggggggntnaccccnggggccnnancnntngnagncgnagggggncgnatccgaaggncgggggttnaaaaccanccngnccaanggggaanccccntntttnctaaaantncaaaanttacccnggcgtgggggcncacnccngnantccaanctantcggnagggtnaggcagggnaancnnttnancctggnaggcaaaaatngcannnagccgncccccc

SEQ ID NO: 42910 - DNA, 351 bp, Homo sapiens
gaaaaaagtggtggggagcggcagcctggctgccactggtgcgtctggcctggaatgaccacttggggagctgggtggactctgggacagcggccgctgggacccgggcttccctggtggcaggtgtgccgaggaaaacacacagcatgtggttcagtaataacaaacagcattttcatatgacatctgtgttcatatgaccactttattataatggcatagcataacagcatttaaggaaatcagcctgacggctctatgtatgggtaaatctgaaacacaatgttggcagaattgcagaatgcgagccatataatattttgctgtggttcagacgcacacaaaaacaat

SEQ ID NO: 42911 - DNA, 352 bp, Homo sapiens
  misc_feature (1)...(352): n = a,t,c or g
ggttgaaggagctggagatagtctgaagaatggaaaactaagaagaggaccagggcacaaaccagcaaagtcttttatgctcatcagttcttttattacagaataggatgctaatcactaaagtagagataagattaactgcaattgttagttgtctgggtggtagtaattattgaaggattaagaccttaggtggtttttactccaaagagcattacttaacttccaaaatgacatatgttttgaggagctcctgtcagatagacagtttcccattaatcataggtcttaagttctagtcttcctttaacaagttggccantaggaaattcctgtgcccagagataaactt

SEQ ID NO: 42912 - DNA, 135 bp, Homo sapiens
  misc_feature (1)...(135): n = a,t,c or g
gatccttacctagggtttcactctatgggcaagcccctcccactttcatggcatgcccagcctgagaactgctgggggaagaagaaaggaggcagacatagctgaggngcnggacagggcattanatgctgatgg

SEQ ID NO: 42913 - DNA, 87 bp, Homo sapiens
  misc_feature (1)...(87): n = a,t,c or g
gatggtattttctcctttgtactagagtctgtatttaatgcagaataatgtgggcttcctgattctcagcntccctgcctttattgg

SEQ ID NO: 42914 - DNA, 128 bp, Homo sapiens
  misc_feature (1)...(128): n = a,t,c or g
gggaaagagagcatggtaaatgctggcccttaaaacttctaccagactgggaagatgatggttaggtngcnnnctgnnacccntnactattgcatanttgnncangccancnncnnnggnnnnngctt

SEQ ID NO: 42915 - DNA, 341 bp, Homo sapiens
  misc_feature (1)...(341): n = a,t,c or g
gcggcacgagccaagatcttttgttttcaaacatcttaactctggtgagtacagactgtggcttcattgctggatcttcctcttcttcggtttgagttgggggtggaggcagtggtttggtgtttgaaggcagagcttctggcttatgctgagatgaaggtatcagcggagggacagctgcagcaccatggagaggctcaaaatgacctgctctagaggtaaatccttggggtggtacttgctcgtaactgcgtgaatattgctcaaaatactgcttggactctgcangcttgggccctgctgaanggnggngctggncttntggaaccgnngangntatc

SEQ ID NO: 42916 - DNA, 237 bp, Homo sapiens
  misc_feature (1)...(237): n = a,t,c or g
ggaggctgttagtttttgagattcggtttgcttcttaggacgtacacaaaagtgttcattatttcattcattaagtgttgtanaaattatagaaaaggcgcntggnnttncngncntgantcactgcnctggcccnttaaaaatanttttattccattttcntattggaatattnnannnntntanncnnnnntactcnnatcntactacccagggattgtnactatnanngccttg

SEQ ID NO: 42917 - DNA, 333 bp, Homo sapiens
  misc_feature (1)...(333): n = a,t,c or g
gctggaagaatttagactgtgacctaatctaaccatattgcctaaggaccttgaacctcataacctccgtcattaacattctcaacaccattaaagatgtaattagaatatctcctttaatttggaaaactacatgaacttcttaattttaaccacctcccctttatctgcatgagctcaaattatttgctggcaaaatgtatttaatttttttttctgtcaagcccttatgaatttaattgattaagctctgcactgccacaactgatataggcatatattggatatttgagaggctccctattagttaatanntcagngntnnnnntatgg

SEQ ID NO: 42918 - DNA, 328 bp, Homo sapiens
  misc_feature (1)...(328): n = a,t,c or g
gcggcacgagaagacggtttgtttggatggatgacctgtggaaggactaaatccacctggtggaaggttcaggatgacaaccccatggacatccaggtagaaatgaaatgaccactgggcatcagcatgagagggagggccatgaagtttaaatttgagaggaggagaaggattggacaatcaaggttgtaaaggtagcttgaggccagtttggacttcattccatatcttgctctattctacaaggagtcagatttgcctatgaatgtacttatgtancatggancancnaaatanatgngatttnctatccntnnnnntnnnattt

SEQ ID NO: 42919 - DNA, 195 bp, Homo sapiens
  misc_feature (1)...(195): n = a,t,c or g
gctgacttatgtcccttcccttgcaggtagaatgtctttctgtgagcctcctctttggtgatggtgttctttcaacatatctcatatttgaatgtttacactgtaatgtgatagcccaattaagagtggagatgctgcacataaggcaccgtatgataagngcanaananaanccnanangctttganctcccaa

SEQ ID NO: 42920 - DNA, 313 bp, Homo sapiens
  misc_feature (1)...(313): n = a,t,c or g
ggataattgatcatacaaaaaaataaaagtacatttaggaacaacagtgtgtcttgactgtcctccatagtacagttataaatctgggcaaacatgtaaaggaggaagacacggtccctgatctgccgaaggagtacagatactggtgggagtagaatggggacatcttttaagctgaagaggtcaggaaaggcttaaccaagcagtgggtctgagctgagccttggagactggagtgaggatganaattgntggtaagacaagggcagnnnttatagattccattttgaatannngncnncttgcnnacccc

SEQ ID NO: 42921 - DNA, 332 bp, Homo sapiens
  misc_feature (1)...(332): n = a,t,c or g
gttcatggattagaagactcagtattaagatacctactcttctcaaactgatttatagattcagcacatttctagtccaaatctcagaggatttcttatagaaattaatgagccgantctaaaattaatatgganaaccaaaggacctacanaagctanaacagttnctgaatncgattggcanccnngcaagantctnnntcccagntannaccntggnccnctngtgnnntagccaanactgngnntacttnggccccncgcntntgnnnncnaantttccgaggtnntttnctnaancnggtnccatcggatttcnctggnggcnttta

SEQ ID NO: 42922 - DNA, 322 bp, Homo sapiens
  misc_feature (1)...(322): n = a,t,c or g
gnnnnnnnnnnnnnnnnnnnnnnnnnnnnnnnnnnnnnnnnnnnnnnnnnnnnnnnnnnnacgcnnnnnnnnnnnnnnnnnnnnnnnnnnnnnnnnnnnnnnnnnnnnnnnnnnnnnnnnnnnnnnnnnnnnnnnnnnnnnnnnnnnnnnnnnnnnnnnnnnnnnnnnnnnnnnnnnnnnnnnnnnnnnnnnnnnnnnnnnnnnnnnnnnnnnngtgcatattcttattttactttgtcctactctggtttgtaggtcaatattccaatgttcattttcctgaagttggttaccatctgcattcactggtggcatttattcc

SEQ ID NO: 42923 - DNA, 339 bp, Homo sapiens
gaactggaagaattccaaagggtacataactcgaattaccctctaagggttgaaacagaaaatattaaatagtgactgaagggtccattgtatcttcttggtagcttttgttagaagaaacagagtatttttatatatagataatttaggattattgtcacctgaaagcaaagaccaaagtttccaagactctcagaaggaggaagtgagtttaaatgtttagaacatggtatttggtatcagattgtctgaactcaattcagtttctgattcttgtggctgtgttaccttagacaagttactgtgttttggctgtactaaaatggagatatttatgac

SEQ ID NO: 42924 - DNA, 325 bp, Homo sapiens
  misc_feature (1)...(325): n = a,t,c or g
gagctgagcctggccgtgctgagcagtggaggaaggaagcgccaggggcagggccggctgctgtcgcttttcactgcaggcgcagagtgcaggcttgtggggttggcacacatgggtgagggcagcgtggttggaggttcagggcactggaagacatttagattcattccagggcaactggaagccactgggggagtagcatggtctgattatttgtccccgtcactttggtggtgtcacatgggatagactgtggatgccaagagatgaaccgtgtgttttggaggtggctggacaggaccnacagacggatanggtgtgggaa

SEQ ID NO: 42925 - DNA, 322 bp, Homo sapiens
  misc_feature (1)...(322): n = a,t,c or g
ggagaatattaaggaaaggcacggaagatatgaaaaaaaactcccagaggtgaaaaatacagtgtctgagatgaaaaatgnactggatgaataatcagcaaattagacactgtagaagaaaaaaatagtgaactagaagatatagcaatagaaactatctaaaatgaaacagagtgnnnnnnnnnnnnnnnnnnnnnnnnnnnnnnnnnnnnnnnnnnnnnnnnnnnnnnnnnnnnnnnnnnnnnnnnnnnnnnnnnnnnnnnnnnnnnnnnnnnnnnnnnnnnnnnnnnnnnnnnnnnnnnnnnnnnnnnnaaatggtgtg

SEQ ID NO: 42926 - DNA, 315 bp, Homo sapiens
  misc_feature (1)...(315): n = a,t,c or g
ggtattatgaaggatctataaaggccacacatggtttggaagatttccgtggcacccagagcaagacagctccatgtgaggcacccttttgcttgagtgggggctgtgcctttgcatcctgccaggtccagtggatgtctatttggtaaggagactgtctttgaccttctcagtggtttcctttcgttttggtgatggatttgaagctgagttagctgccttctccaaacagctttttctctaaatgagtatttgttaaatattgnctgntctttagggntacttanactgaagantcagagtaggntgctggct

SEQ ID NO: 42927 - DNA, 320 bp, Homo sapiens
  misc_feature (1)...(320): n = a,t,c or g
gggaagacagaggggctgtgcataaaggtgtttgttgtcagatagtaaagggccttgggtaccagacttagaggtttggtttttatcctggctaggaagatccttagatggcctgaaatcagattggacttttaagaagctaacctggncatggtatanatattctagaggacagattangatacanagggacntgactttangcctantnataattnttatagtntacccannnngtangccnnnntgnttntggtgannncnntgnnnctatattntatggttngagnnncctnttttgntngnttntctttggattt

SEQ ID NO: 42928 - DNA, 324 bp, Homo sapiens
gaactggacttccctaagcctttaatagtgtaacagggttccctgaacttagttgaccatggaactcttctttcattgggcattttattagaatactatgaaacacattttgggaaatgctgctcttcaacaatgttcctcactaacatcaaaactatgctactgaggagaaaaatgtctttctgccaagtaggatatcataaagccaggctttaagttacattctcacaatgccccgtctcccaaggaggactgaagctgaaacctcacatgacaggattgcacctaggttgaggtccctgtaatgcgagcgcaaacatcgct

SEQ ID NO: 42929 - DNA, 276 bp, Homo sapiens
  misc_feature (1)...(276): n = a,t,c or g
ggagtcaccacctgcccccaaccctacttctcctccgaaggcccaacaaggtcctgtgcgccctccaagggcagaggaggctgctggctgtggctgtgggaggagacctggagcactgtgcccgaggcaaagctggccccgtggagtttgctattccagcttttatttactcctctgtaccctgagcaccatcaactgggtgccaggcctgtgcctatatttggcagggtgaggggtggnggccanacaaattntannangannctnnnnntttgg

SEQ ID NO: 42930 - DNA, 324 bp, Homo sapiens
  misc_feature (1)...(324): n = a,t,c or g
gacagtgtggcagacacttttctaagtgttttgcatttatttactcatttaattctcacatatttgtgagatatgagctgttactgtctgattttatggatgagacaactgagatacagatatgttaaataatttgcccaaggtcgcacatacctgttaagtggagagcctcaatttaaattctgtcagtctgtcttcagagactaaactactcagtagtatcctctattgcttctctgcttctgcttgtagttccaggtgtacatcctgccttgattgtgattggccaagaaactggataggactaagcttcagngntaaggg

SEQ ID NO: 42931 - DNA, 158 bp, Homo sapiens
gaattgtaaatattgagaagattcagtgatatctgcagagtgcttcagagcacgttctctggagcaatgctcttagtacgagtctttatttttgctgcctcaccatttattctgtttgtttcatttaatgtgtagtgatgtattatttgggttagatt

SEQ ID NO: 42932 - DNA, 356 bp, Homo sapiens
  misc_feature (1)...(356): n = a,t,c or g
gatcaataccctgctgtnnnnnnnnnnnnnnnnnnnnnnnnnnnnnnnnnnnnnnnnnnnnnnnnnnnnnnnnnnnnnnnnnnnnnnnnnnnnnnnnnnnnnnnnnnnnnnnnnnnnnnnnnnnnnnnnnnnnnnnntacnnnnnnnnnnnnnnnnnnnnnnnnnnnnnnnnnnnnnnnnnnnnnnnnnnnnnnnnnnnnnnnnnnnnnnnnnnnnnnnnnnnnagaagcnnnnnnnnnnnnnnnnnnnnnnnnnnnnnnnnnnnnnnnnnnnnnnnnnnnnnnnnnagcaagaccccgtctctatttaaaaaagagagagagaggctagacgcagtggctcacgcctgtagtccc

SEQ ID NO: 42933 - DNA, 336 bp, Homo sapiens
  misc_feature (1)...(336): n = a,t,c or g
gagacatcctcacacttgcaagaatttagggaatctagcactgaagaggccttctcaggaaacccacttgaggaagaaaaagattaatcgacaaacatacttagaaggcatagtggaaggtcaattggtgaactcttaatccgttcaaatagagaagcaaagctaagcaggggcagggatgggcagtgaggactaaggaacagaatgtgaggaagtagaaagaatataccagaaatagggggttaaggggaggaccgtgagganatgttaagtgctaactttaattanaagtgtaccttttccnnnnnnnnnnnnnnnnnnnnnnnnnnnnnntca

SEQ ID NO: 42934 - DNA, 334 bp, Homo sapiens
  misc_feature (1)...(334): n = a,t,c or g
ggaaccaaacacccccacattccttcagacctctctgttcttccccattgttctcttccggannnnnnnnnnnnnnnnnnnnnnnnnnnnnnnnnnnnnnnnnnnnnnnnnnnnnnnnnnnnnnnnnnnnnnnnnnnnnnnnnnnnnnnnnnnnnnnnnnnnnnnnnnnnnnnnnnnnnnnnnnnnnnnnnnnnnnnnnnnnnnnnnnnnnnnnnnnnnnnnnnnnnnnnnnnnnnnnnnnctgagagggtaggagtaaaggaatttcctaagctactgccatgtgtcaggcccactgctaggcaatttatatcatttagctcttgaatgatcc

SEQ ID NO: 42935 - DNA, 316 bp, Homo sapiens
  misc_feature (1)...(316): n = a,t,c or g
gaccttatatgaacaaaaagagaaacgaggatatatggagagagtaaaagagaagtgaggcacggtgagaaatggggaagggagacctgagcctttgtctatagcgaaggttgaaaactcagccacctgcaggggcaaagcagaaaatgcaaatgaggtagcaggcttgggataagaaagacctggctcttgttctctgttttcccttttttcagtaaagatataggtagaaactaaaatttgtctgctagaggaaaaaataactactcaagctaaataataaatgccaattggcacttttcctcantgntaagga

SEQ ID NO: 42936 - DNA, 317 bp, Homo sapiens
gaaattctgtagtgaaattttcactttctctcttgtgtagatctctgtaagacacaaaagttggatgacagtcgttttgattcttggactttactagagactccaaagacgcatctgaggagaaaagctctgggtccctgggatgactgtgccactcgacatagcctcctggagtggccaaagagagtgtggataagaaaagaaatattggagtcaactttcactcactcccacttctgtaggtttcttaaaatatatgggtttagaagcaagatacttggcgttttcaaatgactcaaaagagatgtagatgaaga

SEQ ID NO: 42937 - DNA, 274 bp, Homo sapiens
  misc_feature (1)...(274): n = a,t,c or g
gaagtagagtcatgttggaaaggtaacaaatgtaacctctcccaggccaatccactgagacaaaaaaagtcgttctannnnnnnnnnnnnnnnnnnnnnnnnnnnnnnnnnnnnnnnnnnnnnnnnnnnnnnnnnnnnnnnnnnnnnnnnnnnnnnnnnnnnnnnnnnnnnnnnnnnnnnnnnnnnnnnnnnnnnnnnnnnnnnnnnnnnnnnnnnnnnnnnnnnnnnnnnnnnnnnnnnnnnnnnnnnnnnnnnnnnnnnnnnnnnnnnnnaa

SEQ ID NO: 42938 - DNA, 293 bp, Homo sapiens
  misc_feature (1)...(293): n = a,t,c or g
gggagttcaacaccagcctgnnnnnnnnnnnnnnnnnnnnnnnnnnnnnnnnnnnnnnnnnnnnnnnnnnnnnnnnnnnnnnnnnnnnnnnnnnnnnnnnnnnnnnnnnnnnnnnnnnnnnnnnnnnnnnnnnnnnnnnnnnnnnnnnnnnnnnnnnnnnnnnnnnnnnnnnnnnnnnnnnnnnnnnnnnnnnnnnnnnnnnnnnnnnnnnnnnnnnnnnnnnnnggantnccccntnggannaaacatgatcaaaaaatgcctanacntacnntttggggntggttgngggg

SEQ ID NO: 42939 - DNA, 320 bp, Homo sapiens
ggaaactgccaaatgttattaaaactggtatcataacattctctaacaatgtagtatatcatatttacttattcaattctaatatcccctcttctgttatttctgatatccccctttctgttatttctaacagtaacactgtgcaatttctgcataataaaacaaattttataatttttaagtttatgattccaaaggaaaagctatagttacaaaaataacatgcagaaattactctgtagaattgaatagaaaattagccctttataaagctatagtgaaccaaagattttgtttaaggacagttcaggctcttaata

SEQ ID NO: 42940 - DNA, 305 bp, Homo sapiens
  misc_feature (1)...(305): n = a,t,c or g
gnnnnnnnnnnnnnnnnnnnnnnnnnnnnnnnnnnnnnnnnnnnnnnnnnnnnnnnnnnnnnnnnnnnnnnnnnnnnnnnnnnnnnnnnnnnnnnnnnnnnnnnnnnnnnnnnnnnnnnnnnnnnnnnnnnnnnnnnnnnnnnnnnnnacgaacttgatataatgcctacacactnnatttngggnnanagngtgngacnncatctcnaacangnanaaattactatgnataattgaatataaaaataccctntatanaggtntattgaatccaagattttgttaaggacagnttangctcttaa

SEQ ID NO: 42941 - DNA, 304 bp, Homo sapiens
gcagttgaatcagaattgattaggtggaacccaggcctcagtatcttaaacgcttcctgggaaaatctcttgcagtcacgtttaaaaacctttgatttaggcatcagtacctttcttaagcaagaaaggtggaaaaatttgtaaggctttttaggtgaactaacattataaaattaggaattctctgtgagtttatttagaaacattttttggttccagtgtgtaaaatatccttcagaactataataggaatccaatatactggtctttaaataccatactatgttcatcctctggcttcctc

SEQ ID NO: 42942 - DNA, 304 bp, Homo sapiens
gggagaagatgaaggaagccaaggatgcccgctataccaatgggcacctcttcaccaccatttcagtttcaggcatgaccatgtgctatgcctgtaacaagagcatcacagccaaggaagccctcatctgcccaacctgcaatgtgactatccacaaccgctgtaaagacaccctcgccaactgtaccaaggtcaagcagaagcaacagaaagcggccctgctgaagaacaacaccgccttgcagtccgtttctcttcgaagtaagaacatttcaatgatgagtctcccctggggctgcgccgg

SEQ ID NO: 42943 - DNA, 303 bp, Homo sapiens
  misc_feature (1)...(303): n = a,t,c or g
gatttactgatttttattttttgagatggcctgttgctcgttgcccaggttggagtgcaggggancnatcctcngctcactgcnacctncgncnncccagttaannctatncntncancctgaccctcancnaagcccntggntnacagcccccnccaccacctangcnactttnttgnactcccccacatactgtccntcgncangctgaccncncnganctcnnacccccncctancnncnnctcccngcnncngncttctctacacctnctnagcttnnngnccttatcnnccncctccc

SEQ ID NO: 42944 - DNA, 304 bp, Homo sapiens
gagcttcaataccctgtaaactaagtagacaccctgtaaactaagtagaacattgtctatataaaagcttgctttcacctgccatgacagagaatgatggtaaatggagcatccagactctcttcgggagctatttagcctcttctatgcttatgaatataaaaaacccaaagctgatataccagtcatatgaaggaattatacccaaataagttctattgcatctatttgccattcttagaataagagagcattatataagcaatgctgattgactttatcaaccgatgcaacagtgaaaact

SEQ ID NO: 42945 - DNA, 315 bp, Homo sapiens
ggacaattttaatatttttatctcagcaaaaaagtaagtttgttataaattagcacagtttctttgggtcacagacaattgcaccaagttccaggcatcaatttctcatactttgtattggatttctataaaatgaacctggtggtagctgcaggaattgcaggcatagagatgaaattgctgatctcttatggaggatggcttataaataaaatttatttaattgactattacaagcataaaaacaaatgtgcttatgaaataaaatattaagggatttaatagtacctaggtgataactgatgagacaagagc

SEQ ID NO: 42946 - DNA, 304 bp, Homo sapiens
gcggaacagtgaccactataatgtatcagtctgtccatggtgtaggaaattttgaaaacacataagctattatgtctgacaaagtagatgtcaactttctttgaggaaaatattgttaaagaagagaagctgctttagttacatttttgagagataggtaggaaatacatatatttttcccagctggacagaattttaaaagtactttttcttatagtcttaattatcatgtgctttattgctgaatttccagggagggtattaacatatcatctaatatttactatggtggtatgttatcatt

SEQ ID NO: 42947 - DNA, 330 bp, Homo sapiens
gaagcatctctctgcattaggatgtaagtcacagggcaaatgtgctttgctttagactcaagtctctgtgactatatctattgaatttgctggagtacagctgttggatgctaccaacacacagctggtggatctaacacatcttaaattttcataatgctcattttagtcgtgctctgtaacattcaggacataaactacccaaccttggaatggctgacctatcatgaaagaagatggttactttaagagtcattgaatataatctctgggcttacagtctgtaaacttccaagcccacaggaaaatattaacaatgattaaatgtta

SEQ ID NO: 42948 - DNA, 249 bp, Homo sapiens
gaacaaacaaacaaactccaaatactttaaatgctattacagattataaaattacaacactgcagacttggcagaaggaaagatttagatttcagaaaacatacacaagtcatttggtagaaggcccagggatatgaacagatactacacgcatgagaaaatatcatgagtaaaacaagtacagaaaactgtacaaaacagtgccacttttggcatgttaacatttgatattctatttttttttttttt

SEQ ID NO: 42949 - DNA, 305 bp, Homo sapiens
  misc_feature (1)...(305): n = a,t,c or g
gnnnnnnnnnnnnnnnnnnnnnnnnnnnnnnnnnnnnnnnnnnnnnnnnnnnnnnnnnnnaaaaaaaagataaacgagcaatcattcctaacatgtttcagtaagcaactataattctaatttcagaatcatcagaaaaaaagttctaaactggtacctttaaaggctcccttccccagaaaatgacggttttatttcatcaaattatttctttcttattttattttattttattttttcgctttttgnctcccaggctggaatgcccnggggtgactcngntgactgcantccngccngggcaa

SEQ ID NO: 42950 - DNA, 330 bp, Homo sapiens
  misc_feature (1)...(330): n = a,t,c or g
gaataaagataagtctcccaatttttaattgaaataaaagcaaatcgcttctttctggaccaactgaaggcactttggcttttgttccacagttctagaaagagggctgaaaagtctcatactgtgtaacaacattattaaagaacataatcatccaacaaacttaaaagtagcatctnnnnnnnnnnnnnnnnnnnnnnnnnnnnnnnnnnnnnnnnnnnnnnnnnnnnnnnnnnnnnnnnnnnnnnnnnnnnnnnnnnnnnnnnnnnnnnnnnnnnnnnnnnnnnnnnnnnnnnnnnnnnnnnnnnnnnnnnnnnnnnnnnnnnnnnn

SEQ ID NO: 42951 - DNA, 109 bp, Homo sapiens
gtttaaatctgcatatagttgcttccactttgcatttgtaagtttgtgttggcaactcttctaaatgaataccaattggacagtgttcccttaaatttttttttttttt

SEQ ID NO: 42952 - DNA, 330 bp, Homo sapiens
gtaaaagtactggtgtattaatgtcattaagtatttaatttctcttaagcttcattcttttaaacctgtgctagaattctccaaaatttgttcataaacttttcatctttaggacatggataacatcacaagagtatcttaacattgctacatttttaaaataatgctaacctgaatagcaggttttgttttggttttttctgacagacaaatcacttaaattctgtatccactagttaacttattattacttatttatgtacttattgagcccagatagtagtgaactggggagatagcagtgaataatagaaagtccttgccctcata

SEQ ID NO: 42953 - DNA, 333 bp, Homo sapiens
gcgttggtttcagtttgtaatctatgagtgcacataaaatactgctagaaggcaatggccacagagttgtgctcaggacatgtgcaattctgaagttaaaattactgtgaataatttgcctatggtcaataaaagctaataaatgctagttttctttttacaaattaaattcatagaactattgctctcaaactttgatatattgtattatttttccactgtattatttcaaagatgtgttcccatagaaaaggagtaactatatcaccaattttaaacatctctacttaaattttaattttaatatgtacttcagggtgcattcattcatta

SEQ ID NO: 42954 - DNA, 333 bp, Homo sapiens
  misc_feature (1)...(333): n = a,t,c or g
ggacccttagacagcatgggtttgaactacccaagcccaatgatatgcacatggnnnnnnnnnnnnnnnnnnnnnnnnnnnnnnnnnnnnnnnnnnnnnnnnnnnnnnnnnnnnnnnnnnnnnnnnnnnnnnttgcagattccaaggggccgactgcaggacttgaatatgtgcagattttgctttacatggggttcctggaaccaatctcacacatataccaagggatgactgtatatttatttctatgtgaaatgaatgacagcagtgatagaagggataggaaggaaaaatgaggaatattttgttattataaggtatttcacagcacta

SEQ ID NO: 42955 - DNA, 323 bp, Homo sapiens
gtaaggaatctctgggtgagggagaggcttagtaaacaaactaggtgttaggcaggctgcaagccacccaggcacaagatgaccacacgaggctgaggcacccctgtgtattcaggatgggaaagaagggaagtgatgctagccgaggccagctgtgtgttggcgggtatgcggtactggggaccgtgggagtgagttctgtcttcagtaataacaagggcaaaaatgcactggaatccagttattttgaagggaacttggcactataaacaagcggaccttgactcttaaggattttgtgagagcctggcaagttagtaact

SEQ ID NO: 42956 - DNA, 332 bp, Homo sapiens
gattatgaagttattagtgcacttagtagatattctgagtaaattaatgccaataaaaaaaactaaaaaacaaaactgttttcttatcacaaataagctgtgtctgtagctttgtaaaagacattattatttctcctgttataatgagtgtcccatcaggtaaggaccaaaggtcttctttctggcttagttgttttgatatcaagctctggggatgaagatggaggttttttcttgttatcacagtcagttgtcacagcagcctggtgaggcgagcggggtaagtactaccattcccattttgcagatgacagagctgaagagtaactcct

SEQ ID NO: 42957 - DNA, 321 bp, Homo sapiens
gagaaataagtttagaatagtttgtcaacattttttaacaagtggcaaacacctttcaagggtaagtggcaaaaaatagaaattcaaatatagctctgtttagcaaaaaatatcaacatataaggagaaaaaaattctatttgaagggaaacatagcctgatgagatatagccagttaacaaatttaaaggcatgtaagatattcagatattcagagcactgggacaccagtctatttatatatgaggaagcagaaacaaacagaatagaatcaaatcttgctctttgaaccatactgcagtgagagtcagggaatttgta

SEQ ID NO: 42958 - DNA, 331 bp, Homo sapiens
gctgagcttctgccgtggtgccctcatccacaatgtctccaaggagcccgggggctggtggaaaggagactatggaaccaggatccagcagtacttcccatccaactacgtcgaggacatctcaactgcagacttcgaggagctagaaaagcagattattgaagacaatcccttagggtctctttgcagaggaatattggacctcaatacctataacgtcgtgaaagcccttaggaaaaaaaccagaagtcctttgtcttcatcctggagcccaagcagcagggcgatcctccggtggagtttgccacagacagggtggaggagctctttg

SEQ ID NO: 42959 - DNA, 321 bp, Homo sapiens
  misc_feature (1)...(321): n = a,t,c or g
gtacagatcatctgtctgtcaaccacttccagcatctaaaatctaataaataaggactattgctcaaattctttctacacagaagtatgcacacactgtaccacagtaggtcaccattttttggttcatagaccgctttaaaaatttagtgnnnnnnnnnnnnnnnnnnnnnnnnnnnnnnnnnnnnnnnnnnnnnnnnnnnnnnnnnnnnnnnnnnnnnnnnnnnnnnnnnnnnnnnnnnnnnnnnnnnnnnnnnnnnnnnnnnnnnnnnnnnnnnnnnnnnnnnnnnnnnnnnnnnnnnnnnnnnnnnnnnnnnnnnnn

SEQ ID NO: 42960 - DNA, 322 bp, Homo sapiens
ggattcagaaactataataaccaaaagactgtgacatggtggcttattatttattgacataacttagatcattgatttagggcaatatgaatcacagaagcacttgggtgataaccttatgcaattcttttctcatcggaggcccagttcctgggattttatcgggccccatcattgccctctgcaccctcagtactggctgggtattgtccttttcaaggaagtgaaacctagcgcttccttattacttcacataatgccatattagcaatgtgaaatgctttttcttacatgatgttgcttccatgaaataagcccaaga

SEQ ID NO: 42961 - DNA, 322 bp, Homo sapiens
ggacggcttggccttgtgtcaagatacatcaattggttatagcttagtgcttggaggcccacattataggagtagactagttctccctccgccccgcccctggaaaatctatttcaagaccataaaccacattgctaatccttggaaatgcagaaggtggttgggtttaaaatgtggctttaaaatggtcctaacagaaacgtattggatgttactattcagaatatctgcccagtatacgaggaagaaaaaggttaaacctaaaacactaaaaattcatagttcatattcagttattagcctatgaagatttggtacagcc

SEQ ID NO: 42962 - DNA, 320 bp, Homo sapiens
gcagtaattacccaaaggcgttgactccaaagaaaagctttgttttgtttttcctttccttttggaagaaattttctttggccaggtgaatttaattcaactcaaaggactttctcttaaaaaaagaaacagtaaggacgattttcatgtcttatgtttcttctaggtgctgcacttaagtgttatcaggaatagtaaatagtaaggttgtattccttggtagaataggctgttatacttcactgtttcttttgagactagtcaccacctttacttactacaccccattatgaagaggtcttaaagaaagaaaacatgaa

SEQ ID NO: 42963 - DNA, 320 bp, Homo sapiens
  misc_feature (1)...(320): n = a,t,c or g
ggagaggagaaaggcaaagtagcttgccacacttaactccttgtcatcatagaaatttgctaggctttttctctttgtagagattgttacattttgactgaatctaggcagaggtaaaaattatatgggtttgtgtatgtgtattatatataaacatatggggaattacacttgttatatataacactgatagagcagataaattaattcttcaagtatatcacataaagaatantnggccccataatgctntcagntaaaagtttttgattgcttaattggattanaagtcatctgtggtttacttatgangaaatttg

SEQ ID NO: 42964 - DNA, 301 bp, Homo sapiens
  misc_feature (1)...(301): n = a,t,c or g
gcaagacttctgcattcatacctaggactttgtgcacatcattgctcaaacattctagttgtaattgaaccattgactgattagatttgacataatattctgatgatgggtgtgtccttggaatgagaagggagtccttttgatcaggaaggaccttttaccagtaaagtggtaatagtatttagagagaagtctgtttaaacttaaatgggtgatttttgtcaagtttaaagngaatttanagcttatttgattanattggattaagatctggnngngacctnntgaatnatnnnnccta

SEQ ID NO: 42965 - DNA, 150 bp, Homo sapiens
  misc_feature (1)...(150): n = a,t,c or g
gcattttaatactgagaaaaaaagcctcattattagttttagaaaaagagagacaatctgtgttgttctggaaccaagacaaagttctagaagattctctcttgatccttaaacagcatagaaaaaccaggtaagtngactatgntcacg

SEQ ID NO: 42966 - DNA, 229 bp, Homo sapiens
  misc_feature (1)...(229): n = a,t,c or g
gtgctactctttgaacatttttcaatatgatgacatttttctgtctatctttctccaaaacagttttcagaacatatgaactaaactgactatactggagaagtggatacaggccattatgagggtccccttgtcatgaccaatttgtttcacttaatttccttcttaccttataactggcagagaccaccaagtanntatctggatnnatgtnctttanagnnggaga

SEQ ID NO: 42967 - DNA, 336 bp, Homo sapiens
  misc_feature (1)...(336): n = a,t,c or g
ggtcaactctggtattcttagagactctgtttgggaaggagtcctgagccattttttttttcttgagaatttcaggaagaggagtgcttatgatagctctctgctgcttttatcagcaaccaaattgcaggatgaggacaagcaattctaaatgagtacaggaactaaaagaaggcttggttaccactcttgaaaataatagctagtccaggtnnnnnnnnnnnnnnnnnnnnnnnnnnnnnnnnnnnnnnnnnnnnnnnnnnnnnnnnnnnnnnnnnnnnnnnnnnnnnnnnnnnnnnnnnnnnnnnnnnnnnnnnnnnnnnnnnnnnnnnnnnn

SEQ ID NO: 42968 - DNA, 185 bp, Homo sapiens
  misc_feature (1)...(185): n = a,t,c or g
nnnnnnnnnnnnnnnnnnnnnnnnnnnnnnnnnnnnnnnnnnnnnnnnnnnnnnnnnnnnnnnnnnnnnnnnnnnnnnnnnnnnnnnnnnnnnnnnnnnnnnnnnnnnnnnnnnnnnnnncnctgtctcanaaancaaancagaaatttttannnantcctatatgggtagntgntnccatatta

SEQ ID NO: 42969 - DNA, 213 bp, Homo sapiens
  misc_feature (1)...(213): n = a,t,c or g
gcaagactttagatgtctgcctgcagattgaattcttcccaattaaataaggagtctcatcttaagatgttgctggtggtcaaaacagaaagttactgaatgtggcattattccgctctctgcatttaaaatttaaaattttgattcaggtaatgcttagccagactattttgctagcttanagttaaagngagnancactttgggaggctga

SEQ ID NO: 42970 - DNA, 93 bp, Homo sapiens
gcgattggagtagcttaaaagtctgtggagaaatggtagaataagccagttcatacttacttctttagcctctgaaataactactcttttttt

SEQ ID NO: 42971 - DNA, 355 bp, Homo sapiens
  misc_feature (1)...(355): n = a,t,c or g
ggagactgcatagggctcggcgtggtggcgggcgnnnnnnnnnnnnnnnnnnnnnnnnnnnnnnnnnnnnnnnnnnnnnnnnnnnnnnnnnnnnnnnnnnnnnnnnnnnnnnnnnnnnnnnnnnnnnnnnnnnnnnnnnnnnnnnnnnntctcaaataaaaaaaaatatatatttagggatgacgacagggcatcatgttagcaacttagtcaaatggttcaggaaaaaaaatgttcaaacttttccatatgtcagtcattgtttcaaaaattaaaatttaatttaaaaatatctatagcagtgctgaaaacctgggaggggtatacctacagataagaacagaacggaatttat

SEQ ID NO: 42972 - DNA, 363 bp, Homo sapiens
  misc_feature (1)...(363): n = a,t,c or g
ggggccctcaccttcttgatactccaaaacctgcctcccacagcccctgattgttcactctgtccttgagtgcaactggagatatagagatactgatatagatatgaatagatntagactattcantcttangattannttanncnggcacntnntnnactgncccanttgnnatgntcncatnnctgganaanatncanttnttacaatgatcctatgcgcttactgcctgnaganctacnntatgntggnctcttnaggcnnttttantnctntgtnccnttannnangttttnatnatnnttgatcnantcaggatagcgaacttgcttgtgtnncnnnatngntnccattcactttttt

SEQ ID NO: 42973 - DNA, 346 bp, Homo sapiens
  misc_feature (1)...(346): n = a,t,c or g
gaactgtttggccttcacatgttgatgttcgcacacaagccatgtaccagatgatggatcaaggctttgtaggacttattttttcctgtttcatagaagataagaacacaaagactggccgggtactctacacttgcttccaatccatacaggcccaaaagagttcagagtatgagagaatcgaaatcccaatccatattgtacctcatgtcactatcgggaaagtgtgccttgaatcagcagtagagctgcccaagatcctgtgccaggaggagcaggatgcgtataggaggatccacagccttacacatctggactcagtaaccaagatccataatggntcagt

SEQ ID NO: 42974 - DNA, 179 bp, Homo sapiens
  misc_feature (1)...(179): n = a,t,c or g
gaaaaccaaaagagataagttacaaaaatttgctaattaattgcatactgcctgattcatctaatttatgagaaaccgtatcttggcattctgaatagtattaatttgatttgtagaatagcatcatagttgtgtcccctcttnaagcanggtgggtnccataanagtgtntatngaga

SEQ ID NO: 42975 - DNA, 350 bp, Homo sapiens
gaactggaaccactgccactgccatttctttcaattccccaccatgcctgatttctactgtctcttgttcacttcatccatacctgtcacaagtccatttcaaacgctgctccacaaactaagtagatttgggagatggtaattaaaaaatacagattcctacaccttgcccatggagcttttgattcagtatatagagtgtcaagtttcaatcttggtatacccagggaattaaatttaaaaaagatgcctgagcaacatccccagaaattctgatttaacaatactgcatttgggcctggataatgatggctttaaaagttctcagttaattctactgtgcatctaag

SEQ ID NO: 42976 - DNA, 344 bp, Homo sapiens
gcaaaagtgtgtttctttagaatgaaaagggtctctgtacacttttaactctgacaaaatttttttttcagatctaatttaaatgccttacaatatttctttaaaagtgtcaaatcatttgaattttagaggggagggagaaagcaagaatgggaagtattaactccctttataatgtgtgattcaagacattcctagaaaaatagtgccctcagggaaactgagaatttgggtttgcaacagctgtcaaaagatgacatttcaagctgggagggaaagtgaaggcgttgtgaaggcaaagtttccacacagaatgagtccaaattagaaaagagagtggattc

SEQ ID NO: 42977 - DNA, 350 bp, Homo sapiens
  misc_feature (1)...(350): n = a,t,c or g
nnnnnnnnnnnnnnnnnnnnnnnnnnnnnnnnnnnnnnnnnnnnnnnnnnnnnnnnnnnnnnnnnnnnnnnnnnnnnnnnnnnnnnnnnnnnnnnnnnnnnnnnnnnnnnnnnnnnnnnnnnnnnnnnnnnnnnnnnnnnnnnnnnnnnnnnnnnnnnnnnnnnnnnctctggtaaagattcattctggcttgctaatagcatgaaccttgcagcaactcaacatccccagcagggctgctggacatgggctggaggcactgacccactggacnataagtcaaaggcaaaacccaatccagtgtgtgtcatctccccaggctctaaagcacaggcctgctgaggcaggcc

SEQ ID NO: 42978 - DNA, 340 bp, Homo sapiens
  misc_feature (1)...(340): n = a,t,c or g
gggtgttaaaggcacactgcatgtaagtgtatataaattcttaaatgctnnnnnnnnnnnnnnnnnnnnnnnnnnnnnnnnnnnnnnnnnnnnnnnnnnnnnnnnnnnnnnnnnnnnnnnnnnnnnnnnnnnnnnnnnnnnnnnnnnnnnnnnnnnnnnnnnnnnnnnnnnnnnnnnnnnnnnnnnnnnnnnnnnnnnnnnnnnnnnnnnnnnnnnnnnnnnnnnnnnnnnnnnnnnnnnnnnnnnnnnnnnnnnnnnnnnnnnnnngcagngagccganagcacaccaccgcactccancctggacaactanagcgagactcggnctcanaaaanaaaa

SEQ ID NO: 42979 - DNA, 343 bp, Homo sapiens
gctcggcgtgggaatgttggtgtccccagtttgagcctaccccagacatttttttctttttccaacttttgccaaatgcataagtgaaaactgatatctcattattttaatcttgctatttttgaaactcaatctattttcatatgtttcttggccactcgcacctcctccttgacaatattgatattttaagttgtttacaaaactgaaaccaccatcaattaaaaaaaatgtagatagacaactgagaaaatattaagggcaaataatgttcattgttgagaacttcattatatcaaatgctgtgacaaattccccaaggagcagaactgtggttaagaac

SEQ ID NO: 42980 - DNA, 343 bp, Homo sapiens
  misc_feature (1)...(343): n = a,t,c or g
gctcaaggagcagatctacatctttttagttcccacagggacaaacttgcccacagcagtttcttagtatatggtgggacataatgaagaaataatnnnnnnnnnnnnnnnnnnnnnnnnnnnnnnnnnnnnnnnnnnnnnnnntcctttcgccactgcactccagccttggatgacagagcgagactccatctcaaaataaatatctctctctctctctatctatctgtctatccatctggagggctttgaatgctagtttgaggttagccagaactctggcttccttagtacgaagtccagggagatggttttaggtggtggccacgggaaatanaggctg

SEQ ID NO: 42981 - DNA, 345 bp, Homo sapiens
  misc_feature (1)...(345): n = a,t,c or g
gcggcacgagnnnnnnnnnnnnnnnnnnnnnnnnnnnnnnnnnnnnnnnnnnnnnnnnnnnnnnnnnnnnnnnnnnnnnnnnnnnnnnnnnnnnnnnnnnnnnnnnnnnnnnnnnnnnnnnnnnnnnnnnnnnnnnnnnnnnnnnnnnnnnnnnnnnnnnnnnnnnnnnnnnnnnnnnnnnnnnnnnnnnnnnnnnnnnnnnnnnnnnnnnnnnnnnnnnnnnnnnnnnnnnnnnnnnnnnnnnnnnnnttanctgagngtcctgnattttgtcnggccaccntatccattctcctccantgagnttcccnagtccccacaggntcgccctcgtngcntttcctg

SEQ ID NO: 42982 - DNA, 348 bp, Homo sapiens
  misc_feature (1)...(348): n = a,t,c or g
ggcctcacttctcttatctgggtcccccagggttaagtaataacaggaccaaaccagaaattcatttaaaagtgttagtgaaaatatcttgcaaactgtagagtactatacaaaaatcaactgtaagttttcttgtctttgttatgtggccaggagcaacctgatgaaaccagaaagggtgtgttgaccattgatgccagctgtgggtctggttcagtaacttcactctagtgtgctggattttaaaatgttactggttttctaagccctgcatgaatataaatattcatcaagagtcagggcctctggcaggacgggagaatttagggatggaaaagtgtanaaaat

SEQ ID NO: 42983 - DNA, 326 bp, Homo sapiens
  misc_feature (1)...(326): n = a,t,c or g
ggagaatagctgcaccctgcctgccacaaaatccaccacatgtgggatctgggctttagatgtgcggtccaacaccctggtggcccaggggcatcttctctcagcccttactgcacaatcctcacccacaaaagggctgggggtgcaggggcccagccaggcttcgggcaagcatgcccctgtggagtttccccagggcagagggaggcccagctagtgggagtggggatggggccctgcctgtcagactctaagcataagggccgagggcacaaggcccaactggttcgtccttggcagtgntttagaggaaggctctctggggg

SEQ ID NO: 42984 - DNA, 325 bp, Homo sapiens
ggttgaatagattgcttcctctggcaaatctgctcaaacgttaggtttcagtggatgtattcatgtattttaaggtaaacagcaataatattaaacatcagacagtgttaatccttaatcttcaggttataatgctatacttttcaaagtgtttgcacaggtgtattacttggatttttaaattctttccatagtactcatttttctatccaaaatatgaacttagttttaaatttgaaactactcaggtttactacactccatcagaaagatgaacccagtaagcctttatcttcatagagaataggaagtaattttggaggac

SEQ ID NO: 42985 - DNA, 113 bp, Homo sapiens
  misc_feature (1)...(113): n = a,t,c or g
gggaagataacaataaggctcagacattgggaaggatctttccaagatcacattgctggtcaggatcaagccaggtttctgtgaccccagttcctaattggttggngtgcctg

SEQ ID NO: 42986 - DNA, 327 bp, Homo sapiens
gctaagaccagctgataaggaacctgaacccaggaagagggaagaaggccaagagtcacgcttaggacatcaaaagagagaagcagaaaggtatctgcctccttctcgaagggaagggccaactttccgaagagaccgagagagggagtcatggtctggagagacacgccaggatggagagagcaaaactatcatgctaaagcgtatctatcgttccacaccacctgaggtgatagtggaagtgctggagccctatgtccgccttactactgccaacgtccgtatcatcaagaacagaacaggccctatggggcatacctatggctt

SEQ ID NO: 42987 - DNA, 339 bp, Homo sapiens
ggagcatcattccacttcaagattgtaggcatagttttttctttaagtttggttttgttcctaggccctagctaagtgtggtagccatcttcattgctcctctaatattctctgtttatttttgtaatagtgtttatggcacacagtttttttttaaattgtcctcatctcagtcctcctacaaatttcttccatcaactctttaatcccaaattatgtttttttctttggtcttactaccccttttctggtttaattcttttgcaatcaggatttcacttctacagaattatttataaattgttgttgaattcatttctttatagttctttttagccg

SEQ ID NO: 42988 - DNA, 330 bp, Homo sapiens
  misc_feature (1)...(330): n = a,t,c or g
gcgcagagccagcaccatcttgggtaagagaagtgttccatgtttgaggtagttggcaaatgctaagctacctatgtggtgacagttgtctggagcttttcccatctgattaaggggcaatactgatttggtcgttgtgggcagtttctcctcctagccagcatcactgccatcttggaaggtgtggctacctgtcatgtgttgcacagagagtcgaggggagctggcctcgtttgagagggcacctgagactttcagtcacctgctgcagagtgacagaaggaacaagggaaaccaaggctttcccaaacttgccaganaaggtgagct

SEQ ID NO: 42989 - DNA, 353 bp, Homo sapiens
  misc_feature (1)...(353): n = a,t,c or g
nnnnnnnnnnnnnnnnnnnnnnnnnnnnnnnnnnnnnnnnnnnnnnnnnnnnnnnnnnnnnnnnnnnnnnnnnnnnnnnnnnnnnnnnntcattgttaacacaaaggtaaaagcccttctgtactaatgaatctaagagtattgaatagtaagaatcaccaaaacttgatttctttctttctttttttttttttnaaatngaggcaaantntngntntgtnncccagnntgnanngcaggggccnaaccngggntnantgnancntccgcntacnggtttnaagggatccncnttcctgagccncctganaacntggnattncnggcccatgccacaaccccannttactttt

SEQ ID NO: 42990 - DNA, 356 bp, Homo sapiens
gcaaaacactttattgactgcctaccctgatgcactgatggcttcaggaacacaaagatgatgagaataatccctctccccagcagagcctctggttttaaagtccattcagacctgaacagaaggggagagatgccctaataaagacgtgtataaaagcccttcaagggtgtcaagtggagccggaagcaggatcgggtaacgacggcagaagtaggggggaagccatccttcctgtcttcacctgccccttaggatttgagagatcagccctgcaactattgacttgatagattacttgttatgtaactgtatggaacctcccggttcacgagccacgtatttgaaccaaagag

SEQ ID NO: 42991 - DNA, 359 bp, Homo sapiens
gagtgaggggtctttagtgagagaagcggagtttagctccgcctggatgtggctgcagcatttgttcattcattcattcatttactcagtaattattgattgagtggccgctatgtgccagaccctggggacacaacagggaagacaacaagacacaaatctctggcctcatggagctgacattcttgtgagagagaaagtggaaagggtggctgggattacaggcctgagccaccatatccagtggggcttgtggcaccttgaccgtccctcctcctttcctccccctctaggttgccatcaagattatcgacaaaacccagctgaatcccagcagcctgcagaaggtgaggctgggg

SEQ ID NO: 42992 - DNA, 354 bp, Homo sapiens
  misc_feature (1)...(354): n = a,t,c or g
gatgattggtcctaccannnnnnnnnnnnnnnnnnnnnnnnnnnnnnnnnnnnnnnnnnnnnnnnnnnnnnnnnnnnnnnnnnnnnnnnnnnnnnnnnnnnnntagtatgagaatgaggtgcggtgttgaggagaaaagcagcctagtgcttacacctatagaggactggggtcaacagacccagcgctgtgggtgagcctggcttggctcacctgtgcctgcgggttctgccttgctcccccatagcagggctgtgtctgggtcagactccacgtggggatggatgcaagagcagggcacagtgtagaccacagtgtgttccccacgctagctctatancgtgttgccttctg

SEQ ID NO: 42993 - DNA, 349 bp, Homo sapiens
  misc_feature (1)...(349): n = a,t,c or g
gnnnnnnnnnnnnnnnnnnnnnnnnnnnnnnnnnnnnnnnnnnnnnnnnnnnnnnnnnnnnnnnnnnacctgcctcaatttaagtagtcgtgtgtggcttatacctactgtattgaacagtatctaggcaatcaacttgttagccacttttctccatttgtactgttcttgtccctgggcgagctctcatgatttctggcccatctcggtcaactgcagtggctgcctagctggtcttctaagttccactcctgagctatagcctactaaacaaaaattgaaagtgatcttttaaaaatattagcttgagccaaatcaacttgcttatggaatatattgcctttttttt

SEQ ID NO: 42994 - DNA, 351 bp, Homo sapiens
  misc_feature (1)...(351): n = a,t,c or g
gcggcaccgagctcttatttggtcttagttctaaaaatagcctcatatttaatgttcatcacaagttgatgtctctctagtaattttgattgcatgaaacttgttctctaatagattcctctgcaaaagctcatggaagcaatagttcctgaattcttatatgtcagtaatggcttattggtggctttcatacttgagtctgttaggctctatacaaaatccttggttctcatctcttttcctttagtatcttaaatgttactctattttcataggatataaaacattgctattgaaaagcctaacaacaattcaattttatgntcattataagtcacttggtctttttgc

SEQ ID NO: 42995 - DNA, 333 bp, Homo sapiens
  misc_feature (1)...(333): n = a,t,c or g
gaaagatttcctaatggagttaaagaacacacgatgcatactatgacttaaggcgaagcagaaccttttgactcacacaacattatattattttgtcagctttatattttatgaaacatttttactatgagtgaggcaagagaaagaaaaaggaagagacagcatttggttatattacatcatttctaaaatctaatttcctggagtgatgaatgacactaagggtnnctactagantattgntnnnangtntactaatantgtnntnnatcttttaanatntnctaatnttattnttctaatttnnctnatntntnttttttaatntttttt

SEQ ID NO: 42996 - DNA, 334 bp, Homo sapiens
  misc_feature (1)...(334): n = a,t,c or g
gtcaccacttatctgtctctgttaaaatctgaaaatctagcccatggctaaaatctattatatgtgttctccatatttcttgtataagccagtccccagcatctgatgttttgagaagtgcatggagtttcctaaactttgcacagaagaatatcctnnnnnnnnnnnnnnnnnnnnnnnnnnnnnnnnnnnnnnnnnnnnnnnnnnnnnnnnnnnnnnnnnnnnnnnnnnnnnnnnnnnnnnnnnnnnnnnnnnnnnnnnnnnnntgctntactannatacnnnnnttanctggncntganggngcntgcctatngnccnnntcttgnnggcc

SEQ ID NO: 42997 - DNA, 338 bp, Homo sapiens
  misc_feature (1)...(338): n = a,t,c or g
gnnnnnnnnnnnnnnnnnnnnnnnnnnnnnnnnnnnnnnnnnnnnnnnnnnnnnnnnnnnnnnnnnnnnnnnnnnnnnnnnnnnnnnnnnnnnnnnnnnnnnnnnnnnnnnnnnnnnnnnnnnnnnnnnnnnnnnnnnnnnnnnnnnnnnnnnnnnnnnnnnnnacaacttcctttttaaaaattaaannnnaaattgcttggaatanctactgcnncaagttaattcagtcacatactnatttctnnntaatnaanntgtctcaactnttattnnnccnttcnnttttntttacctttaatnnacttttttnngnctttaaaaaatnccntantttg

SEQ ID NO: 42998 - DNA, 344 bp, Homo sapiens
gatcctttgttagagcaagtggaattacctgctgtggcatcagtcagtgcttcagtaattaaatctccatcagatccctcacatgtttctgttccaccacctccattgttacttccagctgccaccacaaggagtaacagtacatctatgcacagtagcattcccagtatagagaacaaacctccacaggctattgttaaaccacagatcctaacccatgttattgaaggctttgtgattcaggagggattggagccatttcctgtgagtcgttcctctttgctaatagaacagcctgtgaaaaaacggcctcttttggataatcaggtgataaattcagtgtg

SEQ ID NO: 42999 - DNA, 333 bp, Homo sapiens
  misc_feature (1)...(333): n = a,t,c or g
gagaaaaaatagtgaaaggttaatttgccactattacttatatgtaaaggccagagactaataatgcatgttaaggtgannnnnnnnnnnnnnnnnnnnnnnnnnnnnnnnnnnnnnnnnnnnnnnnnnnnnnnnnnnnngtattcacaggcgagattatagcatgctatannnnnnnnnnnnnnnnnnnnnnnnnnnnnnnnnnnnnnnnnnnnnnnnnnnnnnnnnnnnnnnnnnntctggctaattttttttggatgtatgtaatgcaaaagacaagatttatcaataattccttggcaaaggtccttaataggccaataataggatttg

SEQ ID NO: 43000 - DNA, 209 bp, Homo sapiens
  misc_feature (1)...(209): n = a,t,c or g
gtcttgcaaagaaaatcagtacagaaaactattaatagttttgccatattagaatgaaagctgctttcttggttttgacctttagttttttttgttttttgataatgccgtttttatttaaccagccttcatttttattattataattattatannngnnntgcnnnnnanatgatnnntnnnncnnnnntnnnntnnnntanantgct

SEQ ID NO: 43001 - DNA, 298 bp, Homo sapiens
  misc_feature (1)...(298): n = a,t,c or g
ggttatttttctctttggccacactggtctagattggatgaagaagtaaagttactttcttcagaaatcgtcttaatataaaccattaatttagtcagaaaagttttagcacatttaaaaaatgcatttatgtacctggtttctaatgtggatgtaaacttagaaccttttcatcttttttagctattaataaaactctaataactcaaaattcaattttatattaattgnanncacagaattatttgcaataattgagtcnnannactaannngananntangcttncncangttca

SEQ ID NO: 43002 - DNA, 311 bp, Homo sapiens
  misc_feature (1)...(311): n = a,t,c or g
gcggcacgagcggcacgagcacagaggatactgatgtgttgagaattaggagttacaaaagaatgttggtaaggagaaatgcatcaaagctgcatctttctatagctctgtcactgcgtccattgattcctaatgcttagccttttggttaaacttggttttagggagctacgttcatatggcagaccttaagaatagaattctgtgtaatctttatgtaaagttttcttaacttgcatttgnatttanatcancnaggnttaaccacnnnacntttaancattgnnatacttannatatnatnttggccg

SEQ ID NO: 43003 - DNA, 331 bp, Homo sapiens
ggttactgaacctttggtacttcagtttactcaagaaatgaagatttaaatttcattagagcattatgtgaatcatgcaatattctgtatattacagtgcctggaaaataataaacctctgaataaatgtttgctcttagtaataatagcaataggagcaggaggagcagtgggggaagctggtattatttataccactctttgtattttatcactttttataagtctgaaattatttcaaaatgaaaatgtaaaaagaacaaggagtttctcactattctttgtccccctaaaaagaccatctttttaaaaagattaaggaattcataca

SEQ ID NO: 43004 - DNA, 330 bp, Homo sapiens
gctggaataggagctacttggtaggttattaagtatctctcatatacatttcagaaacaccaacctgtattagcagaatagctgtatattgttatagtactttgagtagtgccaaaggcttctctgctttagatacttttgaaaacaccaaatttcagggttatgattaaaattctaatcagctttattctaaaatgagttttcagatatttaatcacttcctaaaatgattaaaaacatgttgttattattgtctatatttttagacaatgttagtaaaataaaatatttccatattatccctgatctgtaatcattaaatgcaatcag

SEQ ID NO: 43005 - DNA, 339 bp, Homo sapiens
ggcagtgtgccctgcgtgtattcaaggggatgatccagggaaaagaatgaatcaagccattgctgtggtatttggaccagtggggccacttgccattgacttggttttacaaggcctcagaatcggttcggatgcaggaactgtgtttgacgtttatgccgaagttctcatcaaagcctggaaaatgtggagcctcttttgcaagagtggagattgttgcctttaagccagatcttaaacactgttagctcattgtgaaaaacacaagtgccagtgattaacaaagaatgtttacttaatttacttcagatctggtctcagttaaaggttagctcatcc

SEQ ID NO: 43006 - DNA, 330 bp, Homo sapiens
gcggctacatttggattgtcaacagaaagcagtatttgtcttccagtcatcagtctgcctcactctttcctctgaaacactcagtgattctcaaccctgactgcaccagagaatcagatggaaagctttaaaatgctgattccagggctcctagagattctggtttagttgatgtgctgtactttcagttagctgcttctctgtctacccctacttcctttgcatcttaaaaaaaaaagtaggtgttttcaaaagagctaccttggtaatcttccttgtcccactctacctttcctcttggtagtctcttcaaatgtcccattggcacct

SEQ ID NO: 43007 - DNA, 352 bp, Homo sapiens
  misc_feature (1)...(352): n = a,t,c or g
nnnnnnnnnnnnnnnnnnnnnnnnnnnnnnnnnnnnnnnnnnnnnnnnnnnnnnnnnnnnnnnnnnnnnnnnnnnnnnnnnnnnnnnnnnnnnnnnnnnnnnnnnnnntaaagtattcaacttgaacacttatggcatatgtattaacccatgaagccatcaccacaatcaagacagtgaatgtgtccaccacccctaagtttcctcaatgtccctttttcatctttccctcctgcctgctccttcttatcccctcacccccgggcaaccactgatctgttttctgtcactacagctgtacatagattagcttgtatattctagaatttaatagaaatagaatcacataatg

SEQ ID NO: 43008 - DNA, 428 bp, Homo sapiens
  misc_feature (1)...(428): n = a,t,c or g
attgaacctttggaatcctttcaatgantccaanttantannactcactatagcnnatnnggccctcnangccnngantncngcacgagacacacctcaccctggaccccagcatgattcctgcctagttctattcacaatcctttatttctcctttggagagtctaatccttgaagtctgtcatccttgaccccatcaaagcgtttttcattgggatgatggactaggggaaggctgaggcaggtggagtaaggggctgcaggcagccttgagctctccgtggagcactggttctcaaccttacatcacccaaagagttcaggtacctttgcccagcaatctggttgcttgttgaaaatcttgctgatgatgattgttagccagcttggactgccataacaatnactcagactggtggcttanatga

SEQ ID NO: 43009 - DNA, 243 bp, Homo sapiens
  misc_feature (1)...(243): n = a,t,c or g
gacaaaaataaaaataaatatnnnnnnnnnnnnnnnnnnnnnnnnnnnnnnnnnnnnnnnnnnnnnnnnnnnnnnnnnnnnnnnnnnnnnnnnnnnnnnnnnnnnnnnnnnnnnnnnnnnnnnnnnnnnnnnnnnnnnnnnnnnnnnnnnnnnnnnnnnnnnnnnnnnnnnnnnntcataaataaatacataatatataaataggccaggcncagtggctcacgcctgantnnnagnactttg

SEQ ID NO: 43010 - DNA, 91 bp, Homo sapiens
  misc_feature (1)...(91): n = a,t,c or g
gaaatctttggagacagaaagtagacaagtggttgcgtagggctgggaatatgtggggagaatgaacagtgactgncnnngggtatggatt

SEQ ID NO: 43011 - DNA, 331 bp, Homo sapiens
  misc_feature (1)...(331): n = a,t,c or g
gaacgaccatgtgtcaaatatttatttggctgattaatgggggaacgagtagaatggtaaagaatgcaagaaactgannnnnnnnnnnnnnnnnnnnnnnnnnnnnnnnnnnnnnnnnnnnnnnnnnnnnnatctctgttgatatctgtctgcttgtctatctagttatctaactagctagctgtctattatctatctgtctgtctctctgtctctgtctgtctagctacnctatctgctgnnnatctcnatnnnnctatctatccctcnntctttctatctncnntcgaacctcnncntcncngcggnccncnnaccngntctntcccgc

SEQ ID NO: 43012 - DNA, 324 bp, Homo sapiens
  misc_feature (1)...(324): n = a,t,c or g
gaagagtttggacatggcagagattcggccctgcagctgccttctggtgtggattagcacttgggaatgccttngtanctatnggggaatgancnggccgngactaactgcattnaatcnttcctcanaccgcctgnttttaancnantngctnagtgaactgacatgtttgtcagntgctggncttgatttatangntgccntcngcctggtnngntggnnatnnctgttcgnttnntacntgncnggcttgnttnnctttctttgnctcgcctntnnntnaccntgncnnntcgcctnccngtnntgtcngccggncttccc

SEQ ID NO: 43013 - DNA, 318 bp, Homo sapiens
  misc_feature (1)...(318): n = a,t,c or g
gggacacaggcagggtcagcaaaggtgaaggcgggaacacaggaggccgagagccacagatactgcccaagaggagcctcctgagcggccatctgagaggaagcctctccctgccaaggacgcccaacaggccctacctggcgatgagcagctccaccaggtgcaggtggccgcnggtgnncgnancatgcanaggngggnagcanctnctgtacagtnttnnnngtntactcttgttncnttncntgttgntcnntctttnntnnnntantnnanntnctntnntntntnncttncttcntnnncncntnttcttct

SEQ ID NO: 43014 - DNA, 335 bp, Homo sapiens
  misc_feature (1)...(335): n = a,t,c or g
gccacggcgccggctcctgttggttttagtatctgtcttgttccactagaatctcaaccccacaaggacaagaatttttatctgttttgttcactgctgttttttcagcatttatagcagctccaggcgcgtagcagagaatcattaaatatttatagaaagattaaatacgctcttccggaagcaccgacnaacaagattaantgagcttggattgaacctcgtagcggcccgtagtactcctccttcccgccatcctatagatgataggaagananggaaaagccccgcccctcgctnggntgntggatgcgagggcttnngaagnnntatcg

SEQ ID NO: 43015 - DNA, 339 bp, Homo sapiens
  misc_feature (1)...(339): n = a,t,c or g
gaaggcacagagagagaaagcataagatacattataataaggattagtatttcactgggctgagtctcagtggtggtaaggagataagaccttaccatgttataggagaccttgaaagtcatgctaaaaatttgaatttaattctttatggttgtcnattaactatttntantcnnannaggctcnccnttccggatgcacngcttnncaagntnaatcagtttncnttgnacntcntnntnnncgttttnttccnnnntncctcnntcnntntttttnntttnnttntatttgcagtctcgcnntttgtttttntctntatctntnngcttnncttgc

SEQ ID NO: 43016 - DNA, 345 bp, Homo sapiens
  misc_feature (1)...(345): n = a,t,c or g
gggaaaggaagtggcttcaggtcagttatttagcatggcagagccagagctatgagctgtaagatctttcttgcactcagttctctttttcacatcctagtggtgccttttttctcttgtattgagagttactatttcacgtattcatgagccacgtgtgagtgcgttacatgcatagaacatggaatgatcaaggcagggtacgtggggtatccatggccttgagtgnnnnnnnnnnnnnnnnnnnnnnnnnnnnnnnnnnnnnnnnnnnnnnnnnnnnnnnnnnnnnnnnnnnnnnnnnnnnnnnnnnnnnnnnnnnnnnnnnnnnnnnnnnnnagaattggg

SEQ ID NO: 43017 - DNA, 341 bp, Homo sapiens
  misc_feature (1)...(341): n = a,t,c or g
gattgatgatgtcattatatgcaggagaatatccttgtttgtaggaaataaacattaaaatatttagggnnnnnnnnnnnnnnnnnnnnnnnnnnnnnnnnnnnnnnnnnnnnnnnnnnnnnnnnnnnnnnnnnnnnnnnnnnnnnnnnnnnnnnnnnnnnnnnnnnnnnnnnnnnnnnnnnnnnnnnnnnnnnnnnnnnnnnnnnnnnnnnnnnnnnnnnnnnnnnnnnnnnnnnnnnnnnnnnnnnnnnnnnnnnnnnnnnnnnnnnntgncgtgaattcaggnggtgtancntgtttantgcntnnctnacnnccnntttcntnnnnntcngcaccta

SEQ ID NO: 43018 - DNA, 355 bp, Homo sapiens
  misc_feature (1)...(355): n = a,t,c or g
ggtagatagtaaataaactatatattccactgtatgtctctaaggcttttctcatttgcagatgagaacatttataatgtgataatttatcatataatataattattttggggtannnnnnnnnnnnnnnnnnnnnnnnnnnnnnnnnnnnnnnnnnnnnnnnnnnnnnnnnnnnnnnnnnnnnnnnnnnnnnnnnnnnnnnnnnnnnnnnnnnnnnnnnnnnnnnnnnnnnnnnnnnnnnnnnnnnnnnnnnnnnnnnnnnnnnnnnnnnnnnnnnnnnnnnnnnnnnnnnnnnnnnnnnnnnnnnnnnnnnnnnnnnnnnnnnnnnnnnnnctagagtgattttgcattaaaa

SEQ ID NO: 43019 - DNA, 311 bp, Homo sapiens
  misc_feature (1)...(311): n = a,t,c or g
gcagagctagtacctagtaagcagggattggaacccagccagctctgtctggttcccaagcccacattctcagtactgtaaccttacattgcctgccttctccgttgaacctgagcattctcagggactttgagccttgatagctgaggcttctgcataaaacagccctctgggtaaattctcaaacttgccaactcaaaaggattgacagatttcctgttgtcttgcctgcacttgtccccatgttaagaggaggttgagatctatagtnccagnannataacngnnanngctctgtncannntnttttg

SEQ ID NO: 43020 - DNA, 337 bp, Homo sapiens
ggggagagaagggaagaaaaatagcctatggaatagacttcacataatatcttttggtagccatttgttgcagctcattttaccttagtttttggttcaagaaggatgtttatataggcctatggctatttactctgtttacgtatctgcctcctgttactattttttctgtatttaggccagaaattgcacacactagttttacagtgctttatttaactggattatttgcctgttatcagtaagcaaaagaaaatgcactttttcaaggtactcagagataacatcttccaacttgagggcaagattttctcagctaatttcactatttttatgt

SEQ ID NO: 43021 - DNA, 318 bp, Homo sapiens
gcggaagagaaagaataccatgcagaaggaggcaaagtgcctatcaagtggatggcattggaatcaattttacacagaatctatacccaccagagtgatgtctggagctacggggtgactgtttgggagttgatgacctttggatccaagccatatgacggaatccctgccagcgagatctactccatcctggagaaaggagaacgcctccctcagccacccatatgtaccatcgatgtctacatgatcatggtcaagtgctggatgatagacgcagatagtcgcccaaagttccgtgagttgatcatcgaattctcc

SEQ ID NO: 43022 - DNA, 315 bp, Homo sapiens
ggtcttttttttatctgttttttctctgggtcaaattatctgggtcaaatttttctgcttcttcacatctctgttaattttttgttttataatggtaactgtgaatgacacattgtagaaattcgtatcttcctctgaagacttgagagcagttaaattctggcagatcaattgttcctgtggaggctttttagcctttctttggagaggtttacttcagttttgccattagagtattgcccttagtcctggttcacagtccttatacctaaggtgagatccttctgtggtttaaatggaaagcccaccatgtta

SEQ ID NO: 43023 - DNA, 324 bp, Homo sapiens
gtttttttctttccttctactttctttggggttattttgtgctagtgtttttttctacctttttatcccgtttctccctagcattagcatcttaggctccaagtaatactttcattatatcctttcatttgtttcttcccccctctgcccttgtcacttatgctctggtatgtggtattttcattattggtctgttctatttttgaattcctactacaatttttaaatctctctgatagtttatatttttcatttcaaactactttgttactaatttttaacttatttccttttgggttaggcaaaaatggtatgtaatattac

SEQ ID NO: 43024 - DNA, 324 bp, Homo sapiens
  misc_feature (1)...(324): n = a,t,c or g
gaatttacccattactagtcnnnnnnnnnnnnnnnnnnnnnnnnnnnnnnnnnnnnnnnnnnnnnnnnnnnnnnnnnnnnnnnnnnnnnnnnnnnnngtttttatttcttttagttaaatacctagaattggaattgctgaggtatggtaagtgcatatttcatttttttaaaaannnnnnnnnnnnnnnnnnnnnnnnnnnnnnnnnnnnnnnnnnnnnnnnnnnnnnnnnnnnnnnnnnnnnnnnnnnnnnnnnnnnnnnnnnnnnnnnnnnnnnnnnnnnnnnnnnnnnnnnnnnnnnnnnnnnnnnnnnnnnnnnnnnnn

SEQ ID NO: 43025 - DNA, 315 bp, Homo sapiens
gaaaatgcagatatttttgagtcctaggatgatgttctctctccaaagaagatggacctttgtttctggtaggtgttcaggctaagggcactagcagtcccagatcatctcagtctagtcaggacttcagagaatttgaagctggacttaattcgaggtcatcctagaatgatggcttgaatctaggctatctagttctgaggtccccttaggggcccaacttggcaagccctaaatttccatttttgcttctttagaagatatggcttagctcaatctgtttcaaactttattcagctttttaccattttaata

SEQ ID NO: 43026 - DNA, 326 bp, Homo sapiens
  misc_feature (1)...(326): n = a,t,c or g
gcttctctaaaggttattttgtccatccctcaatcttgggagcagatctctctttcttacaacaaaagaagggggcagtccccactcctcaagacccccagagggagagtcccagcgtatcctcacgctggtctctcacacctttacagccaaaagattcccaagaagcaacaaggtctggagagtggtttggagctgagatcccaagttcatggccagttacagtctcgccactagccatgggacttggggccagcacacccaagaattctcacagacggaattcttccttgntctcatttacctgataggtctattgagtgaat

SEQ ID NO: 43027 - DNA, 325 bp, Homo sapiens
gggattctttccacctgcactcaacatattcaaacagtaacaccttaatcagtgagtaatgatctatgggtctcaaggaggaaatactgatttctccatgatagcaagtgacggtcctgcaagattctggtgtgtgaatgaataatgaaggtgctcgcctagtatggagagttctataagataaagcagctaagtcttcattattttttaaccaaatgccctggattctcctttttcattacagaacaaggagaacttaatgatgattcataaaatgatgcaagtaatttttctatcccaggatggggaaattgttcactatttt

SEQ ID NO: 43028 - DNA, 326 bp, Homo sapiens
gaaagaaggaagcaaggaaaaacaaaacacaactattacactggtcttagagccacacgtacctggttttcaataccagctcctccatttaacaactgtgaccttgggccagtcactgaaatattgtgagcctcagttctcctatctcaaaatggggatttctcaaaatgttgtggggattaacttagacaatgtacataaggtgcttaccacagtaccttggacaaagaagattaaactctgcacccggaagtattatttttagaaaaaaattagcagcagtagagtggaaagtccccacactttgaggtcagacacacctgggt

SEQ ID NO: 43029 - DNA, 317 bp, Homo sapiens
  misc_feature (1)...(317): n = a,t,c or g
ggatggggatccctcaggccagggtaccattagcaaatcgtccccagcgtaggaatcactagaacaaggatctgcaaactacagcttgtgggccagatctgacttgctgcctgtatttgtaaataaagttttattnnnnnnnnnnnnnnnnnnnnnnnnnnnnnnnnnnnnnnnnnnnnnnnnnnnnnnnnnnnnnnnnnnnnnnnnnnnnnnnnnnnnnnnnnnnnnnnnnnnnnnnnnnnnnnnnnnnnnnnnnnnnnnnnnnnnnnnnnnnnnnnnnnnnnnnnnnnnnnnnnnnnnnnnnnnnnnnnnnnnnn

SEQ ID NO: 43030 - DNA, 317 bp, Homo sapiens
gtcttttttgagggttctgagagatcatctctttcttatatcttttttaaaagaatttatgtttctacttagtccccaaaagcatctttctcttaacctattattttatgaccatctaaccccagctgaggtgttgtagctaataggttccacctcaactgtgccctcatgtccttgcacagtgcaaggtgcacaatcctggcagaccctgcatgtcatttgggagagaaggacagttcctagaaaagtgacaagccaaggaatagagttatcattgagctgcagtgacttctcacccatgtgtgggaacaaatttt

SEQ ID NO: 43031 - DNA, 320 bp, Homo sapiens
  misc_feature (1)...(320): n = a,t,c or g
ggtggactgggacgcactctctccgccttcctctgccccctcgttcaccccgcagaccagaaccagtactggagctgggtctccaggtacgtccatctcatgccttgtttgcatccagcgcctatcagccactcaccacgacgggacgcggaagtggcaggtgacgggggtgtgtgccagcagatgcggatgccaggaagagtgtgagaacaggggtgggattaccgtctgtntgggaggggctccangtacccctattcccgtaanacccactgnnagatggcngnttgcaggncaccanaaggaacatntgnctatac

SEQ ID NO: 43032 - DNA, 322 bp, Homo sapiens
gatggcaattaatttttttttaaagttcctactgattttacattatcatatacctgtacatgtgccaggccttcagaccctccccctgaatcccccttaaccaactcctggcacccattactttctcatatctcactctgcatctctaacaacatcatctacacccttcttccttatttcaaccttgacattcacaacctcttgatcaaagtagataaaaaagacctgggatattatattaataacaagtcttctaaagtggctactgtgctatgttatgctgttgtttgagatgtaatttcattacaatggcaagaaatta

SEQ ID NO: 43033 - DNA, 321 bp, Homo sapiens
gggaacgtctgaggttatcaataagctcctagtccagacgccatgggtcatttcacagaggaggacaaggctactatcacaagcctgtggggcaaggtgaatgtggaagatgctggaggagaaaccctgggaaggctcctggttgtctacccatggacccagaggttctttgacagctttggcaacctgtcctctgcctctgccatcatgggcaaccccaaagtcaaggcacatggcaagaaggtgctgacttccttgggagatgccataaagcacctggatgatctcaagggcacctttgcccagctgagtgaactgcac

SEQ ID NO: 43034 - DNA, 320 bp, Homo sapiens
gtcaagtaataagaaactatttgcctttgggaggtagtgtggccagtacagaaagcaccaggccaaaagcaggaacctcagcttccgtccttgatgcagtccttgattcgcgaagttaagcaaattacttaatttctctggacctcagttttttaatctataaaacaaaagcatggaggtagatatttatggtatctttcaactccaccatcccctgtgcctttcttattcctgttaaaaggaatttcatataatcgtcagtttagagaagatcataagcaggaaatagacattgagagagaggagttataattcagatg

SEQ ID NO: 43035 - DNA, 308 bp, Homo sapiens
ggcaagatcactcaaggaagagttgaaacagaaaggagaaacggctggaggactgagctcagggaacctccaacattgagaggtcaagagggaagggggtatgcagatgtgtgatgtaagatgtttttccttaatattaggcaactatctattgagcaactcctctgccagccactgtttcaggtgcttggaataacaagtacccataaggcagctcttactgcttattatctgtgttcttgggtgagttacttaacatgactgaaccccagatttctctctcatctgtaaaatggggttaaacagcc

SEQ ID NO: 43036 - DNA, 176 bp, Homo sapiens
  misc_feature (1)...(176): n = a,t,c or g
ggacgcattcattctaaatatgaatggaaatttcaaaacttttctgagagaatgtatcccctattgaacttgcttagttgttgttactattacttttttaaaaataataacaagttaattagatttatcattataatctctttgtcaggtttttagcangnagatntgnnantttg

SEQ ID NO: 43037 - DNA, 304 bp, Homo sapiens
  misc_feature (1)...(304): n = a,t,c or g
ggatgctcaatggccttgatgtcctccgcaaagtaaacattgaagtaatctgatgattcacagganagtgcgangnnagantcttannantgtgngncnantgntatacntgacntttgaagacngggnncatantatgactngactcagangcccctgtctcattcccncaataangncancctttntannccnnaatgntnaggtanaccccanactctgcgactatnnnaaganaggatatgttactcctgccanaaatcanngncntagcnnntcctgnngnnctttatctctnanattg

SEQ ID NO: 43038 - DNA, 310 bp, Homo sapiens
gtctaaatgtaactattgaacatgattagctgtttcatccctagtagagtgacagaaggaaacatccatagacaggagtaataagaaaccagctaaacttctaaaccatttttaaaggatgcgtgtgagctggcataacctacctactctttcctatgggcctctactgagagcatggaggtaatacatctaatacactgaagaccagggcaagagagctggaagaaatccctcttaagcactccaggccttcactgagtatgaggtgctggtctccaaaggcagagggcaaggcaaggcagagagggat

SEQ ID NO: 43039 - DNA, 320 bp, Homo sapiens
  misc_feature (1)...(320): n = a,t,c or g
gtnnnnnnnnnnnnnnnnnnnnnnnnnnnnnnnnnnnnnnnnnnnnnnnnnnnnnnnnnnnnnnnnnnnnnnnnnnnnnnnnnnnnnnnnnnnnnnnnnnnnnnnnnnnnnnnnnnnnnnnnnnnnnnnnnnnnnnnnnnnnnnnnnnnnnnnnnnnnnnnnnnnnnnnnnnnnnnnnnnnnnnnnnnnnnnnnnnnnnnnnnnnnnnnnnnnnnnnnnnnnnnnnnnnnnnnnnnnnnnnnnnnnnnnnnnnnnncaggnttnttnatttaatnnccggcatgttnatcnnnttaangggggnttatttttnttggccc

SEQ ID NO: 43040 - DNA, 108 bp, Homo sapiens
  misc_feature (1)...(108): n = a,t,c or g
gcagcgaatgggcgagctctttgaatgtgtgctgttcactgctagcctcgccaagtacgcagacccagtagctgacctgctggacaaatggggggccttcgnncccgg

SEQ ID NO: 43041 - DNA, 214 bp, Homo sapiens
  misc_feature (1)...(214): n = a,t,c or g
ggttttgcctcctccctctgctctccctttgtttggagcctgtgctgtttgatttccgtgtcttgtgtgctgcacccttcaggagaattcaggaaaaccaattctgtgtcctcggaggaccacagcccagttgggccccaggcgaaacccagcctggagcttgcaggcaggacgactgntcancncgcanaccgcgaggacnnggaggnncccc

SEQ ID NO: 43042 - DNA, 322 bp, Homo sapiens
gacaaaaaatacaactgttattatttgtctagtttttttctaggtgttgaagtgggtgcattggcctaatacaacttagtaactatatcttcttttaggagtggaacacagaatgacataatatgattccttctaaattaaaataaaattgtaatgaatcagaatttataagctgatatacaaaataaagtataaataatgtttattatcattatacaattatttagctattaaagaagaatgaactccattgctttagtgcttgtgaatgaaccatactcttattttatggacttggaaacttcgtcaatgatttgataac

SEQ ID NO: 43043 - DNA, 342 bp, Homo sapiens
gctgtgcttatggaagaggacaggaaagtttattgaatacgacactgataatatcagcacatcccacagggtttataatgtatgagacgtagctggaaccccctatttttctgatatacagcttgggatgcattgttatttcaaaaacatggaagacactgatgattttgcttcagtggtttgatgtagctgtttttgacagtgttgataggaagggaagaagaaaatagtactgatcctttagcgttttcctattaatatctttctttaattgacaaaccttaaagctatgcgtttgtgaattttaagaaacatctgtgcctagagtaaagacttttacct

SEQ ID NO: 43044 - DNA, 334 bp, Homo sapiens
  misc_feature (1)...(334): n = a,t,c or g
gnnnnnnnnnnnnnnnnnnnnnnnnnnnnnnnnnnnnnnnnnnnnnnnnnnnnnnnnnnnnnnnnnnnnnnnnnnnnnnnnnnnnnnnnnnnnnnnnnnnnnnnnnnnnnnnnnnnnnnnnnnnnnnnnnnnnnnnnnnnnnnnnnnnnnnnnnnnnnnnnnnnnnnnnnnnnnnnnnnnnnnnnnnnnnnnnnnnnnnnnnnnnnntaaagatgagatttcacagttttgcccaggttggtctcagacttctaggctcaagtgatctgtcnnnnnnnnnnnnnnnnnnnnnnnnnnnnnnnnnnnnnnnnnnnnnnnnnnnnnnnnctggtcc

SEQ ID NO: 43045 - DNA, 334 bp, Homo sapiens
gcaggcatgagtcaccatgcctggcccctgttaaactttctacctagcaatgtggttagtcttcccatcccactgtatagcagtttcaggatgatgctgcctctctaacttggagtgctgaacaggaagtaagagttggctttacggtaggcagctgccaggctagcataaattctggcataccagaaaatccctttgatccttcctaaatgcttgtcttactttgtgccaaatgactaatgatttaaagcagtggttctcaaccctgcctgtatatcagaaacacccacagaacttttaaaaattatctagagaaactgccccacctgacatt

SEQ ID NO: 43046 - DNA, 335 bp, Homo sapiens
  misc_feature (1)...(335): n = a,t,c or g
gtgaggcatacctcaaggccatgctaagcactggctttaagatccccaagaagaatatcctgctgaccattggcagctataagaacaaaagcgagctgctcccaactgtgcggctactggagagcctgggctacagcctctatgccagtctcggcacagctgacttctacactgagcatggcgtcaaggtaacagctgtggactggcactttgaggaggctgtggatggtgagtgcccaccacagcggagcatcctggagcagctagctgagaaaaactttgagctggtgattaacctgtcaatgcgtggagctgngggccgncgtctctcttct

SEQ ID NO: 43047 - DNA, 340 bp, Homo sapiens
gcaggagagtaggtgacctggccaaggccagcacacaggacaagattaagcatccagggacccggggtcacagccctcactccattgcaggggtggggatgacagaggccagaggagatcagacaggggcagctgttgatggttctgagatgcagtttctgtctgaggggcctcctcccactcctggcctgtgcagaggggtgggtgtgtggagggaaggtgggtctgccctggtcaaacagcagaggcattgcctgttagtctcattccattccgagtgcccccagggagagtcagccaccttatgtagagaggcaaggccagaaggcagggggggcct

SEQ ID NO: 43048 - DNA, 335 bp, Homo sapiens
  misc_feature (1)...(335): n = a,t,c or g
nnnnnnnnnnnnnnnnnnnnnnnnnnnnnnnnnnnnnnnnnnnnnnnnnnnnnnnnnnnnnnnnnnnnnnnnnnnnnnnnnnnnnnnnnnnnnnnnnnnnnnnnnnnnnnnnnnnnnnnnnnnnnnnnnnnnnnnnnnnnnnnnnnnnnnnnnnnnnnnnnnnnnnnnnnnnnnnnnnnnnnnnnnnnnnnnnnnnnnnnnnnnnnnnnnnnnnnnnnnnnnnnnnnnnnnnnnnnnnnnnnnnctgatattattaaactgaggaatgactagttgaattaacaggtttgtccaaacagttcctgtaaatattgagttctatccaatgcatagaa

SEQ ID NO: 43049 - DNA, 334 bp, Homo sapiens
  misc_feature (1)...(334): n = a,t,c or g
gactggggagacggagaggggagaggggagaggggagagcctctcccttgctttttaatttttagttgacatgtaataattgtacatattnnnnnnnnnnnnnnnnnnnnnnnnnnnnnnnnnnnnnnnnnnnnnnnnnnnnnnnnnnnnnnnnnnnnnnnnnnnnnnnnnnnnnnnnnnnnnnnnnnnnnnnnnnnnnnnnnnnnnnnnnnnnnnnnnnnnnnnnnnnnnnnnnnnnnnnnnnnnnnnnnnnnnnnnnnnnnnnnnnnnnnnnnnnnnnnnnnnnnnnnnnnnnnnnnnnnnnnnnnnnnnnnnnnnnnnnnnnnnnnnnnnn

SEQ ID NO: 43050 - DNA, 339 bp, Homo sapiens
  misc_feature (1)...(339): n = a,t,c or g
gaatgaaatgataatacctaagtaataatcaatcagaagtaaaaacaaagtcatacttcactcccatttttgtttctaatctatatgttttctactttaaagctgtagaattttctttttttcattgctaattatattttaatgtgactagtctgggactattttttctaaaattttcagtttttctatataatttttctctaacttttagtttctttggttatgccccttatatttttgagaagtgtctattcagatttttgcccattttaaaactgggattatttaattattttctattgagttttttgnttcttttgnattctgcttatcaatcgc

SEQ ID NO: 43051 - DNA, 331 bp, Homo sapiens
  misc_feature (1)...(331): n = a,t,c or g
ggaagaattagtgtatttttttcaaatagtacagtaatttgcctcataagcataggagcattgggaatgagagggaactgtgcccagtatactgttttttttcttcctccaataaaagtggtgtagtgccgaaagtgctaaaatatttagtgcggtattgctctgtgaattcaagttcaacagacttcactttggtcatgtttattaaaccaccagtgacatttaaaaatatatttttagcagtcgtaatgttagtcaccaagggaaggtggtggaatgtctatgttttcgattttactgtgagtnaaaaaggcacattnctaccttctat

SEQ ID NO: 43052 - DNA, 340 bp, Homo sapiens
gcggcacgaggcgaagacgagtggggggtgccccactgcctgaccctccggggccagcggcagtccatcatcgtggccgccagttctcggtccgagatggagaagtgggttgaggacatccagatggccattgacctggcggagaagagtagcagccccgcccctgagttcctggccagcagcccccctgacaacaagtcccctgatgaagccaccgcggctgaccaggagtcagaggatgacctgagcgcctcgcgcacatcgctggagcgccaggccccgcaccgcggcaacacaatggtgcacgtgtgctggcaccgcaacaccagcgtctccatgg

SEQ ID NO: 43053 - DNA, 340 bp, Homo sapiens
gtttttcttctttttattgccaaataatattccactgaagtatatagcaagttttacttatccattcatcagctgatggatgtttggactgtttttattttgggactattatgactaatgctgctatgaacattctcatattcacgttccatcaatatagaaagtctactaactagtttatggtaatgggatgatgtggatcatagggagcctggatatccacaggagaccaaaccaggtcttttgtaagacctggggtgactcctccttcccttagaagtcagtcacttcctagaatccgcttatcttcatcccctctgccactacccctcagttcaca

SEQ ID NO: 43054 - DNA, 341 bp, Homo sapiens
gatactctcacctcaaaatcattttaaataccttttgagaagccagcaaaaacaaaaacaaaaaaccctcagcagtgtaatttagactaagaaatagatgttactgtgagtggatgattaatttttaggaaaaatgtaccagaaaataattgtaatattatgtatagtagctattttggtacaaggctttgcaaaagccttgacattttaaagagccttgaaagaaaaaccatcaagtaaatctgagtgaagtgcaactaaagttggaggaaaactagagttacttccagccctcaattctagagtaaaatttgaagagatactcagtttatttacgaatt

SEQ ID NO: 43055 - DNA, 322 bp, Homo sapiens
gggggattggaaacatgctccgcgcctccagagaaaagttgctcccgaggtccatgcccctggaacgtgttcctatcactctggctggttgggctggtccttagactgggtgcttatgattaaagggtcttggttagcccactttccctctccatgtggagatggaaggtagagaaggatacagtgtctatcctcaagttgctacggttcagtgagagaggcagacatctgaacaggcaggtaggattcagtgtgctcagtgcactggggatttggagagagatgggcttgctctctctgtgcacccaggagggccacgcac

SEQ ID NO: 43056 - DNA, 327 bp, Homo sapiens
  misc_feature (1)...(327): n = a,t,c or g
gcaaacaaacaaacacccacttagactgaaaccgtgctaaatactttataccttattattttatcttatttaatcttcattgtagttcggaaatatcttcattttacagctgaggaactagagattcagaaaggttaaatgacttgcccaagatcacagctaatgatggcactgggatttgattccatttctaacttcaaaccttctgtggttttcgttatacacctttctggtacctagctgttgcttatacctattatgccagataattatctctatcctttttttctagtannnnnnnnnnnnnnnnnnnnnnnnnnnnnnnnn

SEQ ID NO: 43057 - DNA, 325 bp, Homo sapiens
  misc_feature (1)...(325): n = a,t,c or g
gcggcacgagctgtagtcaggtattcattagttcagtaaatctttgtttagctactatgagcccttcctagcactatggtaggttctagggaataaaatatatatacatataaacaatgcctagcttaaaatgtgggacaggtgagcaataaacaattgtttaaagcgggcaataggtacaattgggtaaatatgaatttatctaacaaatgtttttttgaggtattttcatgtaacaggccttgttcctggagttgaggatactaaggtgaatgactccctgcctgttggtgtgggtgtggagggctgggttcanacctggaga

SEQ ID NO: 43058 - DNA, 321 bp, Homo sapiens
gcggcacgagcggcacgagcggcacgaggaactatctgatgccccctaccccccttcccaatctctcacctgcactcccttctggaaaaatggactcctgaatttatgcatcatgggtggcctaattaggttaactcatgccctgtcttgaggtgtgacttggccagattagcccattaattgccaagtcagtattgcctgaggcttcctgtactgggttcggtggtgactcagtggggaatttgatagttgggttccctttggtgcccaaaaaatctccatattataggcaggtctcccagcctgtccacacacaccctg

SEQ ID NO: 43059 - DNA, 328 bp, Homo sapiens
gcggcacgagggcacggctctgggtcagggctcagaggaggaacacctaggtagggggttagggagcttcttggaggaagggacatctgactcaggggatgagaaggagttagccaagtgcacagacaagggaaagaggggtccacatggaagaagcagcacaggccaaagtccagagacaagaaaaggaatgccactggtgagaaaccaaaagaggttgggcatagccaaaaggtagagtttgggttcggtaaaggataagaggaggcaaactgaaagcaaactcaatggttttccataacagacaagctattctgaacgagttatg

SEQ ID NO: 43060 - DNA, 320 bp, Homo sapiens
gccttccaaagcacgtggctgacctctctgctcagctgcagcacttttcctgctcagctctatcagttcaaaacccatctcaacacaaaatgcaaaatttagtgttcttgaattgtctggtaattttataattggagtaacttctgaaaagaatgttacaaatagatcccaaaaaacaacttccaaattagcaggcacctttaaatacttcaaaagagtaaaattttaatcaaaatgattattagaaagaaagataatattttagataaaattgaattaaactaagctaaaattttgttgagtaatttgttaagttgttt

SEQ ID NO: 43061 - DNA, 324 bp, Homo sapiens
  misc_feature (1)...(324): n = a,t,c or g
gcagacttttgaagacgtttctaacaatgaagtcagagtttgaaacaaatgagaaatgagaatcagagataaatggaaggagaaaggaacatcaaaacaaatttaatatctttggagagaaaagaaagggtactatgtccacaaaatcagaaaaacatgatgaaaaaaacagtaaaaggaatattcagaaaagttaaaaatacagtaccagacactttaaaaacataataaaaatgttgggagaaagttgaaaaactcagaaaaaagaaccaaaaaacaaaggtantgaagtcatgggaggaaaaaataagaaaatcggaagat

SEQ ID NO: 43062 - DNA, 325 bp, Homo sapiens
  misc_feature (1)...(325): n = a,t,c or g
gtctgggtctagcatttattgcttcctggcttctggcttggcttcttttcgtccattctcatctgccagtgtctggactccctgggccttcaggcaggcattttcaggagcacaggccatgtggttggtctggagccctgtgtcaaggagagtgtgcgtgcttggtggagcagggttgctggagtagtgtgaaaaaaagcagatgagctggcctctggagacaaagctgtgtggcaagactgctggtttagtgggctctgaacaccaagaacagggccgggagtctgatacttgggggctgaactgagtcctgtggcgcangatt

SEQ ID NO: 43063 - DNA, 195 bp, Homo sapiens
  misc_feature (1)...(195): n = a,t,c or g
gggctcggcgtgggtgaggcaggagactactgtttctcatcaaaatccccctagcagtatttgactttctgagctgtgcatgtgtattacttggataaggtaaataatatatacatcaaggaaactgaaaaaaggggttccaggttcttaaagtttttttttttttaaanaatngcttgnntttttttttttttt

SEQ ID NO: 43064 - DNA, 352 bp, Homo sapiens
ggatttttgtatagcttgtttaaacctcatttataaaagctgacaaatgtaaaactgggatttattttcatctttgtaatcaaacagtaagttgaagctaacttcaatagttaaactgtcttaatgaatttggaaatgaactagctctgcaccaaatactttgatgttaagtattgtacaatttcaggaagcattgtccttggaattgtgggacatggcctgactgtaagctctcagagaaccacagatttcccaggataggtttagaaaagcttatattagcatggaattatttagcaaaggttgaaaaatttcctgtaacatacaggatgagcatcccacatctggaaac

SEQ ID NO: 43065 - DNA, 219 bp, Homo sapiens
gtttgctcccatggagactttttgcactcatatttcaccttattgtgtcatgtgtaattcattcttaccatatataatacaactagaataaacaagtttggaaacaactaacttgggactaaggtgactcttactcattgtacaactgaatagttgggagcagaaggtgtaaaaacgaaagctattggggcactgtgtttttgggtttttttttttttt

SEQ ID NO: 43066 - DNA, 345 bp, Homo sapiens
  misc_feature (1)...(345): n = a,t,c or g
gccctttttgttgacaatgtttaacatcctacagttatgacaacctaatttgaatttatacagcttaacttcaataacatactaaaattctgctcctttaaagcttgttctcaactattttagttctttttttttttttncattggncggagttnaattttntnncccgggnggnantgcagngccncnatttgggctaatnganncntnggccncngggnttnagggnatnntcnggcccaancntccnaggtggngggnntnangggggccccnnncnnnnggcggggtnaatttttgnaatttnaagtannggnggggnttaananggtngccnngccgggc

SEQ ID NO: 43067 - DNA, 358 bp, Homo sapiens
gattttgtatacaagaatgttctgatagcacagctgcaatgacaagaaaacattctggagtagttccccagattaagcagcttgcaccagaaagaaaatcacacactgcttggtgtgtgatctcggtacaaaaaatgtcagttgaactaaacagtatgtgtgtagtgtcataataagaatcatgagaatgcaaatacatattaatgattattgtctttattatgtgctaatagaaaaggatactgttagtgaattaatgttaaaataatgttcatattaaaacaatggtactgaggagaaatttgaattacagaacagactcagtgcttctgcaaggtaagaaacaagtttgtttcct

SEQ ID NO: 43068 - DNA, 348 bp, Homo sapiens
gatctcaacaattccatgaaaccacacattagaaaatgtaaatagttaagtagtaaattttatttttgcttaactggtgtttgactacattgtaaacctcccaacaagcattcaagtagttttagtccttctaaattttttaaacttactgctccaaatgctattttcaatgtttcatgaccacaatgtcagattatttggacaaaaaccttcaaacgcaggacttttccttaggcagaatgtatttcttgattgttgtcttaaggcatgggtttggtttatttcattttaaagcatgggttatggtaaagagaaaatgccatttgaatgatgtctatgtctatgccc

SEQ ID NO: 43069 - DNA, 345 bp, Homo sapiens
  misc_feature (1)...(345): n = a,t,c or g
gctaggcagatgtgatgactgctgttggcgtcggtcccctgacattgttggtgtgtctcaattgtgtgccagtccctgagacacccccacctcaagttgctcagtttggaccctcgggcgtcagtttgattccctgtcctcacccagctcttccagtgcgtcaacaagcccagatggctttacctccaggttgagtcctcactccttcctttctcttgctccccaccccaacccccgcctcattgtccaggccacggacacgtccttcctggtgatccagccctttcaagtagcccatccctcaatgcagtgttgncgtcttaccatccatcccctanaccatcc

SEQ ID NO: 43070 - DNA, 335 bp, Homo sapiens
  misc_feature (1)...(335): n = a,t,c or g
ggcggcggcgcggcgcaggcaccggcccggggagaggcaccatgagcggatcacagaacaatgacaaaagacaatttctgctggagcgactgctggatgcagtgaaacagtgccagatccgctttggagggagaaaggagattgcctcggattccgacagnnnnnnnnnnnnnnnnnnnnnnnnnnnnnnnnnnnnnnnnnnnnnnnnnnnnnnnnnnnnnnnnnnnnnnnnnnnnnnnnnnnnnnnnnnnnnnnnnnnnnnnnnnnctgtctgtgtgcccagtttgaagccgtcctgcagcatggcttgaagaggagtcgaggattggcactca

SEQ ID NO: 43071 - DNA, 342 bp, Homo sapiens
gacctgatggaacagattcaagatgactgcactggggatgaagattacacctatttgattctgcgggtcattggaaatatgggccaaaccatggagcagttaactccagaactcaagtcttcaatcctgaaatgtgtccaaagtacaaagccatcactgatgatccagaaagctgccatccaggctctgcggaaaatggagcctaaagacaaggaccaggaaggtcttcttcagactttccttgatgatgcttctccgggagataagcgactggctgcctatcttatgttgatgaggagtccttcacaggcagatattaacaaaattgtccaaattctacca

SEQ ID NO: 43072 - DNA, 336 bp, Homo sapiens
  misc_feature (1)...(336): n = a,t,c or g
gggtttttgagtctcttgtttggctcatgatcttttcaacaccattgaaacacacacaacctcatttttttttcagagcacatataaatgaagaatgacctggaggttaggtgggaatgggtaggactgcctctctctggactcagattcctgggagctgacccagaactgaatgcccttagggatttcaaactcattaccatttgtagtgatgcacttcactctgatctcctttcagtgttacctttgttagagactacactagaaaggaaaatacttggaataaactttanccgttttcaaagttttgtactgccacatgggangactattaat

SEQ ID NO: 43073 - DNA, 342 bp, Homo sapiens
  misc_feature (1)...(342): n = a,t,c or g
ggccctagaacacttctgattttctgcttgtaaaagaggctgtgtgtgtgttgggccttctagcacagctgctctgagttatgctaaatagtgtgcgtcccatcttccatggcctgtccgcacttccagctctcagccctgcaaattaagatgcattagtggaattttgccaaacaccttttatttacatcccacaatgctggggagttttctggcagtgagtctggttttttcgactcttcatgtctgttaaaattaggttccatattcaatatatacaggagaaattcctcaaggnttctggcatcttggnggtgtgcttccttagttaatagnggtgag

SEQ ID NO: 43074 - DNA, 331 bp, Homo sapiens
  misc_feature (1)...(331): n = a,t,c or g
gtcggcgtgggcagattgcagattgcttgagtgtgtggcaaaaccctgtctccacaaaagatacnnnnnnnnnnnnnnnnnnnnnnnnnnnnnnnnnnnnnnnnnnnnnnnnnnnnnnnnnnnnnnnnnnnnnnnnnnnnnnnnnnnnnnnnnncnttcanttgcngnngtntctncncntgancntccntnggactngancctggcnaacatngctggnancctgaccnnantcactaatanncnnncatagtggnntcacccccgccnnccctnttctggacnccnaaggcaagtgccttgnacgatgannangatntgnagancctgc

SEQ ID NO: 43075 - DNA, 324 bp, Homo sapiens
  misc_feature (1)...(324): n = a,t,c or g
nnnnnnnnnnnnnnnnnnnnnnnnnnnnnnnnnnnnnnnnnnnnnnnnnnnnnnnnnnnnnnnnnnnnnnnnnnnnnnnnnnnnnnnnnnnnnnnnnnnnnnnnnnnnnnnnnnnnnnnnnnnnnnnnnnnnnnnnnnnnnnnnnnnnnnnnnntttttctaattttgcnttcctgttttttttnattaagttgancttcantctntactaaaaatncaaaaaattagttaggcatnggggcaggggcctgnantcccagttacttgggaggntgacccaaaatggcgnnaacccgggaggcggannttgcnnnganccgaaat

SEQ ID NO: 43076 - DNA, 334 bp, Homo sapiens
  misc_feature (1)...(334): n = a,t,c or g
gaactggatcaagaatgaacaaggaagacaggaatgatagatgagatcagagatgtaacagaggcnnnnnnnnnnnnnnnnnnnnnnnnnnnnnnnnnnnnnnnnnnnnnnnnnnnnnnnnnnnnnnnnnnnnnnnnnnnnnnnnnnnnnnnnnnnnnnnnnnnnnnnnnnnnnnnnnnnnnnnnnnnnnnnnnnnnnnnnnnnnnnnnnnnnnnnnnnnnnnnnnnnnnnnnnnnnnnnnnnnnnnnnnnnnnnnnnnnnnnnnnnnnnnnnnnnnnnnnnnnnnnnnnnnnnnnnnnnnnnnnnnnnnnnnnnnnnnnnnnnnnnnnnnnnn

SEQ ID NO: 43077 - DNA, 335 bp, Homo sapiens
  misc_feature (1)...(335): n = a,t,c or g
gnnnnnnnnnnnnnnnnnnnnnnnnnnnnnnnnnnnnnnnnnnnnnnnnnnnnnnnnnnnnnnnnnnnnnnnnnnnnnnnnnnnnnnnnnnnnnnnnnnnnnnnnnnnnnnnnnnnnnnnnnnnnnnnnnnnnnnnnnnnnnnnnnnnnnnnnnnnnnnnnnnnnnnnnnnnnnnnnnnnnnnnnnnnnnnnnnnnnnnnnnnnnnnnnnnnnnnnnnnnnnnnnnnnnnnnnnnnnnnnnnnnnnnnnnnnnnnnnnnnnnnnnnnnnnnnnnnnnnnnnnnantcagcctcccgagttgctgagcttccataacactttaccacccaacccat

SEQ ID NO: 43078 - DNA, 332 bp, Homo sapiens
  misc_feature (1)...(332): n = a,t,c or g
gnnnnnnnnnnnnnnnnnnnnnnnnnnnnnnnnnnnnnnnnnnnnnnnnnnnnnnnnnnnnnnnnnnnnnnnnnnnnnnnnnnnnnnnnnnaatccaaaacttttgggtgcccacatgaggctcaaataaagatctgtaatttcaaataagggatatgtcattggtagaacaaagtgaactgggtcgcacagactttggcctcattaactccttgttacttacggtatactgtttgacgtcgcgtatttctaattctttgtttgcagcctgaaaccaaaacatcaaaaggtccttcaaagaaacataaaattctgtatgtgtcttatggata

SEQ ID NO: 43079 - DNA, 321 bp, Homo sapiens
  misc_feature (1)...(321): n = a,t,c or g
gaaataccaaacatagtgaccttatttacaagagaacagattcagccttttaaaaattgcttttatgcagggcatggtggcatgtgcctgtggttccannnnnnnnnnnnnnnnnnnnnnnnnnnnnnnnnnnnnnnnnnnnnnntttgatatttttagatctacaatttatcacctttttttttttttntttnaaaaacanggtttngctntgtngccnannnnaaagggcagccggggaannanantnnanngnancnttnaacnccggggntaaancagncntccnanntaancctcccangtacntgaaantnccga

SEQ ID NO: 43080 - DNA, 326 bp, Homo sapiens
  misc_feature (1)...(326): n = a,t,c or g
gcggcacgagaagtgacaaagagggacaactaatactaggtagaataaagatggtagcatactactcttgagaaacttacgtcaaactgatttaaatttccacctgtgacaagatagacttccaaaccattatggagatacaggttgagtattacttttccaggaccagaaattttccaggattaatnnnnnnnnnnnnnnnnnnnnnnnnnnnnnnnnnnnnnnnnnnnnnnnnnnnnnnnnnnnnnnnnnnnnnnnnnnnnnnnnnnnnnnnnnnnnnnnnnnnnnnnnnnnnnnnnnnnnnnnnnnnnnnnnnnnnnaagatg

SEQ ID NO: 43081 - DNA, 325 bp, Homo sapiens
gatctctcaggttagatgtagttcttgagaacttctgctcttggttattaaacaaaaagtattcctttgtttgttcctttgtttattcatttgacaaacatttactgggcacatactacattctgagtagacaattcatatggctaaggtcatacatttaattagtgaaagcatttgccttagaactcctgattttctagttcaatgctatcctcgtaatagtattctactgtttgaaatatagttgatctgataaatattaatttgacctattatttttatttagaacaatatgcacttatataaaaatacctacatattggta

SEQ ID NO: 43082 - DNA, 340 bp, Homo sapiens
gcggcacgagcaatctcctttacagttttggaagcaggtttgttgccatggagttcacattttgacgggagttgagaagtataaaggtaaccatttgttttagtttcaacgatctgacaaaaagataggctgttgctcttcttctggaaaagcctgattggtaagattcctttaagggctcagccccaaagagctttatcccatcccctcgcagactgaaaactaaagcctgcagagacctctgaaggaaaacctgtcccgggctctgtcacttcacacccatggctaaccctggaggtggtgctgtttgcaacgggaaacttcacaatcacaagaaacg

SEQ ID NO: 43083 - DNA, 348 bp, Homo sapiens
gccagattttacaagatcacaagatgttgatcagcttcgtgatatcaaagagtgcctatggttcatgcttgaagttttaatgacaaagaatgaaaacaatagccatgcctttatgaagaagatggcagagaacatcaagttaaccagagatgcccagtctccagatgaatccaagacaaatgaaaaactgtatacagtatgtgatgtggctctctgtgttataaatagtaaaagtgctttgtgcaatgcagattcaccaaaggacccagtcctcccaatgaaattttttacacaacctgaaaaggacttctgtaacgataagagttatatttcagaagagacaagagt

SEQ ID NO: 43084 - DNA, 340 bp, Homo sapiens
  misc_feature (1)...(340): n = a,t,c or g
gagctcatcatcttgctaaagataacagagcgcttggccaagccagtgcaatgcctgggttcagatctcctctctcatcttttgcctacaacgggaaaggaggtaaaaagtctgtgttccaggtgtgctgagcacttgttgtgtgccgggagttgtagtagacactgtcctgtcttttttttttttngaaananantttanntttggttnncangnnngaagnncagggccncaatntgggttaatngaantttcaacntcnggnantnagggnatttttgggtttaaccntccnnngnannngaantnacgggcncgcncaacnacnccgggttatttt

SEQ ID NO: 43085 - DNA, 348 bp, Homo sapiens
gaccagtgtccccctgagttctcctctgaaggtggatttagttttggagaaggaggtggctggcctctggatcaagatcccatgcacagactacattggcagctgtacctttgaacacttctgtgatgtgcttgacatgttaattcctactggggagccctgcccagagcccctgcgtacctatgggcttccttgccactgtcccttcaaagaaggaacctactcactgcccaagagcgaattcgttgtgcctgacctggagctgcccagttggctcaccaccgggaactaccgcatagagagcgtcctgagcagcagtgggaagcgtctgggctgcatcaagatcgc

SEQ ID NO: 43086 - DNA, 353 bp, Homo sapiens
  misc_feature (1)...(353): n = a,t,c or g
gcacagatgcccgaacccacaatctccaatcttgattttaagatgaccaattgcaccgtgcaaaatttatcgtgttctctttgctgctgtgaaattacttttactaatatgagatgcattaaaagtgaggttttgaaacacctacattcatcatccatcaatnnnnnnnnnnnnnnnnnnnnnnnnnnnnnnnnnnnnnnnnnnnnnncaggaaacaactaaggcttttaaatgcaggccgttttaaaccgggggcaaggaacattactgcttgaaaagaagtcaccattcctccatgcctcaggggtaagacattcataactcacacacagagaagtgggaggcaggaccct

SEQ ID NO: 43087 - DNA, 340 bp, Homo sapiens
  misc_feature (1)...(340): n = a,t,c or g
gcagatgtgaaccactgtgcctggcctgtttgtttgtttgcttaatacatatactccatcactcattccaagaaccaaaccaaactctctctgctcttggagcctgagacactggctatncgctcnncanattcnatnccatntcatacatctcnacaggagacncactctgnnnnncangcngaagngcngcnncacaatctcntctcactgcnacctncanganctgtannnnnnnnnnnnnnnnnnnnnnnnnnnnnnnnnnnnnnnnnnnnnnnnnnnnnnnnnnnnnnnnnnnnnnnnnnnnnnnnnnnnnnnnnnnnnnnnnnnnnnnnnnnnn

SEQ ID NO: 43088 - DNA, 336 bp, Homo sapiens
ggcctggtatgtttgggggactgggaaaagtaggggagtaagggaggagaagaggaaggaaaaggaaaaatctgcttctagaaggagagaggtttgagtgtggaggggtgaagaaaggattgaagacacaactgatgaaaatgacaggatgagggtgccatgattctccaaacccagagtctcctacagcctgggcacgactctgcaggtgaacactaaagaggctttgcattgcacaaggaactaggagaggaaggaaggattcacaaactgaatccctcgatttctggaggtcatagaaaatgagggtaccctggtggggtgcagtgctcacac

SEQ ID NO: 43089 - DNA, 352 bp, Homo sapiens
gttattgcatacctccttatgtgatttttagaaggtgctttggaaaatactgagctatcaaatgagtccctactgtttagaaggctagttgcatttttgaaagtgagtttttccccctttaatatcaccgtaaggctctgtttggttacatgtatagggttttagagtataaagatcattggaaactgtcgtagtcctgcagttgatccttgaagggtacagaggattcagtgaagcagaggtggggagttgatcacagagttggagagaatctgggaggttggcaagcctatcccctgtgtactgaggcccaaagttaatacaagatcagacagacaaataacaaaaatag

SEQ ID NO: 43090 - DNA, 297 bp, Homo sapiens
  misc_feature (1)...(297): n = a,t,c or g
gnnnnnnnnnnnnnnnnnnnnnnnnnnnnnnnnnnnnnnnnnnnnnnnnnnnnnnnnnnnnnnnnnnnnnnnnnnnnnnnnnnnnnnnnnnnnnnnnnnnnnnnnnnnnnnnnnnnnnnnnnnnnnnnnnnnnnnnnnnnnnnnnnnnnnnctgatcatgctgctataaagaccatgcacatgtatgaaatgtnggcctantctcnatannacnntcttgggcccaaccctcctgntncgngancctngagtncnacnatgcccnttttggccgccntgnntannaccctttcttac

SEQ ID NO: 43091 - DNA, 350 bp, Homo sapiens
  misc_feature (1)...(350): n = a,t,c or g
gacaaatgtcagagactctgtcacaaaggggagtgtcttgtggatgagccctgccggcagccctgcaccacccccagagctgactgtggtcacccgtgtatggcaccctgccataccagctcaccctgccctgtgactgcttgtaaagctaaggtagagctacagtgtgaatgtggacgaagaaaagagatggtgatttgctctgaagcatctagtacttatcaaagaatagctgcaatctccatggcctctaagataacagacatgcagcttggaggttcagtggagatcagcaagttaattaccanaaaggaagttcatcangccaggctggagtgtgatgaggagtg

SEQ ID NO: 43092 - DNA, 343 bp, Homo sapiens
gtaaaacagctgaagacagtgcccagaggaggggctaacaggccagaggctggttagcagtgggaaggcaggcagggatgagggctcttggatactagacaggagttcactcatggtgaactccttgaggaaataagatcagtgatagcacctgtgatccagggagtctgtcatatttagagatgtttaacacagcattatgagaaacatttaccaacttcttcaaaagagaggtgttgaggaagtaagctattcattatgttgtgcctctctttaatgtttataaggaccaaagtacaggcgcccctctgtatccatgggttccacatctatggattcagcc

SEQ ID NO: 43093 - DNA, 340 bp, Homo sapiens
  misc_feature (1)...(340): n = a,t,c or g
gcaaagattaacaccagaatggaagaaagcagcaactgcattaaaagatgttgtcaaagttggtgcagttgatgcagataagcatcattccctaggaggtcagtatggtgttcagggatttcctaccattaagatttttggatccaacaaaaacagaccactaagattaccaaggtggcagaactggtgaagccattgtagatgctgcgctgagtgctctgcgccagctcgtgaaggatcgcctcgggggacgaagcggaggatacagttctggannncaaggcanaannnatagntnaagtaanaaggatgtgatngagctnacnnacgacagntttga

SEQ ID NO: 43094 - DNA, 342 bp, Homo sapiens
  misc_feature (1)...(342): n = a,t,c or g
gtcatcagtgccctcttccttctgaagcttgtcaattttaatgtctggagaaccagggggtggtgtaggggcttccagacccctgtttgcaatcatcacttgtacaccagagcttctcacacttagatgcatgtggaattccctggggttggagttaagttgcaggttgcgattccataggcctggcctggggtctgatcctgcatttgtaaccagntcccgggngangatgtggaggnggccaatctcattgttntacnnactgttcnaagactggatgncttgcttcngnnnnnaanctcaagnccngagctgaannctgaatgagcaatggtgcnggaa

SEQ ID NO: 43095 - DNA, 340 bp, Homo sapiens
  misc_feature (1)...(340): n = a,t,c or g
gcaagtcttcatggaggattacagtgcgacagcttgagagcatgattcgtctctctgaagctatggctcggatgcactgctgtgatgaggtccaacctaaacatgtgaaggaagctttccggttactgaataaatcaatcatccgtgtggaaacacctgatgtcaatctagatcaagaggaagagatccagatggaggtatatgatgntcntgcngcaantgggtacatccntgccagtacgnanctcattgttgtatgancngntccaagattgatgtacttggcttcngcnagaacctttagcacatagctnanaactgnangtngcagcggngattg

SEQ ID NO: 43096 - DNA, 330 bp, Homo sapiens
  misc_feature (1)...(330): n = a,t,c or g
gctgacattcctacttggtaagatgatggaataaaatttagcttgtcatagtattcatttaaaaattgacatcttaaaaaacaagttccatactatttattgggattacattacttagtagttagtcaacctttgttacgtctaacttttaagagaatgtaaacattcatttacagtagtttgttttatctgatatgtgagctttacacagatgcttgtattgaccacagttaagcattttgacatagaaacattaaagtgagctacttgtatattttgtatcactatanngacnannttgagctatatcacctatgaaatgaatacccg

SEQ ID NO: 43097 - DNA, 343 bp, Homo sapiens
ggaggaatttaaggctcagaaagggatttgtgacttgtgcaaactcacaatacttttatgttaagcctatttttatgaaatttttagcccacttctcgatggagaggatttcaggccaaatagaatgagtggagctgggatgggaaccctagtgtccaggctgcctaagttagcacattgcacttgcctgtcactgtctagcttgagggaggtctttgggtagcaaccactgcctttcactaaaggctagtttcatttatatgatcacatttgtctaagttcttcagtaagtcatactggttccttccattatattcagcttgttttcttccacaacctttct

SEQ ID NO: 43098 - DNA, 291 bp, Homo sapiens
  misc_feature (1)...(291): n = a,t,c or g
ggggcacccatctcatcctccgaaggtttatgaaaatgcactcatcatttgctaattcattccactacgtgtattacctaatttgtgacacgatgtgaagtaccagagagataattctaaataaaatatagttatgggtctcaaggagccagatatgctaatctcctatcctcctgcagtttacagtggtcctcaccagatacttatttacaaaaattcagnnnnnnnnnnnnnnnnnnnnnnnnnnnnnnnnnnnnnnnnnnnnnnnnnnnnnnnnnnnnnnnnnnnnnn

SEQ ID NO: 43099 - DNA, 360 bp, Homo sapiens
ggaattcttctttggaatcgccttcaaaggcagtatatgaaaatctactttacagtcacatggacatcccccttagtccaaatgtattttctctctcttcttcactttcaccctgtttggcttaactgatcaccttgtacctattctaaggagacctccggtctcagagctagggatctggaggcgagttctgagtatggagcaaggttggacacgctattatgccaaccaaggctgaccaacaaaacacctcatccaaaatgcacgaggaagcccaataccgtaagttcctttggaaaataattcaacagcattttttgagtccccaccactgggtcaggtaggtgttctattctacct

SEQ ID NO: 43100 - DNA, 351 bp, Homo sapiens
  misc_feature (1)...(351): n = a,t,c or g
gatttgcttccgcttgctgttgagttggactggcttggacgctggccaggagcccaagtggacttggtgcttctctttgacagccgggattgaaaatcccagtcaagtggccagagcgcgagggtgagatttaggagacctggatgtcctcactttgccgcccaggaactgctgtgtgactttcaccaagtgggacaacctctctgaactacgtttaccccggctataaaatggaggtgttggattggctgccacaagtgtccttccacctccacaataccgtgactggagcgggttttcactcctttttcttgttagcataactgttggagctgtanagggtttggaagt

SEQ ID NO: 43101 - DNA, 347 bp, Homo sapiens
  misc_feature (1)...(347): n = a,t,c or g
gggcaggtctgagagctgtcccactggccagacttctctccagcagcaaagccagcctggggcttgcatgttgatcctgagcaagcttaacggggtgaagctgggctttctcccccctgtgactggagtgcatgttgacaccagcactttttctgcacatgtatcttcaatccaacaaggccgtttttttaatgctgagtaacaggccaccaagcggntactgcgttatatcttntcagcaactggncgnagactcttntgcaccattttttacaccagacctgcttgncaccacanngagctattttactgccngcacaangacantccaaccaccaccagncaga

SEQ ID NO: 43102 - DNA, 347 bp, Homo sapiens
  misc_feature (1)...(347): n = a,t,c or g
gcatttattgtgcttctagatttaccatggagttatgtcaggataaacttttcgtaagttgaaaatattgtaagttgaaagcacatttttaacaggatattttcagcttatgatggggttattgtaaggtgaggagcatctgtattgtatattatgagctaaattttggtgatactgttcataagatatacattgaaccactttctttctgaattcttttatctgccttcattctggcacatatttttctttttttttaaatttacaattttaaaattgtttgttcgtttgtttacnnnnnnnnnnnnnnnnnnnnnnnnnnnnnnnnnnnnnnnnnnnnnnnnnnn

SEQ ID NO: 43103 - DNA, 333 bp, Homo sapiens
  misc_feature (1)...(333): n = a,t,c or g
ggtttgattcaagagcctgtacatctgaaaggtcattcccagaggccagtggggcactgggtgtggagaggggagcagtcacccttcctgcctttttgctggggcatttctgtttatcagtgatatcagtgactgtttcagaaatgtcccaaacagccttttgnatcctgtagccacttgcccaaaatgcctttctcctagaacctgtttggcngcatcttcctggaacgatanggcaaccaaggtnggaaagccaaagncaaagacactcctgganaggggtccacctgangnccctgtgccctgtgtcccccaagtnatntcangtncagg

SEQ ID NO: 43104 - DNA, 350 bp, Homo sapiens
gggtatgtgtcactgaagactttcatgctttaataatcgagaactagaggggttaccgagatcacacttcttggttagctgacattgattatcaaaatgctatggaacctacctactccgagaaacctaattttaatagtgagattaaatctctgaaccctggtgtaaaggagttgtaagatgtctcctgaaataggcagtgacaacccttaacataaatcttagcccagcatcagaaatggaaagaattttggaatcagaatcagaaccaagttagactctcaacctgcggctcatattacttgtgtgacttcacccaagtcacagaatccacatgagtctcagtttcc

SEQ ID NO: 43105 - DNA, 340 bp, Homo sapiens
gcagtttaaaaagcatgagacatggtgttctgagccaggatgaagatcttcaggttggaggacattttacgagatctaggcaggcaggcaggcaggcatgcaggcatgcaggcatgcaggcaggcaggcatgcaggcatgcaggcatgcaggctgtgtggaggctgagggcttggcctgtggaggcagagaagtgtagtacaagggtcaagagcatgagctgtagagtcagtcaggcctgggtttgagtcccagctctgccacttatagctacatggtcttaaaacactcttaacattactaagccttggattctactttaaaatggggagaatggccgg

SEQ ID NO: 43106 - DNA, 288 bp, Homo sapiens
  misc_feature (1)...(288): n = a,t,c or g
ggcaaatatatagacatatatgtattattttatctagccagaatcatattgctttgtaacctccttttattctctttatattaaattacggccatgttcctgtatcattaaatattacactatatcactacttctgatggaagtacagcaaaccactaaacacggaagtcaagtcctgggctctggaatagtatatattattttagttatgcccagcttctggacctgggatggcattttgtacgcanccttatctcttttgnannnncntananntnnnnnntaggc

SEQ ID NO: 43107 - DNA, 333 bp, Homo sapiens
  misc_feature (1)...(333): n = a,t,c or g
gattgtgtactctaaaattagattattttgttataaaaataaaatgtacagagtactgtttttcacttgtgaggcaagttaaaattatatttatgtatgtttgtgtatgtgagtgagtgtgagttttggtgacttaaaatagccttttatannnnnnnnnnnnnnnnnnnnnnnnnnnnnnnnnnnnnnnnnnnnnnnnnnnnnnnnnnnnnnnnnnnnnnnnnnnnnnnnnnnnnnnnnnnnnnnnnnnnnnnnnnnnnnnnnnnnnnnnnnnnnnnnnnnnnnnnnnnnnnnnnnnnnnnnnnnnnnnnnnnnnnnnnnnnnnnnnnnnnn

SEQ ID NO: 43108 - DNA, 351 bp, Homo sapiens
gcagaaacctcccgtggagcagaaggaatctttgaagaaccgtgatgagtgactaaagacagagcagtgtccgtagcatataactgatgaataaaatcctgcttccttgataatagaaacatgttgctgctttgttccctttatatgactgaaaaagctatgttctctttcagtgaaaaagaaaccataattgtctttctggagatttgaatttagaaggacagtgaagataggagaggatgaaatcttgcttctccctttttttgaaactagagatacctaaggaagaagaaaaggagaaatggaagaaatcaaactttgtctttcccctgctcagtctctaagccctca

SEQ ID NO: 43109 - DNA, 214 bp, Homo sapiens
gcagaggccactttgttaagcatttttctaaaactcaagtccagggtcttgagctctcgcgaagttcccccgtgtttcggaggagctgtgagctgcgcaggccttttaggaggagataattactctttaggaggaagatgatgatttcggggctcagtatgcctgaaggggaagtatgctaatttggttcttggttagtctttttttttttttt

SEQ ID NO: 43110 - DNA, 334 bp, Homo sapiens
gaaaagtacacaaaagcagaatgctaaaatgaaaaacctatggatacccaccacctagatccaacagttgccaacgtttttccatattttctccatcttttttttaattagttaatttttttagaggaaggggtcttgctattttgcctgggctggtcttagaactcctggcctgaagcaatcctccagtgttggcattatgggtgtgtgccatggcacgcggcctatttgctctggatcatttcaaaataaattacaggacttatgacacctaatccctaaatatttgagcaagcaccttcagtaattgctttaagtattctggcatctggag

SEQ ID NO: 43111 - DNA, 349 bp, Homo sapiens
gcaagtgacaggggcaatggatctcaggctctgagataagtatatcagatgacactggtggctctaaggatattgcaattaagcagctacctgtagccaggtattctgctgctcttggccttttcccacgcatcgtctcgtgtcttctccgaaagaccttggaagataggcctggaagagactgttgatgccactttgaagaaaagaacactgagaactagaggagggaacactttgcccaagattactcacaaagccaagacccagagtccagcttagagaatagaagttgttcaggctgcaattgcaagctcattcctctacctcatacttcctctgaggattttga

SEQ ID NO: 43112 - DNA, 301 bp, Homo sapiens
  misc_feature (1)...(301): n = a,t,c or g
gtattttgaactgataaggtatccctagtccatagtgcaaaatctaaatatgaaaaaatttaaagttgtcaagcaaaattctgcataatagtcatgtggaactaataatagctaatacttattgagtgattattatatggtaggcagtttgcatatataaataatttaaagtagagtatatagtagagcacagatcctggaatcaagctggttctgcaagttcctcatggggtgttcattgatttcatagcattttcacctaaaaaagtanggatagagaaggggngactatnccncttat

SEQ ID NO: 43113 - DNA, 314 bp, Homo sapiens
  misc_feature (1)...(314): n = a,t,c or g
gctcttattagccactactgcccatttgcttcaaaaatatatttattggtctccaccatgtgtgacacacacaggatttccaaacataccacttttgagaaaaatgtgcagtaaaaaggaggtttctagaaagtgacatgnaantcacattnangcactagctgncctaggaggagacctggnnnatgatangtgnttcgaannanantngnnagannnantnggcgnaggtnngcnagnnngtngccntttnacatncnntncnnngacnnagnngangntnngngnnanangcnnnggggttnnnnacaagt

SEQ ID NO: 43114 - DNA, 341 bp, Homo sapiens
  misc_feature (1)...(341): n = a,t,c or g
ggcttatgctttcctctagaaagcatgaatatgttttaataagactttcattaatattaaagctgtacataaatagcattttaaatgcagctttcctgacatgaaattttaaagaaatttaaagaaaattttaaagaaaaattaaatatttttcttttgcattactgcattcttttctcattatttgaaaattctaattcagaatcttcctcaaaaatcaatttagatatttcttaaggtaacaagttatgattgattgattgattgatannnnnnnnnnnnnnnnnnnnnnnnnnnnnnnnnnnnnnnnnnnnnnnnnnnnnnnnnnnnnnnnnnnnnnn

SEQ ID NO: 43115 - DNA, 346 bp, Homo sapiens
ggctaaatggatggccttaagatggcattttaccatcttaaccatatataggaactgccttgggtttagctagaagatgtatgcattacaatttcttccaaacattgttttctaagcctttattaggtttggccttttgatccagtctttttgttctatatgtatgtcattttctaagtcagtaatataaatgttggaatgacaactcaagagtctacaatgtggaataaataccattggaaaaaatcacaaatgaatcctggaatcacaaaataaaacacacacagacaggcataatgctgctctttcttggtttacctaggatctaacattgattgtgcaactg

SEQ ID NO: 43116 - DNA, 341 bp, Homo sapiens
gcgctcctcatccaccaatatttacttgtatcagcctttaaatcatgtaggtcacatttctgtgaagaatagcatcatcgaaaacccttgctgacttgtgaagagcaaaaatcattgcaacggagtagtttgttcagtgcccgcagcaagaacctcccactccgatccacctcaaaaagtaataactgcttcttctggactgttttctattctcactacaaatacgtatcatatacctacattgagatagtttatttttattaaaatgaggtcattttatacatttggaaaaataacttagcaacattttaaagttttagggagtttaaaaataacattta

SEQ ID NO: 43117 - DNA, 347 bp, Homo sapiens
  misc_feature (1)...(347): n = a,t,c or g
gggatttaaagtcataggttgtgaaaatcttgtggagatctgcagaataaatgatactgattttttggtgagatatggaaagtcaactctatgatttggctgcagtaaaaacattttttataatactctgaatagagagaattattccaatacgttatattgaatgcatagcattctcttgggaaaggtaaatttctaaaagtagtattttaaagcagcaagcattttcactgttttgtgaataggaggggagaactgggatgatacttgtgaatttcttctcatctcaatgcctgtacanagggctatgttagnanntcantntccanaggntgaacangagcttc

SEQ ID NO: 43118 - DNA, 335 bp, Homo sapiens
gcacgcatgaccctttacagaacaagcttgtgggcccctgcactagaggaagtctgtatgctgaggcccaggggccagccctcagccgcacgcccatgcctgactcctctaagagttacgtgactctgtccttgcctgtcctgcgcccctctcaccacttcactccccagggaagatcttggccttggccactgcacgctgttggggagcacactgggagtcctgaactgtcagtgctttctagggcgtgtgagcagacataggttatatgttgagacacaggctctactgatggacagttacctgaattgtaaatcctggttcttgtcacttac

SEQ ID NO: 43119 - DNA, 334 bp, Homo sapiens
gaaaaatgatatatgagtttgaattattttaaatttcctgtgagcataaacctaaattaaattttctcctggaataaattatcaaaataattcttagtagcaccatttggtcaaaacagcacaaatacttcctattttaatagatgttcaacataaaaatacaatcaatttgattgggaatgcatctcaatgagatggatgtggctacctcgtttcaattagtgaatgaatccattaatgaatgttacttcctgccagactgagacaggattctgcattaatttaattcctgtttatcatttttttattgatgagaaggttgagaaaccatgtt

SEQ ID NO: 43120 - DNA, 333 bp, Homo sapiens
  misc_feature (1)...(333): n = a,t,c or g
gcagttttgtctatagctgctgagataacttgctgtaactctaggactaattttacctatggccattgcccaccagttggagcttgccagctccccagggctttactaataccaatgaactttctcttaagatcacaagnnnnnnnnnnnnnnnnnnnnnnnnnnnnnnnnnnnnnnnnnnnnnnnnnnnnnnnnnnnnnnnnnnnnnnnnnnnnnnnnnnnnnnnnnnnnnnnnnnnnnnnnnnnnnnnnnnnnnnnnnnnnnnnnnnnnnnnnnnnnnnnnnnnnnnnnnnnnnnnnnnnnnnnnnnnnnnnnnnnnnnnagaggctgagg

SEQ ID NO: 43121 - DNA, 341 bp, Homo sapiens
  misc_feature (1)...(341): n = a,t,c or g
gagccacaaatataaaggtttcctacttcatatgacactgatggagaacttgaataaggttcaaaatagaacccttagcaatttataggactaacccccaggctgaaatcagttcgtttcctgggatggtttgattcatttatttgagctattatggatccacctaactggtgtatgagtgcaaacacatcctgtgtgtgttcaatacctctctgttctttcctcactaaacctgctacaagtaaagaggtgtgcnnnnnnnnnnnnnnnnnnnnnnnnnnnnnnnnnnnnnnnnnnnnnnnnnnnnnnnnnnnnnnnnnnnnnnnnnnnnnnnnnnnnnn

SEQ ID NO: 43122 - DNA, 338 bp, Homo sapiens
  misc_feature (1)...(338): n = a,t,c or g
gaaattgttgagcaaccctggtctcaaactcctgggctccagtgatcgnnnnnnnnnnnnnnnnnnnnnnnnnnnnnnnnnnnnnnnnnnnnnnnnacaatactttttggcagttatctccatttgaaataaatctattgtaaaatgtgtgccaagaacagtatattatttggaaaatagtacaataaaaagagcaaagatcttgaagcagcttttcaaatttaaaatattttaaatgtattttaattatacaaagacaaacttttgggggaataattgtgataattgcttcctttctgctcaggaacattttaaaatataaatatgtaggcaagcta

SEQ ID NO: 43123 - DNA, 347 bp, Homo sapiens
  misc_feature (1)...(347): n = a,t,c or g
ggactgcataggnnnnnnnnnnnnnnnnnnnnnnnnnnnnnnnnnnnnnnnnnnnnnnnnnnnnnnnnnnnnnnnnnnnnnnnnnnnnnnnnnnnnnnnnnnnnnnnnnnnnnnnnnnnnnnnnnnnnnnnnnnnnnnnnnnnnnnnnnnnnnnnnnnnnnnnnnnnnngtaccctgggcncagnggnttatgcctgtaatcccaacantttggnaagctgannnnnnnnnnnnnnnnnnnnnnnnnnnnnnnnnnnnnnnnnnnnnnnacncccccatgtttannnnnnnnnnnnnnnnnnnnnnnnnnnnnnnnnnnnnnnnnnnnnnnnnnnnnnnnnnnnntt

SEQ ID NO: 43124 - DNA, 341 bp, Homo sapiens
gacctccatgacccaaacacctcccattaagctccacttccaacacaggggatcatatttcaacatgaggtctggaaggtctaatatctaaactatagcataaatatatctcaaaagaaataaaatatggccattcacttaggcaaggagctccctgattggttgctgtgtcctagaacatacactgaagtttacaaaaacattgaagactggttgtatctaaacagattttaattttagacaacatgaacgcattccttgccatgaaaaatgaggaggtgtctgcctatgttatcttgtcagaattcatatcatttacagtctatgccaaaattgtttac

SEQ ID NO: 43125 - DNA, 340 bp, Homo sapiens
gcaacattttcagggagtggggacactgattttaatggaaaaaggtgaaaatgggaaaagcttcctggagaaaatgacctttaaattgagtcttttagcgttaatagcaagaaaaaggaattgcgaggctgggggaatgtcatatctaaaaaatcattcagcattttaaaactatttcttgtgctctttgatgaacccaaagatataacaaaaaagatgtagtttattactaaagaggtttactgcctcaaacaagccattacagaaacattagttaaatacaaagtagctggaaatgaacaaaaatagagtcagcatatttagctctaggcaaacggcc

SEQ ID NO: 43126 - DNA, 345 bp, Homo sapiens
  misc_feature (1)...(345): n = a,t,c or g
gcacttcaaatgcagtcactaccgtttcagaatatgcactttctttcttttttgttttttgttttttttaagtcaaagcaaatttcttgagagagtaaagaaataaacgaatgactactgcataggcagagcagccccgaggcccgctggttgttccnnnnnnnnnnnnnnnnnnnnnnnnnnnnnnnnnnnnnnnnnnnnnnnnnnnnnnnnnnnnnnnnnnnnnnnnnnnnnnnnnnnnnnnnnnnnnnnnnnnnnnnttcttttaatttaatttactgttaccnnnnnnnnnnnnnnnnnnnnnnnnnnnnnnnnnnnnnnnnnnnnnnnnnnnnnnnnnnn

SEQ ID NO: 43127 - DNA, 351 bp, Homo sapiens
gaaagaaaataaaaatgggtcttttcccacagacagtttggaaagtgctgctttagaccctgctcttttgaccccttgaatcagccagtgaggctgggctgtgcaacggtaacaggcagcgcagctgctccacacacctgaggtttatttctccttcatgctaaatgtccagggcacatcagtcgggagccttgctcatctgatcgtgcagtgacccagccgatggagggcccgtctcaacatgtgcttctgctgtcctggaggcaggacgggggtgtggccacttgtacaggacacacatcactgctcatggttcattggccagcacaagtcacgtagccacacctataa

SEQ ID NO: 43128 - DNA, 336 bp, Homo sapiens
ggtaagaacatgagtaaatctatgtaagtaagtggaaataacatctgatatcaacttatctttagcttaatgtcaccaatcattattaaatgcttatgactaatttcacagattttggaatggttttatggttttatttgagcatttgatagcatctcttattttgttagctgctcaaatatttctatgacaataattaatttttggaattcatatttcagttccccgagaatttattgaaaggaaaaatccacacttgtgaaaaaaaatcaatgtgattagaagacatataagagcaaaggaagtcaaaaacaactatattaaaatttaaatgag

SEQ ID NO: 43129 - DNA, 336 bp, Homo sapiens
gggcgattgaaagaaggaactagaatgagggcccctgattatactacaccagaaatgtaccagaccatgctggactgctggcacggggagcccagtcagagacccacgttttcagagttggtggaacatttgggaaatctcttgcaagctaatgctcagcaggatggcaaagactacattgttcttccgatatcagagactttgagcatggaagaggattctggactctctctgcctacctcacctgtttcctgtatggaggaggaggaagtatgtgaccccaaattccattatgacaacacagcaggaatcagtcagtatctgcagaacagtaag

SEQ ID NO: 43130 - DNA, 343 bp, Homo sapiens
  misc_feature (1)...(343): n = a,t,c or g
ggatggggtgctcaccccttcaagaaggactgctttggctatgaggtcccgctagtacccccattcacagcccttttccttttggttctctgagtctcccttccaattttcattgccttctgcacattcttgtcacctgctctgcccatgggtttttgtgtctagatgcgagggagcagggagtgtgtctaggactgagtggtgtggtgcctgtgatgtctccctgaagaaggagcagaaaggaaaggaggaggtttggggttaaggctggggttgcaggtaggtcagggctgggctgggtctgggaaagaattaggtttgaggttgagatcanaactgaggt

SEQ ID NO: 43131 - DNA, 344 bp, Homo sapiens; identical to SEQ ID NO: 41838

SEQ ID NO: 43132 - DNA, 343 bp, Homo sapiens
  misc_feature (1)...(343): n = a,t,c or g
gataaaataaaaataaaatgttggcttctaactaaaacaggcagatatgtagcagtgttctccactggaactttctgtgatgtttggttcatgttctaggtctgtactgtccagtacagtagccagtggccacataaaccnnnnnnnnnnnnnnnnnnnnnnnnnnnnnnnnnnnnnnnnnnnnnnnnnnnnnnnnnnnnnnnnnnnnnnnnnnnnnnnnnnnnnnnnnnnnnnnnnnnnnnnnnnnnnnnnnnnnnnnnnnnnnnnnnnnnnnnnnnnnnnnnnnnnnnnnnnnnnnnnnnnnnnnnnnnnnnnnnnnttagtaaaaacagggtttcnccat

SEQ ID NO: 43133 - DNA, 336 bp, Homo sapiens
gcggcacgaggggagaggtgataaaacagttgcagggatgacccaactacatggctgcataacacactctaatctgaaatgggagcagaggcatcattcactctcagtaatttggcgctggttgtttggcacattgagtcataagcatttgagtcttccacggtggcactgtcaccatacatgtgacccacagattagatacgagataggtggagtggagaaagcagagtagctgagagagtacttgatgaggctgtttgcttcattggggctcacagtgctaagaaaaaccatttgcagaatcatgggagcagaatgatcatttctcctataatc

SEQ ID NO: 43134 - DNA, 334 bp, Homo sapiens
gaagatttatacttatttaacaatactaatcattttactacttagattagattatggactcagaactattatggtttctggtggcaacaaactagtcactttggctagacatagatgttcctaaatctctaattacccataaattgtttgcacttctacatatatctgattgtgcccattacaacagaacctgtttgtttagttttcccaggtaaatctcataggcagctatttatgcctagacaaaaaatatgttaggagatcaaaaaagatcgtcattgtgattttaatgagaaagcatcctggagaaaagattgaaaatgtaggctgatat

SEQ ID NO: 43135 - DNA, 325 bp, Homo sapiens
  misc_feature (1)...(325): n = a,t,c or g
ggtccttttaatttacgattcctaatgctctccctgcttgtatacttagaagaggcttttcacttttcaaacaatttcatggttctgctctgttagactagaaaatgtaagcaatgatgagttgacntaaatatatttgnttnggattcagtnctcttncagcatcttccagaacttancantgagaattctcgtcttcattcttccttcaataattgtcctgcatactttctcagtttattnctattcatcctctactccnangncttngggcctcttaattggcagcacgtgnctgccccatttggaaggaactantntaacg

SEQ ID NO: 43136 - DNA, 330 bp, Homo sapiens
  misc_feature (1)...(330): n = a,t,c or g
gcggagcttgtagagagaggtagaaaaataggaagcctgataggcttagggttctggttgctaggaaatgggtaaaggagaacttttaacgctagaaagctctgttctgagtcggtaaatatttgagtgaccaccgagtatcaatcagccaccttattaagctttgtagggggagactgaggcttgattttgcccttaaggatttaaaaatctgctggtgttacacaatgctttgagacaggttaatgctgcccccggggggtctgggggaattggttctggccgtcacagatgtggtaggaatgggtanagaatggggaaagggatgga

SEQ ID NO: 43137 - DNA, 332 bp, Homo sapiens
  misc_feature (1)...(332): n = a,t,c or g
ggcaggaccgaattctggagctgtcttttcattccctctgaagtataaaaaagcagtctttggagccagtcctgaagtggctccatttctggcttttaagtgggtcgacaagagtagaatctttgaagttaaaaagagaagtgaggttttcttgttattttgatttctaaataattaatttggaaaccgcttttttgaagaatannnnnnnnnnnnnnnnnnnnnnnnnnnnnnnnnnnnnnnnnnnnnnnnnnnnnnnnnnnnnnnnnnnnnnnnnnnnnnnnnnnnnnnnnnnnnnnnnnnnnnnnaccctttctctacagaaaaaaatt

SEQ ID NO: 43138 - DNA, 326 bp, Homo sapiens
  misc_feature (1)...(326): n = a,t,c or g
gannnnnnnnnnnnnnnnnnnnnnnnnnnnnnnnnnnnnnnnnnnnnnnnnnnnnnnnnnnnnnnnnnnnnnnnnnnnnnnnnnnnnnnnnnnnnnnnnnnnnnnnnnnnnnnnngcaatgaaacccttggaatactactcagcaatatataaaggagctaactattaatacacagaataatctagataaatctccagagaattatgctgagtgaannnnnnnnnnnnnnnnnnnnnnnnnnnnnnnnnnnnnnnnnnnnnnnnnnnnnnnnnnnnnnnnnnnnnnnnnnnnnnnnnnnnnnnnnnncttacccaggggttaagga

SEQ ID NO: 43139 - DNA, 334 bp, Homo sapiens
  misc_feature (1)...(334): n = a,t,c or g
gcgtggggccaagcctgagggcaaggtgagcagcacaggacacttcaatgcctgttgggttctgggctggctaatacatctgccggccctgggcagcatacggctcttgcagtcaccttcccgtcctccttatccccagctgggttgcaaccaaattgccagagtgacctaagaccagatctttgtctccagttctttttttattactccaaaaacacaaccaaagcagcatctcatccaattcttgtttgtttgtttnnnnnnnnnnnnnnnnnnnnnnnnnnnnnnnnnnnnnnnnnnnnnnnnnnnnnnnnnnnnnnnnnnnnnnnttcta

SEQ ID NO: 43140 - DNA, 167 bp, Homo sapiens
  misc_feature (1)...(167): n = a,t,c or g
gttcgagaagtggagttgaagagtgacgcctcctgggtttgggggtgctcccgggatcttaagtggggatgggtaatgaggtctcgaggagatgcttttgattgtagctggggcgtctgtgtgtctgtctgngnnnganaggannactncngntnanagggancttt

SEQ ID NO: 43141 - DNA, 277 bp, Homo sapiens
  misc_feature (1)...(277): n = a,t,c or g
ggtagcctgggaccagggaattgcaactggcttctgaagtaaggacagtcttctccaaagctaacttcagatagtgtcagaataggattgagttgttgtacacccagttggtgtcctaagaaagggtaccccacatttggtgttagaagtaacgtcagaaagcatcacacaattgtatgtattcttttctctggggtcagatcacaagctctttgaaggtaagactatcctgtcctctgcagtacctatcatagtgatatgtgcatggnangtgcta

SEQ ID NO: 43142 - DNA, 129 bp, Homo sapiens
  misc_feature (1)...(129): n = a,t,c or g
gaactggacacagtagaaaaaccactcatcatagcaagaatgaagaaaataacaacttgaatgagaaaagacagtcaacagatgtcaacactgagatgaataggatgtggggattatgngacaaggttt

SEQ ID NO: 43143 - DNA, 336 bp, Homo sapiens
ggcaagaccctgtctagaaaaaattaaacaaaaataaaaaccatttttatcactgtttgggctaagtgattttatcactcttcattaaataaaccaaggctaagtgatgttattactcttcattaagtaaaccaatctcttatttgtatagttcttataatttacatttcaatttgtttaatgcatggctaagaaactgagtttttcaactttcatttttacaaatttgtattaagtaaacaaagatagtcatgtcatttattgtatatctcccatttgctttcaggaataatttgcctaacccttatgaatgaatacgaaacatagaaagaattt

SEQ ID NO: 43144 - DNA, 405 bp, Homo sapiens
  misc_feature (1)...(405): n = a,t,c or g
cattggaaanccgntatgacnnnnnnnnnnnnnnnnnnnnnnnnnnnnnnnnnnnnnnnnnnnnnnnnnnnnnngttgtattttacacagaaagacaattcttaaccagcttgtattggttacactataacactttcttagtgttttagttagttccctccttttaatttttggccatttccttcaaccaacagcagggtcatcttgataataaagaatagtttaaacaagnnnnnnnnnnnnnnnnnnnnnnnnnnnnnnnnnnnnnnnnnnnnnnnnnnnnnnnnnnnnnnnnnnnnnnnnnnnnnnnnnnnnnnnnnnnnnnnnnnnnnnnnnnnnnnnnnnnnnnnnnnnnnnnnnnnnnnnnnnnnnnnnnnnnnnnnnnnnnnnnnnnnnnnnnnnnnn

SEQ ID NO: 43145 - DNA, 337 bp, Homo sapiens
  misc_feature (1)...(337): n = a,t,c or g
gnnnnnnnnnnnnnnnnnnnnnnnnnnnnnnnnnnnnnnnnnnnnnnnnnnnnnnnnnnnnnnnnnnnnnnnnnnnnnnnnnnnnnnnnnnnnnnnnnnnnnnnnnnnnnnnnnnnnnnnnnnnaggcaagggaggaaaaaagcagggaattcaggggcagcacctgggcgaggcaggcagagtcggcgcacatgggccgtgtgccagggagagtcggtgccgcactgccggtgagtgggcaatggcagggccttctctggtgatcccctgattcaggcgccccaggagggttgcctgttgcggggggcgcatgtagctgcacgcccctctgtaatt

SEQ ID NO: 43146 - DNA, 333 bp, Homo sapiens
  misc_feature (1)...(333): n = a,t,c or g
gaaaaaaaaaaattgacaatggatgactcaagaatagtggaacnnnnnnnnnnnnnnnnnnnnnnnnnnnnnnnnnnnnnnnnnnnnnnnngggtttttttgtttgtttgttttgggttcatagaagggatcnnnnnnnnnnnnnnnnnnnnnnnnnnnnnnnnnnnnnnnnnnnnnnnnnnnaccgagaggttgctcttcaggantananannctttnngctacntatnangacagtgtntatatctatnttttatnggananannngttcntnnntggcttantcantctnatgatatgccttnntnngagnnncngttgntnacnctgaa

SEQ ID NO: 43147 - DNA, 332 bp, Homo sapiens
  misc_feature (1)...(332): n = a,t,c or g
ggaagttttcttaaaagaaaagtaagtaagaattcagtgaagcaacgtctttatttttttaattgttttttttganacgntgtttnancntgnanncgangcccttacactatggcgcantacntganntcngctatcttgatcgttacgngctcaatatnccatcttnactnnnancnctagnatnanncgtcganaggacctnggnngannnanttnnggctagnnntcatngtacngcntntncanattctgnatttccaagagagactngttnnntgcnnctcngctnttattataaccatgcnntttaattacanttgtnanncctg

SEQ ID NO: 43148 - DNA, 339 bp, Homo sapiens
  misc_feature (1)...(339): n = a,t,c or g
gnnnnnnnnnnnnnnnnnnnnnnnnnnnnnnnnnnnnnnnnnnnnnnnnnnnnnnnnnnnnnnnnnnnnnnnnnnnnnnnnnnnnnnnnnnnnnnnnnnnnnnnnnnnnnnnnnnnnnnnnnnnnnnnnnnnnnnnnnnnnnnnnnnnnnnnnnnnnnnnnnnnnnnnnnnnnnnnnnnnnnnnnnnnnnnnnnnnnnnnnnnnnnnnnnnnnnnnnnnnnnnnnnnnnnnnnnnnnnnnnnnnnnnnnnnnnnnnnnnnnnnnnnnnnnnnnnnnnnnnnnnnntctcgctctgtctatatatatataatgtaaaaaaaagggtcaggagaggcactt

SEQ ID NO: 43149 - DNA, 339 bp, Homo sapiens
  misc_feature (1)...(339): n = a,t,c or g
ggtcccagggaactactgtttcaattgcatttttcaggtgcattgtaggtatccttcagatgtatggggcctaaggttagagttacctaggcagcttttatataccaatgctccnnnnnnnnnnnnnnnnnnnnnnnnnnnnnnnnnnnnnnnnnnnnnnnnnnnnnnnnnnnnnnnnnnnnnnnnnnnnnnnnnnnnnnnnnnnnnnnnnnnnnnnnnnnnnnnnnnnnnnnnnnnnnnnnnnnnnnnnnnnnnnnnnnnnnnnnnnnnnnnnnnnnnnnnnnnnnnnnnnnnnnnnnnnnnnnnnnnnnnnnnnnnnnnnnnnnnnnnnnnnnnnnn

SEQ ID NO: 43150 - DNA, 341 bp, Homo sapiens
  misc_feature (1)...(341): n = a,t,c or g
gaactggaagaannnnnnnnnnnnnnnnnnnnnnnnnnnnnnnnnnnnnnnnnnnnnnnnnnnnnnnnnnnnnnnnnnnnnnnnnnnnnnnnnnnnnnnnnnnnacatgcactcacaccacatgcactcacacacaccacatgcactcacacacaccacatgcactcacaccacatgcattcacacacacaccacatgcactcacaccacatgcattcacatgcaccacatgcactcacaccacacgcatgcactcacacacaccacatgcactcacaccacatgcactcacaccacatgcatgcactcacaccacatgcatgcactcacacaccacatgc

SEQ ID NO: 43151 - DNA, 329 bp, Homo sapiens
  misc_feature (1)...(329): n = a,t,c or g
gggcctctggggagcttgcgtggaacaccttgaccagggctcagtcctgtctcctaagccccacccatgcctccttcaggggtgcagacccccagcctgggccagctgcaggcagggccaacaaggggcagcaggaggggctggatgcttgggccacctcaggcgattgactgagcccggatgttccggtcacctcaggtgactgactgagccacagttacatnacctacaaatgggntaatanccaangtnctgnctnccangnctgaggacnngattacagnnnatgnnaannannnnnatnnagattantctatcnntatnnctcc

SEQ ID NO: 43152 - DNA, 397 bp, Homo sapiens
  misc_feature (1)...(397): n = a,t,c or g
gtgttattggagtcaagaggaggtaaactcaaaacacatctcattttgtcatgaaaaattcagctagtttctttgtaatttgaagtgtacacattataaagacttataaagcttaataagttaaattgaaaggattattaattgatttttctgcctttgtatttcaggtatctatcacttccaaagtttcangagcttcagaacttattattaggancntgaggatcanatgaataccatgaantgctgtntgnaanaaaancgaganatgacctagcctatacangtaantngnttantcngtnnntntaatcnngnnnntagntaattannnntttatncntctntttngnnncnangnntntatacnnntttanntatnnnnnntnnaagcagc

SEQ ID NO: 43153 - DNA, 363 bp, Homo sapiens
  misc_feature (1)...(363): n = a,t,c or g
ggaagctggaccagaagaggctggaccaggagctcgacttcatcctgtcccagcagaaggagctggaagacctgctgagcccactggaggagttggtcaaggagcagagcgggaccatctacctgcagcacgcggatgaggagccgtgagaaaacctacaagctggctgagaacatcgacgcacagctcaagcgcatggcccaggatctcaaggacatcatcgagcacctgaacacgtccggggcccccgccgacaccagtgacccactgcagcagatctgcaagatcctcaatgcgcacatggactcactgnagtggatcgaccagaactcggcctgctgcagaggaaggtggaggaggtga

SEQ ID NO: 43154 - DNA, 381 bp, Homo sapiens
  misc_feature (1)...(381): n = a,t,c or g
ggtagaattnnnnnnnnnnnnnnnnnnnnnnnnnnnnnnnnnnnnnnnnnnnnnnnnnnnnnnnnnnnnnnnnnnnnnnnnnnnnnnnnnnnnnnnnnnnnnnnnnnnnnnnnnnnnnnnnnnnnnnnnnnnnnnnnnnnnnnnnnnnnnnnnnnnnnnnnnnnnnnnnnnnnnnnnnnnnnnnnnnnnnnnnnnnnnnnnnnnnnnnnnnnnnnnnnnnnnnnnnnnnnnnnnnnnnnnnnnnnnnnnnnnnnnnnnnnnnnnnnnnnnnnnnnnnnnnnnnnnnnnnnnattgccctgtgctccacctgngtgacanagtgagancctgtctcaaaannnnaaaanagncnggttnnangggnnnnnctttaaccctat

SEQ ID NO: 43155 - DNA, 378 bp, Homo sapiens
  misc_feature (1)...(378): n = a,t,c or g
ggaaaccggcgtggccctgccgggaagaaggccccagaaacctgtagcaccgcggggagggggcctcaggtcatagctggtgggaggcagaagaaaggggcggcaggggagaatacctcggtgtcagctggggaggaaaagaaggaagagagggatgcagggtcggggcccccagcgacggaaggcagcatggatacgctggagaaccgtgcagctgaagctgganaacatnaacgcccangcggacagggcctaccttcggctctccaggaattttggnanttgcnactgcngnacttngancnnatnanccacctcttcctaantattccggcttntnggngcangnatttaaaccntnncnngttttcatctttt

SEQ ID NO: 43156 - DNA, 375 bp, Homo sapiens
  misc_feature (1)...(375): n = a,t,c or g
gaaccataattatcttactaattccatcccagaaaagcctgtgatccctgaggccagaattgactctttgggcctaaatagcagctataaacatcttcagtaacttgccaggctctagcatgtggcatggaattttggcatctagctaaaattcctcaacccatagttaagctactcctctttctcctaaaaaaaanaaaaaatgaganaattggggaaaccccaaaagcaaagagagcagctntatgntcattcatgtccggagatnagccantttgngcaccactggangccaantctaaatttnttcagatcgntaacatgggnaacccancaaaantttcccagcaggggcaatntaccccctttatctta

SEQ ID NO: 43157 - DNA, 356 bp, Homo sapiens
gccttgctcctggggacagcccaacactcagaccacggtggggaacacgtccatcagactcgtgggccggctggcgggcagcgaggtgccccaggacagagtgattgacggccaagaccttctgcccttgctcctggggacagcccaacactcagaccacgagttcctgatgcattattgtgagaggtttctgcacgcagccaggtggcatcaacgggacagaggaacaatgtggaaagtccactttgtgacgcctgtgttccagccagagggagccggtgcctgctatggaagaaaggtctgccgtgctttggggaaaaagtagtccaccacgatccacctttgctctttgacct

SEQ ID NO: 43158 - DNA, 357 bp, Homo sapiens
gtagctgatcaacttaaacacttataaattcaccattgttttcggttcccaatttgaagagtggagacagaagtcaagaaaataagcttttcttattcaaagaatgattcccaaaccaataggatttgccctaggatcagtacagacttattacagtctcctaaacagagaggaaagagttgcgtaaattcatctagcttttagtttaatttcacttagcccatagggattctgagaggaaacgatattaatgtgattcctatttcatctaggcactgtagcataatccttcaacaaattaccacatttgattctcatataattctctaaaatgtgaataccatattacagatgagg

SEQ ID NO: 43159 - DNA, 355 bp, Homo sapiens
  misc_feature (1)...(355): n = a,t,c or g
gnnnnnnnnnnnnnnnnnnnnnnnnnnnnnnnnnnnnnnnnnnnnnnnnnnnnnnnnnnnnnnnnnnnnnnnnnnnnnnnnnnnnnnnnnnnnnnnnnnnnnnnnnnnnnnnnnnnnnnnnnnnnnnnnnnnnnnnnnnnnnnnnnnnnnnnnnnnnnnnnnnnnnnnnnnnnnnnnnnnnnnnnnnnnnnnnnnnnnnnnnnnnnnnnnnnnnnnnnnnnnnnnnnnnnnnnnnnnnnnnnnnnnnnnnnnnnnnnnnnnnnnnnnnnnnnnngtttccatatttctgagctcagttgtcaattcccagccctgggaatgatgacattaatattaattgcccttccaaatttgg

SEQ ID NO: 43160 - DNA, 330 bp, Homo sapiens
  misc_feature (1)...(330): n = a,t,c or g
gcagaaaagttaatagtcgtgtgaacaaccatattccttttctttttttatttttaagtttgtagctatctatctatttatttatttattttgagaccgggttataannnnnnnnnnnnnnnnnnnnnnnnnnnnnnnnnnnnnnnnnnnnnnnnnnnnnnnnnnnnnnnnnnnnnnnnnnnnnnnnnnnnnnnnnnnnnnnnnnnnnnnnnnnnnnnnnnnnnnnnnnnnnnnnnnnnnnnntggccaacagccatatnnnnnnnnnnnnnnnnnnnnnnnnnnnnnnnnnnnnnnnnnnnnnnnnnnnnnngtgtgtatttttagtac

SEQ ID NO: 43161 - DNA, 326 bp, Homo sapiens
ggtctgagcagaaggtggacccagccctctttccagccgtacctctttttacagcagtgccctcccggtcattcttcccacgaggcttcctttgggatgaaggctttcaccagctggtggttcagcggtgggatccctccctcacccgggaagcccttggccactggctggggctgctaaatgctgatggctggattgggagggagcagatactgggggatgaggcccgagcccgggtgcctccagaattcctagtacaacgagcagtccacgccaaccccccaaccctacttttgcctgtagcccatatgctagaggttggtgac

SEQ ID NO: 43162 - DNA, 317 bp, Homo sapiens
  misc_feature (1)...(317): n = a,t,c or g
ggggccgtcagccttgccggagccagacgtccgctgtgccgtcctcacagcaaggcctgctccgaggccccggggtgcgtcagcagccctcctcaaacaccctgggagtgcccagcagggcggaacacaccgggaaaccaacaccccaaaggcacaaggaagtatccctggagctaaaaatagttctggaaacttgccacggggccacaggctgggacgtgcgttaaggctccctggccaggctctgggttggtgtagtgnggaaggggcgcccaggtcngccctgggaggacatnaacaggcttaggccgagggcg

SEQ ID NO: 43163 - DNA, 321 bp, Homo sapiens
  misc_feature (1)...(321): n = a,t,c or g
gttttttttttcatctagaaatcctttatttacattttctcttatgaaaaaaatatacagatctgctgccctgtggattcctcagatttagggtctttagggaaaggtgaaagagggtacagggcggcccccatcaaggccgttcattgtccatcgagagcttctgctcatctggccctgnagctgggnttccctganatcagccccagggcactggncnanaggngccatgccaggcctagggcgggnttggcntgaggggcaggggctgggaggngctnatgcagcctgggtcatcaggaactatactggctcacaggc

SEQ ID NO: 43164 - DNA, 304 bp, Homo sapiens
  misc_feature (1)...(304): n = a,t,c or g
ggagaattctatcaaacatttaaagaattaatgtcaattctacatactcttccagaaaaacagaaagggagggaactcttctgttctctcttctcttctctgctttctcttctcttcttcttcttttttttttttncntngaaanagggnnggnntnngtggcccangtaaaagggcaggggcnngannagggttnanngcaccctnnacnttccangntaanncngccntccnncntnaccctccngngnannngaaannncnggggcnngccnccnngcccagnnaatttttaatttngaaa

SEQ ID NO: 43165 - DNA, 320 bp, Homo sapiens
gaggaagaggagctgcagaccctgtgtgactcagctgtgaataatatttacgtacaaataatgtaaacacaaatactagtgaatattgctctggtaaaaatatatgctggatctcagtaggagactgggagagggaaagaatgtgcctgtgtattggtggcagaggataagagagccaagttcttgttcttagcaggaaatcaacaaaggatgtccaaagctgaaaacttgagagtagtatgttatttagaaatatggaggtaaaagaggaggaaaaagcttagaagttaaaattggttttctttggggtaggagatagg

SEQ ID NO: 43166 - DNA, 309 bp, Homo sapiens
ggaccgctttggcccccgacccgtgcggctggttggcagtgcctgcttcactgcgtcctgcaccctcatggccctggcctcccgggacgtggaagctctgtctccgttgatattcctggcgctgtccctgaatggctttggtggcatctgcctaacgttcacttcactcacgctgcccaacatgtttgggaacctgcgctccacgttaatggccctcatgattggctcttacgcctcttctgccattacgttcccaggaatcaagctgatctacgatgccggtgtggccttcgtggtcatcatgttcac

SEQ ID NO: 43167 - DNA, 320 bp, Homo sapiens
ggtattaaaactcacatgggggctttcatgataaaaagataaactgttaagcagttggaaattttcagtgttcttccagtggacacctgccttggggcaggagcttctttgtagtcattattgatagaatggggtcacacacattgtgctcctgcattaagggcagctccaaggtttggcatgagactatgcatgtgtgtggacacggaggtttctcagtgagaaagagtcctaagacagtgaagtggaacgaggccttaaaaatcatctagtcagctgacttccagtttcaggttctcaggctccttttggtattttag

SEQ ID NO: 43168 - DNA, 140 bp, Homo sapiens
gctggatctttcttagtgatttgttttggagcaaggaaagttgaggctggcaattgctagtgagagctaatgaggtctcttgagtttccaggtacttaacgctttggaatgcaatatttttctttctttttttttttttt

SEQ ID NO: 43169 - DNA, 332 bp, Homo sapiens
  misc_feature (1)...(332): n = a,t,c or g
nnnnnnnnnnnnnnnnnnnnnnnnnnnnnnnnnnnnnnnnnnnnnnnnnnnnnnnnnnnnnnnnnnnnnnnnnnnnnnnnnnnnnnnnnnnnnnnnnnnnnnnnnnnnnnnnnnnnnnnnnnnnnnnnnnnnnnnnnnnnnnnnnnnnncctagaataagctgggcctggtggttgtggtggaggaggaggaagacgagaagannnaagaagangaangaagaancctgcagcagggcttggtggctcacgcctgtaatccnannantctggggggcataaggtggnnggannacctgangtnnnnannnntaatccngnntgncttatggg

SEQ ID NO: 43170 - DNA, 344 bp, Homo sapiens
gcacagagctgaatgttccgatcatgaccgtgtggttaggaacagccctgtttagcgcatttctcaccttttccttttcctcacttcttctcttggactccttcccccaacccaaatgatctgcaccccagtgacaacgtggagtggctccgcggaagatggatgatacacacttgtgatgttgctcatgttttatggttaactgcctggaattcttcagagttcttttcatagcagttgaaggctgaaaggcacacagaaatgaccaactcaattctgtcaacatttgctgagtgttctttttctgtgtcaggccctgggaactggagcttatcttacacaaa

SEQ ID NO: 43171 - DNA, 345 bp, Homo sapiens
  misc_feature (1)...(345): n = a,t,c or g
gcggcacgagcagaacttcttcatctatatgtatacatataattatgtatatatatattatacatatagcatatatatatatgtgagacatattatttagccttaaaaaataaaggacattttggcacatgctacatacagcatgtatgagcctgaggtnnnnnnnnnnnnnnnnnnnnnnnnnnnnnnnnnnnnnnnnnnnnnnnnnnnnnnnnnnnnnnnnnnnnnnnnnnnnnnnnnnnnnnnnnnnnnnnnnnnnnnnnnnnnnnnnnnnnnnnnnnnnnnnnnnnnnnnagaataagaagttaattggttcaaaatagttgtgtgtgtgtgggtgtaggg

SEQ ID NO: 43172 - DNA, 336 bp, Homo sapiens
  misc_feature (1)...(336): n = a,t,c or g
ggattgtcctggccagaactnnnnnnnnnnnnnnnnnnnnnnnnnnnnnnnnnnnnnnnnnnnnnnnnnnnnnatgaaaactgcaggtgtattccgtttgttccttcgtcttccttaaatattttcataacggtcgtttcggttcgtgcaaagaaaaaaagaatgaatcaactcttaatgactgcctcctactgctgagctctctggactagtcacttcatttatattttctcattttctttattccttactatatttctctgaagtgtcattcccatttcatagttgaggaagctgggactcaggaggattaataacttgtccagcgttacaaag

SEQ ID NO: 43173 - DNA, 345 bp, Homo sapiens
  misc_feature (1)...(345): n = a,t,c or g
gagtggtacatatannnnnnnnnnnnnnnnnnnnnnnnnnnnnnnnnnnnnnnnnnnnnnnnnnnnnnnnnnnnnnnnnnnnnnnnnnnnnnnnnnnnnnnnnnnnnnnnnntaatgataattaaagaaaaaaatctacttcttaagattgtttttggtttaaaatgggagcagagtatctgaaatatgaaaaacagagtnnnnnnnnnnnnnnnnnnnnnnnnnnnnnnnnnnnnnnnnnnnnnnnnnnnnnnnnnnnnnnnnnnnnnnnnnnnnnnnnnnnnnnnnnnnnnnnnnnnnnnnnnnnnnnnnnnnnnnnnnnnnngtacaaaaattaggcaggtg

SEQ ID NO: 43174 - DNA, 336 bp, Homo sapiens
  misc_feature (1)...(336): n = a,t,c or g
ggtacattttaatttctacatgatatgctattgaatgggtttgtaattttcttaagctactgaaggattttaaccagagagtgacacagtcatgtttgtgtttacagagatctttctgaccacaatacagaggaaagatagaaaagagtaagcttagaagcaggaagaaaaatagtctaagccagacctcaagtaagcagtagtaagaagaatagaaaacaggagacatattttaggatagtgaaggattaaaaagtagacttgnnnnnnnnnnnnnnnnnnnnnnnnnnnnnnnnnnnnnnnnnnnnnnnnnnnnnnnnnnnnnnnnnnnncagg

SEQ ID NO: 43175 - DNA, 343 bp, Homo sapiens
gggcatcttagatttactggtacagggttatagaggaaaaaactgagtaaaatgttgaatatttatgtttttagcagtgggcattgaatttagagtttctcgagtgagagtgatgtcagtgaggcattagttcatgtagttgctgacagtgatggtgacgttaaggtttctgttgtgctgctgtttacagtgctcatgttatgcagacagtggtcttgcgtttatagtgtcgtttgtctggaagaacatgttaatatcagataatgctataaagcttatattttctaaattttatatgtatcttttcaaatacttagatcttaatatttgatttttcattttg

SEQ ID NO: 43176 - DNA, 335 bp, Homo sapiens
  misc_feature (1)...(335): n = a,t,c or g
nnnnnnnnnnnnnnnnnnnnnnnnnnnnnnnnnnnnnnnnnnnnnnnnnnnnnnnnnnnnnnnnnnnnnnnnnnnnnnnnnnnnnnnnnnnnnnnnnnnnnnnnnnnnnnnnnnnnnnnnnnnnnnnnnnnnnnnnnnnnnnnnnnnnnnggtccctgcttaccccactgccttggggaaccccctctgtcccccacacagtctccgtatatgcctgagtctgtgtttggtcttcctcgtctctccacagcaggtctgccccgtgggttgttggccgcggtcggatgctcagccgcttgagaatgctgtctcctgcctgggtgcgtctggctccc

SEQ ID NO: 43177 - DNA, 337 bp, Homo sapiens
  misc_feature (1)...(337): n = a,t,c or g
gctgccttaactaaatggaagaattggggctttactgcatgtttattnnnnnnnnnnnnnnnnnnnnnnnnnnnnnnnnnnnnnnnnnnnnnnnnnnnnnnnnnnnnnnnnnnnnnnnnnnnnnnnnnnnnnnnnnnnnnnnnnnnnnnnnnnnnnnnnnnnnnnnnnnaatgtctggcctttactgcatgttaatttggcgtttcagcagccaactcagctgggaagttgcttgcttgttgggaagacatgggcaagagaaaagtttgataaatgtgcatgctgtgactttatgcttgcaaaaaaccaaaatctcacagttgtcagtacagccatt

SEQ ID NO: 43178 - DNA, 345 bp, Homo sapiens
gaaactggaagtggaggggtgatactacactgcctactattaagtaagacagaaagctaggaaattcccattgcatactgtatttctgtgtgcagaagagctggaggctttgttgatttaatcactagcttgtatttattaaaaatgtactgtgttcatcttggtgctagcttccagggaaagaacaactgaggaagataatcacgaacaacgtctggttctaaacatgcatagcctgaaattttaagccaaattgtgtagtattttatgatttggaaactgtgctcgaaaggaataaaaaaatccatgacattttaagtatttttggtaataatatgctcatat

SEQ ID NO: 43179 - DNA, 228 bp, Homo sapiens
  misc_feature (1)...(228): n = a,t,c or g
gcttagatgttgggctgtacaaatcattgtgggctcacattctaaattaaaagaacagtgcacattcagggacagtggtgtattcttatttttttattannnnnngnggtggactcttgngctgntgnccangntntantgnnntgcccctnnngttngntnanntgnnnantnngtcncngagctttgtgnatctnntgcttngnnnccangctngntncntaggga

SEQ ID NO: 43180 - DNA, 346 bp, Homo sapiens
ggctctgtttcctttattaaaatatttctgtaattggtggtgggaaattgaagaaatcaagtgattgcatcagcgctggaaaaagctgccagcacttggcagtggaagagaatatatgctttatactggactttttgaaaaagaggctgagtttggccagattgccgaccagcaatggaaaaactaattaggtgccttgcctgtgagccagacgcccagcagggctgtggcgcatggctcccgccgcctctgaagaggacactttctagtgaattcagttcgtgctacccttgagcagcctgtgctacagcaggcacatttgtgaatctcccagcctgtgcctggc

SEQ ID NO: 43181 - DNA, 345 bp, Homo sapiens
gtgctggataagctactagcattcctgtattctgggtaggtggtaggttcacatttgctgctctgagctaatggctgttaaaacctgactattgaggaactcactgagttgttcaggccaattccagttttctttttttttcttaacactgattcaggttctgccttctctgtgactacactcccaccccattctatcccactccaccccttccacaatcattctttcgtttcctgaatttgtacagcacttataatcctaatccagcacttggcaatgtgctgccgtaatctgctgtctgattaactggtgtttatgtttaccgttatcattccaactatatat

SEQ ID NO: 43182 - DNA, 262 bp, Homo sapiens
  misc_feature (1)...(262): n = a,t,c or g
gctgactttttactttacataattttatttacagtgatttgttatgccaccatattaattttgaagcagcagtttacagcaaaaggaaaataggtatgttggattattttaaatgatctatatttattaaataataaaattaataaaatttttaatttttctcttttatgcagagttaccttnctaatgacactgtagaatctggcatncatccagcntatntttgcttncccatgatnttgaaatgntnntganngctgag

SEQ ID NO: 43183 - DNA, 326 bp, Homo sapiens
  misc_feature (1)...(326): n = a,t,c or g
ggttccatttcaaactagtttcatctaaataagttgttgggcagagtaggggttagaaggagagagttgttactttacacctatccatatgtaagtcgtttagcacaatgactacagaacattagagtacattagtgggcttgccatagaaaatggcttctatacctttggttaccaactctgccttttacttcctgcatatttgtatatatttttacttattcagaagttttgtacattttaatttttattgggaaacagggttatatatattttttccnnnnnnnnnnnnnnnnnnnnnnnnnnnnnnnnnnnnnnnntaaatg

SEQ ID NO: 43184 - DNA, 316 bp, Homo sapiens
  misc_feature (1)...(316): n = a,t,c or g
gcaaaaagtcattggagccattgtgccgttataatgattgcattggtagataatctgatggtgataatccaattcttacctttagtgtaagataagggcagtataatcctgcagcgcatttctttctttcnnnnnnnnnnnnnnnnnnnnnnnnnnnnnnnnnnnnnnnnnnnnnnnnnnnnnnnnnnnnnnnngttgttagtgttctttttaaccaaaattaggaatgtctgaagtgggtatatgtttcaaatgcagccagatctacaaatgatagattccagtaggtaagtcatttatagtttggatcgcttta

SEQ ID NO: 43185 - DNA, 325 bp, Homo sapiens
gtctgtgggcagcgtctaaatcccagcttctggcacaccagttcatctggaacatgaagactaacatttatctagatgaagagggccaccagaaagaccctgacatcggcgacctcctggatcagttggtagaggagatcacaggctccttgtccggcccagcgaaggacttttaccagcgggagtttgatttctttaacaagatcaccaacgtgtcggctatcatcaagccctaccctaaaggcgacgagagaaagaaggcttgtctgtcggccctgtctgaagtgaaggtgcagccgggctgctacctgcccagcaaccctga

SEQ ID NO: 43186 - DNA, 326 bp, Homo sapiens
gtgcagatgtaggcttctctggggggatcccttcaccagacaaaggacatcgaaaacgggccagctctgagaatgagagacttcagtacaaaacccctcctcccagttacaactcagcattagcccagcctgtgaccaccgtcccctccatgggagagaccgagagaaagataacatctctatcctcctccttggatacctccttggacttctccaaagaaaacaagaaaaaaggagaggatctagttggcagcttaaacggaggccacgcgaatgtgcaccctagccaagaacaaggagaagccctctccgggcaccgggccaca

SEQ ID NO: 43187 - DNA, 315 bp, Homo sapiens
ggggtgaggagcagacgcgggttgccccagacgttccctgcccggccgctgttggcgtcggtctgccgttgggctgtgggtctcacccgcagttagtttgccgtggtctgaggcccatgcttgacttggccctggttccccagaacccatagctccttccctgggggttgagtccagctttgaggcctcagcagtttgtcttggaaccctggggttcctcacattcatgggagtgtgagcagggtttcaggagggatgtgcccccactcctagccccaaaaccacaaccgcaaagtcagagtcgctggagccaga

SEQ ID NO: 43188 - DNA, 315 bp, Homo sapiens
gaactggacataaagagtagagcagcatacaacgtaactttgctgaattcatggatcctccgaaaatcccacacctgaaagagaaaccttattttggcatgcggaaaatggcagtgcgctggcatcatgctgaaaatctggtggacaggccccaaagaggaaagtgaggacgactctcatcttgaaggcagagatcttgatacttggcatgttggtgttaagatctcatgggatgtaaagacacctggtttggcaacaccccaaggagactgctatttcatgcttggtaatctttggagaaccaaaattatattg

SEQ ID NO: 43189 - DNA, 324 bp, Homo sapiens
gcaccaaaattttttggctccactggattatctagcagttaggaaaccaagatcattaaatgaattcaccgcaactacagtgagactgactaccttagcttacctctgtgaaaggagttaagccaaaggaatctgtgaaattttggagagtttgggagcatttgggggcaggaggcaaatgttcttcctttaaatcacaacacttagttctcttccatttataagactcacccctccatcccaacccctgcaccacaggacaaggaagtgttcttggtcttcagctttcatccctgatggtgaaagcagttgctcctgacctat

SEQ ID NO: 43190 - DNA, 359 bp, Homo sapiens
gcccgaggagctggtgtcctgttctgactgtggccgctcagggcatccatcttgcctccaatttacccccgtgatgatggcggcagtgaagacataccgctggcagtgcatcgagtgcaaatgttgcaatatctgcggcacctccgagaatgacgaccagttgctcttctgtgatgactgcgatcgtggctaccacatgtactgtctcaccccgtccatgtctgagccccctgaaggaagttggagctgccacctgtgtctggacctgttgaaagagaaagcttccatctaccagaaccagaactcctcttgatgtggccacccacctgctccccgacatatctaaggctgtttctctc

SEQ ID NO: 43191 - DNA, 353 bp, Homo sapiens
  misc_feature (1)...(353): n = a,t,c or g
gcctctttatatgaaacaaaaattgattaataacagcattgctgtcagtattcgttcatatctacattcaaagactataccttctgttgacgtatctgcagtaatttcctgatagaaataatatagatgccataggggtatgttgcttcggaaaatcagatacaagggatataaggttaagaatagtgaattaatgtcagaagggacagaaagtactagtagtcagggttaggtatctagaagacactggaagaataggaagaggttgggctgaggatgaggtgcaaggctggagggaaggggtgcaacctgtaatcaagtgaanacaaaatagggagtntattacaactgga

SEQ ID NO: 43192 - DNA, 359 bp, Homo sapiens
  misc_feature (1)...(359): n = a,t,c or g
gaagcaaagagcattgaatagtaggaaaaaattannnnnnnnnnnnnnnnnnnnnnnnnnnnnnnnnnnnnnnnnnnnnnnnnnnnnnnnnnnnnnnnnnnnnnnnnnnnnnnnnnnnnnnnnnnnnnnnnnnnnnnatgagtgaccatgcccagcctaaaaaatatatttttttaaaacagcatcagnnnnnnnnnnnnnnnnnnnnnnnnnnnnnnnnnnnnnnnnnnnnnnnnnnnnnnnnnnnnnnnnnnnnnnnnnnnnnnnnnnnnnnnnnnnnnnnnnnnnnnnnnnnnnnnnnnnnnnnnnnnnnnnnnnnnnnnnnnnnnnnnnnnnnnnnnnnnnnnnnnnnnnnnnnn

SEQ ID NO: 43193 - DNA, 354 bp, Homo sapiens
gcacacaatgaaataatttttataagtggagaatccagatcagtttctagtgccctgtgtgcatatcagtctcgtcaacacgtcaggggcttttcgaactgaaagtaggaatagaacatggtctgtttcacgttgattatttgaatgctgcactattagtcatgcaatgttgtctttcatgtgaaaatgggctacgtgcgagctctcaagcgggctactggtattcttcccacgacagtctcccttgctggcccctgctcttcccctgcctcttcacattgctgtgcccagcatctgcttctcagtccttctcccttcccagtctgtactctcctggtgacctcaactgtctca

SEQ ID NO: 43194 - DNA, 360 bp, Homo sapiens
ggagtactgtgaggggtgattttgaaagacatgggaaaaagcattcctagagaaaagctgccttgcaattaggctaaagaagtcaaggaaatgttgctttctgtactccctcttcccttacccccttacaaatctctggcaacagagaggcaaagtatctgaacaagaatctatattccaagcacatttactgaaatgtaaaacacaacaggaagcaaagcaatctccctttgtttttcaggccattcacctgcctcctgtcagtagtggcctgtattagagatcaagaagagtggtttgtgctcaggctggggaacagagaggcacgctatgctgccagaattcccaggagggcatatc

SEQ ID NO: 43195 - DNA, 315 bp, Homo sapiens
gctgggcacttgaaaataagttctacatgaaaattcacttaattaccaatcttagcaaatatgtgttcatatatggaggggcaaggctctccgtggtattcagttcaactttgggttcttcctacccaaagtaggactccatttcccagaagaaatgtacagagttaccagtcccgtgtgagactcctatgtcaccgacacatctactcactccatgggtaaatgaaatcagaagactctcttgctgacatgggctgccagaaagctctgaaggaaacatgaggcttaaaaatacccacattgggccgggcacgg

SEQ ID NO: 43196 - DNA, 312 bp, Homo sapiens
  misc_feature (1)...(312): n = a,t,c or g
gatcttttacttaacttctctgtgcctgacagattgtaaatgtccagtaaatgttagttatgttttactttnnnnnnnnnnnnnnnnnnnnnnnnnnnnnnnnnnnnnnnnnnnnnnnnnnnnnnnnnnnnnnnnnnnnnnnnnnnnnnnnnnnnnnnnnnnnnnnnnnnnnnnnnnnnnnnnnnnnnnnnnnnnnnnnnnnnnnnntgttagtcattcttgtaaaaaagataatggtaaacctggcacatagatgtgtgcgtgcgtgagtgtgtgtnnnnnnnnnnnnnnnnnnnnnnnnnnnnnnnnnnn

SEQ ID NO: 43197 - DNA, 311 bp, Homo sapiens
gcacttaatactgggagctacaattattatttttattcataagctgaggtaaaatatccttccattagatttacaagacaagcatcgaaaattaaaataatggattttacaagccctagaacttgtcctgtgttatagttgttcagatgaatctgtatgacttgtttgtcctgttaaaagttcatgagctgaaatccacatatcagaacctgtggaccctttgggagaaatgaaaacttgttcacagatactctcctgccctgtgttagcctggcgtgggtgagatttctctactgacactgaataagaaa

SEQ ID NO: 43198 - DNA, 248 bp, Homo sapiens
  misc_feature (1)...(248): n = a,t,c or g
ggggataatgtaaattatttttcaaaagctacaactattctatgctaacaattttggggtttttcttttttcttctnnnnnnnnnnnnnnnnnnnnnnnnnnnnnnnnnnnnnnnnnnnnnnnnnnnnnnnnnnnnnnnnnnnatcatggctgactgcaaccttgaagtgatcctcctgcctcagnnnnnnnnnnnnnnnnnnnnnnnnnnnnnnnnnnnnnnnnnnnnnnnnnnnnnnnnnnnnnnn

SEQ ID NO: 43199 - DNA, 303 bp, Homo sapiens
gcaaaaatacgccaacatttatatttttacagttaaaattttcaaacgattcttcccagaaactcttggttttttgttattcaatcatattcattttatggtctttatttcttagtcttttttgcatgtttggatttctaattgctgctgtgtctttaaaaaataaagctctttttcgtaaagcaatactaacttgaaaaaccatcatctccctgacacagctgcaaagacttattgctgcatgactaatatatgaagaggagaaatgaaaggtgaatttacctatttttttctcatagtccc

SEQ ID NO: 43200 - DNA, 325 bp, Homo sapiens
gcttgaggcctgtgagttctggctgacgctggccgagcagcccatctgcaaggaagtcctggcctcccatctggtccagttgatccccatcttggtgaatgggatgaagtactcggaaattgacatcatcctgctcaagggggatgtggaggaggatgaggctgtccccgacagtgagcaggacatcaagccacgcttccacaagtcacgcacggtcacactgccccacgaggctgagcggcctgatggctccgaggacgcggaggatgacgatgatgatgatgctctgtccgactggaatttgagtgtgtgcccctgcctgggg

SEQ ID NO: 43201 - DNA, 324 bp, Homo sapiens
gaaaacttcctataactttgaactagaggagtcacaaataataatcttaataaaagttagaaaataattaaattttttcttttccatgtagtttcacaaagacaactgcaagttataaatattttttttcaaataagtataatttcctactgcttccctactcttcacattcttttccccagttagcttacctagcttttagttcagattcttctcagaatcgtatggtcaaagtctggtgtttaatttcccttcatgtttcttctcaaaatttatcaaaactatcactatgacttaagttggctgggttctatttcattagtg

SEQ ID NO: 43202 - DNA, 316 bp, Homo sapiens
  misc_feature (1)...(316): n = a,t,c or g
ggagaaggctgccagtagaggaaaggggaagaattcccagggcgaggaaaacacataagcctttgcgtgtggagctgtgtaaattcaaggtctggccagggggctgtgagatgccgtgtgtgcttggagcacaggaatgagaagtgaggtgaggaagtggctgggccacctcacaaagggcctcaaattctaggctgagaaactcggacttggtcctgagggtaaagggggccgggagaatgttatgcatggtgctgaagttgcattcaacacagctgtgagaagcatctgtcanggtcaggccagtgtgggaggg

SEQ ID NO: 43203 - DNA, 324 bp, Homo sapiens
  misc_feature (1)...(324): n = a,t,c or g
ggcacgcagactgtgaatttgcgtgactgtgagtactgtcagtaccatgtccaggctcagtacaagaagctcagcgcaaagcgtgcggatctgcagtccaccttctctggaggacgaattccaaagaagtttgcccgcagaggcaccagcctcaaagaacggctgtgccaagatggcttttactacggaggggtttcttctgcctcgtatgcagcttcaattgcagcanctgcggctcctaagaagaanattcanaccactctnagtantctggttgttangggcacaaacttgatcatccnnganacacggcaaaaactcgga

SEQ ID NO: 43204 - DNA, 316 bp, Homo sapiens
gagcatcacttcctactccagggttgcaatgtccagccctcaccactcctgggcagggaaccatgtactgtaggcatcatccgggaacctttggttttaataccacttgttactttggctgcaacgctggattcacactcataggagacagcactctcagctgcagaccttcaggacaatggacagcagtaactccagcatgcagagctgtgaaatgctcagaactacatgttaataagccaatagcgatgaactgctccaacctctggggaaacttcagttatggatcaatctgctctttccattgtctagaggg

SEQ ID NO: 43205 - DNA, 306 bp, Homo sapiens
  misc_feature (1)...(306): n = a,t,c or g
gcggcacgagcagcccctctacctgtgttagcagatctggcaaccctgtaaggggggtgctagatggacccgatttgacagatggcaagactgaggcctggagaagtggaatcactggcctgaggtcacatgactagcacatggcnnnnnnnnnnnnnnnnnnnnnnnnnnnnnnnnnnnnnnnnnnnnnnnnnnnnnnnnnnnnnnnnnnnnnnnnnnnnnnnnnnnnnnnnnnnnnnnnnnnnnnnnnnnnnnnnnnnnnnnnnnnnnnnnnnnnnnnnnnnnnnnnnnnnnnnnnnnnnnnnn

SEQ ID NO: 43206 - DNA, 84 bp, Homo sapiens
gaagtgcactcttatgaacgtaacgcaacccaagatcctagaatgaaaaaatacagtaggaagattatcctttttttttttttt

SEQ ID NO: 43207 - DNA, 318 bp, Homo sapiens
  misc_feature (1)...(318): n = a,t,c or g
ggtggctcccagcttaacattgccttaaagcaatagctacatttttcataacttttacgtgttatgtctatctttgaattatttccaaaaggtaatctgcatcctcactataattctgagtatggtggctatttcctactgccttggtttctggaatgatacatcttcaaatgcagtctttaaatcatacagacaacagattttttctttaaacggagacaaatctttgcaatctggttctgagactgaatcaactttatagaaaggaagaataactgctataaaaagtctcgcttacagnaatatgttcntagtacg

SEQ ID NO: 43208 - DNA, 314 bp, Homo sapiens
  misc_feature (1)...(314): n = a,t,c or g
ggcgacagcagcactctgttggcctctcccatgctgaagcgcttcacctggactgacagcaaacccaaggcctcgctcaagattgacttgagagtaaccagtaaaagtaaggagtcggggctgtctgatgtcagcaggcccagtttctgccattccagctgtgggcacgtcagcgaaggcaagcgcaggttcacctacgaccacgctgagctggaaaggaaaatcgcgtgctgctccccgcccccagactacaactcggtggncctgtactccaccccacccatctagagtttgacacgaagccttatttctag

SEQ ID NO: 43209 - DNA, 299 bp, Homo sapiens
  misc_feature (1)...(299): n = a,t,c or g
gcgtggccttgtgtaaaactagcctattactataaaaataacatgaactcttctgttagtcacaaaaacttcaggtccctgagtgtagttatttcctcgtagcctacacttaagtaaacagtgtctctggcagaaagacaacacaatgaagaacctggtttcttcaactccaggnnnnnnnnnnnnnnnnnnnnnnnnnnnnnnnnnnnnnnnnnnnnnnnnnnnnnnnnnnnnnnnnnnnnnnnnnnnnnnnnnnnnnnnnnnnnnnnnnnnnnnnnnnnnnnnnnnnnnnnnnnnnn

SEQ ID NO: 43210 - DNA, 301 bp, Homo sapiens
gagtgaactcagatgtggagcactacctttgtgagcagtgtgacccaaggcctgtggacagggaggttcccatgatccctcggccccactatgcccaacctggctgtgtctacttcatctgtttgctccgagatgacttgctgcttcgtcagggtgactgtgtgtatctgatgagggatagtcggcgcacccctgatggccacccggtccgtcagtcctatcgactgttatctcacattaaccgagataaacttgacatctttcgcattgagaagctttggaagaatgaaaaagaggaacg

SEQ ID NO: 43211 - DNA, 298 bp, Homo sapiens
  misc_feature (1)...(298): n = a,t,c or g
ggactactggttatttaaggtaagcaataccgttttctcgaatagtatcaatggtgtaccatttgttataaagtttccatttaaaatatatattttttagatttttagagtgaactattttaaagaaaaatataataatagttatggtattttgatgtgacagacatcctnnnnnnnnnnnnnnnnnnnnnnnnnnnnnnnnnnnnnnnnnnnnnnnnnnnnnnnnnnnnnnnnnnnnnnnnnnnnnnnnnnnnnnnnnnnnnnnnnnnnnnnnnnnnnnnnnnnnnnnnnnnnnnnt

SEQ ID NO: 43212 - DNA, 330 bp, Homo sapiens
  misc_feature (1)...(330): n = a,t,c or g
gcaaatgggatgatgactgtaatacctgccagtgcctgaatggacggatcgcctgctcaaaggtctggtgtggccctcgaccttgcctgctccacaaagggcacagcgagtgccccagcgggcagagctgcatccccatcctggacgaccagtgcttcgtccacccctgcactggtgtgggcgagtgtcggtcttccagtctccagccggtgaagacaaagtgcacctctgactcctattaccaggataactgtgcgaacatcacatttacctttaacaagganatgatgtcaccaggncttactacngagcacatttgcagtgaattga

SEQ ID NO: 43213 - DNA, 312 bp, Homo sapiens
gaaaacagacagacaaacacatgtatctgtctgatcaacaaaaaagtaggtcaggcatttccaggaacctcacatttatgaaactattattattgccttagtgattacagcaaagggtggagagtctgccagggtcaagccgtggtcagagaaagtcactttgtcatggaactattttaactgagactgccttaggaagccccagaaaccactgcttggtccccatggggctgacttcattaagagtgtatctacttttagatcatattcagcaacacgtgcatacctccccaccaaaaataattgcaaaag

SEQ ID NO: 43214 - DNA, 312 bp, Homo sapiens
ggaagacaggtaagggttggtatcaatatgacaagccattgggtaggattcacaaacctgatccctggctttccaaattcctatcacggtatagaaaaacccatcacattgaaccacgtaccattagccaggatgagatccttgaacgctgcttatattcacttatcaatgaagcattccgtatcttgggagaagggatagctgctagcccagagcacattgatgttgtctatttacatggatatggatggccaaggcacaagggcgggcccatgttctatgcttccacagttgggttgcccacagttctag

SEQ ID NO: 43215 - DNA, 307 bp, Homo sapiens
  misc_feature (1)...(307): n = a,t,c or g
gcccaagataaccaggtgaggatcttatatggatttccagtgtaaatcatcatagtgtctgaattatttaaaaacaactccannnnnnnnnnnnnnnnnnnnnnnnnnnnnnnnnnnnnnnnnnnnnnnnnnnnnnnnnnnnnnnnnnnnnnnnnnnnnnnnnnnnnnnnnnnnnnnnnnnnnnnnnnnnnnnnnnnnnnnnnnnnnnnnnnnnnnnnnnnnnnnnnnnnnnnnnnnnnnnnnnnnnnnnnnnnnnnnnnnnnnnnnnnnnnnnnnnnnnnnnnnnnnnnnnnnnnnnnnnnnnnnn

SEQ ID NO: 43216 - DNA, 314 bp, Homo sapiens
gcttacagcttcacgactccagcatctggctagattcagaaacaactgcagcaagcacttgtctacccaccagcagcactgtaaaaagcacatttctcacattatcggtcactgttacagtgaaattgttagatgtaaaaattatccttgaaatctgtagtcatagagatgacatggtacataatgtccagcaaatgcacatttatggcttgattcctcacatatctgaggggtctatggaaataaagtacaaatcaggcagaaaagacttagtaacacagttcctaagaatactggggtagtagtttattatc

SEQ ID NO: 43217 - DNA, 331 bp, Homo sapiens
  misc_feature (1)...(331): n = a,t,c or g
gatagaagcaaaaatgtgtagagagacttttggtctatgcaagaggttgggcagatcaggcaatagctgaagagattccacagtgacagtggagataaagagaaatagatagatttaaaacgtcttttggaaatagagctaaaaggatttggtgaattacatgtatggataaaggatagaagagaaaacaaagatggccattggatttctggttggccaactgggagaatagtggtataattttttgagatgagaactgcctgatggaanaatttgangattcnattctnnacatnnttttanananatgcnnnncnnnnnngnatgtttc

SEQ ID NO: 43218 - DNA, 339 bp, Homo sapiens
  misc_feature (1)...(339): n = a,t,c or g
gcaggccattctggaggaaaacaaggagaagctgccacttgacatcaaccccgtggtgcacccccactggcacatctttaaggactacacggacgtgcaccatntggcngctttcttnccacccgngctttccctcaccnatagtgangngnacgcccacatnctgtnnaacttctnacacttcaangnctancctaaantcntccngnananncnaaggccantcaggnnacaggaatgatggnagnacctgntcattgccttctgaggcctnnnngctttacttnattgtcncntgnatntannnttctnnngagcanttancttntnctnntatcc

SEQ ID NO: 43219 - DNA, 244 bp, Homo sapiens
  misc_feature (1)...(244): n = a,t,c or g
ggcttgagagaacaaatgaccaagggaagaagctcaatgaggccagtcgtcaacagaggttcaacacaagcatccgggactttgagttctggctctcaaaggcagagacattgctggccatgaaagatcaggccagggacttggcttcagcaggaaacctactcaagaagcatcagctattggagagagagatgttggctcnagaggatgcactcanggacctgaatcnttggctgaanatttg

SEQ ID NO: 43220 - DNA, 348 bp, Homo sapiens
gctgtcaaatgtctctcgttttgggtttgcttactgtttccctatgattagtttcagatcatgagcttttgataggaataccataagcatgttgttgtgttcttctttgtctaaatctttataaaagctgttgataggtggcagggaaccacctagtcaggcagtgggattgtttgaatgctctttgaggtccagcaaagacaggagtgatagctgcacttggaagcccgctcctacactttcaatgttcttcctgaaagaattagatatgaagctgctagagctgctccggtggggagcaggcaggattgattcttgaactaatcaacatttatgccctcttggcta

SEQ ID NO: 43221 - DNA, 344 bp, Homo sapiens
gtttaaatattctgtaaacagttctctttaaataaaatatatgttttgccatgtcatgcgctcagaggaggggtctggatcctctcttaatgacagacggatttgtcttacaaaggccattttcccgaaaaaaataggaaataacttggaggatactggtgggggctatacgtttggtgaaatccatcagtgatattcaagccaagcaaataatcacccactaatttgtgttttccacttaaaattcttggaggggaccatgttaaatggggagccctggtacagaaaacaacatgggctcatattcactcccttccccatctccctcttctgcttccccatga

SEQ ID NO: 43222 - DNA, 351 bp, Homo sapiens
  misc_feature (1)...(351): n = a,t,c or g
gctnnnnnnnnnnnnnnnnnnnnnnnnnnnnnnnnnnnnnnnnnnnnnnnnnnnnnnnnnnnnnnnnnnnnnnnnnnnnnnnnnnnnnnnnnnnnnnnnnnnnnnnnnnnnnnnnnnnnnnnnnnnnnnnnnnnnnnnnnnnngcctccctggaacttcttagtgtcaaaattttatactccatgcttgtagtcataaggcctacattttatggtcatgtaggtttttaagggtgtataggtctttctgtgtttaagatcagatacctgaaattcactttttgtgaagtttnngagcttggaatactgtangtgattcatgagtaaatgtgatgagcttgtcactaaaatt

SEQ ID NO: 43223 - DNA, 339 bp, Homo sapiens
  misc_feature (1)...(339): n = a,t,c or g
ggcattgactctgtgacatttctagcatatccaaggcaccaccagtgatttctcctgtttcttggtgggggtggggggaaggtacgtattctgcaatatggctaaaccctttcctgattgagagttaaagcaataggagtcaagttactggtgccacagatctggaggtatgataggtcaggggctaggtgttgaacttagntaatggaagactgacagcagaacaggantgtcatctacgcaaggccagaaagtgatcacaaaaagangcanatgatatacactggggtacngcataccacagggaataccttncctggcttgnctctancatatcac

SEQ ID NO: 43224 - DNA, 293 bp, Homo sapiens
  misc_feature (1)...(293): n = a,t,c or g
gagttagtattcctaactttcatcacctagatgatacattggtagagtgatagttgaggtatagacatcatatgaatgtatactgtgggaaataccacaagagtgatgaagcactgaaatactgcgggtttcttttgtaggagacacgaattataggctcctaggagactttgatgatatgctctttttcttttttcttttnntttttnnnacaaanccttagtctgncccnaggttggantncactgnatnacttntcggatnactnaannttccggnttcaaggctnaggc

SEQ ID NO: 43225 - DNA, 323 bp, Homo sapiens
gtggatataaagctctttgtcagctatacatgttgcaaatactttcctttgtgacttgagtttttgctctccatgaacagggtagcagagtaatgcgtattctttttatcatgattaataatatgcatattgaattgaataaactttcagtccatgagaatgctttgtcatttccccacctttgtgtctctaggagctcatgggacacatgtagctagtatagctgctggacactttccagaagaacctgaacggaatggggtagctcctggtgctcaaattctttccatcaagattggtgatacaagactaagcacaatgga

SEQ ID NO: 43226 - DNA, 319 bp, Homo sapiens
gggcaaacacccatcatttcatgggggattcatgaaatcatagtcaggcaaacacccgtcatttcatggctaagcatttgcagaaggtggaggattctcccccgagtccccaaatcagcagcctgtgctagggaccagagcaccgggggcaagaagacagaaccaatgtgggagtggggatggtcactaaatctgactgtgccacacaagcccatgatgaccttggcactggtttgggtggcaggatatgaaggaagctgtaggcattattgaaaaaatcattgttcagccaacagggtgaggctcccagcaaggccgt

SEQ ID NO: 43227 - DNA, 328 bp, Homo sapiens
  misc_feature (1)...(328): n = a,t,c or g
gcacacgtaggcagtcatctttgtaaacctccactggtgctggctgcgtttagaacatactccatataaaacaggccctgnnnnnnnnnnnnnnnnnnnnnnnnnnnnnnnnnnnnnnnnnnnnnnnnnnnnnnnnnnnnnnnnnnnnnnnnnnnnnnnnnnnnnnnnnnnnnnnnnnnnnnnnnnnnnnnnnnnnnnnnnnnnnnnnnnnnnnnnnnnnnnnnnnnnnnnnnnnnnnnnnnnnnnnnnnnnnnnnnnnnnnnnnnnnnnnnnnnnnnnnnnnnnnnnnnnnnnnnnnnnnnnnnnnnnnnnnnnnnnnnnnnnnnnn

SEQ ID NO: 43228 - DNA, 330 bp, Homo sapiens
gtatatatataaaatatatatatataatatataaaatatatataaaatatattatatatataatatatgtgtatatatataaataaaaagatataaccaagagccctgctaataggctatgtccacaaacataggccacaatgcaataattatcatatcaactccaggaatttactgatacttgggtttaaccctcaaatcaccagaaagccatagggttatactgaattttaaccgtgaaactggtagaattcagaataaaaacgaattcttccctcaatgtgacatgatacctaaaggtaccctgggtagggcgtggtggctcatgcc

SEQ ID NO: 43229 - DNA, 343 bp, Homo sapiens
ggagatgtttatgagaaaatacaggtagatacaaggaaatatggtagccttgaatgggctattaggtttctggcttgtaaagctggatgaatggtggggtcctgagcttcaatggggaattctgggaggggatgggatacaggaaggtgaccgtgagttcaggttacaggcatggtgaatttgaggtgcccaagtggagatgccaagtaggcaggtggatatattgctgtggagcgagaggaagatgactggggtgttttacaaattggtgtatagtttggaaattgaagttataagtctggatgaaggtaccaggtggatgactagagcagtaggtctatta

SEQ ID NO: 43230 - DNA, 335 bp, Homo sapiens
gcagagtctaggtacttggaatcccccgcttccagaaggttaacgagagccacagcctgcgatgtttgaggacaactgtgaatggaaggcaaggcccatttttgaatgctaactcaggcctcactgcactccagacttctgccagagaccctatcacatgccctagctatgtgtttacctcctggctggactttgaacttttaagctgtgtccccaaccctggcacagcccgggggtccctccagttgtagcagtttgcagctctgtacctcttctctggaatggtcatgcccagcagagcatcggctctctacctttggactagcggctcctgg

SEQ ID NO: 43231 - DNA, 330 bp, Homo sapiens
  misc_feature (1)...(330): n = a,t,c or g
ggtcccagcaaagggccctcgaccccatctcactgactgccctaccacccaggacttcctcccgggcttctccccaaggcccgcttctggtcctccccctccgtccctgtccctgaggctctttcagcagcccggctaaactgtatggtcccctgggcctccctgccctgtagtcccagattgcacttctgcttctggccaggtgcccttcctccctncggccttcagattcaagaacgttttttaaccaagtcggnctnccccangcacccgtggaggccctnnnctnangnntgnaccnnnnnacactanntnannctntgancccca

SEQ ID NO: 43232 - DNA, 339 bp, Homo sapiens
  misc_feature (1)...(339): n = a,t,c or g
nnnnnnnnnnnnnnnnnnnnnnnnnnnnnnnnnnnnnnnnnnnnnnnnnnnnnnnnnnnnnnnnnnnnnnnnnnnnnnnnnnnnnnnnnnnnnnnnnnnnnnnnnnnnnnnnnnnnnnnnnnnnnnnnnnnnnnnnnnnnnnnnnnnnnnnattgcacggcnnnnnnnnnnnnnnnnnnnnnnnnnnnnnnnnnnnnnnnnnnnnnnnnnnnnnnnnnnnnnnnnnnnnnnnnnnnnnnnnnnnnntaattggcattaaaatatttttccaggtcaatcctaacagcanactcacaggaattaatcaaagnttgatactannattgatnnnnngattgg

SEQ ID NO: 43233 - DNA, 341 bp, Homo sapiens
ggagagtagcaccatgagctaccctggcagcatcccccaaattccatgttctaattttggttcccttgccatcttctcatccacgctcttcttttccttcatcgatccttactgtgaaaagtgccatttactttgtttcttccctcaatgatctataatatctaagagggcaggggacatgttttgttcatccctatatgcccaaacctaatgattttcaaatagtactcagatacttaataaaacatcttatacttgaatgttccttgaatacctccaagatgtttaaaatattctttttcccaccctcaaactataatctgctcccttcattcattccc

SEQ ID NO: 43234 - DNA, 324 bp, Homo sapiens
  misc_feature (1)...(324): n = a,t,c or g
gcagttttgtagaacaatttttccgtgcacctgacaggggtggggttggtggggggatggatnacncggatnnnagnttaagcntaaattntcagncctttnaatgttntnctgtntntgtntcttacatacttnttttnnatncacaatactcgtatttacantnnnatttgacttacatatnctntttctccatctnnaatatcnatnngatcccaatactcccngncangttgtacatcatgttatctttgtcctanagtgactanaannttactggacantctgacatttcataatantnggtacnatatnctcanagct

SEQ ID NO: 43235 - DNA, 342 bp, Homo sapiens
  misc_feature (1)...(342): n = a,t,c or g
gtataaatgagtttcctttaaactcatttttgtggaatttgaggtttaaaagtgaaattaattttgtagaatctagtcatggttgggctctgagaaaatgttgtaaagctgtaatttatcttgtgggaaaaagtgaaaaggaacttaaatttatggtgttannnnnnnnnnnnnnnnnnnnnnnnnnnnnnnnnnnnnnnnnnnnnnnnnnnnnnnnnnnnnnnnnnnnnnnnnnnnnnnnnnnnnnnnnnnnnnnnnnnnnnnnnnnnnnnnnnnnnnnnnnnnnnnnnnnnnnnnnnnnnnnnnnnnnnnnnnnnnnnnnnnnnnnnnntacgctaacta

SEQ ID NO: 43236 - DNA, 329 bp, Homo sapiens
gacaaaaactatgcttacatattaaatacccaatgttataaaccaggaaaaagaatcttctttcaaataacatgtgatagggactacagtaaccaggaagaatgatttcaggtttattgcatcttcctgggaatttcgtgacattagaggagtatttattattaactcacagtgttttttttcatgcttattgagaacacaatgcagattgacaagctttgtatttcattaattgtttatgcaaacaattcttattggagcaatttaatttgtactttcttttgctgttctttcttatttactttctaattatgggttgtacagtaatt

SEQ ID NO: 43237 - DNA, 319 bp, Homo sapiens
ggtccgtgtcaccgccggaacctggcgcaggttaattatagaaaatgccaagtaggaaatttgccgatggtgaagtggtaagaggtcgatggcctgggagttcactttattatgaagtagaaattctgagccacgacagcacctcccagctttacactgtgaagtataaagatggaacagagcttgaattgaaagagaatgatattaagcctttaacttcctttaggcaaaggaaaggtggctcaacttccagttccccttccagacgccgagggagtcgatcaaggtcacgctcccgatcccctggtcgaccacctaa

SEQ ID NO: 43238 - DNA, 320 bp, Homo sapiens
  misc_feature (1)...(320): n = a,t,c or g
gatagaggaatgagataagctataaggagaagtgggtcaaagaaaattttatctctttttttcttttacattcatcacaatttgagtatttcattttaagatcagaaaaataataagtttacacgttgatggaaataactcaatagaggaaaagttggtgaaaaaggaatgtnnnnnnnnnnnnnnnnnnnnnnnnnnnnnnnnnnnnnnnnnnnnnnnnnnnnnnnnnnnnnnnnnnnnnnnnnnnnnnnnnnnnnnnnnnnnnnnnnnnnnnnnnnnnnnnnnnnnnnnnnnnnnnnnnnnnnnnnnnnnnnnnnnnc

SEQ ID NO: 43239 - DNA, 285 bp, Homo sapiens
  misc_feature (1)...(285): n = a,t,c or g
gctttccagtaagtaaagtcacaagactcgctgctgcaggggatctgtccagcaggggctggtgatttactttcagagaaggagttgcatcagcctctggttgctatagtttttatcttttaagctatggtctctgattgttatgttcatcagctgctactttgaaaattagggaaaaatcacaagatctgggctcatcattacctttatgtattattttatctgcttatgttaatactganatatataantatatannaantattannagnnntantanngctg

SEQ ID NO: 43240 - DNA, 318 bp, Homo sapiens
gggaacgtctgaggttatcaataagctcctagtccagacgccatgggtcatttcacagaggaggacaaggctactatcacaagcctgtggggcaaggtgaatgtggaagatgctggaggagaaaccctgggaaggctcctggttgtctacccatggacccagaggttctttgacagctttggcaacctgtcctctgcctctgccatcatgggcaaccccaaagtcaaggcacatggcaagaaggtgctgacttccttgggagatgccataaagcacctggatgatctcaagggcacctttgcccagctgagtgaactg

SEQ ID NO: 43241 - DNA, 327 bp, Homo sapiens
gggaaagagggttgtgctgaagggagaacaaggaaaccagggtctgttttggattcaagagcgaatggcagagcccagtggctcctgtgggaacagccagcagagtgagcagtattgcaatgaatgtgatttctccagagatttcccccagcttcagcctctgggggttgccaagcaatgtcctgaggtttcacgtatgcatgtcttggaggccaactgtacacagcaaatgcaaaacacagagatagcagtattgctctgttgctatattagggccagattgaagccatctgctgatgcaagcttggcaagtaagaaacccccatg

SEQ ID NO: 43242 - DNA, 318 bp, Homo sapiens
gctttgaataggagaaaacattcaaaacaattaagatcatactgaaataaaatattcacaaaatctaattctaggaagaatgacacatttcaggaaagtatgctaattatatctattaattctaagatatgatatacttgatactctagattctaaagtttcaaaaaagttttataaatcttaactttctagcagtgatggtctcagagtttcttagaaagtacaagtgttccatgttttgcaaatattctgtaagtaagctggggataagaaatgtgtcatctatagtgggaggaaacaaagagaaaaatgaacaaa

SEQ ID NO: 43243 - DNA, 324 bp, Homo sapiens
  misc_feature (1)...(324): n = a,t,c or g
gaatgcttcatattaacatagaaaagaaatttcttcacctatctcctgagtcttttgaaatcttcacatatattattttctaaattattattatttaaaannnnnnnnnnnnnnnnnnnnnnnnnnnnnnnnnnnnnnnnntagagtacagtggcatgatcttagctcactgtaacctcagacttctgggatcaaacaattctccnnnnnnnnnnnnnnnnnnnnnnnnnnnnnnnnnnnnnnnnnnnnnnnnnnnnnnnnnnnnnnnnnnnnnnnnnnnnnnnnnnnnnnnnnnnnnnnnnnnnnnnnnnnnnnnnnnnnnnn

SEQ ID NO: 43244 - DNA, 320 bp, Homo sapiens
gacggaaattcacagacgcaggtgggcataaaaacacggaaattcacagatgcacaggtgggcatgaaaacacggaaattcacagacactcgcaggtgggcgtgaaaacacggaaattcacagacgcacaggtggtcgtgaaaacacggaaattcacagacgcacaggtgggcgtgaaaacacggaaattcacagacgcacaggtgggcgtgaaaacatggaaattcacagacactcatgtgggcgtgaaaacacggaatttaacagagacgcacaggttggcatgaccaggctcgcatgggcaagatgtggtgtttctt

SEQ ID NO: 43245 - DNA, 333 bp, Homo sapiens
gggcgaacattattggactttttataagtaactggtgggggtaaggaaatcaaaagtgcaataccattaccctttcttaatcaaatcctcacaaacagttaagtatcagtactgtaaacaaaaaacaaaaacctcatactgtggaaggtttccgtctcaagtgtcttctacatttgtccaattttgtgttgaatattttgaaagcacccctgcatatgcgtgtatgtgggtacagagacatatgtgcaatgtgatccttcatgttggttatcgtaaaaaaacaaacaaaaaaacactttttagagttggacatccttctctggactgaggaaa

SEQ ID NO: 43246 - DNA, 327 bp, Homo sapiens
  misc_feature (1)...(327): n = a,t,c or g
gcggcacgagcagaannnnnnnnnnnnnnnnnnnnnnnnnnnnnnnnnnnnnnnnnnnnnnnnnnnnnnnnnnnnnnnnnnnnnnnnnnnnnnnnnnntggaattacaggcatgagccaccagtatactcttttgctatgctaatcattaaacttttctttgaactgcatttaagtgtaatattgtggtttcttttgcttgcaaatcctcaaacccaaactgaaagtaaaactttcagcaaaacannnnnnnnnnnnnnnnnnnnnnnnnnnnnnntgtccttccttggtctctgaaagcactggcatcacaggcatgaggcaccgt

SEQ ID NO: 43247 - DNA, 339 bp, Homo sapiens
  misc_feature (1)...(339): n = a,t,c or g
gcaaaagccaacacacccggcctggatatgaatttataataccgtacagtgcagcacaagaggatgcactcaaagcactgatgtgaggaagtacttgccccgtagcagctattcactctaccagtgtaaacaaaatctaagctagggcaagacagcacagacacaagtatatactaaccaggggtttaatataaatacaaccagcatagaaagacccaaaactatacagaaaccaaaaccagaatgccatgtggtggaggcaaagggcagaatttctgacccctttggctcanctgcccttccccacaaataaaaaccaacaaagaggacaaatcagga

SEQ ID NO: 43248 - DNA, 322 bp, Homo sapiens
gggctggctctgcgggtggatgctctgcactgtgggatagctggattcaattattgctcccagtttgtggtgtcagaagccacctgtgcaccgggagagcctgtatgtctttatgtcgaagatagagccctctgtccctatagaaaagcctgtttagtccattaaaactgttttaaagtggatctgaagggaacactatctctttccttgtcataaaatatagtggagaggcatgggtttcccaaaattatggtttttgagtgaaaagagaggcacctctgtatagatactgaacgtagttttagtaagttagaagatatcg

SEQ ID NO: 43249 - DNA, 324 bp, Homo sapiens
  misc_feature (1)...(324): n = a,t,c or g
gaataaatcaggcatctgagctcgcaatggaaaaccacaaaacacagtgggaagcaggatatcctgagtccaagctggtaaaagcccagacagaggctccaaccatcagaataggtaagggtgtggcaggtctaaaacatgaaaatgggcgattgaaaatatgagcaggnnnnnnnnnnnnnnnnnnnnnnnnnnnnnnnnnnnnnnnnnnnnnnnnnnnnnnnnnnnnnnnnnnnnnnnnnnnnnnnnnnnnnnnnnnnnnnnnnnnnnnnnnnnnnnnnnnnnnnnnnnnnnnnnnnnnnnnnnnnnnnnnnnnnnnnnnnn

SEQ ID NO: 43250 - DNA, 322 bp, Homo sapiens
  misc_feature (1)...(322): n = a,t,c or g
gcggcacgagcttttgacttgtccctccctatacctgttgttattttgtttctgataaaaaatttgatatgagaaattttaaatattaatttatttaaagtaacaataagaaactcattgcatgttaacataagcattgtaattnnnnnnnnnnnnnnnnnnnnnnnnnnnnnnnnnnnnnnnnnnnnnnnnnnnnnnnnnnnnnnnnnnnnnnnnnnnnnnnnnnnnnnnnnnnnnnnnnnnnnnnnnnnnnnnnnnnnnnnnnnnnnnnnnnnnnnnnnnnnnnnnnnnnnnnnnnnnnnnnnnnnnnnnnnnnnnnnnn

SEQ ID NO: 43251 - DNA, 337 bp, Homo sapiens
gcatttctcagttcttccataactgtgatgtgagcttcttcgtttatgatatggaattagttcccagtggtactttggggtgtccaatacttttctttatgtactgttttctctattctggaatggtgaaaaaatattttcatagtttaggctgggcataatagactaatgtatcagagaaatcagagatggagaaggtcatttagtctctgtttgtttcaccgtaagattgatccagtaagccagcgatatcaaaagtgcttttttggatgtgccttggcctggggttttttgctaggattgttgttgctaccatccttgtggtttaggtctgata

SEQ ID NO: 43252 - DNA, 337 bp, Homo sapiens
  misc_feature (1)...(337): n = a,t,c or g
gcggcacgagagaaaccccggatgtgaggagctaagtaccttgtgacaagaatttgtgtgtggcagttaagaataaagnnnnnnnnnnnnnnnnnnnnnnnnnnnnnnnnnnnnnnnnnnnnnnnnnnnnnnnnnnnnnnnnnnnnnnnnnnnnnnnnnnnnnnnnnnnnnnnnnnnnnnnnnnnnnnnnnnnnnnnnnnnnnnnnnnnnnnnnnnnnnnnnnnnnnnnnnnnnnnnnnnnnnnnnnnnnnnnnnnnnnnnnnnnnnnnnnnnnnnnnnnnnnnnnnnnnnnnnnnnnnnnnnnnnnnnnnnnnnnnnnnnnnnnnnnnnnnnnnnn

SEQ ID NO: 43253 - DNA, 322 bp, Homo sapiens
gatatatgcctggaccgatgtcaccacttatctgcagttctcctgtgatgtttccagggtacatgattaagactcatttaacattccaggaatgttctgctgatgaataatcactgagctggagtcaagagaagaagctttagatactaaccgaccctgtgatcatgagcaagtcacttcccttctctgtgcctcaatttcctcacttataaagtgaaaacaaagggccaagtgagggtggaaggatccccctaccctggagatctgtgattctataacatatgggcaggaaagacttgataacacactcagggtctatgtg

SEQ ID NO: 43254 - DNA, 335 bp, Homo sapiens
  misc_feature (1)...(335): n = a,t,c or g
gaacagatctacaaaattctgattcatgtaataagtaaccattatgataataaatgtttttatttattgagtgcatactgaaaagtggtaggaagattttgtgctgaaatatttgtaaacctagtaattaaaaaannnnnnnnnnnnnnnnnnnnnnnnnnnnnnnnnnnnnnnnnnnnnnnnnnnnnnnnnnnnnnnnnnnnnnnnnnnnnnnnnnnnnnnnnnnnnnnnnnnnnnnnnnnnnnnnnnnnnnnnnnnnnnnnnnnnnnnnnnnnnnnnnnnnnnnnnnnnnnnnnnnnnnnnnnnnnnnnnnnnnnnnnnnnnnnnnnnnnnnn

SEQ ID NO: 43255 - DNA, 343 bp, Homo sapiens
  misc_feature (1)...(343): n = a,t,c or g
gcaatctaagacatgcagatttccatctgactgtacaagattctgctggttttcaacaataaatagcacaaaattgcaagcatttaaggaaaaagtcattttcgatgaaaacaggtatttgccccagatcttagatttgacctacaaagggcctagaactgattagtatcttccaagagaaagcagcagcatagcaggctatgatgaagaaatgaagtnnnnnnnnnnnnnnnnnnnnnnnnnnnnnnnnnnnnnnnnnnnnnnnnnnnnnnnnnnnnnnnnnnnnnnnnnnnnnnnnnnnnnnnnnnnnnnnnnnnnnnnnnnnnnnnnnnnnnnnnnnnnn

SEQ ID NO: 43256 - DNA, 325 bp, Homo sapiens
  misc_feature (1)...(325): n = a,t,c or g
gnnnnnnnnnnnnnnnnnnnnnnnnnnnnnnnnnnnnnnnnnnnnnnnnnnnnnnnnnnnnnnnnnnnnnnnnnnnnnnnnnnnnnnnnnnnnnnnnnnnnnnnnnnnnnnnnnnnnnnnnnnnnnnnnnnnnnnnnnnnnnnnnnnnnnnnnnnnnnnnnnnnnnnnnnnnnnnnnnnnnnnnnnnnnnnnnnnnnnnnnnnnnnnnnnnnnnnnnnnnnnnnnnnnnnnnnnnnnnnnnnnngaataatttttaaaaataaattanttgggtgtggnggcacacctgnggntctagctactctgngaggctgaggcaagagga

SEQ ID NO: 43257 - DNA, 324 bp, Homo sapiens
gaactggaataataagtaaagagtagtggggatatgatctattttgtggggagactagcagcaaagtaagacataaagataaagaaacatacactggcctgaggaagtaacaaagtctctttgagcaaactttggacaggctcctctcagctttcttttcaactacaccttgtccttgggccctgtcctcggcctgcctagcccagttttagcaagagtcctgctgagtaactccctcacccttgatacctgatcaccttgtcctgccttgagcgagaatcctgtttagtcagttgagcaagaatccccctacccttgatatct

SEQ ID NO: 43258 - DNA, 324 bp, Homo sapiens
gaagcctgtggggcaaggtgaatgtggaagatgctggaggagaaaccctgggaaggctcctggttgtctacccatggacccagaggttctttgacagctttggcaacctgtcctctgcctctgccatcatgggcaaccccaaagtcaaggcacatggcaagaaggtgctgacttccttgggagatgccataaagcacctggatgatctcaagggcacctttgcccagctgagtgaactgcactgtgacaagctgcatgtggatcctgagaacttcaagctcctgggaaatgtgctggtgaccgttttggcaatccatttcggca

SEQ ID NO: 43259 - DNA, 331 bp, Homo sapiens
  misc_feature (1)...(331): n = a,t,c or g
gtcatcttctataagggagcgaccacctgaagaagttgcagctcgccttgcacaacaggaaaaacaagaacaagttaaaattgagtctctagccaagagcttagaagatgctctgaggcaaactgcaagtgtcactctgcaggctattgcagctcagaatgctgcggtccaggctgtcaatgcacactccaacatattgaaagccgccatggacaattctgagattgcaggcnagaagaaatctgctcagtggcgcacagtggagggtgcattgaaggaacgcanaaaggcagtagatgaagctgccgatgcccttctcaaagccaaagaa

SEQ ID NO: 43260 - DNA, 316 bp, Homo sapiens
  misc_feature (1)...(316): n = a,t,c or g
gcgaacaactctggaggtgccatnnnnnnnnnnnnnnnnnnnnnnnnnnnnnnnnnnnnnnnnnnnnnnnnnnnnnnnnnnnnnnnnnnnnnnnnnnnnnnnnnnnnnnnnnngtggacgttccgcctttatgagctatannnnnnnnnnnnnnnnnnnnnnnnnnnnnnnnnnnnnnnnnnnnnnnnnnnnnnnnnnnnaggggaggaatgaacagctctggatgcaccacctttaagagctgttaacagtcaacggcgaaggtctgtggcttcactcctgaggcctgtgcaggtcactgaacccagcggaaaga

SEQ ID NO: 43261 - DNA, 300 bp, Homo sapiens
  misc_feature (1)...(300): n = a,t,c or g
gcggcacgaggccnnnnnnnnnnnnnnnnnnnnnnnnnnnnnnnnnnnnnnnnnnnnnnnnnnnnnnnnnnnnnnnnnnnnnnnnnnnnnnnnnnnnnnnnnnnnnnnnnnnnnnnnnnnnnnnnnnnnnnnnnnnnnnnnnnnnnnnnnnnnnnnnnnnnnnnnnnnnnnnnngaataaacagatcaaaatttcaatagctgttacgcctcagtacatgagtatagaggtatgctactgctttcaaatagattgcttacggactatgatccaccttatcactctggatccaccacacta

SEQ ID NO: 43262 - DNA, 313 bp, Homo sapiens
gagaggtagcagaaaagactagatcaatactgaaagtgctaaacacaatgggctaaagacatatcaggttatttaaaagttaatttaagccagtctttttaaagcctttttcttctttatgctaaagctccccgtattcattcctctttattccttcccagaagtagttattattctgaagttggtgcatatcattcacatgattgttttataatttacgtatttgctactgacaattaacagtttacctttaaagtgtcactacataacttcgcaaagcattataggagatgatttttcacaaatgaaaaat

SEQ ID NO: 43263 - DNA, 302 bp, Homo sapiens
  misc_feature (1)...(302): n = a,t,c or g
ggtcttcaacaaggaaatagataagcnnnnnnnnnnnnnnnnnnnnnnnnnnnnnnnnnnnnnnnnnnnnnnnnngccattgaatcatgtaacaacacagccatagatgatcttaaatgcattttagaagtgaaagaacaatccaaaagactacatattgcatgattccattaatacaataatattctggaaatagcaaagctatagggatggaaaacacagtagtaattgccaagggataagaaagaagggaggcnnnnnnnnnnnnnnnnnnnnnnnnnnnnnnnnnnnnnnnnnnnnnn

SEQ ID NO: 43264 - DNA, 303 bp, Homo sapiens
  misc_feature (1)...(303): n = a,t,c or g
gcagaagccatattggacagtgcaaaaacgtgccttttagaacatttctcannnnnnnnnnnnnnnnnnnnnnnnnnnnnnnnnnnnnnnnnnnnnnnnnnnnnnnnnnnnnnnnnnnnnnnnnnnnnnnnnnnnnnnnnnnnnnnnnnnnnnnnnnnnnnnnnnnnnnnnnnnnnnnnnnnnnnnnnnnnnnnnnnnnnnnnnnnnnnnnnnnnnnnnnnnnnnnnnnnnnnnnnnnnnnnnnnnnnnnnnnnnnnnnnnnnnnnnnnnnnnnnnnnnnnnnnnnnnnnnnnnnnnnnnnnn

SEQ ID NO: 43265 - DNA, 302 bp, Homo sapiens
  misc_feature (1)...(302): n = a,t,c or g
ggctcttttagaagtctggcctcagttccctactaacgggccctcctcacctccaacttccctaccacttcctactacagagcaactggatggccactcaaggtccccacacagagactgctgtttgtcagtctcctgccacgactttgttgaaactgaaggaggcagagaggaggctcagcaacatgccacacgatggaacattttggttaccatcacagtaaacgagtacagggaatggtctcnnnnnnnnnnnnnnnnnnnnnnnnnnnnnnnnnnnnnnnnnnnnnnnnnnnnnnnnn

SEQ ID NO: 43266 - DNA, 318 bp, Homo sapiens
  misc_feature (1)...(318): n = a,t,c or g
gatgagaggacgggcaaaatattactggcccttttggaaaaggaacacagtacagatcactttccatagatagccaaccgatgtgaactctgtaagccgtattccaggaactcttatgaacggctgcaattgcgagctgtcatctgtggccagaanactgntganaacctgacncnaangatcctttnntggcananattnctatgtctngtaaangnntntattngtcnggctggcnaatganccngggantnccntnnttcnttcatgacatctccanggtgcancnncnngaacgngnccatangatacacattc

SEQ ID NO: 43267 - DNA, 312 bp, Homo sapiens
  misc_feature (1)...(312): n = a,t,c or g
gagtaggctaggctaagctatgatgttcagtaagttggatgtattaaaggcattttgacttaaaatattttcaatttatggtgagtttgttgggatataccccaccgtaagtcaaggacaatctgtatactattctatcctttggtcatctttctatttgaaacaaaaatttgctcttctttttcgttttaaaagggctgnnnnnnnnnnnnnnnnnnnnnnnnnnnnnnnnnnnnnnnnnnnnnnnnnnnnnnnagtggngnggatcacctgaggtcatgagnnaagaccagcctggccacntggtgaaac

SEQ ID NO: 43268 - DNA, 302 bp, Homo sapiens
gcaactggtcgacctgcctgaatattacagctggggggaggaactgacagagacccagcacatgatccagcgacgcatcatggagtctgtgaacgggctgaagtctctctcagcaggaagggtggtggttgtgaagaatcaggagcatcacaacgcattgggagtgatcctacaggtctcctcgaactccaccagcagagtattcacaaccctggtcttgtgtgataagcccttgtcccaggacccacaggacagggggccagccactgcagaggtgccctatccagatgacctcgtgggat

SEQ ID NO: 43269 - DNA, 302 bp, Homo sapiens
  misc_feature (1)...(302): n = a,t,c or g
ggcttgtgaacatcagcctatcagtcacaataccatagcacttaggacatggaaagatgaccacnnnnnnnnnnnnnnnnnnnnnnnnnnnnnnnnnnnnnnnnnnnnnnnnnnnnnnnnnnnnnnnnnnnnnnnnnnnnnnnnnnnnnnnnnnnnnnnnnnnnnnnnnnnnnnnnnnnnnnnnnnnnnnnnnnnnnnnnnnnnnnnnnnnnnnnnnnnnnnnnnnnnnnnnnnnnnnnnnnnnnnnnnnnnnnnnnnnnnnnnnnnnnnnnnnnnnnnnnnnnnnnnnnnnnnnnnnnnnn

SEQ ID NO: 43270 - DNA, 313 bp, Homo sapiens
gagcttcagctctgccagctgtgttcctttcccaacaagaaaaggcctctgaacagatgtaagaattgaggcttttcctgatgggtctgtgtttgacccatttcagagcctgcagtgcagtacctgattgtatccatgagtcaaacagctcttattatctcctccccagcccatggcagagttgaaggaggaaagtgcgccagaggtaagcgtgctgacagttctgtggtgtgacagcctcacagtttggaaagacaaaattttaaaagcttagtagtccacaggcacttggtagaggcagagaggcagaccc

SEQ ID NO: 43271 - DNA, 326 bp, Homo sapiens
  misc_feature (1)...(326): n = a,t,c or g
ggccactgcacccggcctacttacagctcttttcaaataagtctcttcccaaagattgtagaaggtaacaaaggcagggagatggaatgccttccagcgtcagtagtgctcgtcaacaaaaaataccaaatttgctccagaagatgtgaaagcaggaagagagacagtgaggtagacccagcgagggcactgagagggcttcctttttttttgagatggagtctgtgtcgcccnaggtgggnnnnnnnnnntgatctcanntnaccgnannctncacctccctgttaagcnnntntcctgnctntgcctnccangnnctggnacta

SEQ ID NO: 43272 - DNA, 342 bp, Homo sapiens
  misc_feature (1)...(342): n = a,t,c or g
gcactaatttgctttaaatggctttacaccatagtgaatgagttattttatttataatttgctttgttccagaaagtattttaggcagattacaaatattttataatagaagtagcatagattaaaaagtgatggagnnnnnnnnnnnnnnnnnnnnnnnnnnnnnnnnnnnnnnnnnnnnnnnnnnnnnnnnnnnnnnnnnnnnnnnnnnnnnnnnnnnnnnnnnnnnnnnnnnnnnnnnnnnnnnnnnnnnnnnnnnnnnnnnnnnnnnnnnnnnnnnnnnnnnnnnnnnnnnnnnnnnnnnnnnnnnnnnnnnnnnnnnnnnnnnnnnnnnnnnnnnnc

SEQ ID NO: 43273 - DNA, 333 bp, Homo sapiens
gggcagggtgtgctcgcagactgtgctataaactgcaatttctatttggggtcctcacggagaagaacaccaggaaagacagacaggaccagtgccatgggccagctttgctgctttcctttctcaagagatgaaggaaaaatcagtgagttggaaagctcgtcctctgcagtcctacagagatacagcaaggatatacccagttggtcaagtggtgaaaagaacggaggggagcccgatgacgctgaactagtaaggctcagtaagaggctggtggagaacgcggtgctcaaggctgtccagcagtatctggaggaaacacagaataaaaac

SEQ ID NO: 43274 - DNA, 340 bp, Homo sapiens
  misc_feature (1)...(340): n = a,t,c or g
nnnnnnnnnnnnnnnnnnnnnnnnnnnnnnnnnnnnnnnnnnnnnnnnnnnnnnnnnnnnnnnnnnnnnnnnnnnnnnnnnnnnnnnnnnnnnnnnnnnnnnnnnnnnnnnnnnnnnnnnnnnnnnnnnnnnnnnnnnnnnnnnnnnnnnnnnnnnnnnnnnnnnnnnnnnnnnnnnnnnnnnnnnnnnnnnnnnnnnnnnnnnnnnnnnnnnnnnnnnnnnnnnnnnnnnnnnnnnnnnnnnnnnnnnnnnnnnnnnnnnnnnnnnnnnnnggaataacactagatttggttggggaaacngtttgtaataatttattaaagggcatactgggcctggc

SEQ ID NO: 43275 - DNA, 330 bp, Homo sapiens
gcagacatagctctggaagccatctgcccaagagggcagcccatcccaagttcatcttacagtggccaggcctgccctgagccggggcctctgggtcactcttctgctgtccatggcattgcccacctccctctcaaactctctctggctctttctgagcttcctttcctgctccccagcttgcccagtgctcagtgccccacttggctcttttgctacttcgggtcaggtggagcctcttgggaatgtgaagtgccttacagaaagattgcacttcaagaggagaggctgcagggagccatcctaaacccagaggcctggagcttaccg

SEQ ID NO: 43276 - DNA, 329 bp, Homo sapiens
gcttgcaattaaagaaaaaataacagaaaatgtgttatatgcagtattattggaggtactattaatatttgcaagtgttcagacctaattgcggggaaatgatggcaggattctacaggtatattttagagcagttgtgagatgcatgtaactatttgtaaaggttcatacagatgattactagatcagcataaataatatgtctgtggacgttttctgcaggactttgataacttgttacctgagtgaaatttaattcctgggcgattctgggagatggtaaagtgaggcggaaggagccagcggccaattcctgaactattctggga

SEQ ID NO: 43277 - DNA, 334 bp, Homo sapiens
  misc_feature (1)...(334): n = a,t,c or g
gtaaacagaaaaaaagtacttctaactaatagtctgaatacagcaatatatcaatgtcccctcctattttctagtttatgtggattttaatcagtattgcagatttggcttnnnnnnnnnnnnnnnnnnnnnnnnnnnnnnnnnnnnnnnnnnnnnnnnnnnnnnnnnnnnnnnnnnnnnnnnnnnnnnnnnnnnnnnnnnnnnnnnnnnnnnnnnnnnnnnnnnnnnnnnnnnnnnnnnnnnnnnnnnnnnnnnnnnnnngccactgcgccctgcctgggtncatattttttaagcnncagncntgaatgntagngtctnctgcctacttgag

SEQ ID NO: 43278 - DNA, 71 bp, Homo sapiens
ggtgacttccagcaagctcctgcccctgagcgctgggaggagcaggtccagcaataatttttttttttttt

SEQ ID NO: 43279 - DNA, 333 bp, Homo sapiens
gcttgatagcaattcccatcaacatctcagggatatttgaagatccctacatattacaaaatctgttgaagtcgggaagcatgcctcattgatcacaattttggaaattaagcctttcccaaaacaaacagtggatttctcagcacacacccgcatgcctcttgctgaggcagggtgtgtcttggagagggaaggaccgaaggtggaaggagggacatctgggcccttctctccctgacaagctgtatctgcttttcctctcctgcaggtgttggaaggaatgtccctgtttgcagaactctctgggaacctggtgcctgtgaagaaagctgg

SEQ ID NO: 43280 - DNA, 333 bp, Homo sapiens
  misc_feature (1)...(333): n = a,t,c or g
gggaaaggaactggcatcttgcataagcatnnnnnnnnnnnnnnnnnnnnnnnnnnnnnnnnnnnnnnnnnnnnnnnnnnnnnnnnnnnntcccagctaattcttagagggatacatttgtaatattttagcagtcactacttctagaaatcatgaccagcttttctccatctcttggtctcaattgttccttttcccagcaaccttcaggcttgctcagcagcatcgcaggggaaagggattccagaatccatggtgagaacaccgtctctatctgccttcacaacagactgaaggcagagctaagatcggatgtaattagttnacatgtca

SEQ ID NO: 43281 - DNA, 341 bp, Homo sapiens
  misc_feature (1)...(341): n = a,t,c or g
ggacgtatcaggaatatcagtttaaattatgtgtgtgtgttctttatgaggaaatttggaaaaaaannnnnnnnnnnnnnnnnnnnnnnnnnnnnnnnnnnnnnnnnnnnnnnnnnnnnnnnnnnnnnnnnnnnnnnnnnnnnnnnnnnnnnnnnnnnnnnnnnnnnnnnnnnnnnnnnnccnnnnnnnnnnnnnnnnnnnnnnnnnnnnnnnnnnnnnnnnnnnnnnnnnnnnnnnnnnnnnnnnnnnnnnnnnnnnnnnnnnnnnnnnnnnnnnnnnnnnnnnnnnnnnnnnnnnnnnnnnnnnnnnnnnnnnnnnnnnnnnnnnnnnnnnnnnnnnnn

SEQ ID NO: 43282 - DNA, 334 bp, Homo sapiens
  misc_feature (1)...(334): n = a,t,c or g
gctcaaacccgactcgtcacaaatgctacctctccttcctgccaccatttatggcgggcccaagacccaccacatcatgaaacatgagaataagcttctccatcaggcttaacatcccagtgccttgtctttgaagatgctcccaatggggtggaggcggccctggcagctgggatgcaggtggtcatggttcctgacggaaacttgagccgagatctgacaacaaaggccaccctggtgctgaattccctgcaggacttccagcccgagctgtttggtttgccctcctatgagtgagagggagggcctcagtcttccgccccagcccantctg

SEQ ID NO: 43283 - DNA, 334 bp, Homo sapiens
gagctgactgccaagggatgggtgctgctggctgcatgcaccatcagggtccaaggcactctgctgtaaaacttttgaggggccagtgccactgaagctggtgctagccaccatgccctgcaggagctagacaccgaagaagccagagtgctgcaggagctttgcccagggagcaggcaggactgggaagcaaacctcttcctcctgcagtgtctctccagcaccctctactgacaaggtctcagtgctgctcatagaggacaaagattcacagaggtagcagtaactgcatcaccagcacctagcaatatcccagtgatgcctcctacaggac

SEQ ID NO: 43284 - DNA, 334 bp, Homo sapiens
  misc_feature (1)...(334): n = a,t,c or g
ggggtgatacagtgatatgtttttttctgcttaaaacatcactgtcagtatatttttggatcttgaaagatctcttgtgtttatggcttggggcctgcttgctaggcttgacttcagtactgtttactaaattatagcactgcaataagacatttcaccaatatgatattgaagcataacaagttatttcataaggaatggtaattatctaacattctaagcaaatttggcagtgtgacttggtggggcgcattgctgtccctgacacaatgacagccttactctctaaattagtaacttccgtangagaccccanaagcacacctncctcccg

SEQ ID NO: 43285 - DNA, 346 bp, Homo sapiens
gcttttgcatctaatcacaatagagttgaaagagaggccttaggattctcctctctctaggtgctgagccctcacctccctgttccaggctgagaactcaaatggttaccctgcttcttcctacaatgctgtgtgatatgggtgaacccagcccctgaccttcctctatcccctgcccatcctcccttttacctcctctcttttttaaacacctgtttatcccaacctttttgagctcaagctgtgataaagaagggcccatcctatttcccctcatctagtccatttacgattctcactgactccccgtcttcctggcagacacaaataaacccagtgtcaggtc

SEQ ID NO: 43286 - DNA, 334 bp, Homo sapiens
ggacagcgacttacgtatcttttctcctcctccctagtgttcctccccattttttcagaaaacacttctgactcctgtcccttccccttctgcttttggtcagtccctgttcttgagcctcttttctcctctccccaggatgcagaaagtggtgaacccaggaactgaggaaggaggtttccagttcatttacattaagggccctgggggagaataaagctcagagcaggagggagtaaggaaacatttcctttttggttttatttggttggagtttctcatatttgaaaacattgcggtatccatgatttggccttgtggagggtggcctagg

SEQ ID NO: 43287 - DNA, 344 bp, Homo sapiens
ggatgttatgcaaccttcctagggacacagagctagtaataggtagagctaagatttgaacccaggtctttccagcgccagaccctgaatttgtaggattagtgccttcaggatgacatggagggacctcactgccttgatctgttatttatcaagagtcaaactggaaaaggctgtcagggaaacctccaggctgcatcttgggcaaagattggcttgaaacaggcatttcccaagcctggccttggacaccaactgtaaaaaaaaggccattactggtgtttccttggttagttctgggtataagttctggatcctcactcatctcatctgcactgacatcc

SEQ ID NO: 43288 - DNA, 333 bp, Homo sapiens
  misc_feature (1)...(333): n = a,t,c or g
gctcaagaaagaaaattatcatagtggttacatgtgggagctcagagataagcctaggtttgggtcttggctctatttattagcctggctgtataatctcacacaggtgacctaacttctctgagtctcactttcctatccatgaaatagnnnnnnnnnnnnnnnnnnnnnnnnnnnnnnnnnnnnnnnnnnnnnncagtgaaggtaaagttgcttagcacagtgagtgcctggcacaaaataactaccaagccccaaatggtaactattattatccttcaaccttcctcatttccattaccactgagactcaactgctacaatgctgactac

SEQ ID NO: 43289 - DNA, 334 bp, Homo sapiens
gaaataaacaaataaacaaaaatctcctttcttctcccaaaatttatgccaagaggagagccaccatccacctaggcaacttaagaagaaagtttgatgtaatcttcattaattacctagagatctcatgctatgcatataagatatggaacataatagtaatatcagacacttccatggtgtttaccatgtgcaaggcattgtcccaagggctctatacacaggtgcatttgtagaactcatttaattctcacaaccatcctatggttgtgtaactcatctatttctctttgtagttaagcgacttgcccaaatgtcatgtagcttataagtg

SEQ ID NO: 43290 - DNA, 334 bp, Homo sapiens
gatttctctccacttgaggggtactagaaaaactcagaagctggaacgtgggaatacatcttcatttcacagatgagaaggacctgtctcaggaaaagaggtgactcacccaaggttatagctggttagtggcagaaccaggaccagaagcaaggcctgcagcctcttgtgtaggctttcctagtgcgtgctgctgaccctcaaagctgtccttggccaactcaccacctgtgtgacacttacccccaggcagctgtagggaggaacacagatgttcggggaaggcacttgtgttactgtataagcacaaaggaagctgggatctgagtatggt

SEQ ID NO: 43291 - DNA, 344 bp, Homo sapiens
  misc_feature (1)...(344): n = a,t,c or g
gatttaggaaagaaatgtaagtttctatcctttgagaaaaaaatatggaatttattttaaattgaaaatgtgaacacaatgctaattacttaaaaattatttgagaagtacataaagtaaacgtatgcagactctattgcataccccagaagcaacatcagtaaccaccgtgaggtcagagccacagctaagttaaaggatcagaatgaaatgtgtactggctgatgagttcagttggggattcagatgtgactttggggnnnnnnnnnnnnnnnnnnnnnnnnnnnnnnnnnnnnnnnnnnnnnnnnnnnnnnnnnnnnnnnnnnnnnnnnnnnnnnnnnncc

SEQ ID NO: 43292 - DNA, 345 bp, Homo sapiens
  misc_feature (1)...(345): n = a,t,c or g
gacactatcctatatggtgaatatggtgggggagcttttctaaagatatttaaattaggaacaaattttaaaatgttctactggccaaatagaatgtgccagactgctagttttccatcctttgctaaatttataggctcaggctgatgcagtttaggtactgtaccccctgacttggtgttatctgacattggttaatctccaacttatactgaatacccgagcatttctaagtgccctggccttagctggggcaggcttagcaacaagggtaagacaagagaagacgaatannnnnnnnnnnnnnnnnnnnnnnnnnnnnnnnnnnnnnnnnnnnnnnnnnnn

SEQ ID NO: 43293 - DNA, 332 bp, Homo sapiens
  misc_feature (1)...(332): n = a,t,c or g
gctttaattattaacgttcagggcacagcactgaggaagttttctgttagtgcctatacagttctcacttccaggatttacccaaatttgttcaaatggtactattatattaccctggccccttggagtaggtttgattttctaaggtgtagaatactctagatctctttgagtgtaaaaaggtactttgttttgtttgtcctttctctgtgtttctggaacagtgatgtcgtgtttactcttagcatctcagtctcagttttctcaattgacattttgccaaattaggaaaaactgaaacagtttaatgntatcttcaccaccatttagag

SEQ ID NO: 43294 - DNA, 333 bp, Homo sapiens
gagttaataaatagcacatccttgaaccataaacatacgagatagacaagagctagataataaacagtttttcccccaatccctaagctttacttattttttttactgattcttgtactttgtcattagaaaaaggagtggggttggtttcccagtgaccgcattcattaagaaactgggcatgtacagcaagtagcaaaatatgccaacatccacaccatctctggctatgtgaaaacttggtgccctgtgtgaggagcatgggggatggttggaaataatgcagctttatttttattgtgattgttggaattcatgaatcataaaattctg

SEQ ID NO: 43295 - DNA, 340 bp, Homo sapiens
  misc_feature (1)...(340): n = a,t,c or g
ggcaggataatacagagcattatcgcgggatttgataagaagaaatgtcattgatgacttaaaataccaatttggttattgtgacaaccatgaaaaccagattacatgtgattaacaagtccatatgtagtgatgagattatagtttctatgggccacctaattttgatggagagagagcagttccgattaaagncttttcaagattgagaactanaattngnattaatgaggtaaagtcgncattcagttntgataactttctcatttttaaaacatgtntgcaaactnacactgaaantnngttccaagcattaacagaaaattacaggattactgat

SEQ ID NO: 43296 - DNA, 349 bp, Homo sapiens
gaaaaccatacgccatacagcactaaccagaggtagagcagagtggttaggagctccaaaaccatgctacacaggtctgaatcttggatgttacataaaagctgacttacttttgggcaagtcatttaacttttcagttacaaaatgaacacctaccttctgagattttggagagactaattaagttaataaatgtaaaggactaaagacagcatctggtacatgtaaacatgcaataaatattagttgttattaatttttttattattagctgaaagctaagtactttagaaggttatcctgagaacgcaattagaaaaaaatcaagaagagtttaaaaaacataaga

SEQ ID NO: 43297 - DNA, 349 bp, Homo sapiens
  misc_feature (1)...(349): n = a,t,c or g
gcaataacataaagtcaataacatattctatatgttatgcatatcatataccatattaaagtaagctaannnnnnnnnnnnnnnnnnnnnnnnnnnnnnnnnnnnnnnnnnnnnnnnnnnnnnnnnnnnnnnnnnnnnnnnnnnnnnnnnnnnnnnnnnnnnnnnnnnnnnnnnnnnnnnnntggannnnnnnnnnnnnnnnnnnnnnnnnnnnnnnnnnnnnnnnncaggcacagttggtgtaactttacagaaataatcgtaatttctgcctgacttttttgctttttttatttttctaaaaagtgtttttatatattaacaatcgtctgtccaccttttgctttag

SEQ ID NO: 43298 - DNA, 334 bp, Homo sapiens
ggctgctttcatgctatgatggcagagttgaatagttgtaacagagattgtataacccacaaaatccgatatgtttacgaactggctcttcatggaaaaagtttcctgacctctcatctagatcaatggggttgtacgttaccatttaaaaatatttaggttgtaatctatcctcttattacttgtatttatgggtaactattttgtaagtaaggctgtttcgtatagaattaacgtggtttaggtaagcattcagaaatgttaggttaatttagctctattgtctaacttttttcaaatttagaacatttgtctttgactcgtttaaacttat

SEQ ID NO: 43299 - DNA, 177 bp, Homo sapiens
  misc_feature (1)...(177): n = a,t,c or g
ggaacgtgcctcttgggaaggacgtccgctacttgcacttcctggaaggcacccgggactatgagtggctggaagcactgcttatgaatcagacggtgatgtcnnaaaaccttttctggttnaggcncanaccccnngangntnttnnnnnnnncctgttcntgnncnggnncctgc

SEQ ID NO: 43300 - DNA, 329 bp, Homo sapiens
gccacagactcagagagaacccaccatggtgctgtctcctgccgacaagaccaacgtcaaggccgcctggggtaaggtcggcgcgcacgctggcgagtatggtgcggaggccctggagaggatgttcctgtccttccccaccaccaagacctacttcccgcacttcgacctgagccacggctctgcccaggttaagggccacggcaagaaggtggccgacgcgctgaccaacgccgtggcgcacgtggacgacatgcccaacgcgctgtccgccctgagcgacctgcacgcgcacaagcttcgggtggacccggtcaacttcaagctcc

SEQ ID NO: 43301 - DNA, 327 bp, Homo sapiens
  misc_feature (1)...(327): n = a,t,c or g
gaggaagaagaaataattccagtatataaagttggaaattatacaaagaaggcaggatctctagattattctgcttgtcttataattgctgggcctctaattaatttttagcattcacctgtaggtttccttttattttgagtactgggagnnnnnnnnnnnnnnnnnnnnnnnnnnnnnnnnnnnnnnnnnnnnnnnnnnnnnnnnnnnnnnnnnnnnnncacgcaannnnnnnnnnnnnnnnnnnnnnnnnnnnnnnnnnnnnnnnnnnnnnnnnnnnnnnnnnnnnnnnnnnnnnnnnnnnnnnnnnnnnnnnnnnnnnnnnnn

SEQ ID NO: 43302 - DNA, 329 bp, Homo sapiens
gcccagccgagccctgtgtgcagcctaagcccgcctccacctccctgcgcgggccgcctcctccacctcaaacgctgctccctttgcttctcctggcaaacccccgcccctttcccaatcttccctcgggtcacacatggctgagccaagatgcagctttccactgactgtgtttctacgcaggttgagcaaatggacagaagtcaagtgggccgcacacacgcactctggacccagcttctgattggtgcacctgctgtaaacacatctgagagtgggccgcacacacgcactgtggacccagcttctgatttgtgcacctgctgtaa

SEQ ID NO: 43303 - DNA, 342 bp, Homo sapiens
gcaaaactcttcctcccacatgagaactggctccattcctacttcaccatccaggcagggatggtggttattgttctgtacccagggcagaaatgcctggggctagagcagccctgtggtgtgctgaaggtccacacctgcctgccaggtccagagcccatggctccagctcacattttgcttggatgttttaagctgtcaggaaaggatgtgattccttatgctttttggaggagaataaaaaaatcttcttattgagccatcatgaaaaaatgagcaaatgttttgggtagttttttgagctgatgttttcagaatggttttagtattttttcataaaat

SEQ ID NO: 43304 - DNA, 329 bp, Homo sapiens
gagaaaaggaaatatgatccatcttaactgaggctcaggccacataattggactctgtcacaaagggactttggaaaactactttttggtcatgaaattgttcatcgctgctggagaatgaacgtcattgcgatttatcttgcttcattctgaaccttatcaagaggatctgactgagagcccactgcagttagagctgagcacttttgaaaagcttgtccatcactctagcagggagaggctctggacagatgaataccttttcttcggcttgtgaggcttcccactatttattactgaactattatgttaatgaagatggacatttt

SEQ ID NO: 43305 - DNA, 343 bp, Homo sapiens
  misc_feature (1)...(343): n = a,t,c or g
ggggctctgcattttataagaatattgaatttttgacatgtttttaaactattacacatatgcatataaaagtagcatgtaagttaataagtgtggcaaagagataacttcaagggaaacaaaatctaaagaaaaaatgtaatcctaatgcaccacgcagatttgctattaacaatatcgacatagttttggtgttataaagtgattattgatgtnnnnnnnnnnnnnnnnnnnnnnnnnnnnnnnnnnnnnnnnnnnnnnnnnnnnnnnnnnnnnnnnnnnnnnnnnnnnnnnnnnnnnnnnnnnnnnnnnnnnnaagatggtgaaaccctgtctctactaa

SEQ ID NO: 43306 - DNA, 328 bp, Homo sapiens
  misc_feature (1)...(328): n = a,t,c or g
ggaattttggttttgcaagatgaaaaagttctgaaaatctaatctactgcacaacagtgtgaatatagttaacattattgaactgtaccccttttttttctgagactcctcgtctaaaaaaaangtnganattataanctttatattatttnatcaaantaaaaanctggagtgaaggctgtncaannnnnnnnnnnnnnnnnnnnnnnnnnnnnnnnnnnnnnnnnnnnnnnnnnnnnnnnnnnnnnnnnnnnnnnnnnnnnnnnnnnnnnnnnnnnnnnnnnnnnnnnnnnnnnnnnnnnnnnnnnnnnnnnnnnnnnnnnggggg

SEQ ID NO: 43307 - DNA, 341 bp, Homo sapiens
  misc_feature (1)...(341): n = a,t,c or g
gcggcacgagatnnnnnnnnnnnnnnnnnnnnnnnnnnnnnnnnnnnnnnnnnnnnnnnnnnnnnnnnnnnnnnngatttatctacctactatcactagaatataagctctgtgagggcaattactttcatttttcacctgtttaatttattgtcttgtctgcaaccctagaagagtatgaatggttcattcaccagcatcctcagcaccacctgggagcttgttagagatgctaactgatgggcttcaccactgaataggaatctttggtggtagggatcaggaatctgttttaaaattctccctgtgatttttttttttcatgacagcctaccattgaa

SEQ ID NO: 43308 - DNA, 313 bp, Homo sapiens
gaactggaagaataaatcaaaaactaattaaaaaattaatggagatgggaacaagaggtggggagaaaaggtggagaatacagggaagatttctctgagcctccttttttgggacatgtaatattcaaacataatgttgatttctgaaccaaataaatatatattcaaaaattaaatgaaacccaaagaaaaacaaacctagcattgaaagcaaatggaaattaattcaatgtaaaataactacagggaaagtaattatttcatatgactttggtcattgctatgagttgaatgtttgttacctctcaaactc

SEQ ID NO: 43309 - DNA, 307 bp, Homo sapiens
  misc_feature (1)...(307): n = a,t,c or g
gttggatatccatatcggaaaaaaatcttgacctttgccacacaccatatataaaaatcaattccaaannnnnnnnnnnnnnnnnnnnnnnnnnnnnnnnnnnnnnnnnnnnnnnnnnnnnnnnnnnnnnnnnnnnnnnnnnnnnnnnnntttacnnnnnnnnnnnnnnnnnnnnnnnnnnnnnnnnnnnnnnnnnnnnnnnnnnnnnnnnnnnnnaggcagnnnnnnnnnnnnnnnnnnnnnnnnnnnnnnnnnnnnnnnnnnnnnnnnnnnnnnnnnnnnnnnnnnnnnnnnnnnnnnnnnnnnn

SEQ ID NO: 43310 - DNA, 306 bp, Homo sapiens
gcagactcagagagaacccaccatggtgctgtctcctgccgacaagaccaacgtcaaggccgcctggggtaaggtcggcgcgcacgctggcgagtatggtgcggaggccctggagaggatgttcctgtccttccccaccaccaagacctacttcccgcacttcgacctgagccacggctctgcccaggttaagggccacggcaagaaggtggccgacgcgctgaccaacgccgtggcgcacgtggacgacatgcccaacgcgctgtccgccctgagcgacctgcacgcgcacaagcttcgggtgga

SEQ ID NO: 43311 - DNA, 312 bp, Homo sapiens
  misc_feature (1)...(312): n = a,t,c or g
gttaactgcataggaaattacctaaagggaatattcaccaaggagtgagctttacctggcttacttaaaaagtgacatccttannnnnnnnnnnnnnnnnnnnnnnnnnnnnnnnnnnnnnnnnnnnnnnnnnnnnnnnnnnnnnnnnnnnnnnnnnnnnnnnnnnnnnnnnnnnnnnnnnnnnnnnnnnnnnnnnnnnnnnnnnnnnnnnnnnnnnnnnnnnnnnnnnnnnnnnnnnnnnnnnnnnnnnnnnnnnnnnnnnnnnnnnnnnnnnnnnnnnnnnnnnnnnnnnnnnnnnnnnnnnnnnnnnnn

SEQ ID NO: 43312 - DNA, 303 bp, Homo sapiens
gattggtttgtggtcatattgttttgctcatctttgtaggcggatgacagagatcagttctctgtggtcagatacggagaatctggatgatcagacttcgttctctgtgtccttagcctcttttgagctcaattcaattcagaattttgtgtccaccgggaaggatacctctttgacacctggtccagggacttttccagtttctgtgtttactcttgccctggggctgaagttgtaattcagaaaggcctttgcctctcactaagtgaatgtggaaaactttttttgagtcattgggtaagg

SEQ ID NO: 43313 - DNA, 311 bp, Homo sapiens
gattgaatagctcttctctgttgccattaaatagaggatatggcagagaaaggtgcaaaacagaaatgatgatcaggatgacagagtagctctaatgctaggctacatttcaggagggagagcaatgcttcctactgactcacacacattctccctccattctgaagtgagtactgcggaaaggagccttggccctccagacactgaactgtgctccagacatcctgctacacgtctcataatttgaatatataatggcagacagggataaatgttatggaagcaaagaacccttctttgtgtggggtggg

SEQ ID NO: 43314 - DNA, 305 bp, Homo sapiens
  misc_feature (1)...(305): n = a,t,c or g
ggagagagctagcaccatgagctaatnnnnnnnnnnnnnnnnnnnnnnnnnnnnnnnnnnnnnnnnnnnnnnnnnnnnnnnnnnnnnnnnnnnnnnnnnnnnnnnnnnnnnnnnnnnnnnnnnnnnnnnnnnnnnnnnnnnnnnnnnnnnnnnnnnnnnnnnnnnnnnnnnnnnnnnnnnnnnnnnnnnnnnnnnnnnnnnnnnnnnnnnnnnnnnnnnnnnctgcttttcttattgcttttgtacatctgcttcagaaagctaaatttagcatatagaggtgtcacttgccagccaggtcagtt

SEQ ID NO: 43315 - DNA, 312 bp, Homo sapiens
  misc_feature (1)...(312): n = a,t,c or g
gatttgtannnnnnnnnnnnnnnnnnnnnnnnnnnnnnnnnnnnnnnnnnnnnnnnnnnnnnnnnnnnnnnnnnnnnnnnnnnnnnnnnnnnnnnnnnnnnnnnnnnnnnnnnnnnnnnnnnnnnnnnnnnnnnntttgctattgagtaaaggttggtaaacagtctgcaggccaaatttggcccactttttttttttttngnaannaaaattttgnggaacnnaanccntnnnnntnntttaanatantggnatanggtttntgtgntgnttgggcaaaattgtctanntnnnnnnnaaannncnttttgg

SEQ ID NO: 43316 - DNA, 330 bp, Homo sapiens
  misc_feature (1)...(330): n = a,t,c or g
ggtgtgcctcagtactcagagactaaggctggaggatgacgtgagccaacagtgggaggtcacggagagctataattgtgcggcttcgctccagcctagataacacagcaacacctggtctttnnnnnnnnnnnnnnnnnnnnnnnnnnnnnnnnnnnnnnnnnnnnnnnnnnnnnnnnnnnnnnnnnnnnnnnnnnnnnnnnnnnnnnnnnnnnnnnnnnnnnnnnnnnnnnnnnnnnnnnnnnnnnnnnnnnnnnnnnnnnnnnnnnnnnnnnnnnnnnnnnnnnnnnnnnnnnnnnnnnnnnnnnnnnnnnnnnnnnnnnnnnnnnt

SEQ ID NO: 43317 - DNA, 331 bp, Homo sapiens
gcaactttaataaaattttttaaaaactgattttatctgtcactcatattctttgtccattccatttactatgcattcttatttaacaggtgataattttatattccataagtgcttaaacaccattcattactaaactacatttttgtttaatttcacataatttttatataagcagtactctttctcagtttctcttgaacattcaactcattagtgagtggttttccccagtcatttccatttttctttatttggctctgatagttttctgtttttgtttttcagagataatcctttactatactaaattctacgtgattatattttc

SEQ ID NO: 43318 - DNA, 333 bp, Homo sapiens
gcatagggctcggcgtggaggtgtcatcctgggcttggagtgggggtttcatcctgggcacagggtgggagtggaggtgtcaccctgggcagcgagtaggggtgtgggtgggggtgtcatcctgctgtgtacgggcaccaaggaagaatgaggagccatgtatgaagggagactctgggaagccaggctgcccacctcacttcccttctcctcgccctcccccagccacagtctccccaggctgggagacctcaagtctgattgcgccaacacctggtttgcattaagaagttcctgactgctgaaggaagcctcccatagagacttactctt

SEQ ID NO: 43319 - DNA, 302 bp, Homo sapiens
ggagggagctgggtggggtgtgaggtggtgtgcaggagaaaaagtgcttcaaatggtagtgtgcagatcacagacagaaagtgtaacttgctggaaaaactaggacccaagagaccagctcctagttgccaagttaccactggctgaaaatcacgtatctgtctttggtttggtttctctctaacaaagactgagaatgaataaaactagcatctggcagatgcctactatatgccaggcccattcacatagattatctcatttactctttcccggtcctgcctcctggtgctgtgtggtac

SEQ ID NO: 43320 - DNA, 302 bp, Homo sapiens
  misc_feature (1)...(302): n = a,t,c or g
gaactggaaggattacactattgaatatgccataattgttnnnnnnnnnnnnnnnnnnnnnnnnnnnnnnnnnnnnnnnnnnnnnnnnnnnnnnngcnnnnnnnnnnnnnnnnnnnnnnnnnnnnnnnnnnnnnnnnnnnnataaacagnnnnnnnnnnnnnnnnnnnnnnnnnnnnnnnnnnnnaaaaaanangggngttgaaggatttcaanatntggatnttggaaaanttntananntantanaccccntnccanaggaantaccanaanacanntttntggaaatnagngcttccta

SEQ ID NO: 43321 - DNA, 333 bp, Homo sapiens
ggcaatatataaaaagaacaatacctcaagtccaaaaggagtttatcctaggagtgcaaggttgatttcatactggaaatcaatcaatataattatgaatggaataatgaaaaaccatatgatcatctcagtagatgtcagaaaaacatttgacaaaattcaatattcattcataataattctcagaaatgcaggaatataaagataattttcttattctgataaaggctatgtatcatacttactggtgaaatactgaatgctttcctcttagatcgggaaaaatgcaagaatgtctattcttgctcctattcaacactgcctggccagaac

SEQ ID NO: 43322 - DNA, 311 bp, Homo sapiens
gcaggcatttcaaattactcttgaatttagggcggaggcagaggatggcttactgctctactgtggggagaacgaacacgggaggggggatttcatgtccctggctatcatccgacgctccctgcagttcaggtttaattgtggaactggggttgccatcatcgtaagtgagaccaaaatcaaactagggggttggcacacggttatgctctacagagatgggctgaacgggctgctgcagctgaacaatggcaccccagtgacaggccagtctcagggccaatacagtaaaattactttccggacacctc

SEQ ID NO: 43323 - DNA, 291 bp, Homo sapiens
  misc_feature (1)...(291): n = a,t,c or g
ggcctttttggtataattctgacttttggaaacatgttaatgatctacatattcaccaaatagaatgaaaccaatatggatgggagcgctaactgaaacagatgaattgtatttcaagtgaataatacaatcacactgaagggatttaacaaaaactaattcaagtaaattatgaatgtagtatttgactacatatgtttagtcttgggtagagttgnnagaataccatatcanagactgnactcgttgntgttnnnnnngnnncntcnntngnnttntcntttttnttat

SEQ ID NO: 43324 - DNA, 313 bp, Homo sapiens
gctggattttaattgtaactgcaaaaaattcagtgatgtggttttagattccatattacaactaacctttaagaaagtactaattatcatgttttgctacaatagcaaagaagaataggctattcatagttatctgaaaagactataaaatagtcttcaccttttcctctacttacctgtgtgaggctaaattatctttatgtacttcattcaaccaaaacaacatatcatatagatttactgtcaaagtaggtgtgagaatccaacagtcttctattaagccaaatgttagagttttgcaaacatgttaaac

SEQ ID NO: 43325 - DNA, 319 bp, Homo sapiens
gctgggtctccatgtgcctcccagtcctgctctgagccgtgggaggccggggcgagggccaggcccatctcttccctgtatgatctgtttctaggcagacggaggctcctagccccacctctctgtgagcttgagtggcgtttatgactctccttcctatttcctgtcctgctaatcaacaagtcagctaaacagtccatgctgcctgggcaagcccagtaggcccctaacgtggcacctcggagcggctggcgatgccccaagagccgggcttccccctcctggaggctcttcctgttcctcgccaagctcttaggtt

SEQ ID NO: 43326 - DNA, 336 bp, Homo sapiens
  misc_feature (1)...(336): n = a,t,c or g
ggaggaaaagaagttgccaatgtataggtgggaaaaccatgttgagaaagtgacattagagcaaatacttgaaggaaacatgggagcaggtaaagggctggaggtgggaaggtgccctcgtgttcaaagagtagcnnnnnnnnnnnnnnnnnnnnnnnnnnnnnnnnnnnnnnnnnnnnnnnnnnnnnnnnnnnnnnnnnnnnnnnnnnnnnnnnnnnnnnnnnnnnnnnnnnnnnnnnnnnnnnnnnnnnnnnnnnnnnnnnnnnnnnnnnnnnnnnnnnnnnnnnnnnnnnnnnnnnnnnnnnnnnnnnnnnnnnnnnnnnnnnnnnnnnnnnn

SEQ ID NO: 43327 - DNA, 321 bp, Homo sapiens
gctctttaaaaactcttaaaagatttattgggtcacatattcagaataactacttgccatttgttattgtacctaacagtaatagtgcagtgtttgaaatgaaatggacctgagctccagagttcatcatttattatctgtgtgactttgaacatattatataatcaccctaaacctttttcctcatcagtaaaatggaacttataatacctatgaggattaaatacgatatggtagcttaaatttttgctcattttgctcttttgatatgagccaaattataggagaaataattagagtggcacactagcatgatggtaa

SEQ ID NO: 43328 - DNA, 300 bp, Homo sapiens
  misc_feature (1)...(300): n = a,t,c or g
ggaagcttgtttttattggtttaccaaagtttatttggctttggcaatatggatcataattatgttcaaaagaaactgatgccaggtgtggtggctcacgannnnnnnnnnnnnnnnnnnnnnnnnnnnnnnnnnnnnnnnnnnnnnnnnnnnnnnnnnnnnnnnnnnnnnnnnnnnnnnnnnnnnnnnnnnnnnnnnnnnnnnnnnnnnnnnnnnnnnnnnnnnnnnnnnnnnnnnnnnnnnnnnnnnnnnnnnnnnnnnnnnnnnnnnnnnnnnnnnnnnnnnnnnnnggggaggcta

SEQ ID NO: 43329 - DNA, 344 bp, Homo sapiens
gagggctaactagactgtcttcttttcagatcataacttgatctctttttaagattatttctgggacttgtacagcctcaggaaacttgggtctgtcattgggacaaagaaatacaggcactggctgtggtgttggagatgggagcgacatgggatatggtgagctttgtttctggtgaaatagaattgtttgtcattagctttaggtttaaaaggtgccattcagactggacctcctcacctgggagctggcagacctgggccttgccattggcgatattactgtttatacctctgggtggcacgtgggaaatctcttttgtgctgggaggtaggtttgtctt

SEQ ID NO: 43330 - DNA, 348 bp, Homo sapiens
gtttttttctttttaactgagaacaaatgttgaagtcaaatttcatttgcaaaagccaatgtgtccatttccttttggtagggtggtggaggaaccaagaaagaccagctcaataggaggcctttacttcttaaaaataaggcttcccaggaaccttggcttaagttctaggaactcacctattctaacagtggtcctttaaccataagaaagtatttgcaaggtacagtaaaggcatttttcaaaagttgtagctaatcaacaataagacagagaagcaactagatttgtctcttagctaaaaagcgaggcaatgtcccaagacgaagtactataagacagtttgcc

SEQ ID NO: 43331 - DNA, 331 bp, Homo sapiens
gtgggaggccatcgtagggaccaaagccttcactgtcttcagagccatctggaaggacactgcaacctccgccccccgcccaacctccagcccagcttaggcgatcaggatgccagtattacctttccctgcgggagagtggagcatggtgacttctggctggttgttcccctatcccttccccatcccaggagacagggtccctcatgctgaccctacatccagaaaccagggccactctgtctggtcaatcaacagaaagtgacacatccgtgcggagcttcacactgctactttggggacacttcctggctctcttccagggccaatg

SEQ ID NO: 43332 - DNA, 332 bp, Homo sapiens
  misc_feature (1)...(332): n = a,t,c or g
gaatagatctaagtagaaatatatatacatacatacattttatatagctccttcaacatattataaattgtatagtagagcacgtaaaatgtgctattaaaatgttaaaacctagaataatttttgagaaattatgcaggtaaccaggtcttgacaaaaaaatgacaaaaaacacaaaaaatgggagataaatttataggaggcttatttatctctctggtgattataggcatttaaagtcaaatatcannnnnnnnnnnnnnnnnnnnnnnnnnnnnnnnnnnnnnnnnnnnnnnnnnnnnnnnnnnnnnnnnnnnnnnnnnnnnnnnnnn

SEQ ID NO: 43333 - DNA, 325 bp, Homo sapiens
  misc_feature (1)...(325): n = a,t,c or g
gctggaagtatagtcaatgaaatcatttactattactattgtataagtcaatatttgctttcagaaaattatttctaaggttttaaaatattttcccaacacaaatgcccttaaaacaatgcaattaaaaaaataaaaaaacttaaggagaaaatatttgcaaatcatgtatccaataaggagcnnnnnnnnnnnnnnnnnnnnnnnnnnnnnnnnnngagtaacaagacaagtgtactttaaaatgagcaaaggaactattataaataggcatttctgaaaaatgtacagtaaacggccaattagcacatgaaaagatgtatag

SEQ ID NO: 43334 - DNA, 330 bp, Homo sapiens
gggtgcggggaggtagtagtttcttccgcgagggtgcgggagggccccggggcgcccttgggaaccgggctggaggcagagacaggcccggaggaccaggcggacgtaaggatcaggcctctggacgcaactgcggagccggaacagaccaggagggcgcggttgggcgggtacagccaggaagtgctcgtcgcgagcgcggcccgcggttcggccacagcgagaagcccgcgggtgccgggagtgctcggtcttctctcgatctctgcagggagtcactggccccgttcctttttatctgtctgaacatcacgccgaacttttaacagg

SEQ ID NO: 43335 - DNA, 322 bp, Homo sapiens
  misc_feature (1)...(322): n = a,t,c or g
gaactggggctgcatgttccaggtcctgcccggagctggcctgcgtggtagatactcatcttcttttctccaggtgggggatccccatctatttcagggtgctaagaatagctttggttgtgggagggagattgttatcaaactgaacttgggtctgtgccgagcacagcaaagncaaacactgacatcatgattgnagcaaganaaagngaggcatgtattacaggacgncaagcangganacttgngcgattntcatgcttangaaccaanntccctgatggnttacatanacnaggnnttatagnanaagtnntacctt

SEQ ID NO: 43336 - DNA, 329 bp, Homo sapiens
gcaccagggtagataggctggcagtggccaatgttgttctaagagaaatcctaaagactacccaatttttttttttcttgaatccgcaggatcctgttttgtgaaaattcctcttacgcccacctataggatagacagtggaggcccccctgggagaaagtgtacacagaaagtgctatctaattacagaagtagcagaatttcctttgtgctcagaggggaagtgctacaaaagtgtaattactttacccagcatgtgtgatttacgggacttaaaatgtgtgagtttccaaagagtcatctgtttttaaatacagtatccctcccag

SEQ ID NO: 43337 - DNA, 321 bp, Homo sapiens
  misc_feature (1)...(321): n = a,t,c or g
gcaagccattctttgtctgagcagcttgatggtttctccttgccccatttctgccccaccagatctttgctcctttccctttgaggactcccaccctttggggtctccaggatcctcatggaaggggaaggtgagacatctgagtgagcagagtgtggcatcttggaaacagtccttagttctgtgggaggactagaaacagccgcggggcgaaggccccctgaggaccactactatactgatggtgggattgggacctgggggatacaggggccccaggaagaagctgccanaggggcactcantgctctgcananaggg

SEQ ID NO: 43338 - DNA, 328 bp, Homo sapiens
gggaacgtctgaggttatcaataagctcctagtccagacgccatgggtcatttcacagaggaggacaaggctactatcacaagcctgtggggcaaggtgaatgtggaagatgctggaggagaaaccctgggaaggctcctggttgtctacccatggacccagaggttctttgacagctttggcaacctgtcctctgcctctgccatcatgggcaaccccaaagtcaaggcacatggcaagaaggtgctgacttccttgggagatgccataaagcacctggatgatctcaagggcacctttgcccagctgagtgaactgcactgtgaca

SEQ ID NO: 43339 - DNA, 327 bp, Homo sapiens
ggcattggcagccaggatattgacttatatgggatgatagtagtgtgacgatatatattgtccaaaccagatattttcgtttaggacaaatgctgaactgaacagatgtttgttgtagaaataaaaccatataaaatatatagcattcaaatgtatatatcagtatgaataaaagtttaaaatgtgcatggaattaggtctttttaggtactaaaaataataaaaaaaaattaggtaccaaccctggagaagaataaaggggaatagatagaggagagtgtacacagggactttggggatatctttttttttttaaccccccctaca

SEQ ID NO: 43340 - DNA, 322 bp, Homo sapiens
  misc_feature (1)...(322): n = a,t,c or g
gctggaagggaagaaagaagagtcagagatctgaagaggctatggtggctctgaagatggaggaaggggcataaacaaaagcttgnnnnnnnnnnnnnnnnnnnnnnnnnnnnnnnnnnnnnnnnnnnnnnnnnnnnnnnnnnnnnnnnnnnnnnnnnnnnnnnnnnnnnnnnnnnnnnnnnnnnnnnnnnnnnnnnnnnnnnnnnnnnnnnnnnnnnnnnnnnnnnnnnnnncacgnnnnnnnnnnnnnnnnnnnnnnnnnnnnnnnnnnnnnnnnnnnnnnnnnnnnnnnnnnnnnnnnnnnnnnnnnnnnnnnctcaag

SEQ ID NO: 43341 - DNA, 321 bp, Homo sapiens
  misc_feature (1)...(321): n = a,t,c or g
nnnnnnnnnnnnnnnnnnnnnnnnnnnnnnnnnnnnnnnnnnnnnnnnnnnnnnnnnnnnnnnnnnnnnnnnnnnnnnnnnnnnnnnnnnnnnnnnnnnnnnnnnnnnnnnnnnnnnnnnnnnnnnnnnnnnnnnnnnnnnnnnnnnnnnnnnnnnnnnnnnnnnnnnnnnnnnnnnnnnnnnnnnnnnnnnnnnnnnnnnnnnnnnnnnnnnnnnnnnnnnnnnnnnntgcctggctggtttttgggggccatggcaagtgcaggcttgtcagaggaattggagaagcagggattagttaggaaaacctctccacttctt

SEQ ID NO: 43342 - DNA, 328 bp, Homo sapiens
  misc_feature (1)...(328): n = a,t,c or g
gggaaaattcttgttgagtagattaattctggatcctgaaaatgcgggaccatggagacgagaatatcgagacaaatgtctgtctgtcttaccaacttacctctagaacagtgattttcacactgctggatgtgaccttcacgagggtaatgaaatcaagctagtgggttgggagtagcannnnnnnnnnnnnnnnnnnnnnnnnnnnnnnnnnnnnnnnnnnnnnnnnnnnnnnnnnnnnnnnnnnnnnnnnnnnnnnnnnnnnnnnnnnnnnnnnnnnnnnnnnnnnnnnnnnnnnnnnnnnnnnnnnnnnnnnnnnnnnnnnnnn

SEQ ID NO: 43343 - DNA, 263 bp, Homo sapiens
  misc_feature (1)...(263): n = a,t,c or g
ggagagcagaggcccactggctacctcgcgcctgctgctgttgctgctgttgctactactgcgtcacacccgccagggatgggccctgagacctgttctccccacccagagtgcccacgaccctccggctgtccacctcagcaatggcccaggacaagagcctatcgctgtcatgacctttgacctcaccaagatcacaaaaacctcctcctcctttgaggttcgaacctgggacccanagggagngattnnnatgannatac

SEQ ID NO: 43344 - DNA, 330 bp, Homo sapiens
  misc_feature (1)...(330): n = a,t,c or g
gnnnnnnnnnnnnnnnnnnnnnnnnnnnnnnnnnnnnnnnnnnnnnnnnnnnnnnnnnnnnnnnnnnnnnnnnnnnnnnnnnnnnnnnnnnnnnnnnnnnnnnnnnnnnnnnnnnnnnnnnnnnnnnnnnnnnnnnnnnnnnnnnnnnnnnnnnnnnnnnnnnnnnnnnnnnnnnnnnnnnnnnnnnnnnnnnntaangtatatcctttgtgtcctgaagtgttgnttttaggcgccactttctcccccaccctcagttcgcgtgtggtgtgcaacagagtccagtttcattcttccacgtggatagccagttgatttctctgtaccatt

SEQ ID NO: 43345 - DNA, 324 bp, Homo sapiens
gttcctttcctgtttaattgcacacagtccccccaaatcacacccttcttgtggcccagggcaccagcaattccttagcaagtgaagggagatgattcctttctctctagtatccagttccctaaattcatacttcttcaccacaaaactgtggaaatacatgacatacaaaaggagttttaacatttctattttcttgacctttgcattttatcttggtatggttttctaatatatatccctgtgttgatggatttttaggcctttaggtacctaggagaaacagatttgatctattttaatttgttaaaaaagtactgactg

SEQ ID NO: 43346 - DNA, 447 bp, Homo sapiens
  misc_feature (1)...(447): n = a,t,c or g
gggataaggagtcgtcacttggccggtaagggaaatagactcaagtggatgaggtccaacgattcagtcttgagatttcactgccctaaaagtcaaataatgtgtaagaggacagcgaagggaagacttcctcctcccccacccccacctcaggaaatcctgatcttaattnnnnnnnnnnnnnnnnnnnnnnnnnnnnnnnnnnnnnnnnnnnnnnnnnnnnnnnnnnnnnnnnnnnnnnnnnnnnnnnnnnnnnnnnnnnnnnnnnnnnnnnnnnnnnnnnnnnnnnnnnnnnnnnnnnnnnnnnnnnnnnnnnnnnnnnnnnnnnnnnnnnnnnnnnnnnnnnnnnnnnnnnnnnnnnnnnnnnnnnnnnnnnnnnnnnnnnnnnnnnnnnnnnnnnnnnnnnnnnnnnnnnnnnnnnnnnnnnnnnnnnnnnnnnnnnnnnnn

SEQ ID NO: 43347 - DNA, 470 bp, Homo sapiens
  misc_feature (1)...(470): n = a,t,c or g
ggagaaaacaaaatcaagaacgacaagcaacatttccaaaattatataaactttttggtcctttatgattttgaaacagagttgagaggccgtatagttcaacctacttttgtttttggtttggtatttaacttttgtttctctatctgcattctctccagattctgaaaatgatcagaagtgcagttgaagcgctctctctttcttaacatcttttaaactaataaaagaacactctgttttccttttcattatcgttcagacatcgcattcaaaagggttctaaaaatactaaattagaagaaatcttgtgctcactagccttaaaagctctacaagatcagagcagttcagaatttctaatgaaggcgtnnnnnnnnnnnnnnnnnnnnnnnnnnnnnnnnnnnnnnnnnnnnnnnnnncggatcncangcangaganaagaccanctgnctaacagggggaagaac

SEQ ID NO: 43348 - DNA, 474 bp, Homo sapiens
  misc_feature (1)...(474): n = a,t,c or g
ggatgactgccttctcactgtgtcctcacatggtggagagagaaagtgcaagttctctggtatctcttcttataagagcactaattctgccatgacgannnnnnnnnnnnnnnnnnnnnnnnnnnnnnnnnnnnnnnnnnnnnnnnnnnnnnnnnnnnnnnnnaggcttcaacatgtgaatttggggtgagcaggacacatttcattccatggcaaaatggatcatacatctaaatgtaaaccacaaaactgtgaaacttctagatgataatataggaaaaaaagaggtgaccttggtttgacaatgagtttttaggtacaacaccaaaggcacaatccatggaagaaacaattgacaagctggacttcattaaaatgaaaaacttctgctctgtaaaagacggatcaactttgggaggccgaggcagcagatcacccgaggcaggagttcgagacnacctggccacatggtga

SEQ ID NO: 43349 - DNA, 475 bp, Homo sapiens
  misc_feature (1)...(475): n = a,t,c or g
gaccatatactacacaaagtacactacattcagagttccaaatttagggttacagctgttgactgctttcttttgtgtgtgtgtgtgtgtttccttaaatggctttaaaaatgccaaagattatggagggagtcacttaaaatacagtgtgtatataactggttttcttctccaattctcactaaaatttgattgctttctgtgtgtctgtgtatgtgtgtttccctaaatggcttaaaaaatgccaaagattatggagggagtcacttaaaatacagtgtttatatgacttgatttcttttctaattctcgttaaaattgaagtacttctgtgaccctattttaagaaaaagaannnnnnnnnnnnnnnnnnnnnnnnnnnnnnnnnnnnnnnnnnnnnnnnnnnnnnnnnnnnnnnnnnnnnnnnnnnnnnnnnnnnnnnnncctgccaaagtaggaaaccctgctctactat

SEQ ID NO: 43350 - DNA, 294 bp, Homo sapiens
  misc_feature (1)...(294): n = a,t,c or g
gcggcacgaggaatcttggttttatttttcattatctgcaaatgatatgtccataacagtagttatttgtcacaaaaatacttcacaagaacattggtaaacacatacaaatgttagcagttctgaacaggcatttattgtagaggaacctgtttatgatgagaaatatgaaagaattgagacagtgggcctctaccatagaggagggaagaaactagttgggtgaaatttagtgttaggatgttttgcananaactatttttgnnaggctgangcnggangatggntngagcc

SEQ ID NO: 43351 - DNA, 272 bp, Homo sapiens
gcacataccaagccttgtccggcctcagggcctttgctgttactatgctttcagcttgggacactttcttctcatatcctcatggctccctctgctgtcatctcctgatctctgcttaaatgtcaacccagtggcactccctctccatccctctgcatcttcttaccctgttttcttgttctttacatcaccacctgacatatcatgttttctgggttttatttatagtatgtctccacaactagatcagaagctctgcaggggtaggggtt

SEQ ID NO: 43352 - DNA, 357 bp, Homo sapiens
gagatagatttctcactgctatattagaagctggaagaagagggcatactatcttcaatgtgataacctggaatgatcaacctggaattttatgtccagagaaactatctttcaaggatgatggtgaaatacaaagacatttcagataagcaaaatagaaactgcctccaacagactttcacttaaggaaattctactttaggaagaagaaaaatggtgccagaaaggaagtctgagatacaggaaggaacggtgagcaaagaaattcgtaagcacctgtgtaaatctaaacaagtgctacctgtataaaataataatgatgatgatgatatctaatttatgaggctaaaaaaaaat

SEQ ID NO: 43353 - DNA, 328 bp, Homo sapiens
  misc_feature (1)...(328): n = a,t,c or g
gtaattctttatcttagtaaatttaatcagcagagaagtcagtgtgaatataaaggcatccacataattagatacctatctgttttatgttaatgcagtattgtgtgcatctgttatggaaacacttgtatcagccaactcccagtgcannnnnnnnnnnnnnnnnnnnnnnnnnnnnnnnnnnnnnnnnnnnnnnnnnnnnnnnnnnnnnnnnnnnnnnnnnnnnnnnnnnnnnnnnnnnnnnnnnnnnnnnnnnnnnnnnnnnnnnnnnnnnnnnnnnnnnnnnnnnnnnnnnnnnnnnnnnnnnnnnnnnnnnnnnnnnnnnnnn

SEQ ID NO: 43354 - DNA, 327 bp, Homo sapiens
  misc_feature (1)...(327): n = a,t,c or g
gggatggcggcgcgggacagtgacagcgaagaagatctggtcagctatgggaccgggctggagcctctggaagaaggtgaaagaccaaagaaaccaatccctcttcaggatcagactgtcagagatgaaaaaggaaggtataaacgattccacggggcctttagcggaggtttctctgctggatacttcaatactgttggctcaaaagaaggatggacaccctctacctttgtgtcttcacgacagancagancagacnnatctgttnttgntcctgaatattttatggatnnanagntgcttnntcatntcnttttttgctaatta

SEQ ID NO: 43355 - DNA, 337 bp, Homo sapiens
gctgggaactcagagctgattttgttattcaaatatcatcaatcagtataattcaccatatcaacagactaaagaaaaatatttgatcatcctagtagttgcagaaaaagaatatgaaaaaaaaataccattcgttgatgataaaaatgctgagcaaactaggaattgaaagaaactgcctcatcagaaaccctagagttaacaccatacttcgtggtaaaagactgaaggcttctgctacaactgggaacaggccaagatgtctgctcgcattactcctgttaagcataatgctgggagtcccaggtaggcagtgaggcaggaaataatagtgaaa

SEQ ID NO: 43356 - DNA, 326 bp, Homo sapiens
gactggaaaggtggtctacttttcagccacatacccctacatcatgctgatcatcctgttcttccgtggagtgacactgcccggggccaaggagggcatcctcttctacatcacacccaacttccgcaagctgtctgactccgaggtgtggctggatgcggcaacccagatcttcttctcatacgggctgggcctggggtccctgatcgctctcgggagctacaactctttccacaacaatgtctacagggactccatcatcgtctgctgcatcaattcgtgcaccagcatgttcgcaggattcgtcatcttctccatcgtgggct

SEQ ID NO: 43357 - DNA, 333 bp, Homo sapiens
gcgcggagatctgtctcctgcccctagactacggaccctgccgggccctacttctccgttactactacgacaggtacacgcagagctgccgccagttcctgtacgggggctgcgagggcaacgccaacaatttctacacctgggaggcttgcgacgatgcttgctggaggatagaaaaagttcccaaagtttgccggctgcaagtgagtgtggacgaccagtgtgaggggtccacagaaaagtatttctttaatctaagttccatgacatgtgaaaaattcttttccggtgggtgtcaccggaaccggattgagaacaggtttccagatgaat

SEQ ID NO: 43358 - DNA, 338 bp, Homo sapiens
  misc_feature (1)...(338): n = a,t,c or g
gggaaatttttctgagtattgtctatccatatgaatccatacagattgtctatctatgaattgtctatgcatccatagatgcctaactcatgaatatgtaggaccaaatgtaacagtctttagaactcaatcctctttcctccttagttaaagaaaatagggaagtcttagtcctcagtctgtggttactcagaaatcacttctcagtccactcaaaggctggtggttgtactagtggctctattctgctggtgccccattatgaggaactttgctgagccctgaaggccaaggtgcttagtacctggtctcaataacatccctgcagntttncccat

SEQ ID NO: 43359 - DNA, 344 bp, Homo sapiens
  misc_feature (1)...(344): n = a,t,c or g
gtgtgaacttaattttgaggacttaaaatttgaatatgttagaatgcagagattctccagagacaattttgctgcttccctcctcccccccacaccnnnnnnnnnnnnnnnnnnnnnnnnnnnnnnnnnnnnnnnnttgagagaggatgctgttggcatgtagtcagtaggggctaggcatcctgctaagcatcccacggtgcatagggaaccccctcaacaatgaattggctcaaagtataacagtgccaaaactttgctcttttaatgctgtgttatccagaaataagactcaatagtagcaatagcaaaagtgaacatagaaacgacttacctagactgct

SEQ ID NO: 43360 - DNA, 348 bp, Homo sapiens
gcacagactcggcggtaccccagctccatctcttcatcaccccaaaaggacctgactcaggcaaagaatggcttcagttctgtgcaggccacgcagttacagaccacacaatctgttgaaggtgctacaggctctgcagtgaaatctgattcaccttccacttctagcatcccccctctcaatgaaacggtatctgcagcttccttactgacgacaaccaatcagcattcatcctccttgggtggcttgagccacagtgaggagattccaaatactaccaccacacaacacagcagcacgttatctacgcagcagaataccctttcatcatcaacatcttctgggcgc

SEQ ID NO: 43361 - DNA, 346 bp, Homo sapiens
gaaaaaaatagccattaaacccacccctgttacaggtcactattggtattttgattttgccttcaatccatctgttattgtttacttttaagagtccttgatagttgctttttatgtccagagttttaatttcagtcagaaaaagaaataggccttggtgagcatgctttgtcttggctggtgccagaagtctgtactcaaatatttttaaaataatttttagttgaataacaagttagacctgtgtttagctttctcattgttttcctaaaaatagaagaaaaggttttaaatactttaaccacgaaataatttaaagcaggtttaaaataaactccttcatttt

SEQ ID NO: 43362 - DNA, 344 bp, Homo sapiens
  misc_feature (1)...(344): n = a,t,c or g
gnnnnnnnnnnnnnnnnnnnnnnnnnnnnnnnnnnnnnnnnnnnnnnnnnnnnnnnnnnnnnnnnnnnnnggcagcatttcacacgtgttgtcatggcttgttgccaggggaattaaacatgtccgtgactgctggagagaattcttggaagcacgtgcctggtttcctcgggacttcctgccctgtgccttttccctttgctgatctggctttgtgtcctttcgcagtaataaatctgtgaatagccgtggccatgactccacgctgcgtcctgtgggtccttcccctgatcattgaacacgggctttttattgagccttaaaaaggagtaaggcactgacat

SEQ ID NO: 43363 - DNA, 207 bp, Homo sapiens
  misc_feature (1)...(207): n = a,t,c or g
ggttgggaggtgtgggggcaggaggggcaggaggggtgcatgcaaccaggccaggccaggagccccaggtgcctatctgaggaactgnnctgtatcctgnngnctatgngancngnnngtgggttttgatgaagcgcaacnggnacntgnnnnnggagcnggnnnctaagntgnggaactggntgnctncnccnntncnncnnctac

SEQ ID NO: 43364 - DNA, 344 bp, Homo sapiens
ggaacattgggcctagagagtattgagtcatctttcctcttcctttgctctagacagagttatgcctaaagccttccaaacaaatgggtctctatccatcctaattttatagatcttcaagataaaagatttctttctctgctgtaatcttttctttgcttcataacttacacactgttctaggcagacaataggatagtacagggcttcaaattaggtcatgtcagcaaattaggtcatattgttaataaattttaatatgtacaacgctatgctacagaattatggtattggcatatattatttatgtgctatataaacatttatgctagtctgccttttgg

SEQ ID NO: 43365 - DNA, 336 bp, Homo sapiens
  misc_feature (1)...(336): n = a,t,c or g
gnnnnnnnnnnnnnnnnnnnnnnnnnnnnnnnnnnnnnnnnnnnnnnnnnnnnnnnnnnnnnnnnnnnnnnnnnnnnnnnnnnnnnnnnntacacagcaacgaaattgcctaacaagacatttctcagagcgacacatgactgtgtgtctaaagcagttttatcatacaaagtagtggctcgtaagagggttaggaaattttagttacttgtagatgttaaaatatatacnnnnnnnnnnnnnnnnnnnnnnnnnnnnnnnnnnnnnnnnnnnnnnnnnnnnnnnnnnnnnnnnnnnnnnnnnnnnnnnnnnnnnnnnnnnnnnnnnnnnnnnnnn

SEQ ID NO: 43366 - DNA, 328 bp, Homo sapiens
gattatgaagattaaatcagtgataaaatatgggattatgcctaagatacagtctggcatgttttaggaactcaataaatattagattctcctccttgcattttttttctcagaactttagaaaccagaggtaagaacatcacaaaataacagatgactctgcttactccaatatgtgccaagaagcaaaaatgcccaagtgaacaatcttatttagtaagatactgaaaggagattcaccgttcgattaatgcagcatggatttgtaaatacccagtttacgctcttctttggtcactatcaagtaagaatgacatcactcttcact

SEQ ID NO: 43367 - DNA, 332 bp, Homo sapiens
ggaaaaacttatacatttggtcagtgggagctatttcaagccagttcctatctgcttttagcataactttactaatctttgaatacttccttgttttctagcatatatcctggtatgatttgtgaattcctagcctgagacctgaaatcggccatttctccaagatgcagtggtttcttttagcgggaatgctatttagataccaaaatttgagtgagcctgatgcttcttgctattcgagtatccctgcttctaagcctttttatggaacagaactgggaaacatgttctttaaaaaatcatgaaggtgtttatagactaagttgctttga

SEQ ID NO: 43368 - DNA, 324 bp, Homo sapiens
  misc_feature (1)...(324): n = a,t,c or g
ggccacagaacacttcccagcgcagcatttcaggcagctactcctagcccttgggactcagaaataatttaccaactgtgaacaagtggcttccagctggaaaatctgtcctatnnnnnnnnnnnnnnnnnnnnnnnnnnnnnnnnnggcnnnnnnnnnnnnnnnnnnnnnnnnnnnnnnnnnnnnnnnnnnnnnnnnnnnnnnnnnnnnnnnnnnnnnnnnnnnnnnnnnnnnnnnnnnnnnnnnnnnnnnnnnnnnnnnnnnnnnnnnnnnnnnnnnnnnnnnnnnnnnnnnnnnnnnntactcaggaggctgagacaggaa

SEQ ID NO: 43369 - DNA, 325 bp, Homo sapiens
gtaaagatacttcaagtgaagaagttaacctgagtcacattgtaccatgtgagccagttccagaagaaaagccaaaagaattacctgaatggagtgaaaaagtggctcacaacattttgtcaggtgcttcctgggtgagttggggtttagtcaaaggtgctgagattactggtaaggcaatccagaaaggtgcttctaaactccgagagcggattcaaccagaagaaaaacccgtggaagttagtccagctgtcaccaagggactttatatagcgaagcaagctacaggaggagcagcaaaagtcagtcagttcctggttgatgg

SEQ ID NO: 43370 - DNA, 276 bp, Homo sapiens
gcggcacgagcacggcaggacggggggccaggacaatgagctgacccagggcggagcactccaggacagggggcagtccatggaggctcacgcgggaggccctgtggagagacagacacagcgacattctcagcaacagctaggacttgtgatgaatcttggcttcctgaagtccagaactcaccctggtcatctcattacttttgaaaaatgagaacccccattttaaatgtttgaggctttttggcctcattaatagtgctatggtggggcttt

SEQ ID NO: 43371 - DNA, 303 bp, Homo sapiens
  misc_feature (1)...(303): n = a,t,c or g
gaatctnnnnnnnnnnnnnnnnnnnnnnnnnnnnnnnnnnnnnnnnnnnnnnnnnnnnnataaagattgagatgcctctagacatctgactagtgaattgtcaaggaagcagttaaatatttaaatccagagttcaggagagaatcagnnnnnnnnnnnnnnnnnnnnnnnnnnnnnnnnnnnnnnnnnnnnnnnnnnnnnnnnnnnnnnnnnnnnnnnnnnnnnnnnnnnnnnnnnnnnnnnnnnnnnnnnnnnnnnnnnnnnnnnnnnnnntannanaanacnnnnattanccgggtatgg

SEQ ID NO: 43372 - DNA, 323 bp, Homo sapiens
gaaatagagccaaatcctaattgcttagctttagattctataggtgactaatcacttgctgttggattatcccattagaagtcacacagcaccaactccatttcctccttttcctagacagcccttctggaaagccttagaaaggggatgtttcagcagagtcagaccatgttgaatgccagaataaacaactctgattgtgttgtgaacataagagctgtaaagaggcactgacctcagctgctccttcagttcttctgcagcctctacagatgtggagaaattgtgatgagctctcaatctcagggaacagctcctagagt

SEQ ID NO: 43373 - DNA, 332 bp, Homo sapiens
gaaaggaaacacataatcaccaagtcataatgggacagcatttgaaaaaaaattatcacaacatcctgaggacaagcaggtttctgttcagtttgggccaggagtagaaagaagaggaagagaaagaccacagaagttgagatttacatgtggtgacttggaaataagaaagaaacttctgaaggtgagggaattggaaagaacttctttcttcaagcttgggaggaattacatgaaacattccttggtgaaggggctcagaataaaaccacaggcaaaagaagaaaaagatagctggaatttgtcaacaacagagaagccattcttaactc

SEQ ID NO: 43374 - DNA, 324 bp, Homo sapiens
gggggtcctgctggcagcttttctggggaaggacggcgttggaagtgaattgctgtggtttgcttcagactgtggtgcacctggaatgtgtccgggggaaaatgttgaggcttgagtaaaatagcacagcgcagacattggcaacatctgtgtggtcttggcacgaagtcacatagagcgatgggcccagtgtgtagggaagttgggggagccaggaaacagccaagtctggcctccgcaccatgcctcagctggaggggttctacatcttacctacttgaaaactgaaccctaagagtttaggatttttttttaagacacaac

SEQ ID NO: 43375 - DNA, 320 bp, Homo sapiens
gggcatttacaggattatcagttttagagataatggctgtataatttattttcatgttgcttttttttttgatatataatacttcacatatttagggggtacaggtgagtatttgtttcaacagctgtgtaatttaaaaaagagagtatttttagtgttttgtttgacttttacttccaactttgttgtcagtgtgaaaaagttatttgtggaaacttactatgattggcagttcctttcttgtaagctgtaaagacagttttgaggttttttttggttttaaaaaaattccttgttgtatgtaggttggaaaataacaa

SEQ ID NO: 43376 - DNA, 331 bp, Homo sapiens
ggagagctacaccatgagcttcaataccctgggatataaaaccttaaaaattcgaatcttgattctgtctcaaatcaccattttaataatccacgtgagtagccccaacccacactatctgaatatttttaaggttcatgaacatgaaataaccaatgaagttaggaacactgtgtcaaaacatagaatgtacctttcatatcactatgaatataaaaatacataaatcaagtgtattaaaagccttatctgataaggaggaaatcaaaagagttcatgcaattctatacaaaacgcctgatccttggaatgattctaaggcctggaaaag

SEQ ID NO: 43377 - DNA, 85 bp, Homo sapiens
  misc_feature (1)...(85): n = a,t,c or g
ggccctcaagaagtacttattctactttgagaggtgggaagcagtagggaggtcagttgggactgntgangngcgnntannacag

SEQ ID NO: 43378 - DNA, 66 bp, Homo sapiens
gattttttcttcttttttttttttcttttttctaacaaaggggaactccttcaaaaaaaaaaaaaa

SEQ ID NO: 43379 - DNA, 321 bp, Homo sapiens
  misc_feature (1)...(321): n = a,t,c or g
gnnnnnnnnnnnnnnnnnnnnnnnnnnnnnnnnnnnnnnnnnnnnnnnnnnnnnnnnnnnnnnnnnnnnnnnnnnnnnnnnnnnncttttttaatttgagacactcttatcacccaggctgttttttctggaccaggatgggccccttgaaacaagtgggtcagggagagaagtaaaggggtaaaatgtagaccaggagaaatggagtgatagacactggaggaaaggggaaagtcaaaaagaatctgtgaaaaggaagaattcacaaataggaaaatatccaagattgactcttccaattgcctggggcttctattactc

SEQ ID NO: 43380 - DNA, 330 bp, Homo sapiens
  misc_feature (1)...(330): n = a,t,c or g
gtggaagacactttttccaatnnnnnnnnnnnnnnnnnnnnnnnnnnnnnnnnnnnnnnnnnnnnnnnnnnnnnnnnnnnnnnnnnnnnnnnnnnnnnnnnnnnnnnnnnnnnnnnnnnnnnnnnnnnnnnnnnnnnnnnnctcatagctnnnnnnnnnnnnnnnnnnnnnnnnnnnnnnnnnnnnnnnnnnnnnnnnnnnnnnnnnnnnagttggagacccctgtattattacatgatgatacaacttgcacacaaatgtttaccattttcacctctgcttgtgtcatatcttaattctgcccccataaggttctttcaatctaatttc

SEQ ID NO: 43381 - DNA, 323 bp, Homo sapiens
ggcggggatttatacagcacctggccttataagttgagtattcatgataggtgaagaggtgaagttttttgttcatgagaatcactaatgaaaatcagttgtttagaatgtgaagggcacagcctacactgctaaaacactccccctagtgggagtttggtagaatacaaccaagccccctgtgtccaaagagggagttggcctttcattgtactccgggtgatctctctccattatccgcgcaaaggaagggcccgagagcaggaacaatttgatcttatatttctttgggttttgtttcaaaatttattttactttcttta

SEQ ID NO: 43382 - DNA, 329 bp, Homo sapiens
ggaaaaactcactgaatagctggaagggtggcaaggaggaggcagctggggatgggcctgtgtctgataagcccccagctgagtctgttggtaacggagggagcaagtatagccaggaggtgatgcacagcctgagcattctgaggactgccatgcaaggggagcggaagtttatttttgttggaaccctgaagatgggtcaccgtcaccagtatcacgaggaaatgatccagcgctacctttctgatgctgaggagagattcctggcagaacagaagcagaaggaggcatagaggaagatcatgaatggaggaatagggggtggccct

SEQ ID NO: 43383 - DNA, 323 bp, Homo sapiens
gtacctgtacaaaactgaagaacttcaacatttaaagcatgaagactggaagtagatattggtgaaaatctaatctcatctctaggatatggacttatttcagcaaccataaaagggcttacctgtccacctgtggcataggtagaatcactctggctagaggcagccccaggtcctgtttcacagccaaaactccatgaccaatgagaaacttcaagtcgtttggaatgataaccaaaacctacttgagttttcaacttcagtatgcttactgtgataccctaaattatcaaggatgatataaaacttaactcacgaaagat

SEQ ID NO: 43384 - DNA, 349 bp, Homo sapiens
gaatagagtgaccagctgtcgttatataatatctgcaggctatgattgtgtaggtgcctgtagtcactggctatgaaaatggccccaaataaagtggtatccacacttcttctttctcctacgaatttggaggtctaggaacgggggtaagcctatatggtcagaattagcctgcaaacgtgaattaatatgcagaatctgtccccactgtgatagaatttgccattcgcttcctttgctaaatggcttgcagtggcagctgacggccaaaggggaagctgagaacagcaaagattcaactgaaaacattttagggggttcctgacttcaggcctcttttcagaatgag

SEQ ID NO: 43385 - DNA, 141 bp, Homo sapiens
gtttattgaagcaactgtcctttacccattgcatgttcttggtacttttgttcaaaaccaattgaccatagatgcataggtttatttctgggatgtctatctttcttattccactgattgatatgtcaaaaaaaaaaaaaa

SEQ ID NO: 43386 - DNA, 333 bp, Homo sapiens
  misc_feature (1)...(333): n = a,t,c or g
gctggaagaannnnnnnnnnnnnnnnnnnnnnnnnnnnnnnnnnnnnnnnnnnnnnnnnnnnnnnnnnnnnnnnnnnnnnnnnnnnnnnnnnnnnnnnnnnnattttaacgactttcacaaatatgctgtactgagagagaatgttacatancattgagaactagtacangtnaatattaaagtgaagtgaccatttcctacacatgctcattcagaggaggatgaagaccattttggangaagacagcatcnttnttananttgcncnngnnngncnnnnggctttngnnnntnannnnnnnntcnnnngntgnngnnccntgcttnnggcc

SEQ ID NO: 43387 - DNA, 339 bp, Homo sapiens
gcaaatagttgtatttctgaaagatttttgcccatactcagattcacttaggtcaaatacaaatgtcttcaagtctgatatttattggtttgttctcaatggatatgaataggtagttaaaatactagacttttgctttgttttccatcaaggagcctgaagaaataaatgcagatgatgagatagaggatacatgtgaccacaaagaggatgacctgggagctgtagaagaacaacgtagtgtcatcctacatctcttgtcacagcttaagctgggcatggatttaacaagagtaagtaatggcataagctggctatggagattgtaagggctgtacc

SEQ ID NO: 43388 - DNA, 358 bp, Homo sapiens
gcagaaatttctcctggacagcactgacgagagactccaagtcctccgtccttacagttcttctaacttgatgagcagaagaaagccttctcgtaaaggacagcagttcataggcttcagatggtcacttctcttctctttacgaagggaactgcagtttaccagaggggaaggacagttcggaagccttccgtgctcgcagaccaggtgtctgggtgtggcatgctttctttacttaccatggaggcactgcaagttggaatgatggaagttatgagttgcacagatgtctaatgtcttaactcaagggttttcttcacagtctggattgaaggatctctgccacctatcataaggg

SEQ ID NO: 43389 - DNA, 340 bp, Homo sapiens
  misc_feature (1)...(340): n = a,t,c or g
gccattttccagcagagcaccactgtcctatccagagcttattttcctggaaaccattctctccataaaannnnnnnnnnnnnnnnnnnnnnnnnnnnnnnnnnnnnnnnnnnnnnnnnnnnnnnnnnnnnnnnnnntgattaatacaattcgagagtgctattagcatctagnnnnnnnnnnnnnnnnnnnnnnnnnnnnnnnnnnnnnnnnnnnnnnnnnnnnnnnnnnccacagagcatgctttctaccttctgttcatcataggccccttacatatgacatcttcattttcattttcaacccaaacacattttatttaacaccgtataacttcaat

SEQ ID NO: 43390 - DNA, 225 bp, Homo sapiens
gtatcaacttatcatataaggaaaggaaagtgattgattcggatactgacactgtaggatctggggagagaggaacaaaggaccgtgaaagctgctctgtaaaagctgacacagccctcccaagtgagcaggactgttcttcccactgcaatctgacagtttactgcatgcctggagagaacacagcagtaaaaaccaggtttgctactggaaaaaaaaaaaaaa

SEQ ID NO: 43391 - DNA, 339 bp, Homo sapiens
gacttcaatagatgagtttggagggtgatgcagtccaacccattacacgcaggcatcagtgttagatgtggctaggcttgggaaggagaactgaagaggagcagagtggaatcggatgtggatgggagagagtttctagtggtgaagaggaagggaggaggtcggtgggaggaaggagatgagctcagttttatagaccttaagccagtgttggggataaaggactggggagtgatcagaagtgagtagtccagttcatacctcttaggcagactctgagatttcttggccgatttgtacaaacttgctacaatctaccttaaggaagataacattaga

SEQ ID NO: 43392 - DNA, 353 bp, Homo sapiens
gcatcagaattgttgaaactggtgctgttttctgttgcactgggattctgatgatctgggattttccctccttggcacagtaaacaccatgactgtctttattgagaatgtcgtcacagtcctttagtgatagattagttagacccatggttgcaatacctttatctccccaaagaaaataatcaaaagaaagcacaaaagctaccctgtttgcagaatatttcactgacattgatttgtcattaattctaccagagctgacctcattcaggcttgatagaaacaggttcctatgtttagggcagatccctagcctctcgctcacagtgagtctgcatgtcctagattctggt

SEQ ID NO: 43393 - DNA, 352 bp, Homo sapiens
  misc_feature (1)...(352): n = a,t,c or g
nnnnnnnnnnnnnnnnnnnnnnnnnnnnnnnnnnnnnnnnnnnnnnnnnnnnnnnnnnnnnnnnnnnnnnnnnnnnnnnnnnnngtgatgactttgaatgactctttaatactgctgtcaactctagaggttggagttacaacctgaattacattaaaaggctatgttgagtaataacgttacgttgaacttaagtgcttttgaaccttttggttctgtagataattaattttctttgaattgacaccatatttattactgagtatccgtgtaacagattattcactgtggtcatctaggactccttgactggaatgaaagctgtttctttctttttatatgagaaagagaa

SEQ ID NO: 43394 - DNA, 338 bp, Homo sapiens
ggctgaccagttggcgacatggtggcacccgtgctggagacttctcacgtgttttgctgcccaaaccgggtgcggggagtcctgaactggagctctggccccagaggacttctggcctttggcacgtcctgctccgtggtgctctatgaccccctgaaaagggttgttgttaccaacttgaatggtcacaccgcccgagtcaattgcatacagtggatttgtaaacaggatggctccccttctactgaattagtttctggaggatctgataatcaagtgattcactgggaaatagaggataatcagcttttaaaagcagtgcatcttcaaggccatga

SEQ ID NO: 43395 - DNA, 351 bp, Homo sapiens
ggtctaaaaataccccgaaatcctttacaaaattgcaaattagaaaggcccgttgggattttgtgtatatggcagtgtgtatctactcccttcaaagagggagcacactgggttaccctgcccctctctacctggttgtgaggttccatactatatacttgtcagttctaactttgaattcttaagcatgggaaatagctctaaataagagtcctattggtactcaagcacctcattcttgtgtgtagaaatagcattccagtggactgccaatttgaacatttcttgaatacgaactttttctcttacagcaaacattattgatagcttgtgactctacttttgttgtgg

SEQ ID NO: 43396 - DNA, 338 bp, Homo sapiens
  misc_feature (1)...(338): n = a,t,c or g
gnnnnnnnnnnnnnnnnnnnnnnnnnnnnnnnnnnnnnnnnnnnnnnnnnnnnnnnnnnnnnnnnnnnnnnnnnnnnnnnnnnnnnnnnnnnnnnnnnnnnnnnnnnnnnnnnnnnnnnnnnnnnnnnnnnnnnntcattagaagatatacctaatgtanatgatganttantgggtgcagcnnncnancacatctnnnnnnnnnnnnnnnnnnnnnnnnnnnnnnnnnnnnnnnnnnnnnnnnnnnnnnnnnnnnnnnnnnnaagtattgctgtattagccctatatacnntattagcaagtagtcatctttagactaatncattttttttttgttt

SEQ ID NO: 43397 - DNA, 343 bp, Homo sapiens
gcaaggcagctggcaccagtgcccgggtcttggcagctcatggcagtgacggagagcaggtcagcctccgtctcaacggccacccgccaggagtgtgggccaacggcagtgctccccaccttgagcggaggcccaatggctacgccctggggctggtgagtggagggagtgcccaagagtcccaggggaacacgggcctcccagacgtggagctccttagccatgagctcaagggagtgtgcccagagccccctggcctagatgaccccctggcccaggatggagcaggagtgtcctgatgattcatggagtttgccccttcctaagggaaggagatctttat

SEQ ID NO: 43398 - DNA, 333 bp, Homo sapiens
  misc_feature (1)...(333): n = a,t,c or g
gtcagattctgttgtgtggctcgttacaattttcttgatgacatttcaaattcattatttttttctgacttagaaaaaaattttgtttttccnnnnnnnnnnnnnnnnnnnnnnnnnnnnnnnnnnnnnnnnnnntcaatgattttttaatgaacttttattttagaatagtttttagatttatgaaaaaattgcaaagannnnnnnnnnnnnnnnnnnnnnnnnnnnnnnnnnnnnnnnnnnnnnnnnnnnnnnnnnnnnnnnnnnnnnnnnnnnnnnnnnnnnnnnnnnnnnnnnnnnnnnnnnnnnnnnnnnnnnnnnnnnnnnnntatg

SEQ ID NO: 43399 - DNA, 332 bp, Homo sapiens
  misc_feature (1)...(332): n = a,t,c or g
gctattgttgactgtaatcacctgcnnnnnnnnnnnnnnnnnnnnnnnnnnnnnnnnnnnnnnnnnnnnnnngtacccattacccatccccacttcccacccctactactaccctttcaggcctctagtaaccatcattctannnnnnnnnnnnnnnnnnnnnnnnnnnnnnnnnnnnnnnnnnnnnnnnnnnnnnnnnnnnnnnnnnnnnnnnnnnnnnnnnnnnnnnnnnnnnnnnnnnnnnnnnnnnnnnnnnnnnnnnnnnnnnnnnnnnnnnnnnnnnnnnnnnnnnnnnnnnnnnnnnnnnnnnnnnnnnnnnnnnnnnnnnngga

SEQ ID NO: 43400 - DNA, 340 bp, Homo sapiens
gggagggcccagccaacctgtgtctgccaagaagcaatgcgggatggtgggcagtgtgccagagtggtttctaggctcagctgtgcccttttcctgccatgtgaccacaggcaaattcctcacctctctagtctcagtttgctcagctgtatattgggtccactgggtcactgatctcaggggctccttggtgctaatgtgttccaggctgtaagtaccagctcccaggccttggggtggggagtagtcaaagagctagggcttctctcctggggcatcttagcttctcccgtcgttggccaaaagcaaaactgtggcatggaacaaagtcatgatgagg

SEQ ID NO: 43401 - DNA, 343 bp, Homo sapiens
  misc_feature (1)...(343): n = a,t,c or g
gcnnnnnnnnnnnnnnnnnnnnnnnnnnnnnnnnnnnnnnnnnnnnnnnnnnnnnnnnnnnnnnnnnnnnnnnnnnnnnnnnnnnnnnnnnnnnnnnnnnnnnnnnnnnaannnnnnnnnnnnnnnnnnnnnnnnnnnnnnnnnnnnnnnnnnnnnnnnnnnnnnnnnnnnnnnnnnnnnnnnnnnnnnnnnnnnnnnnnnnnnnnnnnnnnnnnnnnnnnnnnnnnnnnnnnnnnnnnnnnnnnnnnnnnnnnnnnnnnnnnnnnnnnnnnnnnnnnnnnnnnngcctgttaataaagtagtagcagggttggcaaggattgacaacaattttgaaagaaat

SEQ ID NO: 43402 - DNA, 119 bp, Homo sapiens
gagattcactttatctccatgtgttaagtatggtaaacttgcctgcaactatacctgtgtctcttaagccagagaccttctgttttgccctctccatagaataaacctttagctttcag

SEQ ID NO: 43403 - DNA, 303 bp, Homo sapiens
ggagactagcaccatgagcttcaaaccctgtggtccttaaatatattttcctaacattttctacaatatataatatgaaggaaagcttgctaaatgaataagatatcgtattaagtttaaaaaactacaagaaattttaaatgcagagtttggagagacagagccatcagtacagatatttttgagatgtttttggtaaatagctgttttacttctaatgaataattaaatacaaaacactgcttttcattctatttgggcatcctaacagtttatcacagctgaagaagttcagtacctaag

SEQ ID NO: 43404 - DNA, 308 bp, Homo sapiens
  misc_feature (1)...(308): n = a,t,c or g
ggggctcnnnnnnnnnnnnnnnnnnnnnnnnnnnnnnnnnnnnnnnnnnnnnnnnnnnnnnnnnnnnnnnnnnnnnnnnnnnnnnnnnnnnnnnnnnnnnnnnnnnnnnnnnnnnnnnnnnnnnnnnnnnnnnnnnnnnnnnnnnnnnnnnnnnnnnnnnnnnnnnnnnnnnnnnnnnnnnnnnnnnnnnnnnnnnnnnnnnnnnnnnnnnnnnnnnnnnnnnnnnnnnnnnnnnnnnnnnnnnnnnnnggaatgacacacacgtcaaagaaaaaaagaggccgggcgtgatggctcacacctctaat

SEQ ID NO: 43405 - DNA, 301 bp, Homo sapiens
gcctgacctgattggggagtcggtgatcatggttgctcacttcctgcagagcctcactcatcggctggtgctgggaggagagctagtttatcaccggcggccaggcgaagagggggccatcttgacactggctgggaagtactcggctgtacactgggtagctacattgaatgtgggatcaggcggggcccatgcaagttactaccacagggcaaatgaacaggttcaggttggagtggagtttgaggcaaacacaaggctacaagacacaacattctcctttggttaccacctgactctg

SEQ ID NO: 43406 - DNA, 302 bp, Homo sapiens
ggaggaaataacattcattctgctttccccacatgatgccttttgtacattggattgctcctctagtttagatctgttttactaagcagcagtggtcaagggacatggtggagagaagtgtactgagttctaaagaagagtgtaaatgacgtctctgtggcatattcagatgccatcaggaagcttttgtaagtgaggggagcatcaggagggaggtgtggaaatcagcagcactttctgaaaatggtgtagcttgggaggctgtattcaacttagtttggattttaaatgaattaaaatgg

SEQ ID NO: 43407 - DNA, 308 bp, Homo sapiens
  misc_feature (1)...(308): n = a,t,c or g
gggcgtggtgtggtgttnnnnnnnnnnnnnnnnnnnnnnnnnnnnnnnnnnnnnnnnnnnnnnnnnnnnnnnnnnnnnnnnnnnnnnnnnnnnnnnnnnnnnnnnnnnnnnnnnnnnnnnnnnnnnnnnnnnnnnnnnncctctaaacaaaacaaaagaaagccatctttcctagctaaaagttctcaaattttagtttttaattttgaagtaactccatactttggtttctatcaagaatcaactaacctgaatcccaataggtttagtatatttttgcctttagatatttgttgcttttgaacttg

SEQ ID NO: 43408 - DNA, 218 bp, Homo sapiens
  misc_feature (1)...(218): n = a,t,c or g
ggcatggatcccgcttacagccctgtccatgatctggactctgtgcaaagagggcaccccagtttcccagggtgattttgtgagtttctgagaactgtggatcaggcagcacgaacgtcactgtgaccgattttgctgcacatctggaaacttangctcatgctgccaacctggccgnttatnnncanntntntaatttncanntncttgatactttg

SEQ ID NO: 43409 - DNA, 255 bp, Homo sapiens
  misc_feature (1)...(255): n = a,t,c or g
gctatctgcagtccccgcttcagccactgatggacaatctggaatctcagacatatgaagtgtttgaaaaggaccccatcaaatactctcagtaccagcaggccatctataaatgtctgctagaccgagtaccagaagaggagaaggataccaatgtccaggtactgatggtgctgggagcaggacggggacccctggtgaacgcttccctgcgggcagccaagcaggccgaccggcggataangctgnatgctg

SEQ ID NO: 43410 - DNA, 121 bp, Homo sapiens
gcacataaaagctgtgttttcaatatgaagataaaaaggtattgtgcaaagcatgcagggttttcatgcctcctggcataggtgcagtgatagcttcatgaatttcctttttttttttttt

SEQ ID NO: 43411 - DNA, 230 bp, Homo sapiens
  misc_feature (1)...(230): n = a,t,c or g
ggtcactttgtctctcattctttttaacagctgtatagtatcccactggaggttcctcatgtgatttatttgatcagtgaccaactggtgggtgtttttactgtatagtcttttttgctgngnccagaattctgggctggntgngctggncnannctngnncctcatccttntnnaangctnannnnnnnnnntnnnnnnntannnnnnntgangnnccttnnctntatg

SEQ ID NO: 43412 - DNA, 233 bp, Homo sapiens
  misc_feature (1)...(233): n = a,t,c or g
gcggcacgagtccccctttgtgaatctacctgagggagataattatccaaaagtgaaaatgtgtgtgcccgaggatgcttgttgctgatttgctgttaaaaatccagaatactagagggannnnnnnnnnnnnnnnnnnnnnnnnnnnnnnnnnnnnnnnnnnnnnnnnnnnnnnnnnnnnnnnnnnntgatttctgcatttncatctgaggtnccgggnnnatctnactagg

SEQ ID NO: 43413 - DNA, 320 bp, Homo sapiens
gaggagattaagcgggctgccttccagataatctcccaagggatctcagaagcaaccgaacaggtgctggccaccacggttggcaaggttgcaggtcgtgtgtgtcaggccagtcagctccaagggcagaaggaagagagctgtgtcccagttcaccagaaaactgtcttgggcccagacactgcggagcctgccacagcagaggaggctgttgccccgccggatgctggcctccccttgccaggcctaccagcagagggctcaccaccaccaaagacctacgtgagctgcctgaagagccttctgtccagccccaccaa

SEQ ID NO: 43414 - DNA, 241 bp, Homo sapiens
  misc_feature (1)...(241): n = a,t,c or g
gggaagagaaaaacgtagggtgttgggagcagaggcgggaggcgggagatcctgcgaaatcggagtccctttggagtgggggaggccgctgaggcgcgctgagggctccggccctcttgccgtgnngcttatacnganntggggcnnnagttncgntgtgtantgntgcttcttanctttctnnctnttntanctcngagnaccnactnnttgatgannacntnnatnctgnncntntctg

SEQ ID NO: 43415 - DNA, 342 bp, Homo sapiens
ggcgtcattttaatgcagtcaattgctactggcttcgtatttagtttttacacttatgttggcgtcagaattatagaagagttgtaagcaaaagcactttgcatctagttgtgttagttttgtgtacattgatgcaacattgcaatgaaagtaatctaaaacaatgccaacagtccaagagattttatctttcttttagaaagagtctatgcattattcaagcttgttgtgaatgctgacttcctatagcacttgcatttaagttatgagaagttattggcatgagagataatttaagtggcatgagctcatctgctgtcactgcatgaattacttgggagg

SEQ ID NO: 43416 - DNA, 318 bp, Homo sapiens
  misc_feature (1)...(318): n = a,t,c or g
gatctaatgaggcttacaacttgctaaccccaaaagaagcaataaatgttaagcaattttagtaaccagtatggcatgtatcttatttttgaatgcattcctccttatccccatcctcttaggaatatggacgttttactaagtaataaagatttcaaatgctttttttttttttggnanccccaanngancncnggaaaaancngnggttnacananctngancannnnncccngggncncncncntnannngggnaangncnggnttnnancccnggantttnnggntcnaaancccnngatntttnncccctttc

SEQ ID NO: 43417 - DNA, 347 bp, Homo sapiens
gaaaaattaaagatggcactagctgtaaactgtagcaggaaccatgccctgttcatttgtctattaagagggtttggttgagtttaatgtgtgatctaaggtaggatgctcagtataggttaattagatgatacagagttgccctgtgttttattttattaaatctcacattgtgatagtgtaaacaggaaaagagctttatggtttttttcctctctagggtcttgttttccttacctgtaaagtgaaggagttggataatatgatcttttaaagttctctccgttttcagcatcccactaggaggaacagccataatccctggatccaaactatatgaaatacag

SEQ ID NO: 43418 - DNA, 248 bp, Homo sapiens
  misc_feature (1)...(248): n = a,t,c or g
gtgcaagttttaacacctttcatggttagatgaaattttaaatgtaaagcatccatgtgaaaatgtgtcatgtgatttattcctgtttgagtgagttggtattttatttcttctactgatgatctattatgggaacaggagcaatctttgagtattattggtttttacgttttgttagcattttatattttaaatattctactttaattatctaangaangttattantttaaatgcttacttttttg

SEQ ID NO: 43419 - DNA, 146 bp, Homo sapiens
  misc_feature (1)...(146): n = a,t,c or g
gcggcacgagctcctnnnnnnnnnnnnnnnnnnnnnnnnnnnnnnnnnnnnnnnnnnnnnnnnnnnnnnnnnnnnnnnctcctggctgtatttcttaatacattaaaaatagtatttaaaggctgnncgctgnngnctcatgcctg

SEQ ID NO: 43420 - DNA, 240 bp, Homo sapiens
  misc_feature (1)...(240): n = a,t,c or g
gttttgtcttaaacagaacatgacaaccttcaaattaaaggaaaataaattgtgcaatctttttttaaaaactggaaatttcttggatgtgaggctcattgagatgggactataagatcagatctataaatttaaaaatttagtaggtttgttaggtttcttctacnaangaanaatattttcaagactatatcanacacggntggtcacagnggntnangcctgnnntnnnancacttt

SEQ ID NO: 43421 - DNA, 341 bp, Homo sapiens
gcggcacgagggccccttcgccccagcaggagacgccagctggaagagggaacttccgagcccccaggggcggggacacccccactgagccctgaggatgaggggtgcccgtgggcagaagaagctctggacagcagcttcttggggtctggagaagaactggatttgttgagcgagattctggacagtcttagcatgggagccaagagcgcaggcagcctgagaccgagccagagtttagactgctgtcacagaggagacctggacagctgcttcagcctgcccaacataccaagatggcaaccagacgataagaaactaccagagccggagccccagcc

SEQ ID NO: 43422 - DNA, 352 bp, Homo sapiens
gcaggtgtgcaggtctgcttcttccaaactgacaaagccaggctaggttgctcggggcctgtggcaagaggcaaaggccacggggcttagttcattttcaaggtgagcacaagttaaagcaaggccttaggccttaatcccagcttcagtggtgcgagaaggctggacactccttcagccccagcaggggaggcacccaggctgccgaggcccagagaactctgctacaatccaggtgctgagtatagaggatgttgagaccacaggtgactgcattaaaggagtcaaccattcccttcccactgccacccactcaccacccccttctgagggcgtaacagctgggccagcc

SEQ ID NO: 43423 - DNA, 324 bp, Homo sapiens
gcctgtcttaattataggtgcttttcttggaggagttggtggttaggagtatagtcagagagcgcctgatagagaactggaaggatgtagaaagtatagatccctcctcttctgccaaacatcacttgcagccaggcaggagaagctaatgtcaggcgtaaaagcttccgtttccttccttctcttcttaacacctagcatagcgctatgctatagccagcaagctgtcattaattcaatgattgcagcagagactagagttggtgtagcatttggtggcttttggtagtaacagccatgtcttcataattaatattcacttga

SEQ ID NO: 43424 - DNA, 214 bp, Homo sapiens
gtgtagctagagtggccgatgttagatcttggggccagagagctttacaatgattatgaagatcaaagggcattagaatcaagctataaagagccactgtttgatgttgggatgtgaggatgctgcaggtggatgtctgcacattgatggtgagagtatggtcaccctggccctgctgggtctttgctaaagagactgtgctctgttcttgccg

SEQ ID NO: 43425 - DNA, 324 bp, Homo sapiens
gtgcttcatcaaaactggtgtataagtaaaacgttgagactggctttttttcctcttgccattgcaaagataaaagtgcacctgcactgcagctgtaactgctgggttatgatatggaggaacttcaaggacaatgtgagccccttgacatttttccctgattatcttcccttctacctcccactgaggtcgtccatcttgtcctttttcaagaaaaatgattttggattctggaagaaaattagatccagtcacaaccatttcatgacctccatttacagaacaactgttgatactgtacttctcaatatgaggaagttcttg

SEQ ID NO: 43426 - DNA, 331 bp, Homo sapiens
gcacctctttgagttccccaggaagaacccatttgcactaaaaacattattgagcaaagtagatgttactaaagattttgaagggatgtgtagtctttcatcacctaccttgcagcactcaagtttacaaaccctcattgggcatgtgggggttcctgagtcccctgtgggaagtggttttttgccatacaccttgtttcagagctcagcctcagttagacagggcaggctccagtttcctcatctacccctctccccacagcacctctaattaaccagcccttttcttaccactgagaaattgaactctactaaataattacagccttgt

SEQ ID NO: 43427 - DNA, 221 bp, Homo sapiens
  misc_feature (1)...(221): n = a,t,c or g
gctggttttctgcctttggtatcatcttcctctgtccttactgtccacggtccctgttcaataagccaaagaccctggtgccccgcccagacccctgggctgacgtccagaccaatctcaccccagaggcaactggatggtgcctttagttggtgcggatgccccgtggccaggtcaagtcagagcacctggacaggngtnctncntgctgntgaccctgc

SEQ ID NO: 43428 - DNA, 323 bp, Homo sapiens
  misc_feature (1)...(323): n = a,t,c or g
gagcgagactccatctcaaaaggggaaaaaaagaatataacttcaaagatggttcctggccaggtatnnnnnnnnnnnnnnnnnnnnnnnnnnnnnnnnnnnnnnnnnnnnnnnnnnnnnnnnnnnnnnnnnnnnnnnnnnnnnnnnnnnnnnnnnnnnnnnnnnnnnnnnnnnnnnnnnnnnnnnnnnnnnnnnnnnnnnnnnnnnnnnnnnnnnnnnnnnnnnnnnnnnnnnnnnnnnnnnnnnnnnnnnnnnnnnnnnnnnnnnnnnnnnnnnnnnnnnnnnnnnnnnnnnnnnnnnnnnnnnnnnnnnnnnnnnnnnnn

SEQ ID NO: 43429 - DNA, 327 bp, Homo sapiens
  misc_feature (1)...(327): n = a,t,c or g
gctcagccaggggagacacagggaaatgatgcaaaagaaatgatgcaaaggatctgagcagaacactgcccctccccaccccctgaatgtgtgagtgctgagttacggccttcagtatccaagctctctgtttgacagtagatatattgtcagatgcactgtgctgcttagttttgagtgcagtgtgattttctgaaaggncnatgagntgatngatgtagcatgctcagcactgacctgcccatantgatcactcnatnactgttaacatctatgtcttgntatttcnactgatggntanctcntntaatnnnacagatttcatgg

SEQ ID NO: 43430 - DNA, 320 bp, Homo sapiens
  misc_feature (1)...(320): n = a,t,c or g
gcttttttttttatttttacagaggtagaataaaataattgactaatataaatatgtgactggctgctgataagaaaaataatttatctacttttttttttttgccngnnggggttnnnggggnaaaaagggttnnaanaaaanggnnccnnncccccttttgnaaaanctnnanacccnctttttnnaaaaaannggccngggnttntnccaaaggggcggnaccnangnccncccctnaattttcccttnntaccccnggaaaggggnngnnncncgggtcnacncctggccccnngnnccnacncnccccngntgcc

SEQ ID NO: 43431 - DNA, 303 bp, Homo sapiens
  misc_feature (1)...(303): n = a,t,c or g
ggtaaacccctctcctcttttcatcagagctcccccgcttttactgctctatcatcaggttgcagaaaataagttttcctgcaaacatagattcccatggcaacataacaaaaaggtaatagaacaaatgtttattttgtctagacctgctgtctgagtaccattagaccctgaacatgttggctcctgttatttgaatatgtggttacaaattccttattttcctcaaaacttacttctcttaggccttggtgatattgtcactgtgcctgtgatatgaaggaaggtgtgtgtgtgngtgag

SEQ ID NO: 43432 - DNA, 329 bp, Homo sapiens
gagaaaataatgatcactgtgaagaccacttcttatatagtatagaagtactatctagtacatgagcattttatttatgtttggctattcatgcatttgccaaagtatctattgaagttttttgtttactactgagataatctggtttccaaatcacttttatctctgttgaaaacatgagtcatattccaataaatgtaaacatagggcagtttcttataaacgcaaggcattattggtatgctaattgtatgttccactttctgcatgcttaatcatcaccttccagctccaataaattgtaccttaattgctgaggatgtattata

SEQ ID NO: 43433 - DNA, 312 bp, Homo sapiens
  misc_feature (1)...(312): n = a,t,c or g
gattaattcttccagatatctaaaattagatggtatattttaaatcattccctgatgctgctttctgtatagtaaactgataatctgactgactgagatatgcaaacaaaaccaaactccaatgctgcttcattcattcattgtgctgaatcttcagattaactgacacttgacaccctctcctgccacagctctacacaagcccctaatttgtgcaagtaggccctaccacagcaaggcctgcaaagcacgtgctgcatataatgcgttcctattctgatngntgncnacnanaagccttttgcnattcac

SEQ ID NO: 43434 - DNA, 322 bp, Homo sapiens
  misc_feature (1)...(322): n = a,t,c or g
gcttgtctcaaaaaacaaaacaaaactgcgtgactatgtgtgacactgagctggtgagagatggcagcgttgtgacagtgcatgcgagagtttgcggctgtgcagggcactcggaagccagagcgtgagggaggccttgtgtgtataaggcaagagatgatggagaggcggnagccnnanttcgnnctcaaanncctnctaattccttcncnnccngnnngtnccacnaggattcnccactaacaccntttntgcctggnncctgtncccttttgctgnncnnnccccacacanctgccngatggnnaacgaatgaaccctc

SEQ ID NO: 43435 - DNA, 321 bp, Homo sapiens
  misc_feature (1)...(321): n = a,t,c or g
gaataacaagtcagaggttttctgaggaaatacacttttacagttccaccttaaaatgctaacaactcatttacaaagacagagtgacatttgtgaaatgcattgaatctggaccccaaagacctggttttaacccttgcctgagctgtgtttattatcattgcgactttgagcagttctttgacttgcgtaaacttccgttttttaatttacnaanngnaganantactttncccaaacactttttttgttatgaanatcaaatganataatgatcccnanaatgttngaattntattctgtngctgtanaccctgaaat

SEQ ID NO: 43436 - DNA, 317 bp, Homo sapiens
  misc_feature (1)...(317): n = a,t,c or g
gggaaaggactgagggcctgaggcccagtgccctgaccagcctccgccctggctcagcttccaggggctgccccaagggacaacgtgggccacacacagtgccccctgcagtcccaatctcacctcccgctcctggtgtccagattctgagccaggccgggcagggggtaggggaaggnngccnccctcnnacngncnccccnncnnncnnaccantntnntcgtcnnnnccacnncccnatccnctagtcncnctntcnnnnacnnnncnnccnntntctcntccccnnnnnccnactcnnccnctcnntnctcct

SEQ ID NO: 43437 - DNA, 329 bp, Homo sapiens
ggttatcaataagctcctagtccagacgccatgggtcatttcacagaggaggacaaggctactatcacaagcctgtggggcaaggtgaatgtggaagatgctggaggagaaaccctgggaaggctcctggttgtctacccatggacccagaggttctttgacagctttggcaacctgtcctctgcctctgccatcatgggcaaccccaaagtcaaggcacatggcaagaaggtgctgacttccttgggagatgccataaagcacctggatgatctcaagggcacctttgcccagctgagtgaactgcactgtgacaagctgcatgtgga

SEQ ID NO: 43438 - DNA, 330 bp, Homo sapiens
ggtcttgctgaaggtgaagctgggtgacctgctgctgctggcccagtccaagctgccctcgtccattgtccagatgttgctcatcctgcagagtgttcacgagcccacaggcccaagtgagagttatttgcaactggaggagctggtgaagcaagtggtttctcctttcctcggcatcagcggggaccgtagcttctcaggccccacgtacacgctgggcggcactccagggtccggcccaaggtgactgtcctgaactatgcctccccgataaccgcagtcagccggccactgaatgagatggtcttgaccccactgacagagcaggag

SEQ ID NO: 43439 - DNA, 347 bp, Homo sapiens
  misc_feature (1)...(347): n = a,t,c or g
gccccaagagcttcatcttttgatactattgtaaatgatattttaaaaattagtttccatttgtttagtatgtaaaaatataattaattgggttttgtgtattgaccttaatgttgtaactgctaaactcatgtattagttgtaataccctttttgtagagttcttaggatttttttacattgatgatcatgtctataaatagagttnnnnnnnnnnnnnnnnnnnnnnnnnnnnnnnnnnnnnnnnnnnnnnnnnnnnnnnnnnnnnnnnnnnnnnnnnnnnnnnnnnnnnnnnnnnnnnnnnnnnnnnnnnnnnnnnnnnnnnnnnnnnnnnnnnnnnnnnnnnn

SEQ ID NO: 43440 - DNA, 344 bp, Homo sapiens
  misc_feature (1)...(344): n = a,t,c or g
gggacccaagagacttttagcagtaatttttctctttttnnnnnnnnnnnnnnnnnnnnnnnnnnnnnntctctttctttttcttttttcttcctttcttttttcttcttcctttcttccttccnnnnnnnnnnnnnnnnnnnnnnnnnnnnnnnnnnnnnnnnnnnnnnnnggttttgggaaaaaagggtttggcnnngnggccaaaacggnagggnaggggcggnancnaagntaannanaacctcaaccncnggggtaaanggnatncncnggcctaagccnccnangaancangnacaacgggnncnggcnacaacnccgggnaaattttggaattttaa

SEQ ID NO: 43441 - DNA, 322 bp, Homo sapiens
  misc_feature (1)...(322): n = a,t,c or g
gagtgagactccannnnnnnnnnnnnnnnnnnnnnnnnnnnagcagattcactaaaaagagaacctttcccccctgcaagaacttagcagtttaggttcttccttgcctgacatctgagcctgcatctgtctctttaggaaaacatgagcagtcctggaagccctggacaaggaggtcctatagnttcttcacctatngggncncacttagggcaattgcattatcagtgagatgnnccgnnatnnnnatanacccncttgnnnncaggggncacnccttgggncnnacacccgnggcntntnnnannncngncntntcttt

SEQ ID NO: 43442 - DNA, 381 bp, Homo sapiens
  misc_feature (1)...(381): n = a,t,c or g
gcacacaccctaaaatctttcttttaaagtgtgcaattcagtggttttatacattcacagaggcaggaaaaggtacatccacacaaaaattgtatgtgagccaggtgtagtggggnnnnnnnnnnnnnnnnnnnnnnnnnnnnnnnnnnnnnnnnnnnnnnnnnnnnnnnnnnnnnnnnnnnnnnnnnnnnnnnnnnnnnnnnnnnnnnnnnnnnnnnnnnnnnnnnnnnnnnnnnnnnnnnnnnnnnnngcacggtacnnnnnnnnnnnnnnnnnnnnnnnnnnnnnnnnnnnnnnnnnnnnnnnnnnnnnnnnnnnnnnnnnnnnnnnnnnnnnnnnnnnnnnnnnnnnnnnnnnnnnnnnnnnnnnnnnnnnnnnnnn

SEQ ID NO: 43443 - DNA, 363 bp, Homo sapiens
  misc_feature (1)...(363): n = a,t,c or g
gaacccaaatggccttcagtgggtgaatgtatagcactgcggtatgtccatacagtggaatactatgcagcaacaaaaaaggagctattgatacacaaaacaaattggatgaatctcaaaggattgatgtggaattagataagtcagtnnnnnnnnnnnnnnnnnnnnnnnnnnnnnnnnnnnnnnnnnnnnnnnnnnnnnnnnnnnnnnnnnnnnnnnnnnnnnnnnnnnnnnnnnntgggggagggcgtgactacagagggatagtatgagtctagggtagtggtatcactgttctgtgtcttaattgttgtgatggtaacacaaatctatgtatgtgtaaacattcatagaaatgtgcac

SEQ ID NO: 43444 - DNA, 377 bp, Homo sapiens
gcacagtactcagttgatactcgaagaccggccccccaaaaggctctgtattccacagccatggaatccatccagggagaggctcgacggggtggtaccatggagactgatgaccatatgggtggcatccctgcccggaatagtaaaggggaaaggcttctgctttatattggcatcattgacattctacagtcttacaggtttgttaagaagttggagcactcttggaaagccctggtacatgacggagacactgtctcagtgcatcgcccaggcttctacgctgaacggttccagcgcttcatgtgcaacacagtatttaagaagattcccttgaagccttctccttccaaaaagtttcggtctggctcatcttt

SEQ ID NO: 43445 - DNA, 361 bp, Homo sapiens
gcttaaatgctgtatgcttttttgccaccatgcaacttgcccaacatcaatcttcaccctcatccctaaaaaagtaaaacagacaaggttctgagtcctgtggtatgtcccctagcaaatgtaactaggaacatgcactagatgacagattgcggcagggcctgagagaagcagggacaggagggagcctggggattgtggtttgggaaggcagacacctggttctagaactagctctgcccttagccccctgtatgaccctatgcaagtcctcctccctcatctcaaagggtcctcaaagctctgacgatctaagatacaatgaagccattttccccctgataagatgaggtaaagccaa

SEQ ID NO: 43446 - DNA, 361 bp, Homo sapiens
  misc_feature (1)...(361): n = a,t,c or g
ggagagctagcaccactcaataccctgacttttcagatgataaaaaaattaggcttnnnnnnnnnnnnnnnnnnnnnnnnnnnnnnnnnnnnnnnnnnnnnnnnnnnnnnnnnnnnnnnnnnnnnnnnnnnnnnnnnnnnnnnnnnnnnnnnnnnnnnnnnnnnnnnnnnnnnnnnnnnnnnnnnnnnnnnnnnnnnnnnnnnnnnnnnnnnnnnnnnnnnnnnnnnnnnnnnnnnnnnnnnnnnnnnnnnnnnnnnnnnnnnnnnnnnnnnnnnnnnnnnnnnnnnnnnnnnnnnnnnnnnnnnnnnnnnnnnnnnnnnnnnnnnnnnnnnnnnnnnnnnnnnnnntgaataatcttatg

SEQ ID NO: 43447 - DNA, 95 bp, Homo sapiens
gaagaaacttgtttttgtttttgcttttctgcatatattccataaaatgctactgtgagccatcgtgcatggcctgattgatttttttttttttt

SEQ ID NO: 43448 - DNA, 359 bp, Homo sapiens
  misc_feature (1)...(359): n = a,t,c or g
gcctcccacctnnnnnnnnnnnnnnnnnnnnnnnnnnnnnnnnnnnnnnnnnnnnnnnnnnnnnnnnnnnnnnnnnnnnnnnnnnnnnnnnnnnnnnnnnnnnnnnnnnnnnnnnnnnnnnnnnnnnnnnnnnnnnnnnnnnnnnnnnnnnnnnnnnnnnnnnnnnnnnnnnnnnnnnnnnnnnnnnnnnnnnnnnnnnnnnnnnnnnnnnnnnnnnncaaccaccaccaagagtacaggctatggaatgagactatggttttaaatcctggctttgcaatttattaactagccttaagtgacttccctgagcttcaggcaccaatctgtaaaatgaggataagaatattactcatgcc

SEQ ID NO: 43449 - DNA, 364 bp, Homo sapiens
  misc_feature (1)...(364): n = a,t,c or g
gctccggaaaggggcctcagtggagcacgtgtgccaccgcatccaccggtcactcgccagccagttcaagtacgccctggtgtggggcaccagcaccaagtacagtccgcagcgggtgggcctgacccacaccatggagcatgaggacgtcatccagatcgtgaagaagtaacggcgcctgccgggcctcccgcccacctgcctcgtctccctggggaggtggtcccactgggacacacaaacacccaaacagaaaaatacctatacacgtactccaggaaggggtccctcaagtctctgctatttacagaagtttcttcagtatgcatacaanagtgngttgntgcaaaggggctcggttgga

SEQ ID NO: 43450 - DNA, 352 bp, Homo sapiens
  misc_feature (1)...(352): n = a,t,c or g
gccctttgtcttctaatagacactttttggatccagaaattgttctctgcaatttctttacttaaacataattatcagcctgtatgacctctgtggtctgactactttgaaattaagggannnnnnnnnnnnnnnnnnnnnnnnnnnnnnnnnnnnnnnnnnnnnnnnnnnnnnnnnnnnnnnnnnnnnnnnnnnnnnnnnnnnnnnnnnnntgacaagaccctgtctcgnnnnnnnnnnnnnnnnnnnnnnnnnnnnnnnnnnnnnnnnnnnnnnnnnnnnnnnnnnnnnnnnnnnnnnnnnnnnnnnnnnnnnnnnnnnnnnnnnnnntcaaggtcggcccaggaggtca

SEQ ID NO: 43451 - DNA, 368 bp, Homo sapiens
ggagctagcaccatgagcttcaataccctgcccgtgccttgaccttctcccactcagacgttattcccttcttcatgcctgtgagcgtctcatatgattcctgagctgtagctctagaatttagcatgaggagggctgcccctgatagatgtcttacatgagtaatgctcttaatgatccccaatgggactaccatattattccagcaggatgaatcattcagacacaaaaacaaattctatgtattttaccgtgaaacagaatgaaaactaaaaatttctacgtttagaaatatttttcttaaattttgcaaaaaataaccaagttttcccagtgaaaaaagagttaacaaaagtttcttcatatag

SEQ ID NO: 43452 - DNA, 352 bp, Homo sapiens
ggctatttaaatcttattttaataatgatcaatttatttatgcatattttcaataatttaggacagtacactggattaccaagtcggaagattgttttgtctgatcctccattataagtaagcttgtctaccacttttgagtatttttacccagggatatgacaatagtaatgtatcagtgaaatgtatccatgcatcaaatatttatggacccccctttctgtgagcctgacactggggctataaagatgaagtaggacacttccctaccctccagaaactaacagcctattagacaaaaatagatatatgaagaatttgttgctacatgatgtaaaaaatatgactgctg

SEQ ID NO: 43453 - DNA, 363 bp, Homo sapiens
  misc_feature (1)...(363): n = a,t,c or g
ggtaaaacttccaacatataagcacaaaatttttagaccttaagaaatatttgagttttttatatcagaaagacagtgttggggtgagggttggggggcacatgtaaatactcagataaaattgtgaattttctagggtaaagaaatctgcatattcatagaaaacaaaaatgaaaaatagtttatttacagagtaaatacatacgactgtttacctgtaatgctaaatattaaaagacagnnnnnnnnnnnnnnnnnnnnnnnnnnnnnnnnnnnnnnnnnnnnnnnnnnnnnnnnnnnnnnnnnnnnnnnnnnnnnnnnnnnnnnnnnnnnnnnnnnnnnnnnnnnnnnnnnnnnnnnttc

SEQ ID NO: 43454 - DNA, 363 bp, Homo sapiens
  misc_feature (1)...(363): n = a,t,c or g
gctaaatgacatttcaccacccttcagatctcaatgtcacttttgacnnnnnnnnnnnnnnnnnnnnnnnnnnnnnnnnnnnnnnnnnnnnnnnnnnnnnnnnnnnnnnnnnnnnnnnnnnnnnnnnnnnnnnnnnnnnnnnnnnnnnnnnnnnnnnnnnnnnnnnnnnnnnnnnnnnnnnnnnnnnnnnnnnnnnnnnnnnnnnggccaggtgcagtggccagtgaacactaatgtcttacgaggtatttatgagagaaaagcttaaaattgcaaaaagtccatgcagagccctcattcctcgcaacacattgggctgaggccactgtctaattgcagtttagggaaagacaggctatccct

SEQ ID NO: 43455 - DNA, 322 bp, Homo sapiens
  misc_feature (1)...(322): n = a,t,c or g
nnnnnnnnnnnnnnnnnnnnnnnnnnnnnnnnnnnnnnnnnnnnnnnnnnnnnnnnnnnnnnnnnnnnnnnnnnnnnnnnnnnnnnnnnnnnnnnnnnnnnnnnnnnnnnnnnnnnnnnnnnnnnnnnnnnnnnnnnnaactgttggcttcaggggaatgaagccagaagttcgagaccancctggcancatggcaaaaccctgcctctacncnatacannatattagctangnatggnnncnaatgcctatngnctanntnacctgggnaggatcntgcnncagcatcacnagactcanatgacnccacnccctnctgact

SEQ ID NO: 43456 - DNA, 351 bp, Homo sapiens
ggaagaaattatcctcttcgatgcaagctatcataggaacacatcttagttcaaagaagagctttcagtggcatgccaaacaaggcatggaaacagcctttctagtgtaattccctctcttttcttcaaacattgttctccaatgtcatcagactccagtgcagaaagggattgttttcagattttccctttttattcccgctggtttcttttctcatggaataaaatagtcattgtataaaggccaaacaatttaagtcatcatagattaggatcctgtgaagtttccatctgaacaaccaagagccagaaaataaccaaattcctggggaaattatataataattctta

SEQ ID NO: 43457 - DNA, 339 bp, Homo sapiens
  misc_feature (1)...(339): n = a,t,c or g
ggtgctgctgttatgctttttgtgttgcataaaatatcttgtaaaaattagatggataaatgaattattaaaaaatcacatttctgaagatgtaaagtattagggaattttgtgctggaaaaacatttttgacattcaaggatgcctattttatcttctagcaaatttctgtggtccctggaaaagtacagatgatcctggacttacaggggggctacctcccactaaacccattgtaagctgaanccattgnnagtcnaaaggcatttnatacncccancttaccatacaccntngnttancgnannctancttnacnttctncaccattcnnaatgc

SEQ ID NO: 43458 - DNA, 358 bp, Homo sapiens
  misc_feature (1)...(358): n = a,t,c or g
gggatctaaatggtttaagaagccaatgtattttcctaccacagacttggcaccatccctgcactattatattagctatttaagccatacaaatatagcctacctgagatagaaccactatttatgcgactattacagctattcatatacattatccatgagaatctggccagtcacctnnnnnnnnnnnnnnnnnnnnnnnnnnnnnnnnnnnnnnnnnnnnnnnnnnnnnnnnnnnnnnnnnnnnnnnnnnnnnnnnnnnnnnnnnnnnnnnnnnnnnnnnnnnnnngnnatacnaaagttagctggncatggtggtncatgcctgtaatnccanttactgnngangcttaaccac

SEQ ID NO: 43459 - DNA, 348 bp, Homo sapiens
ggatggttcttcatttaaaaaacggggaattcttcaaaaagaatccctcttgggcttcagcagtgtccctcatggagtctcagcagaagaaccaagtaagcagggccatttgcgacttgaagagcggtccccataatttgctgtcatacatctgcctgggcacttcctgggggtctggttggtggcaggagaagggcataagcagggagggatgggtcatgttactgtattggctgtgtccgaatatttttactttatgttaaagttgatgaggcacaactattgcagagtccatttttccgagtctctgcgctcacctggctcctgggattgtggagggagttttgc

SEQ ID NO: 43460 - DNA, 352 bp, Homo sapiens
  misc_feature (1)...(352): n = a,t,c or g
gatacctaactcatttacccctgaattagactgtaggcatttgagtttcttctagggaagagtcccagatttgatcagctcaggatacccccactatcctgcttcagtatttttataaaactcaatgtcnnnnnnnnnnnnnnnnnnnnnnnnnnnnnnnnnnnnnnnnnnnnnnnnnnnnnnnnnnnnnnnnnnnnnnnnnnnnnnnnnnnnnnnnnnnnnnnnnnnnnnnnnnnnnnnnnnnnnnnnnnnnnnnnangnacacaaancanggnatgcccnnaggnnccccnggcttggggcnnnanncnggggaccgnggtncttgnaggttgcnnccngaaaatgcatt

SEQ ID NO: 43461 - DNA, 349 bp, Homo sapiens
gcatgtggaccgtgagtcgcaaacactctggagaaggctgagatgccaccattcccacggggactgaagacacattacgtggacctggtcccaggctcagtgaggagatggcctcagctgtggggctggtccatgttgcccactcactccagtgggaagtggggaccacgccatagagggtctgctcccactgcagctcccggtgctctcgtgttctgggaaggcctgggtgtgtgcacaaggaggcccgggccagggacttcaccaggggctgggtcacaagggcacagggtgtgtggaaagcgctgtgggggaagagccggtcaccggagagtgagcaggcggagac

SEQ ID NO: 43462 - DNA, 355 bp, Homo sapiens
  misc_feature (1)...(355): n = a,t,c or g
gcatggctgtatttcttcaaagtgaaaatgaaattaattgagaaatattatttgatatattaaccttttacatacaagttttcaaaggtacagaaaaggcagaaactgaacatttggattatccctaatagagagaagttggttaaatgttttcttgctcccttaaatattgtgaaggtaaagattgaatgnnnnnnnnnnnnnnnnnnnnnnnnnnnnnnnnnnnnnnnnnnnnnnnnnnnnnnnnnnnnnnnnnnnnnnnnnnnnnnnnnnnnnnnnnnnnnnnnnnnnnnnnnnnnnnnnnnnctctcaaaanatttnnntaaacgaanncaaaggtgtgcctgtcttgttt

SEQ ID NO: 43463 - DNA, 349 bp, Homo sapiens
gaatgtaggaagtaggtgaaaagtttatgagcaaggagaaatttttctttgaagatctgtgtattagtggttgagagaatcctgagttgattaatctcaaatataaaataaagtctaacaagcaatgttttccttaaatttgttatgaattcatagggatcttatacgtgatctaggatctgaggcattgttaggctgctctatgagaatttactccttttagcagtggaggaagggctcgttggtacaatcttcttggaggtacatagttgttaaagtagggatggttgctattttatctttcagtgggtacagattaataagaaatgggagttacacttgtcagtga

SEQ ID NO: 43464 - DNA, 352 bp, Homo sapiens
gggctcggcctgctgatgccacataccaggcaacctcccatcccacccccgaccctgccctgggcgagcccctccttctcccctgccggtgcacaggcctctgcctgctggggattactcgatcaaaaccttccttccctggctacttcccttcctcccggggccttccttttgaggatctggaggggtggggagctagaggccacctatgccagtgctcaaggttactgggagtgtgggctgcccttgttgcctgcacccttccctcttccctctccctctctctgggaccactgggtacaagagatgggatgctccgacagcgtctccaattatgaaactaatcttaacc

SEQ ID NO: 43465 - DNA, 343 bp, Homo sapiens
gtgaatacttagcattttgcatgccagatagtttactgggcaacaccggttacagcaatgtaggctgtacagtgaatggctgctggttttcttttcccctgtaacaacataccgctacagtaactctgcatgctttcatttcagtaacctctagaggtcctttattacaaggtatcagagcactaaaaagatttctgggacttcattgagtttaaaaaacagatgcatatgtctatttttgtaattgttaacagatacttttttacatggggcaggttttggctagagctacttttattataaaaacacaagattttcaaggaagaaacctaatgccctcatt

SEQ ID NO: 43466 - DNA, 349 bp, Homo sapiens
  misc_feature (1)...(349): n = a,t,c or g
gcgatacaataatcgacttgcagaacatgtaagtgctaaggaacagtcttaaagatttttggaaattttaaaaaagaataccctgaaatcnnnnnnnnnnnnnnnnnnnnnnnnnnnnnnnnnnnnnnnnnnnnnnnnnnnnnnnnnnnnnnnnnnnnnnnnnnnnnnnnnnnnnnnnnnnnnnnnnnnnnnnnnnnnnnnnnnnnnnnnnnnnnnnnnnnnnnnnnnnnnnnnnnnnnnnnnnnnnnnnnnnnnnnnnnnnnnnnnnnnnnnnnnnnnnnnnnnnnnnnnnnnnnnnnnnnnnnnnnnnnnnnnnnnnnnnnnnnnnnnnnnnnnnnatccacctggg

SEQ ID NO: 43467 - DNA, 291 bp, Homo sapiens
  misc_feature (1)...(291): n = a,t,c or g
gatgacttgagccaggaagtcagcttcagcttaatcaatatttagagtgtgatgtgttgctaatcagtgttggttttgtgcataggaaaggtagccacgactcgtggtgaatcagctgcccacaggtctgctacaagccaccggatgccagcttccttcattgcatgggtgcctcaaagcaccttcttgaagggtttagaccatgttctgcacaggccatgcagggtgattttgaggccctntttggggccancacnccctnnttaactnanngaaacnttgccccncccc

SEQ ID NO: 43468 - DNA, 346 bp, Homo sapiens
  misc_feature (1)...(346): n = a,t,c or g
gcagccattgccaaatgtctctgggggagggaaggagggcagactcatcccagattgagaaccactgatatagactcaagtataacttgacaagacacagaacaagtttagcttcaatttcatggtgaccagtgtgtaaatatttctcactgttacttctaaacaaagataacacaaaaacactgcagtgattacaggggtggtgacacatgctagtaatcccagccgnnnnnnnnnnnnnnnnnnnnnnnnnnnnnnnnnnnnnnnnnnnnnnnnnnnnnnnnnnnnnnnnnnnnnnnnnnnnnnnnnnnnnnnnnnnnnnnnnnnnnnnnnnnnnnnnnnnnnn

SEQ ID NO: 43469 - DNA, 321 bp, Homo sapiens
gaaattttacagcttctacacttctctactttctttcaagtgaaattcttcttatatctataactcataagattcccctggcatgagatggatccttcattcccataggcctgttctgaattggaggagacaaccaaaacttcaattattaatgctattaatgctctgtcaagaatatcttactacatgtgataccaacaacaaaaaaagtggcatgataaatgcttgctttcatagcatgtcatagcacactgtcataacatgtcacagcttgcaaaatactttaaaatatagcactgcatactttaaactacagcactt

SEQ ID NO: 43470 - DNA, 316 bp, Homo sapiens
gggagggaagcaaaaagatcactgggaaataagaacaaaggagacggagaatcaagggtaaagaaggaacccaccaaaagacctaggctgaagccctctttctttcacttattcatgtacacaatcactcaatattattgagcatgaactctgagccaggtactgttctaaatcctcgagagatggcagggaccaaaacacagtcctgctttcatgaagcttagattctagtaggaagaaacaaactataaatagacaaatcacacagctagtgaatgtaagtaaataggtgactggctgtgttgccatatacttc

SEQ ID NO: 43471 - DNA, 309 bp, Homo sapiens
ggagagaagagaaggggaaatctgtatttttaacaactaatgaggcatggtaggacagaggattttgaaacttaatctctggtggttttaaacatgtactaaagagttgaaatgatctctttaaaataggtatttgacaacgtatattccttctgacctcagtattaaaatttttcagtgtggatatacttgtcgctcttcataaagctattgattctagatcctgttaacgtgaacacaaaacatcaacagagatttttgttctctatataaaatgatcaatgttttagtttgtggtcattcctggac

SEQ ID NO: 43472 - DNA, 330 bp, Homo sapiens
gggacaacgaaacttctgtacattttaatctgaataattcttcaggatttaaaattaattggctctggcttggttggaccgtactcggatctcgccacctctgcgtttcccgagtcactggcgaagaggtcccagttcctctgggaatcgtcctgtatgcaacatcttcacaagagtggcaggcagttgaatctctggccttcgtgggaccactggacatctggcagagaaccaggaaaccacggttcccttctgtgagtccctcagccggaaaactacaagctcctcatgcagctgctgtctacagaccccctggactgcctggggaag

SEQ ID NO: 43473 - DNA, 345 bp, Homo sapiens
ggaaaaaatacgaatagaaatgggaaaaaatatagactgtagataaaagaaaaaaattagaaaaaaaaacaaaagaaatgacaatcgagagaaaaagaaataggaactccaagtctaatcactagttttcttattttatcaaaagttaatgtaggtacttttgctataaattttctcataaaattgaattcatcattttttgcccatgttttgttcaaccctatctacatgtgttttatgagtgataatcaggaatcagtacctgcaaaatggaccctttatgaaaggagaaaaatgggacttttgttaatcagctgtagctgtacaggggaagatattcctttt

SEQ ID NO: 43474 - DNA, 353 bp, Homo sapiens
gcaacatttcaccaggagtcctaaacaggtagtaagataagaaataaaaaaggtataaagatcggaagagaagaaatgaaactgatattattcacaaattatatattagtttgtagagaaaacctaaaataatgttcaagctattggcattaatatcaaggtattaagcaacagttgctggatgtaacatctatatacctcccactcccaaattgaattttgatatagttggttaaatattgttagcaaaaaagttatttacaaatgcaaataacaatataaggtacttgggaataaatctaataataaatgatgggcatcacctttctaaagaaatttatatcatttcatta

SEQ ID NO: 43475 - DNA, 352 bp, Homo sapiens
gggggtggagtgtggatgcagaagcttaggaaggctagaagtttagatcttcatgacatagttttttacttttgccaaagacataaattgtcaaaaaactgggcaatctcataaatacaaaaatgtttccaaagacaaacacacatggttttatattatctaccgttttggatttttcacttgtactcttgcagatgggtgcttctgttcaataattctcggctgtgaaatttttgaacaagtttttatctcctgagacagtttggggctggtgggaatttgggctctggctttgtgccatttgcaggtgccaggcggattatgagcattagagcatttcacaggaaacgct

SEQ ID NO: 43476 - DNA, 346 bp, Homo sapiens
gggaatcccggcgcctagaacgtgtttttcgggagagcaaaggctgtgtctacggcaggctggggatatagcctctccttccgatgaaaagagaaaggaagaatggactacagccaccaaacgtccctagtcccatgtggacaagataaatacatttccaaaaatgaacttctcttgcatctgaagacctacaacttgtactatgaaggccagaatttacagctccggcaccgggaggaagaagacgagttcattgtggaggggctcctgaacatctcctggggcctgcgccggcccattcgcctgcagatgcaggatgacaacgaacgcattcgaccccctccat

SEQ ID NO: 43477 - DNA, 354 bp, Homo sapiens
  misc_feature (1)...(354): n = a,t,c or g
gctggaattatctggatagtatgttagctgtgagaagaaaataaagcaagattttcatatgcactcttttgatgaaagatttttaaaatttctataagtattaatcatatctacaagtacaaaaccaaaaatgtnnnnnnnnnnnnnnnnnnnnnnnnnnnnnnnnnnnnnnnnnnnnnnnnnnnnnnnnaaatctcttagcctaggagtttgagatcagcttaagcaacatagtgacatcttgtatctattaaaaataaaataaagttagacaggcatagtggcatgcaactgcagtcccagctactcagaaagctcaggtggatcgcataagcccaggcagttgaggctcca

SEQ ID NO: 43478 - DNA, 329 bp, Homo sapiens
gaactgaagatggatatcagttacccctgttttcattttgaactacttagcattttgggaaaatctgcaaaggctttgcatactctaatgttattgctacatgtgtttttacctcacttttcttaattctgccttctcatttgttcaggccgaaagggaatatgtctttaaaaatttgcctttcaaagtataacggaggagcagttctatatttattctggggctatctacttcaaatactagaatcgtttccaaaagtatgtattagattatttgcccatcagatattactgattcagaaagagaaactgctcctcctccaccctggg

SEQ ID NO: 43479 - DNA, 345 bp, Homo sapiens
  misc_feature (1)...(345): n = a,t,c or g
ggtagaaggccacttggatttcctcatgcctctccccggggcctccctcccatacctcccccagcaggaagtctccttcccattgagcaaacgcagctgttcatgcagctgcggtacagtggccagggaagactggaggaccaggcatgatcaatcatagcaccagtttcagtaatggtgattaaagctgataaactgccaacagggctggcttcttcatatttaagaattcaannnnnnnnnnnnnnnnnnnnnnnnnnnnnnnnnnnnnnnnnnnnnnnnnnnnnnnnnnnnnnnnnnnnnnnnnnnnnnnnnnnnnnnnnnnnnnnnnnnnnnnnnnnnnnt

SEQ ID NO: 43480 - DNA, 336 bp, Homo sapiens
gcggtgccactgagactgcgtgagatgcgacgtaaattctctgcactgtactgctcatcctccccacactccctgctgaggcctcggcaaggtgtagccttcaaacacacagacacatacaggcagacacataataccagacttatggttttcccacagacagtatcctcagggtatgggaaagagtaggggaagactcagtagtaatagacacctgaattagatgtattggtaagatagtggccatgtaacaatctcctctaattcaaaagaagcccaatcatagaccttattttcttctgatagccccatatcaccatgcctctgccttatcat

SEQ ID NO: 43481 - DNA, 329 bp, Homo sapiens
  misc_feature (1)...(329): n = a,t,c or g
gnnnnnnnnnnnnnnnnnnnnnnnnnnnnnnnnnnnnnnnnnnnnnnnnnnnnnnnnnnnnnnnnnnnnnnnnnnnnnnnnnnnnnnnnnnnnnnnnnaannaantaaaattcatgtatnatggccaggcttgggggttnanncctgnnatcccacntctttgtaanantgaggaggnaggntctttttccnccagacnttttnnntctcntnctntttcnnnntcatttnatatctgnctnctcnnnaaatcttgcatgactatanaanctaantaacttncactttacatcatancgctctatttaattttctttntanccgtactg

SEQ ID NO: 43482 - DNA, 334 bp, Homo sapiens
  misc_feature (1)...(334): n = a,t,c or g
ggcttcaaggtctacctgaccagaccctgcctagtcctctaaccccaggcccctcctctctccctccttgttcactgtgcttctgccacattggccttccttttgggaccttgaacctgccaagctcatccctatcacagaaacattgcacataactatttttttgatttggaatgctctttctccagggagttgtgtggcattctcctcctctttcaggtctcatttcatatactgcctcctcaagaaatcttgcatgactatagaagctaaagaacttccactttacatcatagcgctctatttaattttctttctanccgtactgggaccg

SEQ ID NO: 43483 - DNA, 355 bp, Homo sapiens
  misc_feature (1)...(355): n = a,t,c or g
ggnnnnnnnnnnnnnnnnnnnnnnnnnnnnnnnnnnnnnnnnnnnnnnnnnnnnnnnnnnnnnnnnnnnnnnnnnnnnnnnnnnnnnnnnnnnnnnnnnnnnnnnnnnnnnnnnnnnnnnnnnnnnngccgggtgtggaatcccagcaccttgggaggccnnnnnnnnnnnnnnnnnnnnnnnnnnnnnnnnnnnnnnnnnnnnnnnnnnnnnnnnnnnnnnnnnnnnnnnnnnnnnnnncaacctaaagaggggatagtttttaaacccttttggtctttaccatttgaataatgaagaagttctgttctcctctttcagagacgctgtatttacacacacacacacacacact

SEQ ID NO: 43484 - DNA, 341 bp, Homo sapiens
gaaatggttgttgaatcataaaactagaaagatgggtaagaaagggaggaaccccccttacttcgaagaattgttgttgatgtgaaggacaggactttttgagacactctcatcctaagaaacagctgatatctactaggaaaaaacatgacatttgaagtttcttcctaagagatgtgaggttttgacagaagtgccaggaagccagaggtgtgtgagtagtgggccaatctcgcgtgaaggctgtgggacggggcaggagaggggcagccagcatttcctgagcgccagctaatggcggggacctggcacctttgctctgtgactctccagctgtatgg

SEQ ID NO: 43485 - DNA, 344 bp, Homo sapiens
  misc_feature (1)...(344): n = a,t,c or g
gacaannnnnnnnnnnnnnnnnnnnnnnnnnnnnnnnnnnnnnnnnnnnnnnnnnnnnnnnnnnnnnnnnnnnnnnnnnnnnnnnnnnnnnnnnnnnnnnnnnnnnnnnnnnnnnnnnnnnnnnnnnnnnnnnnnnnnnnnnnnnnnnnnnnnnnnnnnnnnnnnnnnnnnnnnnnnnnnnnnnnnnnnnnnnnnnnnnnnnnnnnnnnnnnnnnnnnnnnnnnnnnnnnnnnnnnnntaaggggacgttttcaatatggctgctggtttgcaatgggaatggagattgccctgtatgtttgctattgttcttataccactaatcatgagttggggggagatcg

SEQ ID NO: 43486 - DNA, 334 bp, Homo sapiens
  misc_feature (1)...(334): n = a,t,c or g
gctggacacctgtgtcctgcttaacctccactttgcctttatactgcctttataaaccttttcttctggaggtctttccctgtatgctggaacaggttggtcccctataacacctgcctcaccctaacaccatctcatttttttttacctgatagaaactttaatgatgttaaaaaaccaatcagtnnnnnnnnnnnnnnnnnnnnnnnnnnnnnnnnnnnnnnnnnnnnnnnnnnnnnnnnnnnnnnnnnnnnnnnnnnnnnnnnnnnnnnnnnnnnnnnnnnnnnnnnnnnnnnnnnnnnnnnnnnnnnnnnnnnnnnnnnnnnnnnnnnng

SEQ ID NO: 43487 - DNA, 333 bp, Homo sapiens
gggcattcctgaccgtgaccctacaccaaggcggagccactcgcgtgtacgcactcacatctgacgcacagcctctgctgctcagcaccttcagcggagaccgccgcttctcccgatttggtggcgttctgcacttgagtgacctggatgatgatggcttagatgaaatcatcatggcagcccccctgaggatagcagatgtaacctctggactgattgggggagaagacggccgagtatatgtatataatggcaaagagaccacccttggtgacatgactggcaaatgcaaatcatggataactccatgtccagaagaaaaggcccaatatg

SEQ ID NO: 43488 - DNA, 332 bp, Homo sapiens
gtttgagactgcatagggtggcgtggtaggcagacttctaaggtggtgccaaatgatccccatctcctagaattcatgtccaagtgtaattctctctcctaaagtataggttgcacctagagactcgcttctactgaacagaatacagcaaaaatgacggaatgccacttctgaaattaggtttcaaaagacttttacctcatactctctcactctctttttacatatttataagaagcaagttgccctaaggagagaagcacatggcaagaaattgagtgtggcttccagtaaggcctttagctcaaaggcccaggagatgactcctgcca

SEQ ID NO: 43489 - DNA, 330 bp, Homo sapiens
ggcgggagctccttttgggccctagtattgcttgcactgttgcagagttaaccagccaaaataatagagatcactgtgccttggttcgtagtggctgtgccttcatggttcatgtctgccaggatgaacaccaactttacaatgaatttttcacaaaaccaacatcaaaattagatgagcttttggagaaactgtgtgtgtcattgtatgatgtcttcaggccattgatcattcatgttattcacttagagactctgtcggaactttgtgggattcttaaaaatgaagtgcttgaagatcatgtgcagaacaatgctgagcaactggggg

SEQ ID NO: 43490 - DNA, 330 bp, Homo sapiens
  misc_feature (1)...(330): n = a,t,c or g
gagcagattggtggttttaattgggtgccgactattcactaaaagtgagccaagacacacctgtgtgcacgctttggtggagatatgcctttggacatgccagtggggttggaggcgatgctgggcatagagagtgggtggctgagcctccttcctgagctgctgtttgttttgagcttaagggcctgtagagactctgccttctctgctggttgccacctcctcttttttttttcctnaaanatggggtctcactgtgttgnccagggnggtnttaaactcctgacntngcaccttggcctcccaaagngctggnattacgnncnttga

SEQ ID NO: 43491 - DNA, 333 bp, Homo sapiens
  misc_feature (1)...(333): n = a,t,c or g
gggctcggcgtggctgatcaccatcataacgggcctatggggatacattctcttagacattttgaagtaattaatgctctcgttagtgattaagtctgtgaagtagtcctttgcataatcaaatccatgcttttctttgatgccattgcgacaaacagtgtaattatagaagcgagaattcttgattaatccaagccattctcgccacccaggggggatgtagctgccattatattcattgaggtattttccaaaaaaggctgttctgtanccagngttgttaanatatacagcanaagnccgaggctnatgcntggcctgccacnangggga

SEQ ID NO: 43492 - DNA, 335 bp, Homo sapiens
  misc_feature (1)...(335): n = a,t,c or g
ggacactagtactattggaaagttccttatgtctggttcactgatgaagcttgaggatagaattggtgaggagggaggggagaacaggtcacagctgnnngggancctnnnccctatanggtntnaggcaaancacnnnggctnataggacatgnggacngtgngnaananattnctnangggacngactatncctggctcatgtacccacaacctgnncccagatgatcngtctggacacacnnngactacnnggccatgcccnnatgtgcnaacactangtgccncnccagganngcnntcgatacaggacacanataatcananttgtacac

SEQ ID NO: 43493 - DNA, 329 bp, Homo sapiens
  misc_feature (1)...(329): n = a,t,c or g
ggtcacctcgtttgttttctctttaatttcttcattgttagtttagtggactctgagggtgaagagaagaaaattctgttattaatttgtcatctttaaccagaaatctcacatatgtgttcttatannnnnnnnnnnnnnnnnnnnnnnnnnnnnnnnnnnnnnnnnnnnnnnnnnnnnnnnnnnnnnnnnnnnnnnnnnnnnnnnnnnnnnnnnnnnnnnnnnnnnnnnnnnnnnnnnnnnnnnnnnnnnnnnnnnnnnnnnnnnnnnnnnnnnnnnnnnnnnnnnnnnnnnnnnnnnnnnnnnnnnnnnnnnnnnnnnnnnnnnnn

SEQ ID NO: 43494 - DNA, 331 bp, Homo sapiens
  misc_feature (1)...(331): n = a,t,c or g
gctgcctttaaccgtgaagtgaaggcagatgtgcatgagttttcagaattctctcacacccttgcagcaggaggggaggaaagaagagattgggagagggatatcgtgaagagtgtctaaacccagagaaatggggtgacatgaagagtctagggtggtcctgtgttcaaaatttcatgtcttnnnnnnnnnnnnnnnnnnnnnnnnnnnnnnnnnnnnnnnnnnnnnnnnnnnnnnnnnnnnnnnnnnnnnnnnnnnnnnnnnnnnnnnnnnnnnnnnnnnnnnnnnnnnnnnnnnnnnnnnnnnnnnnnnnnnnnnnnnnnngactaaa

SEQ ID NO: 43495 - DNA, 318 bp, Homo sapiens
  misc_feature (1)...(318): n = a,t,c or g
gcctcccacctcggccnnnnnnnnnnnnnnnnnnnnnnnnnnnnnnnnnnnnnnnnnnnnnnnnananaanntcataangtgtgctaatgangcctnnctgattgantgnttattnananattttatnaggcgnngncnnantntgtctgccanactggactgcagagtcacnatctctacatctctgcnaccatcctnctccnaggtatnaagcgatgctcctgcctcagacctcccaagtagntgggatcacaggttatgtgtcacctnnctccggctaanntntgnattttgagtanaggtgcaaantnaccatg

SEQ ID NO: 43496 - DNA, 332 bp, Homo sapiens
ggcaggtcttcctaagcgcagtggaaaattccccccacgctcatgagggcgagtgtgaagaaggcaggtgctgtccgcttcggattatggtcatagcttgcactcgcggctcccctgcctggtctctgggacccccaggcatccccagacctccctggcctcagccagttcccgccgcttcaccatatggcagaacacatgcgcggccggccggctcacagatgggcgtacctgcgtccggcccacccgcctgcggtcctgtgtgctcaccctgccctggtctctgcctggactgtggatgggggtgagtggggcatggaggcgttctgcac

SEQ ID NO: 43497 - DNA, 321 bp, Homo sapiens
  misc_feature (1)...(321): n = a,t,c or g
gctttttcttttcttttctttttattgtttgtttggttcttttttgatannnnnnnnnnnnnnnnnnnnnnnnnnnnnnnnnnnnnnnnnnnnnnnnnnnnnnnnnnnnnnnnnnnnnnnnnnnnnnnnnnnnnnnnnnnnnnnnnnnnnnnnnnnnnnnnnnnnnnnnnnnnnnnnnnnnnnnnnnnnnnnnnnnnnnnnnnnnnttgnatttttannnaagacngggntncnccntgaaggccaggctgnactcgaactncngacctcnggttcaatncnttngaatncnaacatgtacctntaagancagagcaaacg

SEQ ID NO: 43498 - DNA, 331 bp, Homo sapiens
gaaaagagtaagtctagcagcagtgtagagaatagatgacatacaaagagagattggaggaagggataccaattagaaggcagcagaaatctctcacgttctatatgtcaaaagttgaaagcataatgccatttagattaatggttcataaatttttccaccaggatcatgcctaagacacacagagtaagaaccacttcttattatctttaaccctactagtttttctcctattgatccagcacagatgtatcaagataccttatcatgccttgcttattgttcaggattgagcgtgatggtagttctggtaatgagttaagtgagtgag

SEQ ID NO: 43499 - DNA, 330 bp, Homo sapiens
  misc_feature (1)...(330): n = a,t,c or g
gggcttggatttagggagaggcataagaaaggataggttatcatggacttggaaaatgggagttttttactgatccatgtgtgggtaaagaccaagttgnnnnnnnnnnnnnnnnnnnnnnnnnnnnnnnnnnnnnnnnnnnnnnnnnnnnnnnnnnnnnnnnnnnnnnnnnnnnnnnnnnnnnnnnnnnnnnnnnnnnnnnnnnnnnnnnnnnnnnnnnnnnnnnnnnnnnnnnnnnnnnnnnnnnnnnnnncgtccctggannnnnnnnnnnnnnnnnnnnnnnnnnnnnnnnnnnnnnnnnnnnnnnnnnnnnnnnnnnnnnnnnnn

SEQ ID NO: 43500 - DNA, 332 bp, Homo sapiens
gcacacacacacacacacacaaaataaaacaacctctcctgcatggctgtgaccacctactcttgctgctaggcttctgggagttggctataagtttttagccattgctctgtactgggccttggtgctcttttcccaccatacatatttcttcatgctcaggatctccatatcctacccacatgttttcagaatatctcttgactcacatagttgtcaaatgatgcattttatggattcatagattcacagagctcgtgaggagcataaggtcatcttggcagattgcatgcttggggtttgcattcttccattaccaacatccttgccag

SEQ ID NO: 43501 - DNA, 330 bp, Homo sapiens
gggatctcataaatctgggtgtaataggcacagaacgttaggtgtaatatgggcgggactctggactcagcatatccaacaagctgctggctgattccgacgatgccgatgaattgccaggttgggaactgctgcccccagagaacctagcagagagctctgtacgtggtaggtgctcactcccctattgtttgggtgtatgcctcctgataatgaacttgatcgtaactttattgttgtattatgcctgtattgtttccttaagtgaaggaagaatgcttttgagtacctaataggtggcaagctctgtgcctacttacatacatgaac

SEQ ID NO: 43502 - DNA, 320 bp, Homo sapiens
  misc_feature (1)...(320): n = a,t,c or g
gccacaagtcctgtcctgtgtggctctgggtcacgcctttcctgttggccaggggtcggtgctgttgagcaggggagggcgttgttcaaggatatctatttgcacaataacctgtgcaaaggtagctagaagacttgannnnnnnnnnnnnnnnnnnnnnnnnnnnnnnnnnnnnnnnnnnnnnnnnnnnnnnnnnnnnnnnnnnnnnnnnnnnnnnnnnnnnnnnnntnnnnnnnnnnnnnnnnnnnnnnnnnnnnnnnnnnnnnnnnnnnnnnnnnnnnnnnnnnnnnnncgcatntgaatcccagctactcangagg

SEQ ID NO: 43503 - DNA, 325 bp, Homo sapiens
gcaataattgacacctcaaatgtagcatatcctaaactgagtttttaatcagcacttctcccatgtttgccaaatctgtttcttttaccatctttctcacctcagtaactggcaacgtaataattcacttctctctgacagtccatatacatgctgttaagaaattctgttggctccatcttgaaaatatatccagaatgggacattctgtgctgcttctatcaatattatcctggtctacatcttgcttgggtcattgcagtagctttctaattggttttcctgcttctatccttactgcctgtagttaaccagagttgtattg

SEQ ID NO: 43504 - DNA, 354 bp, Homo sapiens
ggaggttatcaataagctcctagtccagacgccatgggtcatttcacagaggaggacaaggctactatcacaagcctgtggggcaaggtgaatgtggaagatgctggaggagaaaccctgggaaggctcctggttgtctacccatggacccagaggttctttgacagctttggcaacctgtcctctgcctctgccatcatgggcaaccccaaagtcaaggcacatggcaagaaggtgctgacttccttgggagatgccataaagcacctggatgatctcaagggcacctttgcccagctgagtgaactgcactgtgacaagctgcatgtggatcctgagaacttcaagctcctg

SEQ ID NO: 43505 - DNA, 342 bp, Homo sapiens
gctgggcacaaaaatattagtctcttgtcaaaccatagctctttctgtgctttccccaagtacgtagtctcaaactttgctggagtcaataaaaatcagagggcttctgagtttagctacaggtcaacctttctctagcattcaaagcactctctatcctacttcaccttacttatcctgagactctccactcaaaccagatcagtcacactctttggattattccaagtcattctcaactatggtcccataaaaaccatactcatcctccaagatttggctcaagccccaatcttctcttgaccactgcatttcatagtgattgtctccatccatttattc

SEQ ID NO: 43506 - DNA, 335 bp, Homo sapiens
gcatgcattgtctgagctccacagaatgccccattatgcagatgaagaaactgaggccccaagaggtttgagagttgctcaagtcacagagcccaatttgacaggatctgatgcctgggcaggtgctccccttactcaatcctgccccgcagggtgaccctgtttgcagcacgatgtctgaagaagaggtggctcagatccccagatccagtgtgtgggagcaggaccagcaggtgagggctgcccctcccatggagcagggacagaaggtattgtgtgggcagtcccttctaggagcgtttcaggccaggtatcccgccccactcctctccttg

SEQ ID NO: 43507 - DNA, 329 bp, Homo sapiens
  misc_feature (1)...(329): n = a,t,c or g
gaagacaccagccatattggattacggcctnnnnnnnnnnnnnnnnnnnnnnnnnnnnnnnnnnnnnnnnnnnnnnnnnnnnnnnnnnnnnnnnnnnnnnnnnnnnnnnnnnnnnnnnnnnnnnnnnnnnnnnnnnnnnagggacaacttagcccataacatcagtaatcattggctccctgagattaccttatctggaggttctcaaagctggcagctcgtcagagtcattgaggtatttcataaaaaatatcagtcttgggtccttacaccagacctgctggatcaatccaagaatgacactgggtgacagagcgagattccgctca

SEQ ID NO: 43508 - DNA, 302 bp, Homo sapiens
  misc_feature (1)...(302): n = a,t,c or g
gcggcacgagcggcacgaggtcctagatcacaaagctagtaagtggtagataacaggctttaaatactgtctgttcaattccaaagtttacactctacactcttgtgttttagatagactattgctatgtctgccagcctggnnnnnnnnnnnnnnnnnnnnnnnnnnnnnnnnnnnnnnnnnnnnnnnnnnnnnnnnnnnnnnnnnnnnnnnnnnnnnnnnnnnnnnnnnnnnnnnnnnnnnnnnnnnnntctnggntaatgntngnattgnattnntgnnnnanactgnattnnnccatg

SEQ ID NO: 43509 - DNA, 344 bp, Homo sapiens
gaagaatacactttcagaaataaaaagcagcagtgctgcttctggagacatgcagacaagccttttttctgctgaccaggcagctctggctgcatgtggaactgaaaactctggcagattgcaggatttgggaatggaactcctggcaaagtcatcagttgccaattgttacatacgaaactccacaaataagaagagtaattcgcccaagccagctcgatccagtgtagcaggtagtctatcacttcgaagagcagtggaccctggagaaaatagtcgttcaaagggagactgtcagactctgtctgaaggctccccaggaagctctcagtctgggagcaggc

SEQ ID NO: 43510 - DNA, 320 bp, Homo sapiens
  misc_feature (1)...(320): n = a,t,c or g
gacggtttggtagtagtgttaagtatattcacctttttttgttgttgtttgagatggagtccagcctgggcgacacaagactctgtctcaaaaacaaacaaacaaaaaccttaagcatacacattaaaaatctaccaaaactttttaaaattgagttttggcacttcatttttaaaaatataactggggtctcaaaaaggagtacgaggccgggcgcgatggctcacgcctgtggtccctcccaaagtgctgggattacggtgtcagccactgcgcccggcgttntnnnnnnnnnnnnnnnnnnnnnnnnnnntgtttgt

SEQ ID NO: 43511 - DNA, 335 bp, Homo sapiens
  misc_feature (1)...(335): n = a,t,c or g
gggatcgcnnnnnnnnnnnnnnnnnnnnnnnnnnnnnnnnnnnnnnnnnnnnnnnnnnnnnnnnnnnnnnnnngagtcagagagcaaggcagaactttatacatacagtgatgtgagatgggcatgcagagggaagatgttcccagtggctgaagctgaaacagtgtgagcaacaaaataaagcnnnnnnnnnnnnnnnnnnnnnnnnnnnnnnnnnnnnnnnnnnnnnnnnnnnnnnnnnnnnnnnnnnnnnnnnnnnnnnnngagtccannnnnnnnnnnnnnnnnnnnnnnnnnnnnnnnnnnnnnnnnnnnnnnnnnnnnnnnnnnnnnnn

SEQ ID NO: 43512 - DNA, 346 bp, Homo sapiens
  misc_feature (1)...(346): n = a,t,c or g
gattctataaggtttttccctgtcttatgtagggtacagcattatgctaaaactggggcttggaggaatagggaggccagctttctctctctctcttttttttttttaaattaaataaaaannggatttnnntntgtngnccaggctganctcaaactccngggctnaancaancctcccacctnnacctntnaaaaagggtgggnactacnggctngaaatnctaccctggntngnggccnnctntcgggacctntaaaaangcnccatgaaanngccctttaaaatttnnngcctncccnnnatngactcgagntnaanngacccnaancnggcncctnnaaag

SEQ ID NO: 43513 - DNA, 343 bp, Homo sapiens
  misc_feature (1)...(343): n = a,t,c or g
gatggtatctaattttagccttggaaaaggataccatgcgctactcactatactccagaatttccaaggatctcatttcttatctcttaactattatcagatggaagatttaaaagaaactcagaaaacaaatctcaattttttttttgtctcaggtatattttccccttacgttttatgaagggtcactgttatcacacctacctttgctctttttaaatgatctttgttccaggaaactatctctttctctcctatcataccaagaaagcatgtattccagtgttctttaaaaagaaaaataangaangaccaaataggttttgctcattcaaaatattgc

SEQ ID NO: 43514 - DNA, 346 bp, Homo sapiens
  misc_feature (1)...(346): n = a,t,c or g
gctggaagaattatctttgttttatacatgctagtcagagagttcagtaactacccccaaagactcacagaggccagatatcaaccaggtctccaaagtctgtactcttaactgtcagcataagtaatttctatagtccttctatctttaaccttttattggtctagatgttaactggtngacnaaannngngacnntggattcaaggaagcacagnacnagctttaanngcattcaccccaataaatatttaatgggttctctgcagctagctatacattttaagaactctcaacctataaagggaatgggtagattggagtggtccttgaaaatgagcatcatc

SEQ ID NO: 43515 - DNA, 348 bp, Homo sapiens
  misc_feature (1)...(348): n = a,t,c or g
gggcagggtggtacagtcgagagtgagccagactccggtgtggggctgtgattgctgagcgacttctggcaagtcactgccccctcctgtggggagatgcatggatgagcttggtatgttctccaaagccccaggtattctggggccacacaggcagtgatgacaggggtacaggcccaggtttcctcctcctgctggagcagctcctgtggtctcaagcacgtaggagattctgactgcttaaaaaannnnnnnnnnnnnnnnnnnnnnnnnnnnnnnnnnnnnnnnnnnnnnnnnnnnnnnnnnnnnnnnnnnnnnnnnnnnnnnnnnnnnnnnnnnnnnnnnnnn

SEQ ID NO: 43516 - DNA, 311 bp, Homo sapiens
  misc_feature (1)...(311): n = a,t,c or g
nnnnnnnnnnnnnnnnnnnnnnnnnnnnnnnnnnnnnnnnnnnnnnnnnnnnnnnnnnnnnnnnnnnnnnnnnnnnnnnnnnnnnnnnnnnnnnnnnnnnnnnnnnnnnnnnnnnnnnnnnnnnnnnnnnnnnnnnnnnnnnnnnnnnnnnnnnnnnnnnnnccccaaaaccatagcttaagcatgacactcctttaagtggttgttctgtcttggctagaaaatcncattttaagaaattcgtaacgtgaaggttgngaactgtctaactgttccanaagngggtcngagnncatacnccnnattntttg

SEQ ID NO: 43517 - DNA, 351 bp, Homo sapiens
gattttttaaaaataaatgaatgagaacaaaaagcctagcaaaccttgggtaatggggagaatctgatctccagagataccacaccataaatttcaaatgtccacttttcaacaacaacaaaaaaatcaaaagatgaacaaagaaacaagaaagtatgactaattgaaagcaaaaaagaaaagaaactgtccctgaaaaagaccagattgtgggcttaccagacaaattaaaacactgtcttaaagatgtttaaaaagctaaaagataatgtggacaaagtcaagaaaactataaacaaaatggaaacatcaataaagatagagaaaacaaattctggagctgaaaagtac

SEQ ID NO: 43518 - DNA, 184 bp, Homo sapiens
  misc_feature (1)...(184): n = a,t,c or g
gaaaacatttagctaaagaagaatttttactctgggttggtggaatgtattataatgataatattggaaattctcaagaggagatgtntaattngggntnaatgttttganngaatcctgnnnggngantcntgaaaacctgtatnnngnactggggtnnatnnntnngtncnannntnntgaa

SEQ ID NO: 43519 - DNA, 245 bp, Homo sapiens
  misc_feature (1)...(245): n = a,t,c or g
gcagagttggaaggcagagaatgaagccttcaccctggctgacctgaagcaactgccggagctgaacccaccagtgctgatgcccagagggaatgtggggactcccctgcgggtctttttggagttgatccgggcctgccgcctaccccctcggatcatcacccagctgcatntccagntccccaagannggttcctcccngcgctncngcnntgngcnttttgagtatgaggactnnganactg

SEQ ID NO: 43520 - DNA, 189 bp, Homo sapiens
gactgatatgtgtagtaaaaatttcaaatctaaacatcttgacttactgaatatcatcatgtgccaaaaattttgaataaagtcactgaaattaggatttgaaatagagtaaaataaatcagtattctctttcctttcttttcaggaagtatatatgtggttcaatattttcatctttttttttttttt

SEQ ID NO: 43521 - DNA, 334 bp, Homo sapiens
  misc_feature (1)...(334): n = a,t,c or g
gatgggaccaaaatcattttggaaggtactggcttggacggctgctgggtgagtcctttggagtgatgatgtcatgatgtgggaaacgggccttatggcttgtggaaacagatgccctgtgttctgaccaaacaaggggtctcctccaatacggacaggcatgaggtcacgctggcctgcttggttctttctaaattcattctgctgtgcagaccaccttttaaaagtgatcacaaaccatttgctgaatacttgtggaacttgaatcctcaccaatgtctccattttctggaatccatcccaacccccaccttggncttttggaaaattgggc

SEQ ID NO: 43522 - DNA, 337 bp, Homo sapiens
gaaaaagttttaaaaatagaacaacatacattccactgtaagctttgaaaaaacttcctgaattatggctttgagtttcaaccaagacatggaggccatatttatggctgtgtgcatgtttgtgcatctttttgtgagtggaaattcattactgtacaggacatgagctctttccctaacactcgtgttaaatggttaatatgagatgacttggtggcactctgaagtacgaagtgacagacagagttaaagttcttgatgtatgctaggtcagtgaagctttgtcatttagttcctgtgtggaaattaaaggcactatatgcaggttaaagttttt

SEQ ID NO: 43523 - DNA, 337 bp, Homo sapiens
gcagccattgtccttttgtctgttggtgagttacatgtgtatcatagaagatgtagaaaatagagcctcggaaagaaattaaaaatcacccgacttcccttaactccattactgtgagctaaatcacagagacattctttttagatggggtcatttgtgttcatatctgcaccctgcttctttcactgggtggtttcactggcagtgctgacgtcgcccacacaccatccacctgtgagccatccctggtgggaggtggaaggccatcttccggggaaattattttcagtgctgtttcgtgacccctcgctgatggaacacagtggttcacctaccc

SEQ ID NO: 43524 - DNA, 336 bp, Homo sapiens
  misc_feature (1)...(336): n = a,t,c or g
ggagtgaagtagagggggcgtcccacagagggtcccactcaccgtggactcctgcccctcgaacaggagctgtccctcccaggagcaggcccagggagaggtgggaaggagggtctgagggctccccactgggcctcactttccccatgggtgccagagggacctatggaaaaaaggacccccatggggccttctccagctggaacattctaagaatcctggattcaaacactacccattcaaatctagcctcagatgcccccagcctgcatttcacccctggtgggtggagagcacccggccttgggaaggcagccaggcctgtgtggnggctca

SEQ ID NO: 43525 - DNA, 345 bp, Homo sapiens
gataacgacccaggttggttgaagactttcaatgactactttagagacaagactcagtatatttttaataacatggtcctaaagctgaaagaagactcacggaggaagtttatttggtctgagatctcttacctttcaaagtggtgggatattatagatattcagaagaaggatgctgttaaaagtttaatagaaaatggtcagcttgaaattgtgacaggtggctgggttatgcctgatgaagctactccacattattttgccttaattgatcaactaattgaaggacatcagtggctggaaaataatataggagtgaaacctcggtccggctgggctattgat

SEQ ID NO: 43526 - DNA, 325 bp, Homo sapiens
  misc_feature (1)...(325): n = a,t,c or g
ggacaaaggtgacatttgcaaggctttttcttcatcagatgcagggatctggacttcatgtgtatccttttatccactcctctcactgctactgtgaagcagatgccataattctgatttttcagaagggaaagccgaggcacagagggttgaagatacttgctctaagtcacacagtttgtcagccaccaggctgggacctgcatcccagagcgttagtttcgtagtctgtgcacctgtttgctgagggctggcgggctccgcagtggtggggtgggggggagntgnnngnnnngngcntggagnnccacctgngnntggctga

SEQ ID NO: 43527 - DNA, 336 bp, Homo sapiens
  misc_feature (1)...(336): n = a,t,c or g
gnnnnnnnnnnnnnnnnnnnnnnnnnnnnnnnnnnnnnnnnnnnnnnnnnnnnnnnnnnnnnnnnnnnnnnnnnnnnnnnnnnnnnnnnnnnnnnnnnnnnnnnnnnnnnnnnnnnnnnnnnnnnnnnnnnnnnnnnnnnnnnnnnnnnnnnnnnnnnnnnnnnnnnnnnnnnnnnnnnnnnnnnnnnnnnnnnnnnnnnnnnnnnnnnnnnnnnnnnnnnnnnnnnnnnnnnnnnnnnnnnnnnnnnnnnnnnncacttgtaaaaaattattcccagttaactgcactcatttaaccaacctgctaacacaatttttggtttatctggatctttg

SEQ ID NO: 43528 - DNA, 338 bp, Homo sapiens
gggtaaatttattttttaaaaaatcatagaattgtacatttgaaatgagcaattttatgctatataaattatgtctttataaagttattttaaaaagaggcagtgtgcagatctcttaaagccacatcatgcaccttttagtaaggtattactcttatttccttctaaattctttcttgtactttaacccttttggtatcagatctttttttaaatcttacaacctctaaaaaagctggccccttctttcagtttccctatgtgtttcattattttggttattttatacttaaaaaaatacttaggaactataagtagaaggcaaaataaataaaacc

SEQ ID NO: 43529 - DNA, 331 bp, Homo sapiens
  misc_feature (1)...(331): n = a,t,c or g
ggggactattaagcccttttttcacatgaggaaacagagactctgagaagataagtgacttttctgaggacacacagtgatttggttggagagctggaggacctcacatctgtgccctggtttcaggctttttctattagttcagtcttcacagtgacacacccttgaccctgcctcccacgagggtcccacgttcctattctctttgctgtggagcagtgtttgaaatagctaacactaaaagtggcaactattgnnnnnnnnnnnnnnnnnnnnnnnnnnnnnnnnnnnnnnnnnnnnnnnnnnnnnnnnnnnnnnnnnnnnnnnnnnn

SEQ ID NO: 43530 - DNA, 336 bp, Homo sapiens
ggagatacgtaatgagaagtttcgattatacaaattaaagatgatggcaaagatggaaaaatatcttcattctagcagatgtaggagacaaatcatcttgtctcattttgaggacaaacaagtacaaaaagcctccttgggaattatgggaactgaaaaatgctgtgataattgcaggtccagattggatcattgctattccatggatgactcagaggatacatcctgggactttggtccacaagcatttaagcttttgtctgctgtggacatcttaggcgaaaaatttggaattgggcttccaattttatttctccgaggatctaattctcagcg

SEQ ID NO: 43531 - DNA, 328 bp, Homo sapiens
gaccacatgtattagttttggatttgcttgttcgttatattgtatgtgtacagctcatgggcactttaaaaataatacaggacattgatagacatcgactttaatcccagaggaaaaaaatggaaatcgttgaaagggatagataattagtaattaagaaattcagctctccattagcagacatcaaacattaccgtagcgctgggctctccaaggtgtcagaggaaaacttcatggtgatctagatatagtttttttttcttcaacttgcttatgttggagttgggaaggtgtaacaaggtaaaattaatcttattctttgtgagtg

SEQ ID NO: 43532 - DNA, 340 bp, Homo sapiens
  misc_feature (1)...(340): n = a,t,c or g
gatttctgctttaactattgcaggttcggctttccagtttggcagcagcactacaaatttcaacttcacaaacaacagtccatcaggagtgttcacatttggtgcaaattctagcacacctgcagcctcagcccagccttcaggctcggggggctttccatttaaccagtctccagcagcatttacagtggggtcaaatgggaaaaatgtgttctcttcttctggaacttcattctctggtccgcaagataaagactgctgttagacgcaggaaataaaggtcacattggtgttgnactcaattttaacaacacgctggtgccctgctttcagatactgg

SEQ ID NO: 43533 - DNA, 325 bp, Homo sapiens
  misc_feature (1)...(325): n = a,t,c or g
ggcagaacgaaaatgagcggatctgggagtgcaggctgcgcttcgtccacatcgataacagatgtttcctggtgaagatgtgtagggcgcagcgggtcacctggtcgggggagggcacagggcgtccctccacggggtgcctttggcgttgggcacttgtgtggtctccagcttccgggttttggaagcggagtgtcccctgnancctgancctnttgcaggtnggtttccttgggacgaactcccagggggaggtcanacntctgntncngctgctcnnntgntngggcgncntantntncttnntntacntgcttgntcgtta

SEQ ID NO: 43534 - DNA, 332 bp, Homo sapiens
  misc_feature (1)...(332): n = a,t,c or g
gaactggatgagnnnnnnnnnnnnnnnnnnnnnnnnnnnnnnnnnnnnnnnnnnnnnnnnnnnnnnnnnnnnnnnnnnnnnnnnnnnnnnnnnnnnnnnnnnnnnnnncatgccctgtctctcttctctcagtgctagggcaacttctgccagagccctaactggccgnatttantcattcattcaataactacttactgaangtctgtctacnnctgtgctnnctntgncaatgcggtcgtncntcctntantccntncnngnttctgntcttantgtntcnctgcgcnngnccagtcnntnntcncttntntcgncnnnctcntantcac

SEQ ID NO: 43535 - DNA, 351 bp, Homo sapiens
ggacctgtgcatgctataatttatttccatattaaatcagtgggggctcaaaggaagaagtcagctcacttggactaagaggttaagaaagctcttaaactgaatcttaaaaatcaggtagagaaagactttccgggttgcagaaatagtatgtgcaaaggcataaagacgcaaaatgcatggcctcgtttaagaatagccattaatcttaggtggctagagcactaaatatatatatatatacatatattcaggtgatactgcctttcttagcaacacccttaggcagttgtaccttcactcgtttgctgctgtattgcatttttagaattcttctttggaatcgccttc

SEQ ID NO: 43536 - DNA, 350 bp, Homo sapiens
gattcgatagtaaattacatgtttttaaaaagacaatttgctttatagtgaggtggtaatcaattcataactcttagttttggggagcgtctattgtaagtaacacatctgacctcttaaaatgtaaggaaattgaatttatgtaatgattcaggcttttcaaagttaaaaaggtagctgttttgaggaactgatagtttggaatatttattttaaacaaaataagcctttgatcttatgcacatagccgtacaagtaaaatgttttcttattttaaattagattatgttttagaatttttttcagttttgctttatatttgactgattgcttttctttattcctaaggg

SEQ ID NO: 43537 - DNA, 349 bp, Homo sapiens
gggatgatgttggggggcaggccagcctcccgaaggatgcggtagacagcatagctggccagcatggcagtgtcactgggcttccataggaccacgttgcccatcagggccggtgcccccgccaggttgccgccgattgcagtgaagttaaagggcgagatggccgccacgaagccctccagaccccggtacaccgtgctgttggtgctcgggggcacgctgatgggctgctgcccctccagctccaccgcatacttggcattgaaccggaagaagtcgatgagttccgctgcagcgtcaatctccgcttggatcacggtcttaccctgtcccaccatggtcttggcga

SEQ ID NO: 43538 - DNA, 349 bp, Homo sapiens
ggggttgagggaagccaccgatgtggcagaaaaggaagggaaagcaaaaggaggtaaagaatagacagcagatgaggggcctcagaggtgccagctgactttccaggcctggggtgaggaatggggcaagggagcaggctgcacgaggagccacagagaaaaggacatcttcttttatttgcgctagtatgacatgtgggctgtgttacgagctttgcttctttagtctgcaccggatagcagaggagtctggtggcacttgggaaatgttataatctgcatgactgcaaatgactcaaagctttgctcaactttttgaagggctagggggccttggcagctttccatt

SEQ ID NO: 43539 - DNA, 349 bp, Homo sapiens
  misc_feature (1)...(349): n = a,t,c or g
gaattactcccaaggagggataatatttagagtatattttaactttaaaattgatttgattttttagtcttcaactgaaaactgaaatgctaagaggtgatgaatatggattatctattgatgttctcaccatgtgcagagatgcataccaaaggagnnnnnnnnnnnnnnnnnnnnnnnnnnnnnnnnnnnnnnnnnnnnnnnnnnnnnnnnnnnnnnnnnnnnnnnnnnnnnnnnnnnnnnnnnnnnnnnnnnnnnnnnnnnnnnnnnnnnnnnnnnnnnnnnnnnnnnnnnnnnnnnnnnnnnnnnnnnnnnnnnnnnnnnnnnnnnnnnnnnnnnnnnnnnnnnn

SEQ ID NO: 43540 - DNA, 341 bp, Homo sapiens
  misc_feature (1)...(341): n = a,t,c or g
gctcttcttccccagtttcccaccctcaataaagggtactaccattcactcattgtgcaggcaataaatcaccaagcaatccttgatttttcttactccctacgttaaatctattagtaagcccgatcacacctcaaaaatgtatctttaattcaatgattccattcgattctctctatgaaccattatccgttgctcaaattactgcagctgttttccaatggctatctgcttctatatcacttctgtactagtcccatctctgtagcaatcagactgaactctcttttttttttcttctttttngaaacagggtntcnctgtancccgggntaaagaac

SEQ ID NO: 43541 - DNA, 341 bp, Homo sapiens
gtttttgtttgtttctaaatagtggattgatactgattgaaactaaaactttttgtaaagttttaaactttgcattaatattataagaaaaagaagaaaagtagaaaatgaaggttggcatgtaaggtgtcgacaaagcaggtttgcagccactttgtgtgttctagatatttcaatctcttggcaacatgagtgttggccttacagcttttttctctgaatatcttttttttttaatctgaaaatatgtccttgtatctggtgacttttatcagatgagaacttcagagttggtcattgttaccagtaagaaaaatataatgcttaagaagaaataccga

SEQ ID NO: 43542 - DNA, 336 bp, Homo sapiens
  misc_feature (1)...(336): n = a,t,c or g
gactttattggaacttatataggaaattattggtcttagtatagtttttgttgttcttcctcatatatttttttaaaaaggatatataacttataggcagaggctgacatttgtctcttctgtctttctgttgccctccccaatcctcttctccctgttcctcttttcttcacttaaatattttggtctttgtatatattcttcgaactgaaataatcatggtgacaaatagaaacaaacgaagattttttattgacaaatctttaatcactctttcttaaatgtcctagctagtcgtgagtccatttaactgtaagntcctatgcatgganggcc

SEQ ID NO: 43543 - DNA, 336 bp, Homo sapiens
  misc_feature (1)...(336): n = a,t,c or g
gactggaagggagacagggagatggggaagggacatagggtgtgtgtatgtgtgaggtagccctgagcagggtctctactatccccccagttctgtgcagtctaactacctctcgaccttgccctttgcatcaaacttaggacttggannactgttattgcagatncnncacctgccttcancctgaatattcctctccncctcaaaannncanacttttnnttgaanatttcntntcnccntttaaagaanattgacngnntggcccattcccacctttntgccacanctatttnnactttgacntttttcctntccctntntccntannccccc

SEQ ID NO: 43544 - DNA, 340 bp, Homo sapiens
gaaaatgcatttgtcaaatgcagcctttagtcactccaaaatatgtacattgaattgggtggtgggagcctaatttttaatgacctttgatttaccacttccttaagtaatgtagttaatacaacaagcaaaagattccattatctcttgaattttactggcgtgtggaatggttgaaagcacagaaaataaaattttcttcactttcccttccctctctccctctttctttctctctgttttcctttttttcagatcttttgctgttgaggagccccacccatcctgtgttattagcttcctattgactgttctctccaccctacaggggaggggtcgc

SEQ ID NO: 43545 - DNA, 342 bp, Homo sapiens
gaccactcggaagttttcctgctgttgctgaaaagatagcttgataccatggtcatgtgtctatgacaccaggattgcttttcaaggagctatagaggatgagtgctcttggccatgaatcaggggaaggctatctccaagtagagtaggcacttgagctgcctctaaactccaagttagcttagggactcccaggtctaggaaatggggcaggtctgggaaacagaaagaaggtagaggaatctcatggcccctcctatacgtgacgcttccttattcctttgtgccacatctctactcagatgagaaatctggaggagactgggatccactctgtctgca

SEQ ID NO: 43546 - DNA, 340 bp, Homo sapiens
  misc_feature (1)...(340): n = a,t,c or g
ggaactgtcaaagattattcccatgtttctgggttgaaaaactttgaaggtattggtacagatcagtaatccagtgtttccgggcgtggtgtttctcaacttttttttaatcaccttcctaaggaaactttttagacctttttttccccctaatgtacctgccctatgacatattaacactgagataaactctgtatctttttatgtaccatgtctgtgctttatacataagagtaagtgtacaatttagtttttattcaatgcatggttaagnnnnnnnnnnnnnnnnnnnnnnnnnnnnnnnnnnnnnnnnnnnnnnnnnnnnnnnnnnnnnnnnnnn

SEQ ID NO: 43547 - DNA, 342 bp, Homo sapiens
  misc_feature (1)...(342): n = a,t,c or g
gccccatctctcctcctccaaaaaaattagttgggcatggtggacggtggcatnnnnnnnnnnnnnnnnnnnnnnnnnnnnnnnnnnnnnnnnnnnnnnnnnnnnnnnnnnnnnnnnnnnnnnnnnnnnnnnnnnnnnnnnnnnnnnnnnnnnnnnnnnnnnnnnnnnnnnnnnnnnnnnnnnnnnnnnnnaatgtatttttaaatgaataattaagctgcctcttcccttcaccccagccccctttcccagtgatgaccattaccttatgtttttatttcctctcagaaaatgtttgagtcatagatccgcatattaataataaattttaagaccggcatg

SEQ ID NO: 43548 - DNA, 341 bp, Homo sapiens
  misc_feature (1)...(341): n = a,t,c or g
gggcggagtagccccctgcatggagaaaggcatagtgagggggaagctcctgacatacctccccagctccaggcgctggggtcatttccactcatttggcttccttttgctgggaaggctgacagggagatgaagaaatggaaggcnnnnnnnnnnnnnnnnnnnnnnnnnnnnnnnnnnnnnnnnnnnnnnnnnnnnnnnnnnnnnnnnnnnnnnnnnnnnnnnnnnnnnnnnnnnnnnnnnnnnnnnnnnnnnnnnnnnnnnnnnnnnnnnnnnnnnnnnnnnnnnnnnnnnnnnnnnnnnnnnnnnnnnnnnnnnnnnnnnnnnnnnnnnnnnnnnnn

SEQ ID NO: 43549 - DNA, 335 bp, Homo sapiens
  misc_feature (1)...(335): n = a,t,c or g
gtcagagttgtttcatatttttttagctttattctcttctactgtgagtacagctctgttgagctgtacagtacagtactgctttgcttgcaaagcagtacagatgcctaggagaagtttcaggatcacaggagaccagcagttacctggctgtaagctctccttttgactgttccttatggagggaatatttgtactcccagttgttaccttcctgctgaaggacatgagatgtgtctgtttgttatgaagttttccccctacttcccgagttgttgcttatctttgttgggctgatctctgctcttggttgaggtactgggatgtanaaccac

SEQ ID NO: 43550 - DNA, 342 bp, Homo sapiens
  misc_feature (1)...(342): n = a,t,c or g
gcggcacgagnnnnnnnnnnnnnnnnnnnnnnnnnnnnnnnnnnnnnnnnnnnnnnnnnnnnnnnnnnnnnnnnnnnnnnnnnnnnnnnnnnnnnnnnnnnnnnnnnnnnnnnnnnnnnnnnnnnnnnnnnnnnnnnnnnnnnnnnnnnnnnnnnnnnnnnnnnnnnnnnnnnnnnnnnnnnnnnnnnnnnnnnnnnnnnnnnnnnnnnnnnnnnnnnnnnnnnnnnnnnnnnnnnnnnnnnnnnnnnnnnnnnnnnnnnnnnnnnnnnnnnnnnnnnnnnnnnnnnnnnnnngccacctttaatcagatgatcaatctcttcttttgnttctgnntctacg

SEQ ID NO: 43551 - DNA, 329 bp, Homo sapiens
  misc_feature (1)...(329): n = a,t,c or g
gggatggtgggattcaggagctgaggagggggatggtgggattaatgccctgaagcagtggatggtgggattgaggattgggttttctagggaggagggacaaggcagttaagggtttcacaaaggagaggttctgttgatttccccctgagtctaaactgggtaatgagggacataacagagaatgatgggtgtgaggacagggcctggagtcgtgatgtggttgaagaattactggattgaagttaatacagtcaatgagctataaagaaaggctggagagaacagaaaggatccttggaattgaggggttgnttcgttttntgata

SEQ ID NO: 43552 - DNA, 341 bp, Homo sapiens
ggagtaaccgttagccacatgtggtcattgaactcttgaaatgtggctgaggcaactgagaaatcgaattgttaatttttaaaactttaaatttaagtaacctcacgtggatgacggctgctgtgttggacagcacagctacacatcagtgaggccagcaccagggactcagtgcaggttttggagcagctgcagcagcaacatgatgtgagggatagatgcactaggaggaccaatggagtttgccatgagggctgggcaagggtggtgcttggatgaggtgggaggccacatgtgtgagtgggaacagtgaaactatcaggaccatggataaaagaagg

SEQ ID NO: 43553 - DNA, 329 bp, Homo sapiens
  misc_feature (1)...(329): n = a,t,c or g
gnnnnnnnnnnnnnnnnnnnnnnnnnnnnnnnnnnnnnnnnnnnnnnnnnnnnnnnnnnnnnnnnnnnnnnnnnnnnnnnnnnnnnnnnnnnnnnnnnnnnnnnnnnnnnnnnnctgtcttagttctttgaagatgtgggcatgtgtggaataaaaacatcagtgctgctggtcggacctctttgcaaaccaactgcaatttttccagacagatacttttaaacggtgtgcccagcatacttagaaaaagaaatctccagctttttacatgctgcacagaaagggcaaggaattagtcagaaatagcaaaaacaccacctggcttccag

SEQ ID NO: 43554 - DNA, 333 bp, Homo sapiens
  misc_feature (1)...(333): n = a,t,c or g
gagtaaatatatttggtctctttgcctggttcccaacacagagctcctgaatgtcgcaaattcctgagtgataggagcatcttttgttctaactaggacactcttaatgggcttctgggtagcttcaaggtggggactagtcaccaaaaagaccaagccatannnnnnnnnnnnnnnnnnnnnnnnnnnnnnnnnnnnnnnnnnnnnnnnnnnnnnnnnnnnnnnnnnnnnntaatcagcaatcagtcatgccctcataatggaacctctatacaaaccctaactgatggctggagtatggggagagttcagagagcttccaggttggtgaat

SEQ ID NO: 43555 - DNA, 334 bp, Homo sapiens
  misc_feature (1)...(334): n = a,t,c or g
gnnnnnnnnnnnnnnnnnnnnnnnnnnnnnnnnnnnnnnnnnnnnnnnnnnnnnnnnnnnnnnnnnnnnnnnnnnnnnnnnnnnnnnnnnnnnnnnnnnnnnnnnnnnnnnnnnnnnnnnnnnnnnnnnnnnnnnnnnnnnnnnnnnnnnnnnnnnnnnnnnnnnnnnnnnnnnnnnnnnnnnnnnnnnnnnnnnnnnnnnnnnnnnnnnnnnnnnnnnnnnnnnnnnnnnnnnnnnnnnnnnnnnnnnnnnnnnnnnnnnnnnnnnnnnnnnnnnnntacctagtataaaacagaacatagtttttttctcccttactctcatcctgngttgc

SEQ ID NO: 43556 - DNA, 321 bp, Homo sapiens
gaattatgaccacactgtaactttgagcagagaaagtgggaattggaactggattctctttagagccaggaagagcctcctgaggcggccagatgtctgctggtggccgcccagccacatgcttgtctgcctgagtgcaggtctaggaagcctctgggcatcccccagggtggggtctgggccgctgagctgtgtgctgctgctgggccaccgtgggccttaccttgacggtcactctgcctgctagggggtttccctggagctgtgggcatttccgtgcactgactgagcagaggcaagggctgcctgtccgccaggggc

SEQ ID NO: 43557 - DNA, 331 bp, Homo sapiens
  misc_feature (1)...(331): n = a,t,c or g
gggattttcatgttagtgtatcttctagatgttaaataaatgtgatccaccacacccagacttttttcnnnnnnnnnnnnnnnnnnnnnnnnnnnnnnnnnnnnnnnnnnnnnnnnnnnnnnnnnnnnnnnnnnnnnnnnnnnnnnnnnnnnnnnnnnnnnnnnnnnnnnnnnnnnnnnnnnnnnnnnnnnnnnnnnnnnnnnnnnnnnnnnnnnnnnnnnnnnnnnnnnnnnnnnnnnnnnnnnnnnnnnnnnnnnnnnnnnnnnnnnnnnnnnnnnnnnnnnnnnnnnnnnnnnnnnnagtgccaggcccagcctgtgtcactgaaact

SEQ ID NO: 43558 - DNA, 331 bp, Homo sapiens
  misc_feature (1)...(331): n = a,t,c or g
ggctggagnnnnnnnnnnnnnnnnnnnnnnnnnnnnnnnngctcaacagaggtttagtttacagtctctgaactaaagtagtaacctcccaaattgttttttctaataagctgagattcccatttctcttaaggagaagccacccatgagatgtcttttccttctccatcatcttagagccaagttatatgttcttgtctaatccatgtagctttttgttcaatgacttgatcatctgcttcctttttgaatttttaacagatagtaagtaaatttggtggttttttcccctgggtcagtgatggaaaggggttaacttcagccaggattg

SEQ ID NO: 43559 - DNA, 341 bp, Homo sapiens
  misc_feature (1)...(341): n = a,t,c or g
ggacagggnnnnnnnnnnnnnnnnnnnnnnnnnnnnnnnnnnnnnnnnnnnnnnnnnnnnnnnnnnnnnnnnnnnnnnnnnnnnnnnnnnnnnnnnnnnnnnnnnnnnnnnnnnnnnnnnnnnnnnnnnnnnnnnnnnnnnnnnnnnnnnaaagaacgagactctggaaaaaaaaaaataaagtttgtcactggggtctcataataaaacgacactccatttcctatctggcccctgctccttaatgttagccccctcctgttgggaggagggggtgactttcatcgcatgttcaaacattnccaggnntggctctgatcctnantaaagcccatcgtcat

SEQ ID NO: 43560 - DNA, 329 bp, Homo sapiens
gatctgggggttgaagtcattcccaggaggattcctgtcagatgaaacgtgtccgggctcgagagcaccaggagccttcgggattggtaccactttctttcccagattttgcagacctagggaccagaccctcccttcctcaggtgggtaaaaggtggtaatgtgatcctgtgttgtgagctgtcaggttctaaaggagggtagctttctagggtcaaagcatccttgcaatgatgatttgatgcaaccagaccaaatcagtgaaagctcagctgccagaccccttgagatttggggatagggcgcagagtgtagacaatttgattaga

SEQ ID NO: 43561 - DNA, 338 bp, Homo sapiens
  misc_feature (1)...(338): n = a,t,c or g
ggagccaagattgaagtcagtatacaaaaatccattttatttctatatactagaatgaataattggagactggccgccggtggctcacgcctgtaatcccaaactgctgggattgcaggcgtttagccaccatgcctggcctttactcatttttctattatgtaatttttttaaattgatttttacaagttcattatatctcatagatactaacctcttgctagttatacctatgactgtgngttacagtttttcagttgatactcttgaattttttaggcacctgtggatcccatgaatatggnnnttttgccngcatcatggctcacncctgtaaa

SEQ ID NO: 43562 - DNA, 362 bp, Homo sapiens
gaaagaaaagatgcagaacttttctagaaaacagaacaaagaaccaagagttggaaaaaaaaattaatgaaagtggagacattagagaatcattccacgtggtcctacatcttctaatagaggggaaaaaaagtggaggaaataaagatgcgcacacacacagatgttttaatttagcattggatcatcatctcccctgggcagcatgtcttttaaagtatctctagtgttagcagcttgttttccatctgagttggaaaattaaataacattattcacatttttatgtaaatgttagataatatgcatgtataatcacttgataagtgataagaaaaagaatttgagtggaccagtaacta

SEQ ID NO: 43563 - DNA, 354 bp, Homo sapiens
gacagcttatgccctatggctgcctcttagaccatgtccgggaaaaccgcggacgcctgggctcccaggacctgctgaactggtgtatgcagattgccaaggggatgagctacctggaggatgtgcggctcgtacacagggacttggccgctcggaacgtgctggtcaagagtcccaaccatgtcaaaattacagacttcgggctggctcggctgctggacattgacgagacagagtaccatgcagatgggggcaaggtgcccatcaagtggatggcgctggagtccattctccgccggcggttcacccaccagagtgatgtgtggagttatggtgtgactgtgtgggagctga

SEQ ID NO: 43564 - DNA, 367 bp, Homo sapiens
gggccctgcgtggtctcgagctgggtgagcgagcgggcgggctggtaggctggcctgggctgcgaccggcggctacgactattctttggccgggtcggtgcgagtggtcggctgggcagagtgcacgctgcttggcgccgcaggctgatcccgccgtccactcccgggagcagtgatgttgggcaactctgcgccggggcctgcgacccgcgaggcgggctcggcgctgctagcattgcagcagacggcgctccaagaggaccaggagaatatcaacccggaaaaggcagcgcccgtccaacaaccgcggacccgggccgcgctggcggtactgaagtccgggaacccgcggggtctagcgcagcag

SEQ ID NO: 43565 - DNA, 369 bp, Homo sapiens
  misc_feature (1)...(369): n = a,t,c or g
gggctcggcgtggtcatgcagtctgggcctccatcccaggagagctctccagtgacagatccaactgaaggagctgggggtggggggccctgtgaggtgggggtgaggagcacaggcttcccagctccttcacagacagctcagtggttctgaagagcctctcccagctcccagaccccctaactgtgtggaagtggggagggagaggcccagctccactggactcagtaggcctggtggctatggaacatagttgtagnnnnnnnnnnnnnnnnnnnnnnnnnnnnnnnnnnnnnnnnnnnnnnnnnnnnnnnnnnnnnnnnnnnnnnnnnnnnnnnnnnnnnnnnnnnnnnnnnnnnnnnnnnnnnn

SEQ ID NO: 43566 - DNA, 367 bp, Homo sapiens
  misc_feature (1)...(367): n = a,t,c or g
gatgaagttgacgtgcggctgccgttccaggccgagatgttcatccagaacgttatcctggtgttcttctgtgtgggaatgatcgcaggagtcttcccgtggttccttgtggcagtggggccccttgtcatcctcttttcagtcctgcacattgtctccagggtcctgattcgggagctgaagcgtctggacaatatcacgcagtcacctttcctcttccacatcacgtccagcatacagggccttgccaccattcacgcctacaataatgggcaggagtttctgcacagataccatgagctgctgnatgacaaccaagctccttattttttttanacgnngncnancgnagcctgtntggagcggt

SEQ ID NO: 43567 - DNA, 370 bp, Homo sapiens
gggaaacttaacatcacagaatcagcagctgaaattaagcattcacattgcctaaaattgaaaaatgaaaatatgaagacagttatgagccttacagaaactgctgtgtctttgcaaagcgttaactctggttcagtgtagcacatacctattccatcttcatcccaacacagttttaaataggaaaaagtatgtgtaaacttgacaagtctcatgaaactgaagggactgtatttttagaaaatacatttccagaatgcctttggattctttttaaaaaatgttaaatctcttttacgtttgtttatatttgtttgtcacagattcgagaaactagttcttgtggataacatgtactgattgctcactc

SEQ ID NO: 43568 - DNA, 380 bp, Homo sapiens
ggcaccatgagctcaataccctgggaactctcctcctgctgccttggtccatggggctggatcatacctttattctacaaataagaaaccaaaactactatgttaacttcacagttttgttttctttatttggcttccaaaccttaggagtatgaaatcaaccttttattctacaactctccctaaaagaggaaggagaagaacagggactctcctttttttctctaaagttattaacccgttttcatctttttgcaaacaaacttcagttaaaacttaagtcaaatttaaacatctcaagctgcccttttccttctacttaaaattaattccacaacttttgggggagggaaaaacaagaaacaggaaaaagaatatca

SEQ ID NO: 43569 - DNA, 369 bp, Homo sapiens
gtttaggacgagactggtcccaggaggaaaagcggcgtcgattggtttccatggagaatgcggtttctcactgtggactcttgagttcttagttatgctgtcaaatattctaaaatcataggtcacctcgccgtgttgaaaggttctacagagccttctgagtctcagagaaagttaagtttgaattcttggggtggaggagccgaggtcaggcactttggggttagaggtgaccctggcctcctttttccctctcgtaagctcgaggtggggaaaacccagaacccccactgcaggcaagaatgtggttccatctggcctttttgctgtcgcagaacctgccaggaaaggcgcacacaggatgtttta

SEQ ID NO: 43570 - DNA, 351 bp, Homo sapiens
  misc_feature (1)...(351): n = a,t,c or g
ggagtgctgaaatggcatgagccaccgtacctggcttaaatgccatccttaaacatcaccttaaaggtgtccatccatgtgtgccctgcttcagacacaggatgagcatgggtgaaagtttagagctggagataccagtcacccagctctgcatactttccgtgcccttgtggggagcgtgctctcatccacactgggtatggaagattatccttatgccatcgtggctctctggatggagaagactcgtgattctttgtcttactggctctgacttgctcccactcagggcttcacttgacacagatgaggggcattaaatgtcttanagttgatattgggagtagtggg

SEQ ID NO: 43571 - DNA, 360 bp, Homo sapiens
ggtaaatttttcaaaactcaaaaatgtatatataaaaaacatgcattgaattttatgtggtactttaccacagtgaagttaattttgaaaataagttacatctaaaatatagtgtgcagcatcatgtcctagactaccaagaaacataaattggcaggccagaatttgtgaagataggaacaattcaaaaatgaagtgtgaggtattaatagctctaggtgaatggcccaggaaggaggcttcaaaagtgtgtacccattttaggattctcttttaaactgatattcatggattaaatgcattggtagctctgagtagttgatgaagggatagaggagataaaaataattccaagatttt

SEQ ID NO: 43572 - DNA, 358 bp, Homo sapiens
  misc_feature (1)...(358): n = a,t,c or g
gcacacacgcacacacacatcacatatatacatacatatatatattctttttagagatatagaatttaaattgaaatgtaatacattatttaaaacataataagtaataaannnnnnnnnnnnnnnnnnnnnnnnnnnnnnnnnnnnnnnnnnnnnnnnnnnnnnnnnnnnnnnnnnnnnnnnnnnnnnnnnnnnnnnnnnnnnnnnnnnnnnnnnnnnnnnnnnnnnnnnnnnnnnnnnnnnnnnnnnnnnnnnnnnnnnnnnnnnnnnnnnnnnnnnnnnnnnnnnnnnnnnnnnnnnnnnnnnnnnnnnnnnnnnnnnnnnnnnnnnnnnnnnnnnnnnnnnnnnnnnnnnncac

SEQ ID NO: 43573 - DNA, 346 bp, Homo sapiens
  misc_feature (1)...(346): n = a,t,c or g
gcggcacgaggccaggatgacctctggtgcctggagaagggcgggtttttcagcctagcagccatgatgccctcggaacctggccctatggtatggatgtgaggactacgcactggctgccctgagcccggggctggaaatcatctctggctgccaaggatctggacctattttggagtggagagtcatggttaaaattcccagcccggcccaggtacgggnnnnnnnnnnnnnnnnnnnnnnnnnnnnnnnnnnnnnnnnnnnnnnnnnnnnnnnnnnnnnnnnnnnnnnnnnnnnnnnnnnnnnnnnnnnnnnnnnnnnnnnnnnnnnnnnnnnnnnnnnnnnn

SEQ ID NO: 43574 - DNA, 356 bp, Homo sapiens
  misc_feature (1)...(356): n = a,t,c or g
ggaaagtcatcagaaattggcagtgcattagaaatgaaaagaggaaagggaggtcgtaagagttaaagaggaaggaaacacgaaacacagctggcaattaaagacaggttttctttagttaaaacctgagaggnnnnnnnnnnnnnnnnnnnnnnnnnnnnnnnnnnnnnnnnnnnnnnnnnnnnnnnnnnnnnnnnnnnnnnnnnnnnnnnnnnnnnnnnnnnnnnnnnnnnnnnnnnnnnnnnnnnnnnnnnnnnnnnnnnnnnnnnnnnnnnnnnnnnnnnnnnnnnnnnnnnnnnnnnnnnnnnnnnnnnnnnnnnnnnnnnnnnnnnnnnnnnnnnnnnnnnnnnnnnnnn

SEQ ID NO: 43575 - DNA, 346 bp, Homo sapiens
ggaaagagaaatggctgcccctgcaccacttaccgcgaaggaggctcaaggctggggggcccctctgccttccagtgaccgcccgtgtcacatcctgacccgctcagcaggagaacacagcaggtccctccgaccgcagtcggcctctccagcctgccatgcctctggccatgaggcgacccgctggagtgatggattcccgtcactaccacccacagggcgagggggtgcattggtctgcttgggccgctgtaacaaaatgccacagcctggatgagtgactgacattgcttccccaccgttctggaggctggaggcccgagatcgaggtccctgacactatttc

SEQ ID NO: 43576 - DNA, 355 bp, Homo sapiens
ggaaatgggctttggagtgcctcgaatttggcctccacttttcttttctactgtcttacctggtcttaggcaggtcgggtgaccatctggagtcggagtttctctcatttgtaaagcgggggtgatatttttctcacagggctgcttcaagggttaacaaagttaatgtctaggaaggacatagcatagcaccttcacctggttgcaagcccctggagtcacatggcaacagctgtggaaccaggtaaatgacttgacttacatgttacacgctcttagttgttcgatttgtaaatgggaagagtgtgtgacccaaattagtcgtttccagatatttcctggtaaatggttgttg

SEQ ID NO: 43577 - DNA, 249 bp, Homo sapiens
  misc_feature (1)...(249): n = a,t,c or g
gaggaaatctgtaactaagggggaataggaggcaaagagaaagagctgaaacaaatcttcctcctgttgtagtaaggacaaaggcacagagaagcacagtcagcctgaaatcatgaacgctgctagggaggtcgtgtgttcatgaagcagcagcgcctggaactggggactgtgcaaggtcctctgccataggaggaggcttccctcatgctggggctaccggaaaaganaancgacncacctgtgcgt

SEQ ID NO: 43578 - DNA, 218 bp, Homo sapiens
  misc_feature (1)...(218): n = a,t,c or g
gaataacttctctgagtgctcagagccagtcccctgaggaaacttcttgcttcactaagaaacccctgtnnnnnnnnnnnnnnnnnnnnnnnnnnnnnnnnnnnnnnnnnnnnnnnnnnnnnnnnnnnnnnnnnnnnnnnnnnnnnnnnnnnnnnnnnnnnnnnnnnnnnnnnnnnnnnnnnnnnnnaaaattagctgggcgtggnggngcnnncctg

SEQ ID NO: 43579 - DNA, 129 bp, Homo sapiens
  misc_feature (1)...(129): n = a,t,c or g
ggtctgaaataggggtgagtgctccatcactcaaaagctggtatttcacacacccaagccaaatgctacatgtgctgatgaaatcatggtttcgtgtttgggatgtgtgggaggtgtgtannntgttta

SEQ ID NO: 43580 - DNA, 324 bp, Homo sapiens
  misc_feature (1)...(324): n = a,t,c or g
gnnnnnnnnnnnnnnnnnnnnnnnnnnnnnnnnnnnnnnnnnnnnnnnnnnnnnnnnnnnnnnnnnnnnnnnnnnnnnnnnnnnnnnnnnnnnnnnnnnnnnnnnnnnnnnnnnnnnnnnnnnnnnnnnnnnnnnnnnnnnnnnnnnnnnnnnnnnnnnnnnnnnnnnnnnnnnnnnnnnnnnnnnnnnnnnnnnnnnnnnnnnnnnnnnnnnnnnnnnnnnnnnnnnnnnnnnnnnnnnnnnnnnnnnnnnnnnnnnnnnnnactaatttctattaaaactaattttcttcaagtccaaaaaagtctcaggaaggatataaag

SEQ ID NO: 43581 - DNA, 274 bp, Homo sapiens
  misc_feature (1)...(274): n = a,t,c or g
gacacttgacctgctacctaaaacgatgtaatattacaacttttttgaataatctcaggaaaaatggagaaatgtttatattcatagttaataaacattctagatagtaaccaactgtcatttactgaaaataaaattttacccaggnnnnnnnnnnnnnnnnnnnnnnnnnnnnnnnnnnnnnnnnnnnnnnnnnnnnnnnnnnnnnnnnnnnnnnnnnnnnnnnnnnnnnnnnnnnnnnnnnnnnnnnannctncnnagnannngggattac

SEQ ID NO: 43582 - DNA, 354 bp, Homo sapiens
gggtgggctcccaggaagagccgagtgagtgctgaccatccacctcctcccttgctacctggtctgtagctgcttgcctctgtaggttggaaatccacagctgagctacatcagaatcgagcattgcatgttagacgagagcaagtggtgctggctgcagaaggcgctttgcattggagcagaggagataggcatcgatgtttaaccagtagctgccgtgggctggggtgtgcacactctgtcttgtttgatacagcaactctatgacataggttttatcacattgccatacaggtgaaaaacctgaggccgagagatattcagtaacctgctcaaagccacacagccgctaat

SEQ ID NO: 43583 - DNA, 362 bp, Homo sapiens
  misc_feature (1)...(362): n = a,t,c or g
gggaggatatctcctgctgggtgatgctgaacattaagaccaaggtcttacaccagcaactcagtgctattcattaccaaacagatcaaaaactgggtaacttttgtttcacttccatatctcctgtcccaaaaagtgaagtcaaattcagcattaaaaaaaagtgtttgcacaactgtaatttttgatggtgtggtgtagaaacaaataccgtgtctgtttggtttgctttaagacataannnnnnnnnnnnnnnnnnnnnnnnnnnnnnnnnnnnnnnnnnnnnnnnnnnnnnnnnnnnnnnnnnnnnnnnnnnnnnnnnnnnnnnnnnnnnnnnnnnnnnnnnnnnnnnnnnnnnnnnn

SEQ ID NO: 43584 - DNA, 360 bp, Homo sapiens
  misc_feature (1)...(360): n = a,t,c or g
ggtgaattcgatgactgtaactgcctcctccaagtggactcnnnnnnnnnnnnnnnnnnnnnnnnnnnnnnnnnnnnnnnnnnnnnnnnnnnnnnnnnnnnnnnnnnnnncctgagtgtcagaattatattcctttttaaggctgatcaccctcaacaaacaccagcgctttgggnacgtgcagcantactgactgngnagtncctgtnacnncntanaccgcgtnctgnanantgnggctgtatanttggnttaanatactntnnttntnnntntnnnntannnttntantnnntatttnnttntacnananntcnttnnttagcnaattntttacaattatntannttatgatttgtt

SEQ ID NO: 43585 - DNA, 345 bp, Homo sapiens
  misc_feature (1)...(345): n = a,t,c or g
ggtattttgacatgacaaaggagaattaattgaatttgtatattgtaatctgctcacctagaattgagatgtagcatttttataccaaaccagagtcattggcatcagtccagatggcagaaataaatcttacaaaatatatttgctagcatggtttttgcctgcttatcatgctggctctgttagatgataaatgtaattcagactttgagcttgcttataaatcctgtctgtcatcacttgatgataacagttgccaaacagcctcaggtaaaaaagacctcagaattttcatgagggttaaattatttaattgcctgttctanaaagaananaaattacaga

SEQ ID NO: 43586 - DNA, 361 bp, Homo sapiens
gggtaactgagagaggaaggtctgcagcacccgcaaatacaccagcagcccttcctcagagagggcccccaaataattttcgccaacagttaaaacgaaatagaaaagccagggtgctccaccactctttcttgaacatctactctctattaacaacagtgcattcagaaagggctcgtaagggaaaacggtctgcgcatctgcaagcgccggaatgatgaaatgaaaaatctgatctgtaaaaggtgctgccagaaactcctctgtgaaggctgtaaaaacttgttgcctcgcaccttccggacaggagttgtaagtaaagtgcaatggttttagaacattctctacaaaatttttgcta

SEQ ID NO: 43587 - DNA, 328 bp, Homo sapiens
  misc_feature (1)...(328): n = a,t,c or g
gnnnnnnnnnnnnnnnnnnnnnnnnnnnnnnnnnnnnnnnnnnnnnnnnnnnnnnnnnnnnnnnnnnnnnnnnnnnnnnnnnnnnnnnnnnnnnnnnnnnnnnncacatctttcccatctcaggacctctgtatgtgttttttcctctgcctagaatgtccccccatacacacacacacaaatacaccaggacttttttccactatgcacacaaacactgtgcttgcacactcaacttactgctcagggctcagtttcaatgtcacttcttcaaaggggttgtccctgacccctagtctaaagtgagccnctanaggntggntgcggc

SEQ ID NO: 43588 - DNA, 330 bp, Homo sapiens
  misc_feature (1)...(330): n = a,t,c or g
gcggcacgaggtttgactggatcttgaggaacatggacgtgtctgttgatttgatagtttaccttcggaccaatcctgagacttgttaccagaggttaaagaagagatgcagggaagaggagaaggtcattccgctggaatacctggaagcaattcaccatctccatgaggagtggctcatcanaggcagncttttccccatggnancccctgttntggtganngaggctgaccnccacatggagaggacgntagaactntttgnacaaantctggcatngaatattaantcngganaattgnaannattgtccatattagtgcttctgg

SEQ ID NO: 43589 - DNA, 329 bp, Homo sapiens
gatcttgtctcttgaaaaacaaacaaacccacagtacaaatcaagtagttacttagtgtcctacctccctgacagtacagagagaaccacccccaaatgttactatcgaaggaaacaactgtacttcaccaatggtctgcacctgatcagtaccagcaagggaaggccaaaggcaaacaagtcagacaaaatgtaagatttggcaactttcctactgatgtggaattattgtaattagagagatttttaacaattggagaaatgttaaaatttatagaagttctaactgatggaaatatctttttaaatagtgaaaaactatgacaact

SEQ ID NO: 43590 - DNA, 335 bp, Homo sapiens
gggaaaatagaatttacctataaaccaactacctgtggaggatgtagttaatatttattgtgtctttccagtcttttttttaaagcatacttttacatgcattcaagtacttttaaaggacacattattgaattgcagagaacaaaaaaattgttgggagtaagatctgtgatatggaatatataatactttatatgacatgaaacattttgataaatattttcatatttatgttaagggtttaggtttttgtttcttttaaaattttcatactgaaatggagcatgttgattagtgtttgttataaccaaattatttttctctacttcactgtc

SEQ ID NO: 43591 - DNA, 335 bp, Homo sapiens
gcaggaatggatagcacagaggccagcagagggggcccagaagagggctcagcaaaagtcctgtggccgccatttacctgttggttattgccctacacctgaatctttcccactccgactttgaactttttcactctgtagtaaccgcaactgtggagtaattacaggggaggatagttactgaaggaagactggggtggtggcttaaagagctgttcatgccggcttgttgatctgcggcgggtctggttgtgggatcagcatgagcaactcaatggactgtcaaaccctgcagagccgggacacttactcatcacccccgtttcacctgtggt

SEQ ID NO: 43592 - DNA, 339 bp, Homo sapiens
gcctcaatatagttaattttttaaaaatcatagatttctttatatttaatgcatgaacataaacctaagacactcctccactccaaaacttaattaccttgtgatcagcagagcagaaggtactttgtgatatataggtagagaagatgaagtcttgtgacatttaacaagggacaggaaaatggaccttgtcctaagttaccaaactgcaaaaatatcacctacaaaggctattcataacatacattttcaagggggttacaatatttgcctactataaaattttggatctgtaaaggggttaaattatttgtgcaggggaataaacatcaaagaaac

SEQ ID NO: 43593 - DNA, 369 bp, Homo sapiens
  misc_feature (1)...(369): n = a,t,c or g
ggtcttctttggaatagttgctgtagaaaagcttcaaccaggcttaggggaaaaaaaaaaaganccactaaanaanctgnggggttctgnatgctgaaanacaaancangtntaggtagnaatgactngtctatacgnggctntgctcctccaacactgggggcccagctgtngtttttnaaaccgccccccaccaggcaatgctgcctttngtttgaaagtctccatggancatgtagttggnaaaatacgtcctcagngttcacagttanaaatngtaatactttatttgtaaaaataccattttaggganaggctaaataggtngtatnctattaaancaaaaaaagttaaatagttttttttggc

SEQ ID NO: 43594 - DNA, 355 bp, Homo sapiens
gggacaaaagagctaagagttggttctttgaaaggactattaaaattgacatcctctggcaaaatgactaagaaaaaaggagcaaatcacccatcaggaatgagaaaggaagacagttcagccacatccgatgctgaaaaggtgagaaaagcctgtgctgacaaagagaactccaccaaaacggttcgaccatcaggaggaaagtcacgtggcagcccagctcgaggagacacgcacacagaatccatcgccatgacagagattgtgtggatgattctcagtcttgccaaagaacaccaagtccaggtgctttgcacgtgagttcaagaaacagctccagttttacccagactcg

SEQ ID NO: 43595 - DNA, 190 bp, Homo sapiens
  misc_feature (1)...(190): n = a,t,c or g
gtggctacatggtaaaacgttgtctctgccaaaagaaaaatacaaaaaaatagctgggcattagtggcttgcgcctatagtccnnnnnnnnnnnnnnnnnnnnnnnnnnnnnnnnnnnnnnnnnnnnnnnnnnnnnnnnnnnnnnnnnnnnnnnnnnnnnnnnnnnnnnnnnnnnnnnnnnnnnnnnnnn

SEQ ID NO: 43596 - DNA, 350 bp, Homo sapiens
  misc_feature (1)...(350): n = a,t,c or g
ggaacagaggagtgataggatctgactcgtgctttcaaaagatcactctggccgccgtgctaagagcagaactaagaggacaatggtggaagccagaggctccattacccaggtacagaatgatggcttgaactagatagtagcaatgagtaagataaataagatgcagtctcnnnnnnnnnnnnnnnnnnnnnnnnnnnnnnnnnnnnnnnnnnnnnnnnnnnnnnnnnngatnnnnnnnnnnnnnnnnnnnnnnnnnnnnnnnnnnnnnnnnnnnnnnnnnnnnnnnnnnnnnnnnnnnnnnntaacgtacagtctgtctatggtctcccaacacttaggcagaggcg

SEQ ID NO: 43597 - DNA, 345 bp, Homo sapiens
gggaaataatctctgttagatattggcatatggtgttcaattttgggtctctcatacttgagaggataattaaaatgattaaaaggttgaaaaacaggtcttatcattgtaagttttaaaaaggggggaaagattttagcctagagaaagaaaagctaagagataacttcattatcatcttcaaatacaagaatagttttgccagggggatttttattaattattcttcatgaacttcaaagatttaagaggaaatggtcttaaattgaaggaggagcaattttgatgaatacgagaaagaattttttgatcatcaaagtggggaaatgtttgaatgactgccca

SEQ ID NO: 43598 - DNA, 351 bp, Homo sapiens
gtgatgccactgttatcgattctaaatttgagggcctagctttcccagtgatcgttggccatgaggctgcaggtattgtggaaagtattgggccaggagtgaccaacgtcaaaccaggtgacaaagtaattccactttatgcacctctatgtagaaaatgcaagttttgtctgagtccactcacaaatttgtgtgggaaaatcagtaatctcaaaagtcctgctagtgatcaacaactaatggaagacaaaaccagcaggtttacctgcaaaggaaaaccagtttaccatttctttggaaccagtacattctctcactacactgggtgtcaaatatcaatcttgccaaaat

SEQ ID NO: 43599 - DNA, 344 bp, Homo sapiens
ggtggaaaaggagtttggctggaggcagctgaaggccctgccttgaggccccggaatgaacagtgagagaaaggttaggatactgggactggaaatgcaagagagaaacattcccagggaaaagcttacacctgggaattgaggtagagagaatactgaagcgtttacctacgtgtttttccctgtcacagaaaaaaggcattgctttggcaaatattttctgctgtaaaatcctgaactctgttagcttcctttccctgcccaccttgttttgcaggtaggcaacctgaggtggcctatttgaggtcagagttcatatctgggccaggtggagtttgctcccc

SEQ ID NO: 43600 - DNA, 131 bp, Homo sapiens
gtaacaacatgtactagttttttggtttcctgaataaccctatataatgcttgcaaacatgtctaagtttgcataaggtagtgcatattaaatagtaataacttttagcatttggggtttttttttttttt

SEQ ID NO: 43601 - DNA, 350 bp, Homo sapiens
gtcagatatctggttgtctgcttgtgattaagggcagggaagacattcctgaattcaaaaaaggggatgtgcaaaacttatattctgagccccaatgttgggtgatctctgagggctgactgtttgtggaacccccagtccggtggctgggtcttttgttgtgggctggtcaggtttctagagctccctgaagtctggaagctgggtttgaattgtgcgatgtctgccctttctttttcaaatatgatagagagttcagtgttctcgttttccttttatagaattttttattagtagcttcttaggtacgtgtttataaatagagagcttttatttctcatcattggctg

SEQ ID NO: 43602 - DNA, 350 bp, Homo sapiens
  misc_feature (1)...(350): n = a,t,c or g
gnnnnnnnnnnnnnnnnnnnnnnnnnnnnnnnnnnnnnnnnnnnnnnnnnnnnnnnnnnnnnnnnnnnnnnnnnnnnnnctcgtttttaaacaattttttaaaaatgnnnnnnnnnnnnnnnnnnnnnnnnnnnnnnnnnnnnnnnnnnnnnnnnnnnnnnnnnnnnnnnnnnnnnnnnnnnnnnnnnnnnnnnnnnnnnnnnnnnnnnnnnnnnnnnnnnnnngataatacctttttgctgtgtatgggggcaacagttagaatttagagaccttaaaactagtataaattctttcacagtggatatgatttgctctccatttgagaaaaagtttatgcatgtcactga

SEQ ID NO: 43603 - DNA, 340 bp, Homo sapiens
gggattacaggcctgagccactgtgcccaggcagttctacatattttaaatatttttctggaattaataacaataatgacaacagtacctaccatttgttgtatgtgatttgccttggacactgtgtaatgctttataaacagtggcatatttgagtcgatgtgatgaatttatctcgatgtttgttttggttggttattgcattgtgtaatctgattatgtggagaatttgcccacatatccgctgctcgctgagccagtccctcctgtattttatgacctgtgaagccctgtgctgcttcctgctgagccatactttgctttttattgagccctgaat

SEQ ID NO: 43604 - DNA, 350 bp, Homo sapiens
gagattttaatgaggaagaataactctttagaatatattctgagcgagctgtttgcatgacagtttcagacgtggacttaaaatcatccacctataaactgcaaggggtcaagtttgtgttcctgtttggttcccttgacaaccaaaaggtgtggctcagagtttctggggagtacctgctgcggtgcacgtgacatgggagtgggtgtgtgtgtgtgtgtgcaggtatgtgcacatgcatgagtgaatgtggcccctgccctcaggcctttaccagtgccaagtgtgaacttccagaatgaatctctcctgccatccctctgcccgtctttctccccaggtcccctgtt

SEQ ID NO: 43605 - DNA, 352 bp, Homo sapiens
  misc_feature (1)...(352): n = a,t,c or g
ggagtgaaactccgtctcaaaaataaataaaataaaatgaatgggagaaaatcgtgtagccgcacctctacaaatcaaatccaaccaagtcagtcaagaaaaggtcatcccnnnnnnnnnnnnnnnnnnnnnnnnnnnnnnnnnnnnnnnnnnnnnnnnnnnnnnnnnnnnnnnnnnnnnnnnnnnnnnnnnnnnnnnnnnnnnnnnnnnnnnnnnnnnnnnnnnnnnnnnnnnnnnnnnnnnnnnnnnnnnnnnnnnnnnnnnnnnnnnnnnnnnnnnnnnnnnnnnnnnnnnnnnnnnnnnnnnnnnnnnnnnnnnnnnnnnnnnnnnnnnnnnnnnnnnnnnnnnnnnn

SEQ ID NO: 43606 - DNA, 350 bp, Homo sapiens
  misc_feature (1)...(350): n = a,t,c or g
ggcaagacaaatacggatggggttcccctaaccaagaagggaaaggcagcctcttgggacagcgtgactgccctaatgaagactattttaggctcacctggctaaaccataaatccaattttatcatttcctcacctaaaaccctctgttgcaatggttgtcaaactccaatatgcaactcctttaacaagccttctgggtgagtttacacgacttaaccaggtgccacccccagatccctactgcatcaagctctgggggtagagcctaatnnnnnnnnnnnnnnnnnnnnnnnnnnnnnnnnnnnnnnnnnnnnnntcaggactgcactttggggaccactgttccca

SEQ ID NO: 43607 - DNA, 373 bp, Homo sapiens
  misc_feature (1)...(373): n = a,t,c or g
ggactgaaaggtctacttttaatgtatatatgataacttgcagttggtttccctctcccctccccccctttaccttcagtctgtgagagcatgaccacagggtcaagggaatcttttccattggagttatgtacataaaaacacatcgacattttgacatttcacaatgcgtggctacaatctgtactgctattgggatcctttgtccttagaagccaaattaaggaagagaaagcaggacaganananagaangaangannnaggganactttacagggtgtgctgatctggaagnacnatctatttctttngnagncttttttntatttctcctctttctcttttcctggttcgnaggaagctccgntgct

SEQ ID NO: 43608 - DNA, 375 bp, Homo sapiens
  misc_feature (1)...(375): n = a,t,c or g
ggacaggatgcccagatagggactaatggatgtggggcatctactttagttgggaggccagggaaggcctttctgaagcaataaagctgaagctaaactatggcacaaaagcccgtccctggaatgttgggaggtgttccagaccaaaggtgtagcacacatgagggtcctgaggctggacatctcctggggctagctaccagtgagagggtatcagctggttttcacacagcagacctggtgttgcaggtatatttggacagatgcatatatctggactctctggaagtcccagttttgctgaaagataagcgtggcacatcctatcattctgaaataggacacngtgagacaganganggcangccanncttc

SEQ ID NO: 43609 - DNA, 370 bp, Homo sapiens
  misc_feature (1)...(370): n = a,t,c or g
ggcaaatttatgtggccatgtgtgctttactatacttctttgctcatgtaagtttactctgtatattacactttcaggatagattctgttaattgcattttctttaatgaccagtagcatttcatgcttgtaaatgaaagactatggtttctcatgtcttctgtaaattcctacctcagatttgtctgtatcttgagtctggctttccagagattcagttgtttcagaggaaaaaacacagggtttaagtcaaggagaacttggtttgaatcctggctctgctgtgtgtgaacttgatgacttcaggacagctccntaactgntgngacanttaananggntaccagggngggcgccggnggccaccccc

SEQ ID NO: 43610 - DNA, 367 bp, Homo sapiens
  misc_feature (1)...(367): n = a,t,c or g
ggtgtttaggagacagaagtttgtgagaaacagaagagggactctttggtccagactttgatgagagctcacggtttcatttattcagtgcatttttttgagtgccgagcgctggagatacagatggaaaggtccgcgctctcccagaatgtacagttaggagggagtgtagtaagaaagataggcattgtgnnnnnnnnnnnnnnnnnnnnnnnnnnnnnnnnnnnnnnnnnnnnnnnnnnnnnnnnnnnnnnnnnnnnnnnnnnnnnnnnnnnnnnnnnnnnnnnnnnnnnnnnnnnnnnnnnnnnnnnnnnnnnnnnnnnnnnnnnnnnnnnnnnnnnnnnnnnnnnnnnnnnnnnnnnnnnnn

SEQ ID NO: 43611 - DNA, 364 bp, Homo sapiens
ggcctgatagaatggcccatctttcagtgtaataaagtccctgttgctaaataacctctgggtcctttccaattctaaggctttttaaatgtactttgaattttcctctgtataggttattttgcagctagatgtggagaaccttttcactgtttttctccctgtctgtcctctcccagcctcctgccccatgttggtgtctttcatggacatttagagcaaccctgtgtgaacatatcttcatatctgtcctgtcctaattctgtaataagtcaaccacaaagctcttttcctcctttaagtctctgaaatctgcatgactagaatttctcttgcaggccggcagtctgagaatgggcatgag

SEQ ID NO: 43612 - DNA, 375 bp, Homo sapiens
gcaagggtttaattagtactccttttaataaattagtttgtggtacccaaccgttaaaactcatatgtgcctgacactgttcttagcgtgtatataaacagaacctcatttcatcattacaaacaaccctgttaggccagagtacttttatgttcccattttgcagatgagaaaaccaagattagaggaaccaagtagttctatgagattttgtagcttataagtcaggagtttgaaatttaaaccataagagtctgattttagagctcataatcttaacaactgactatatttgaatgcatttatacatttattcgtagtcaaacttaacatgtttttaaaaattttatattttgcctaattcctgataatata

SEQ ID NO: 43613 - DNA, 370 bp, Homo sapiens
  misc_feature (1)...(370): n = a,t,c or g
gcaatatttttttttctccagaaatnnnnnnnnnnnnnnnnnnnnnnnnnnnnnnnnnnnnnnnnnnnnnnnnnnnnnnnnnnnnnnnnnnnnnnnnnnnnnnnnnnnnnnnnnnnnnnnnnnnnnnnnnnnnnnnnnnnnnnnnnnnnnnnnnnnnnnnnnnnnnnnnnnnnnnnaatgtgtggaggtgggganctcgnnatgctgttnaagatggtcncaaactctggtctcaagngattcccctgcatngntctcctaatnactgcnattatntgncaccnnccntntnatcacctnaaangnctccntncttcactatantctcannctnanccactcttnantgntnnaancnntcnttcgcctc

SEQ ID NO: 43614 - DNA, 360 bp, Homo sapiens
  misc_feature (1)...(360): n = a,t,c or g
gctaaaaaatatatattttcaacattaaatttgtgtaactctacaattttagatttagttggaactgattattatagcttcaatttcctnnnnnnnnnnnnnnnnnnnnnnnnnnnnnnnnnnnnnnnnnnnnnnnnnnnnnnnnnnnnnnnnnnnnnnnnnnnnnnnnnnnnnnnnnnnnnnnnnnnnnnnnnnnnnnnnnnnnnnnnnnnnnnnnnnnnnnnnnnnnnnnnnnnnnnnnnnnnnnnnnnnnnnnnnnnnnnnnnnnnnnnnntagacatgggatcttgctatgtngngcangctgnctcaaactcttgatctcaagctcccctgctgccttcaaagcnntgggatcac

SEQ ID NO: 43615 - DNA, 373 bp, Homo sapiens
  misc_feature (1)...(373): n = a,t,c or g
gaaaagacagaggtctaaaaataaagaaggagtacagtttgggcatggtggttcacccctggagnnnnnnnnnnnnnnnnnnnnnnnnnnnnnnnnnnnnnnnnnnnnnnnnnnnnnnnnnnnnnnnnnnnnnnnnnnnnnnnnnnnnnnnnnnnnnnnnnnnnnnannnnnnnnnnnnnnnnnnnnnnnnnnnnnnnnnnnnnnnnnnnnnnnnnnnnnnnnnnnnnnnnnnnnnnnnnnnnnnnnnnnnnnnnnnnnnnnnnnnnnnnnnnnnnnnnnnnnnnnnnnnnnnnnnnnnnnnnnnnctgggcgtggtggacgcacctgtagcccagctactgnggaggctgangcaggaaantcacttgaacc

SEQ ID NO: 43616 - DNA, 373 bp, Homo sapiens
  misc_feature (1)...(373): n = a,t,c or g
gaaaacgtcaagatgtatacgttggcgaagnnnnnnnnnnnnnnnnnnnnnnnnnnnnnnnnnnnnnnnnnnnnnnnnnnnnnnnnnnnnnnnnnnnnnnnnnnnnnnnnnnnaactctactaaagctagaactgccatacgacctaaccctctttcttctggatatatacccaaaggacatgaaattgaaattgccattttgcaacgatatatgtactctatgttcatttcagnantattcacaanagcgaaaatnnggagtcaangtgagtgatcntcannggncnantanatnactngtncgcngtgtggatgcacgnntcnnattttnctgtgnncnggncttctnctgnnagaantctaanccntgat

SEQ ID NO: 43617 - DNA, 353 bp, Homo sapiens
  misc_feature (1)...(353): n = a,t,c or g
gggctcggcgtggaagataccgggggacactcatgagggttggtgcaacgtcgtgactgggaaattaaggtcgagcgtccaggcccctgtgcagctggctcaagtcaaagtcctggtcctcttctccgcctccttcttcatcatagtaataaacgttgtcccgggtgtcatcctctgggggcagtaagggttctttgaccaccgctctcctccgaagaaacagcacgagcacagaatcanaattagcatagcangaattcctccnagaatccccaaantggcangaatttgcantcctgcttcgacaggctntgccttcctacagacgccgnnggccccttcacagtcacacg

SEQ ID NO: 43618 - DNA, 336 bp, Homo sapiens
  misc_feature (1)...(336): n = a,t,c or g
nnnnnnnnnnnnnnnnnnnnnnnnnnnnnnnnnnnnnnnnnnnnnnnnnnnnnnnnnnnnnnnnnnnnnnnnnnnnnnnnnnnnnnnnnnnnnnnnnnnnnnnnnnnnnnnnnnnnnnnnnnnnnnnnnnnnnnnnnnnnnnnnnnnnnnnnnnnnnnnnnnnnnnnnnngttacttttttgtgtatatttcccaatagactgtggcttttttgaaggtgggctattctaatcatctttgnnccatcnntatgtantcacagtggnacccagtanacattcanatntgctgtngtgtctccagaataaaagngccaggtcctcctgcattgcacca

SEQ ID NO: 43619 - DNA, 344 bp, Homo sapiens
  misc_feature (1)...(344): n = a,t,c or g
gcacaactgcaacttttgataaactcatggactttagagctgaaaaatgatgctaagaaaattgatctttcactgaggagaaaatctaagtacagagggagtagatcacttagccttatacaaatggcttattaatactgaagcaaggcatcttgcctagtatatcactttattgatatcttaatattagaaacttgctttaacatcaaagttggtatatttgcatctctgtataaagagagcttgcaaataggaatttaggtgttatccttttcaagctttggggtgnttcnaggaaanacggctgcaaaangtnncttttcanttgcngnattcgcttatcc

SEQ ID NO: 43620 - DNA, 346 bp, Homo sapiens
  misc_feature (1)...(346): n = a,t,c or g
gaactggatataataaacagggtagagaccagaggaagtaaatactgtttatccattctgtacatggttactaagttaatgtcaggtttctatttggcccttgaaaaaccactccaagtaggtgagaagtgtctgtaagtaagttaaatttttgaatgatgacggatgtcttgataaagcgcagtggcattcacagggaagtttagttggccctgccctggatgtccttgctttagcatcttgctgctttattgtaacatgctttcttaccaccttcttagaagtactagttggatcccaactgtggctcctcagtcaatggtaagntagnntttgtgncctgact

SEQ ID NO: 43621 - DNA, 351 bp, Homo sapiens
  misc_feature (1)...(351): n = a,t,c or g
gaaacactggaaaagtggagaacaagttgattgtgattagatcaacacttattcttctactagggatgagcacattgctccctcatataaagttacagaactgtcttgtacagttctggcggtggtggtgatgatgatgctatatgatgacctngcactgnccccntttatcgnncatgctgganantacnttaganntnatctggnntcatagcgatncccctgcctcttnctcncatccatctgcnattacnantcccagtcnctangctntgtncntatatnnatntnctcccnntctacacaacttncntttcannctntntcttatctcnttagctnaacantgct

SEQ ID NO: 43622 - DNA, 348 bp, Homo sapiens
  misc_feature (1)...(348): n = a,t,c or g
gctctgctttacttataccattgggttttgtgctttctttttttttaatttttttaannnnnnnnnnnnnnnnnnnnnnnnnnnnnnnnnnnnnnnnnnnnnnnnnnnnnnnnnnnnnnnnnnnnnnnnnnnnnnnnnnnnnnnnnnnnnnnnnnnnnnnnnnnnnnnnnnnnnnnnnnnnnnnnnnnnnnnnnnnnnnnnnnnnnnnnnnnnnnnnnnnnnnnnnnnnnnnnnnnnnnnnnnnnnnnnnnnnnnnnnnnnnnnnnnnnnnnnnnnnnnnnnnnnnnnnnnnnnnnnnnnnnnnnnnnnnnnnnnnnnnnnnnnnnnnnnnnnnnnnnnnnnnnnnnc

SEQ ID NO: 43623 - DNA, 346 bp, Homo sapiens
  misc_feature (1)...(346): n = a,t,c or g
ggagacttgaagaggaagcagtttgaaggtggaaggaagagaaagaaggcagcatgagatgagatttgaatgggagtcaggagccaggccatcagggtttcatcagacagagtgggaaatttggatannnnnnnnnnnnnnnnnnnnnnnnnnnnnnnnnnnnnnnnnnnnnnnnnnnnnnnnnnnnnnnnnnnnnnnnnnnnnnnnnnnnnnnnnnnnnnnnnnnnnnnnnnnnnnnnnnnnnnnnnnnnnnnnnnnnnnnnnnnnnnnnnnnnnnnnnnnnnnnnnnnnnnnnnnnnnnnnnnnnnnnnnnnnnnnnnnnnnnnnnnnnnnnnnnatcttggcc

SEQ ID NO: 43624 - DNA, 351 bp, Homo sapiens
ggctgcctccatgcctgtggacattgccaagacccgaatccagaacatgcggatgattgatgggaagccggaatacaagaacgggctggacgtgctgttcaaagttgtccgctacgagggcttcttcagcctgtggaagggcttcacgccgtactatgcccgcctgggcccccacaccgtcctcaccttcatcttcttggagcagatgaacaaggcctacaagcgtctcttcctcagtggctgaagcggccgggggctcccactcgcctgctgcgcctatagccactgcgccctgggggcctgggctctgctgcctggacccctctatttatttcccttccacaagtgtgg

SEQ ID NO: 43625 - DNA, 352 bp, Homo sapiens
  misc_feature (1)...(352): n = a,t,c or g
gcagttttgcaagtaatttccagtctttctttcctgtgttagtatggtcttttaaagtaattgagcgcnnnnnnnnnnnnnnnnnnnnnnnnnnnnnnnnnnnnnnnnnnnnnnnnnnnnnnnnnnnnnnnnnnnnnnnnnnnnnnnnnnnnnnnnnnnnnnnnnnnnnnnnnnnnnnnnnnnnnnnnnnnnnnnnnnnnnnnnnnnnnnnnnnnnnnnnnnnnnnnnnnnnnnnnnnnnnnnnnnnnnnnnnnnnnnnnnnnnnnnnnnnnnnnnnnnnnnnnnnnnnnnnnnnnnnnnnnnnnnnnnnnnnnnnnnnnnnnnnnnnnnnnnnnnnnnnnnnnnnnnnnnn

SEQ ID NO: 43626 - DNA, 372 bp, Homo sapiens
gagagagctagcaccatgtctgggaatactgtttcagaaggttctgagccttacggatcgtccctgtcaccagagccacacagagaggagataagaagacctaggaaatgagtgagagaaaacagcagcggccctccacctgccccccaggccccgcacccagctccccaacagtgagcaggcctttccctgagaccaccagagacgctggggacaaggatgaaggaaaggagtcatttccttctccaaatggagccttgattctactaccgaccctccttgttctggatttcagctcatttctgaaaggacagagggtaatgaagatggaccaagatccaccaggagaagtcaaaaatatggagtggcatc

SEQ ID NO: 43627 - DNA, 358 bp, Homo sapiens
  misc_feature (1)...(358): n = a,t,c or g
gaaaatatacataattatgaggatgagagaattgcaaacttgaacagttctttcgctttctctccttttacttgaaaagctttcacaaagcttttgaaagatgacacagccttcatagnagcagnatgcnaattangttnttctgncaaganactcataaactannntanggaagancacaaangctnantcttantcttgcctttggattncgtaancaanagaatcttctgcatcannttttntcccactgcanctgnatattncattccnnantangtctcaagntgcatncnnnttctntgccgagcnnctcaantagttgcactcnagcanccannccattgctgccttttca

SEQ ID NO: 43628 - DNA, 366 bp, Homo sapiens
gaaatcattttcatgattttgtagctcaagaattagggcagtgctcaggtgggcagttgatttctctcttccatatagggttgacagaggtcccttagtgatatttagctgctgaatggactagtctggaaagtccaatatcactcttatgtctggtgccctggcagggatggctacacggctagaactgtcaaccagagtgcccagatgtggcttcttcagtatggcagcctcaagatagtgggacttctaacttgggagctcagggctccaagagtgaggggttctagtaagaatctacatgactttataaccttgtcttgaaggtcacatacagtcactgctgctctgcctattgattgaatc

SEQ ID NO: 43629 - DNA, 357 bp, Homo sapiens
  misc_feature (1)...(357): n = a,t,c or g
ggaaataatcacaagctaattaccatatctgttacctaacacaggtggctgtcgtttggtgagaacacttaagatgcaccccaacacttttccaggacgcanngcantcttcttcccctaangaccctcgncnttaaganctanccccaccaagggacctgtgcacctgccaggcngncctgaccntcacgcnggctacgccctgtncangaangacatnnanncggnnncacncncnnnantctggctaccgnnaaannccccggnctcttgggangggcttnnttncctgctnannccttccntntctccctggcnggnctcnagagnnanccannanctggngcanggnacacg

SEQ ID NO: 43630 - DNA, 363 bp, Homo sapiens
  misc_feature (1)...(363): n = a,t,c or g
gaactactagatgccttttagatgaactgaaatgaagtctgaatagaaaaacaatttagctgtgtgtcttgtagagtgaaaaaacaagaaaaaataatttaaaatgaatgttgagagtaaggatgactttgctgcataactaagtcagtaaaatgtataaatgatgagtagtagtgaaatcagaattcttatagttgaaaatcaaaatatagcacgtatattgtgacatatcaaaggtacaaaaatttagtttgctttgcttacaaattttaaactaacatgaggaaatattataaatacattaacaaaaaactatattgatattagnccttatatttctattatactatttcatattttcac

SEQ ID NO: 43631 - DNA, 362 bp, Homo sapiens
  misc_feature (1)...(362): n = a,t,c or g
gctccgttgctgtatgcactttattgtcacaaattatttgatggctgttcataatcttaaaaacaaaaactgtgagatcaagtggtgacgtctaggaggatgtgcaatgtgaaagctccctacttaggtaaataggtctggtgagtacctgtggcaaaattaaagtctcattcctttgaatcttaatatttaaaaattgttgaaatttctcagtttctctaccttgcagtacccactcattcttaattggtctttaaagatttattttacagataaaaaaatttctctaagatacccataataggaagtatttcatntgnaagtcnaatcanttnttatatactaatcacgtgaaaactatt

SEQ ID NO: 43632 - DNA, 372 bp, Homo sapiens
  misc_feature (1)...(372): n = a,t,c or g
gagaatattgcttttaaaggaatttgtagttctttgttgggaaaattttctattattttgcttcctcataagtgatgctcatcttttcaaagaaatacatatacatttttaagtgtatgtatgagtagtatgtgtatnnctgcctacnaantcntcccccgnccanaccattctgnnntacctccnactataacnnggcannnngcgnganccctntaaannnttntctatntcctacncactggacgcccnntngccgcntcnnactgcccnncnnantnggcttgccgcnnangctccccntatccnnncatggctcnccgacnacccgcnnccaannngnncctnnccncnagnnganncnnncacctg

SEQ ID NO: 43633 - DNA, 349 bp, Homo sapiens
  misc_feature (1)...(349): n = a,t,c or g
ggattaatgtgaaatgtgtaacttctcaaattagtgctcannnnnnnnnnnnnnnnnnnnnnnnnnnnnnnnnnnnnnnnnnnnnnnnnnnnnnnnnnnnnnnnnnnnnnnnacttggctaatttgnnnnnnnnnnnnnnnnnnnnnnnnnnnnnnnnnnnnnnnnnnnnnnnnnnnnnnnnnnnnnnnnnnnnnnnnnnnnnnnnnnnnnnnnnnnnnnnnnnnnnnnnnnnnnnnnnnnnnnnnnnnnnngaccatctctttaatatttgcaaagattgatacaacactgcctctttaatatttgcaaaattaaacttgctgtcagtatacatttgtgaatttgttc

SEQ ID NO: 43634 - DNA, 350 bp, Homo sapiens
  misc_feature (1)...(350): n = a,t,c or g
gagaaagaatagtccaggaggagggaagtccatgggggccaagaaacctcatgatccactggagaaaccacaggtgcttcctgatagctggggtgaagcagagttggaaggagggttggaaagagcgagggaggaacttagaattcccttggagtgaattcatatatgccctgccagggagtttgcaggtcattctcaacacaacgagaagctatgaacatttccagatttggcttttggaaagatgtctgtggaagcaagggatggagggatggacagagtggatgagggtatntccnncctgtnttcccntccctctannctncncntcnttccntcctnctttcccg

SEQ ID NO: 43635 - DNA, 348 bp, Homo sapiens
  misc_feature (1)...(348): n = a,t,c or g
gcactccctacatcctggaacctggagagtaccccacctcagaggcctggggcacatcggaccccagcgtgggctccctgaagcccatgagattgggctgcccaagtgtggagaagccaggggagcccagggctgtggtgtatgaggccccaggctttcanggccgnanctgggaagngagccgagacatctacanccttcancagccagaggacagccagagcccccacctggcctctgtggggtccctgagagttctcngaggctgntggntngggctacnagaaggagggnttccngggccaccagtatctgctggaggagggggaatacccacantgctcacac

SEQ ID NO: 43636 - DNA, 347 bp, Homo sapiens
  misc_feature (1)...(347): n = a,t,c or g
gctnnnnnnnnnnnnnnnnnnnnnnnnnnnnnnnnnnnnnnnnnnnnnnnnnnnnnnnnnnnnnnnnnnnnnnnnnnnnnnnnnnnnnnnnnnnnnnnnnnnnnnnnnnnnnnnnnnnnnnnnnnnnnnnnnnnnnnnnnnnnnnnnnnnnnnnnnnnnnnnnnnnnnnggaactcttaattctttctcaaatcagttagtcctggtgcataagaaataccaatacctctctaaaaaaaaattatcttttatgactttctaaaataaaacatcacaatatgaatttcaaactgttctgtgttctactgatcccaggcaaaacacacacatgcacacacacacacgaa

SEQ ID NO: 43637 - DNA, 345 bp, Homo sapiens
  misc_feature (1)...(345): n = a,t,c or g
ggttggtgattggctggatgccatcaagatggggcggtacaaggagagcttcgtcagtgcggggtttgcatcctttgacctggtggcccagatgacggcagaagacctgctccgtattggggtcaccctggccggccaccagaagaagatcctgagcagtatccaggacatgcggctgcagatgaaccagacgctgcctgtgcaggtctgacaccggctcccacggggaccctgaggaccgtgcagggatgccaagcagccggctggactttcggactcttggacttttggatgcctggccttaggctatggcccanaagctggaagtttgggaaaggcccaagc

SEQ ID NO: 43638 - DNA, 344 bp, Homo sapiens
  misc_feature (1)...(344): n = a,t,c or g
ggaagttgaggatttgaatgttgtgattattatatccagataaagttctagcctggcacagtgcaggcacgtgcctgtggtcccagctgcttgaagtgggaggagannnnnnnnnnnnnnnnnnnnnnnnnnnnnnnnnnnnnnnnnnnnnnnnnnnnnnnnnnnnnnnnnnnnnnnnnnnnnnnnnnnnnnnnnnnnnnnnnnnnnnnnnnnnnnnnnnnnnnnnnnnnnnnnnnnnnnnnnnnnnnnnnnnnnnnnnnnnnnnnnnnnnnnnnnnnnnnnnnnnnnnnnnnnnnnnnnnnnnnnnnnnnnnnnnnnnnnnnnnnnnnnnnnnnnnnnnnnnn

SEQ ID NO: 43639 - DNA, 101 bp, Homo sapiens
gaaaaataagtggggggatagatgaaacaagattggtaaaatgttgataattgttgaagcaatgacgtctatgtctgttgtaaaaactttttttttttttt

SEQ ID NO: 43640 - DNA, 350 bp, Homo sapiens
  misc_feature (1)...(350): n = a,t,c or g
gagaaaattttgacaaataaaaataccaggctaagtgtgtacactttaaatttatgatattattctggctnnnnnnnnnnnnnnnnnnnnnnnnnnnnnnnnnnnnnnnnnnnnnnnnnnnnnnnnnnnnnnnnnnnnnnnnnnnnnnnnnnnnnnnnnnnnnnnnnnnnnnnnnnnnnnnnnnnnnnnnnnnnnnnnnnnnnnnnnnnnnnnnnnnnnnnnnnnnnnnnnnnnnnnnnnnnnnnnnnnnnnnnnnnnnnnnnnnnnnnnnnnnnnnnnnnnnnnnnnnnnnnnnnnnnnnnnnnnnnnnnnnnnnnnnnnnnnnnnnnanaccagaccctgtctcaaac

SEQ ID NO: 43641 - DNA, 344 bp, Homo sapiens
  misc_feature (1)...(344): n = a,t,c or g
gaaattttaaatctgtaattagagattttcttcagattgcagagccaattgaatgtcaaaactggagaggaccataagtatagcctccaataattcataaaagatttgtttgaaagtattttggaagggatgttcatgatcctttttatttttatctttatttatttgaaatagtttggatgctgctggaaccgagtgtttgaactcaggctttttttttccccccctttttaaaannaataattcttttttttttnaaaaaatntnttnncagttaaaanntttntttggnncnaanggatttaaccggganncaggntttntncctctnttncccatncacc

SEQ ID NO: 43642 - DNA, 377 bp, Homo sapiens
  misc_feature (1)...(377): n = a,t,c or g
gcattaaccatcctctctttatctccaccctattccctgtacccgcctacacaannnnnnnnnnnnnnnnnnnnnnnnnnnnnnnnnnnnnnnnnnnnnnnnnnnnnnnnnnnnnnnnnnnnnnnnnnnnnnnnnnnnnagattttaacatagttgactgttcataatgtaacttagaagccacaagcttatttaattgtgaagaaaaatataaggtagcaattaagggatagattctagagccagactgtgttaacatctcagctctgtgacatatgagctgtgtaacctcgggaaaattacttcactctgcagtatgtttcattcatttaaaaaacataaatgacagtatctgtctcacaggattgtggtgatgg

SEQ ID NO: 43643 - DNA, 370 bp, Homo sapiens
  misc_feature (1)...(370): n = a,t,c or g
gcggcacgagcttgtaaataaatatatacagtagttttatcaaaatatgctttaaaaatacatgctgtttctcaattattttaaaatagttgtcccattttaataaatataaaaagctattcttagagtttcttatactcccttaatcttagaaaatcagtcnnnnnnnnnnnnnnnnnnnnnnnnnnnnnnnnnnnnnnnnnnnnnnnnnnnnnnnnnnnnnnnnnnnnnnnnnnnnnnnnnnnnnnnnnnnnnnnnnnnnnnnnnnnnnnnnnnnnnnnnnnnnnnnnnttaccctagaacttaaagtataatcattaaaaaaaaaaaaannaaaatntggggnatttttnttntgancagggagttt

SEQ ID NO: 43644 - DNA, 382 bp, Homo sapiens
  misc_feature (1)...(382): n = a,t,c or g
gattatagttgatttttctatataggatacttatgtatgtatatgtatgtttttatatgtgtgaatggagttcatcatcaacacagacattataaatcagaaagacaaaataaaaatattgagtgggtagccaaattctaatcatttataataaaagggatagtaagtaccatctgtttaatgtaaaaaaaaaaaccaactgataaaatgcatacatatctagtaaattaaaatcatggagtaattcatataaaacaaaatatgtataaaatgtcaacatattccattagggtgcgattgatttaaacatgtnctatctacataatagtatgatatgagaaatagaaaaatcttttgattatgtttggngctaaccacaatt

SEQ ID NO: 43645 - DNA, 383 bp, Homo sapiens
  misc_feature (1)...(383): n = a,t,c or g
ggaaagcaaatgtatctaggtgagatgaactgatctttatataaagtcagttgcatttatgtagaagtaaatgtttcccgtagaagcaggcgtgtgcgggnnnnnnnnnnnnnnnnnnnnnnnnnnnnnnnnnnnnngatttctgtcaaaatagccattggtatactttattaaagaaagtcaattaagtaccagctgagttcttgtcacttcggtttgttgcatacaacactactaacttgtagaaaacaaatctaacttccacccaagcatcccattggttttcttgtttctgccttatttttcacagacattcttaccctccccatctgcttagcatgacaccctaccccttcccagtctgctggacacttggggcacgg

SEQ ID NO: 43646 - DNA, 381 bp, Homo sapiens
  misc_feature (1)...(381): n = a,t,c or g
gactgaaaattggaagggggcactggaagagtatattgttaaaattttatgggaagaaaagatacaattatacctaggcactagatatttctgtaaatccatagctgtacagttgctcccattggagaagcatgaaggcattcttaggcagacattctgtcagtttctatctctctctttccaaaatcaaataggagtgatttttttatcgtgtttaattgagatgcaattaaaatgtacagtagttatgacagttgtatacaccctatggccatcacccaaaacaagaaatagaacacttctgnnnnnnnnnnnnnnnnnnnnnnnnnnnnnnnnnnnnnnnnnnnnnnnnnnnnnnnnnnnnnnnnnnnnnnnnnnnnn

SEQ ID NO: 43647 - DNA, 383 bp, Homo sapiens
ggagagagctagcaccatgagcttcaataccctggaagaggaagaaggaaaagtatagcaaacatttgtatatcaaagtaatatcaaagagcatgtgacaaggcctggaaaaatggcacaaaaaaaaagaaaaaggctgaaaaggtggtaaagatttagaaatcagcggggtcactcccaacagggatactgtcatcctgaaggtgagatcagatctgggccttaagggatggagaattctgatgggaacagaatactctgggatgtaaaaacagcaggaaaaagatccccagaacagagaaggcagggcgggttcagagcatagcaatcttgctaaggagtagcagggaatgatgaagaaaatgtcacataggttgcagtga

SEQ ID NO: 43648 - DNA, 381 bp, Homo sapiens
  misc_feature (1)...(381): n = a,t,c or g
gtgttcctcctgtgtctaaccacactgctctcaccctgcctgcttctcctccttaagtgaagatcactgactgaaaaaaaacaggttgtagaaaagcatgtataatatgacctcattttactaaaaatacatatgcaggctcgtgcatggagagagatcaggattggtgagcaaagtggtgatctctgagtgcgggcatgcatagttggtcattttcagtttttgtttatctgcattttcttcttctaacatgtgcatagtttctgttataagttattttctctttaaggggagaggtgagatcaaaaaatcaaaaataaaaacnaaaaacaggggaaatgagaagactagtgctaataatgcttcaagtcttgatgccat

SEQ ID NO: 43649 - DNA, 340 bp, Homo sapiens
gaagacagctttccagattagcatggccaagccaaggcccaactcagctgaggagagcaatgggcccatctatgcctttgagaacctccgggcatgtgaagaggcaccacccagcgcagcccacttccggttctaccagattgagggggatcgatatgactacaacacagtccccttcaacgaagatgaccctatgagctggactgaagactatctggcatggtggccaaagccgatggaattcagggcctgctatatcaaggtgaagattgtggggccactggaagtgaatgtgcgatcccgcaacatggggggcactcatcggcggacagtggggaag

SEQ ID NO: 43650 - DNA, 326 bp, Homo sapiens
  misc_feature (1)...(326): n = a,t,c or g
gaggtggtgcagaaacatctgctgtgggagtggggtccccagcactgggtgcttcggccagctacccccgaccccaggccccctcataggctgccctcccataccctcctttctcgtcttttcctcctacaggtgctacacccctgtgagagtgttttggagtgttttcattgttagggtggagggaggctgttnaagncctggaaaggtgactcctgtgttatccatganggtccttgcncggatgnntggnnnagngccctngggtgtgntnncttctatacnaaactatgtaatatttgntactattttttagaaatgataag

SEQ ID NO: 43651 - DNA, 333 bp, Homo sapiens
  misc_feature (1)...(333): n = a,t,c or g
gaacaatnnnnnnnnnnnnnnnnnnnnnnnnnnnnnnnnnnnnnnnnnnnnnnnnnnnnnnnnnnnnnnnnnnnnnnnnnnnnnnnnnnnnnnnnnnnnnnnnnnnnnnnnnnnnnnnnnnnnnnnnnnnnnnnnnnnnnnnnnnnnnnnnnnnnnnnnnnnnnnnnnnnnnnnnnnnnnnnnnnnnnnnnnnnnnnnnnnnnnnnnnnntcgcaactgactaatcagtgattcaggatcataactctatcagtggaactttcttctcattcagataatgtgctagttatacagatgcacaagctaggctttactttcaaattaatagtccaa

SEQ ID NO: 43652 - DNA, 338 bp, Homo sapiens
ggatttttaaattccatgatgtgagtctgaggggacttagtatgtagcactttcctggctccgagttagtagcaagttgaaaactaagacaaaggattaacaaatgcagagagtatcatgcaaaatacttccatgtagtgctgtcagttcagtgcagaaacctccattgtgttttgtttactgtattgttgtaaggttaataaaattcctacagaagccttcatacctgcctgtgagttcattgcactattccaaatttatgatgaagtagattttttgtagtaacatctttatcatccttaaagactaggatagagaatatagtgtaggatgacagc

SEQ ID NO: 43653 - DNA, 340 bp, Homo sapiens
gaatcaggaaaaacagattaaaccaacaatgagatgctgtttcacagccatcagactggcagaaattttaaagcctgacaatgccaagtatctgagggtgaggaataggaggaattcacatacactgcaggagggggtgtatattggagattttggagttggaacagtggctgtcccctaccctagagaaactcccatacctccatgcagcaggggacacatgccaggagtgtgaggggcatcgtcatgtgcagatgcccagcctctggagaatggggaaataaattgtgatgtctttacatgatgatatgttatgggcccgggcgtgttggctcacgcc

SEQ ID NO: 43654 - DNA, 342 bp, Homo sapiens
  misc_feature (1)...(342): n = a,t,c or g
gattcaaaatagcacaccacgttaaatgacatttattgttttataaattgtatacaggttgagtattccatgcttgggactctagagtgtttcagttttgggattannnnnnnnnnnnnnnnnnnnnnnnnnnnnnnnnnnnnnnnnnnnnnnnnnnnnnnnnnnnnnnnnnnnnnnnnnnnnnnnnnnnnnnnnnnnnnnnnnnnnnnnnnnnnnnnnnnnnnnnnnnnnnnnnnnnnnnnnnnnnnnnnnnnnnnnnnnnnnnnnnnnnnnnnnnnnnnnnnnnnnnnnnnnnnnnnnnnnnnnnnnnnnnnnnnnnnnnnnnnnnnnnnnnnnnnnnct

SEQ ID NO: 43655 - DNA, 352 bp, Homo sapiens
gcggattccctgcatcttctccagcagcttgccacagtaagaaaggctcagaaaagggagagaaggcagagccagtcatgacacagagcctcaacagaggctggtctccagcatcaggcactgatgacattcactgagccacagcccatgcccagaaggtttccgacgttcacatagaccacaggccttctccagaagtaagcaccaacaggggctacaagatcactgacaaagaaatatatcagagtgccattctaacaaaatggattcttaaaaatacatgctgtgactgaggcagagtaattgcaagaagggaattgcaggaataacttttattgctctgtactgctcc

SEQ ID NO: 43656 - DNA, 347 bp, Homo sapiens
  misc_feature (1)...(347): n = a,t,c or g
gagaannnnnnnnnnnnnnnnnnnnnnnnnnnnnnnnnnnnnnnnnnnnnnnnnnnnnnnnnnnnnnnnnnnnnnnnnnnnnnnnnnnnnnnnnnnnnnnnnnnnnnnnnnnnnnnnnnnnnnnnnnnnnnnnnnnnnnnnnnnnnnnnnnnnnnnnnnnnnnnnnnnnnnnnnnnnnnnnnnnnnnnnnnnnnnnnnnnngtgggccgngcgcantgggtcacgtntgtantcccaacactttnggaggctgagggggncntaccacctnangctctgagntnannnnnnnnnnnnnnnnnnnnnnnnnnnnnnnnnnnnnnnnnnnnnnnnnnnantggctcggc

SEQ ID NO: 43657 - DNA, 206 bp, Homo sapiens
  misc_feature (1)...(206): n = a,t,c or g
nnnnnnnnnnnnnnnnnnnnnnnnnnnnnnnnnnnnnnnnnnnnnnnnnnnnnnnnnnnnnnnnnnnnnnnnnnnnnnnnnnnnnnnnnnnnnnnnnnnnnnnnnnnnnnnnnnnnnnnnncttcagtttggtgtgggtctcaatacacagaatgcaaactggaagtaattcagagttgttgatttcaaggcaaaaaaaaaaaaaa

SEQ ID NO: 43658 - DNA, 346 bp, Homo sapiens
  misc_feature (1)...(346): n = a,t,c or g
gtttttttttaataacagctttattgagctacaattcacatactatacaattcacccacctgatatgtacaatttagtgatttttagtattttcacatnnnnnnnnnnnnnnnnnnnnnnnnnnnnnnnnnnnnnnnnnnnnnnnnnnnnnnnnnnnnnnnnnnnnnnnnnnnnnnnnnnnnnncccccttcccttcccccactggttcttcaggcctaggcaatgactaaactgcgttctctctaaggatttgctaaacatctgagcagttgatgtaaattcagtcataccctatgtggtcttttgcgactggcttctttccctcagcaggaactgatttttaat

SEQ ID NO: 43659 - DNA, 343 bp, Homo sapiens
  misc_feature (1)...(343): n = a,t,c or g
gccctggcttaagctcagccaatagtaccatagatatgcttgacggaacatccaaccctagaagagactgtcacagtacaacccagaataaaaccaaagaacagaaactggcttgaataaggatttgaaaaacatgaccactggtggagagaaacataaagataaaangatgaagttaagtctcacgntnggctaatgantctttgtgtgtgcgngngtgngtnngtgctcaanntcactccnntggctgatgnctncanngtgnaatccatctacctaaatgcggangncgcgaacncncaccttnagaacnctcatanttcnctcatcacccgcnaacctt

SEQ ID NO: 43660 - DNA, 353 bp, Homo sapiens
gggaagaatttgcactgcgagaccaagataaatatcgctaccgctatcccaagggagagtcctatgaggatctggttcagcgtctggagccagtgataatggagctagaacgacaggagaatgtactggtgatctgccaccaggctgtcatgcggtgcctcctggcctatttcctggataaaagttcagatgagcttccatatctcaagtgccctctgcacacagtgctcaaactcactcctgtggcttatggctgcaaagtggaatccatctacctgaatgtggaggccgtgaacacacaccgggagaagcctgagaatgtggacatcacccgggaacctgaggaagccctg

SEQ ID NO: 43661 - DNA, 346 bp, Homo sapiens
  misc_feature (1)...(346): n = a,t,c or g
nnnnnnnnnnnnnnnnnnnnnnnnnnnnnnnnnnnnnnnnnnnnnnnnnnnnnnnnnnnnnnnnnnnnnnnnnnnnnnnnnnnnnnnnnnnnnnnnnnnnnnnnnnnnnnnnnnnnnnnnnnnnnnnnnnnnnnnnnnnnnnnnnnnnnnnnnnnnnnnnnnnnnnnnnnnnnnnnnnnnnnnnnnnnnnnnnnnnnnnnnnnnnnnnnngtcngatctcctgacctcgtgatccgnnnnnnnnnnnnnnnnnnnnnnnnnnnnnnnnnnnnnnnnnnnnnnnnnnnnnnnnnntgctggctcttaacacagganagtngagttggaaatctggtgtttnctaccc

SEQ ID NO: 43662 - DNA, 338 bp, Homo sapiens
  misc_feature (1)...(338): n = a,t,c or g
gtgagatcaaggcaccagcagattcatgtctggtgaagacccacttcctgctttacatggccaccttctggctgtgtcctagcatggaggaggggaaggctctggtctctttctcttcttatgacactaggtatgggagctcgatatacctgtgtctggttttgccaaataagtattgtttatttacttaatatgagaaaattcaagataaaacacccnattgaacggatnctganngaaaggctnaactntatcatacctntacgnganctnaanccnaatagcannangagcactataacancatgancggnccacgggtcnnncctgctgacccg

SEQ ID NO: 43663 - DNA, 333 bp, Homo sapiens
  misc_feature (1)...(333): n = a,t,c or g
gattgttgagtgacattcctagattaaagtgcccattataagttgaaactgtaagaaatatgattagtagcttagactcacaacacctagtttttcataattcacacagattcacagtcatggctggacgcattattcagactgagggatcgtgtgatgcagtcggtcgcacggctcttttccgtggctctgacattcgatcctgatttaatcattctggagtgttttcaactatttttggcagctgctccaagtaaggattttgacacttgctttgctttttggcttaaggaaaaaagaacangcattatacctctcttaaataataacatg

SEQ ID NO: 43664 - DNA, 208 bp, Homo sapiens
gtaaaactttgagctttgggattattctctcaaggaaatagtgacatttggtgaagagcctgtttggtgtggctatgtgaggcttagccaagaaaatgcaccatttttattaggaggttaggccatccgttgccacaaagtgtcagatgctaggcctagagcctggagaaaacttattttaaaattgatggggtgctggaggggttgg

SEQ ID NO: 43665 - DNA, 330 bp, Homo sapiens
gaggtgggggcagccagaaggggctgcactcgggattgttcttaaaacgctgactctagaaaggaagagaccgtggggcctggggagtctacctggaggcgaaggtgggtggccggggagtggccatctcctggatccaagtccggttgggccatcagcatcgggctccctgtgcccctcgcatctccaagtcggcctcattcgtgtgtcagatactcagtcgtgtctcctcggtgctaggccctgagctgaggctaggaactggggactccgaggtgggctgaacctcacaggtcccactgtccctgggaaatggtccagccttcctat

SEQ ID NO: 43666 - DNA, 348 bp, Homo sapiens
  misc_feature (1)...(348): n = a,t,c or g
ggctgggtcatgtaactgcatgcctaactgccaaactgttttccagaatggctgttcccatttcatacttttaaggaaaggattttggctggcagaaggcacttcccccctccagctggagggaagaagtatacagagatctagaacttgaaagtgcattgtgaacatggaacagcaaggggtttcgtgctgctgagaggtagtctgggtttagctgaagagggaacacaggtttgctcctcatttgttcagtcaagaagtattgaccgggcgcgnnnnnnnnnnnnnnnnnnnnnnnnnnnnnnnnnnnnnnnnnnnnnnnnnnnnnnnnnnnnnnnnnnnnnnnnn

SEQ ID NO: 43667 - DNA, 333 bp, Homo sapiens
  misc_feature (1)...(333): n = a,t,c or g
nnnnnnnnnnnnnnnnnnnnnnnnnnnnnnnnnnnnnnnnnnnnnnnnnnnnnnnnnnnnnnnnnnnnnnnnnnnnnnnnnnnnnnnnnnnnnnnnnnnnnnnnnnnnnnnnnnnnnnnnnnnnnnnnnnnnnnnnnnnnnnnnnnnnnnnnnnnnnnnnnnnnnnnnnnnnnnnnnnnnnnnnnnnnnnnnnnnnnnnnnnnnnnnnnnnnnnnnnnnnnnnnnnnnnnnnnnnnnnnnnnnnnnnnnnnnnnnnnnnnnnnncnangcntgnacacangacataccgnaaggacctgactnaacnctntngngctnattacctctccagag

SEQ ID NO: 43668 - DNA, 342 bp, Homo sapiens
  misc_feature (1)...(342): n = a,t,c or g
ggacaagatatcagtagaaaaaaatggacttgtatgagcaagattttgaataagaaaaaattcttgtgagacaagtagaggtctgattctcaagagcttaggactttaattcaggatatttagagatttttgaactacagcttaatatgtataaagttatattttgtgggagtagaagaggaanannanncntggacctcatanttctncncccaggtncctccagancccgctatnncccctanatccanancccctcnacncncctctcncccctccccncccnctcnacncctcancccctccngccccnccgntcccgccncccntcctccntccccc

SEQ ID NO: 43669 - DNA, 355 bp, Homo sapiens
gaggcaggcccccgtagccccagactccaggatggtacctatggattgagcgtccaagcctaccctggtactaagcaggattctgcagcccaaggttccagctcctccaacctccaccaccaggccagacccaattgatgcaagttttagacttgtcttagggccaggctggccccagtggccctgggcttagagctacctttagtaccaggctggctgtcacaggcaggcacctgtggatacaggcttcaagctgtcccagcttcaggccctctccaggtttcagaccagctgagagccaggttggccacacagccctgggcttcaggtctgcccagtacaaggccattccctg

SEQ ID NO: 43670 - DNA, 351 bp, Homo sapiens
ggttaaagagtacaaactttttactcagttctgattttggctctactttttaaagtagactatactagagatataattgcctcatactaaaaatgagattgataatactatctgaggatgacttgtattaagtgagataatgcatctaaactagtgttgtctggcacatggaaatctcttagtagatggaagtcacattagtatcttcagcacagattcattattcagcaaatatctgttgaataaatgatcacatatcaggtactcaggatatatgcactgttaactggtagtatctaactcggtaattggtatctacttagtatctggtaaggatatataaaagaaatc

SEQ ID NO: 43671 - DNA, 351 bp, Homo sapiens
ggaggggaagtaggggagctgatttgaggatcggagggaagaccagcgtggctggagccaagaacaaggtagggaaagagaggggcaacgcagggttcaggacgtagccgggtcctgaccgtgcaggcctgcggagcatggtgggaggcctgggtcttatcctcagcataatgtgtagtcactggacatttttaaagcagagtggcatgaccatatttctgtttgaaaagctcccctgaccatggtgtccaccatgaaaggctgaagagcctggagctgtgtccactcgtgaaaagattgggaccttagcgactgccattgctccctgtagagctctcatggggcacaagg

SEQ ID NO: 43672 - DNA, 350 bp, Homo sapiens
gaggaaaactgtttccagaaattgtcaaaagacagccaggtgaacaagattgtggtccgaggtggcacaggatgctgggctgaaaattacagcagcatgcacagcacttattgataggagaatgctcagctgtgctcctgagggcccttcagcctgctttgcattcataggcaatttatcctccttaatcactaaatcattaatggggatcaatagcaatgccacatcagtgaaggcaggggtgcatgcggggagaataattgcttgcttagtttttagtttagtggtgctaaccgggcttcgggtccattctgggaggaaacccttctcctgggtgttagagagaactg

SEQ ID NO: 43673 - DNA, 337 bp, Homo sapiens
  misc_feature (1)...(337): n = a,t,c or g
ggcaatgggtgggcagttgctggggtcagaatcgctgggctttaaccacacatgagagtctggttccctgtgagactgtgaattctgcagctgcaaaatgggcacagcaccagggctgcaaaggacccacataatgcctggcagatgcacntcttangccttncnnntggnngatgcttgtgttattactcntanntcnctanntnnntnanccttttccctgctnaacngantatctgnacctngntattnncctacntanccactttttccnacttcantttctcnnantgcnnnngtcncncttcacttacctancgtntnnnannntnatcag

SEQ ID NO: 43674 - DNA, 154 bp, Homo sapiens
  misc_feature (1)...(154): n = a,t,c or g
gaactggatattagaaattataattacctttgttaattttattatgtagaaaaagtccttgtttgcagatacatattagaaacaaagtgccctggccgggcgcggtggcnnatgactgnnntnngaacactttgngaggctgangnnnncggat

SEQ ID NO: 43675 - DNA, 340 bp, Homo sapiens
gaggaaaatggtgagagggttacacacaaaaaaggttaaactactctatgcatgtttctgcaatgtgttatctcaggaactcatttctgtagcccatcagggcaggagctgggctctcacctgttgataatattccataagggaggttcttccccacagtgtttagtcttccaacgctggtacagcctgacatgatgacattctactttcatgtcggtcatgctgcagggaaaattctgtgagtgtcctaataggctggaatcatttgctagggtgaaccccatctttggtgctcacttttctgttatcttgtaattagctttattctcagcaaatccaa

SEQ ID NO: 43676 - DNA, 313 bp, Homo sapiens
  misc_feature (1)...(313): n = a,t,c or g
ggtgtggaggtgtgccccaagtgatcctcccacctctcaagcctcagnnnnnnnnnnnnnnnnnnnnnnnnnnnnnnnnnnnnnnnnnnnnnnnnnnnnnnnnnnnnnnnnnnnnnnnnnnnnnnnnnnnnnnnnnnnnnnnnnnnnnnnnnnnnnnnncaagccccagaatcagngggtacaacactcggnncangggacaagaccacccncntgctgctncttnanctngnagagctggactgccccangctgnnaggaactctgtnangactcnctntaancttnngannntatnannncnntgtngact

SEQ ID NO: 43677 - DNA, 330 bp, Homo sapiens
ggataaatgctatggaaaaaggacaagtagagcaataagatcaggagtgctaagtggggagaggtcaggctgtagttagggttatatttgaacaacaatttgaaggatgcgaagggagttagctaatgaaatttctgggagaagtacctttgaattagaggaacagctggaacaggggctctaggatgtgaccatgcctgtcacgttgttcaaggaagccactgtgactggagcagacatagtgggagtgatctgtgggagcaggagtgggagtgatcattggatttgaagtcagagaagtcatagaatctatattatgtagattatagt

SEQ ID NO: 43678 - DNA, 348 bp, Homo sapiens
  misc_feature (1)...(348): n = a,t,c or g
gctgcacgaactgcctgtccccaagccgagggggacaccgaagccgtccgaggggacaccagcccccaggaaggaccccccatggatcacgctggtgcaggcagaaccaaagaagaagccagccccacttcccccaagcagcagcccggggccaccaagccaggacagcaggcaggtggagaatggaggcaccgaggaggtggcccagccgagcccaacggccagcctggagtccaaaccctataacccctttgaggaggaggaggaggacaaggaggaagaggctccagctgcacccagcctggccaccagccctgccctgggccacccggagtcnacacccaagtc

SEQ ID NO: 43679 - DNA, 337 bp, Homo sapiens
  misc_feature (1)...(337): n = a,t,c or g
ggggattgcaggcgtgggccactgggccctgcctgtattttttatcagccacaaatccagcaacaagctgaggattcagctcataaaacaggcttggtgtcttggtgatctcacataaccaagatgctaccccgtggggaaccacatccccctggatgccctccagccttggtttgggctggagtcagggcctggatacagtattttgaatttgtatgccactggtttgcattgctggtcaggaactctagtgctttgcatagccctggtttagaaacatgttatagcagttcttggtatanagcanactanaanaaccancaatcattccactgtc

SEQ ID NO: 43680 - DNA, 347 bp, Homo sapiens
  misc_feature (1)...(347): n = a,t,c or g
nnnnnnnnnnnnnnnnnnnnnnnnnnnnnnnnnncttccacagttttttaaacttaaaaaaaaatggtgatacctatgaccagttatccataatctttccatcccaatcactatttacattttattttgctgtttcctcccagactttttttaatgattttttttaaattaaaaaaaaaannnnnnnnnnnnnnnnnnnnnnnnnnnnnnnnnnnnnnnnnnnnnnnnnnnnnnnnnnnnnnnnnnnnnnnnnnnnnnnnnnnnnnnnnnnnnnnnnnnnnnnnnnnnnnnnnnnnnnnnnnnnnnnnnnnnnnnnnnnnnnnnnnnnnnnnnnnnnnnnnnnnnnn

SEQ ID NO: 43681 - DNA, 379 bp, Homo sapiens
gattgtcttttaagtgtcaagctttgaggagtttatgataaccaagaagagacataaattctgctctctcaaagtttacattctaattgtagaaaaaaggcttaaaaaaaaaactgcagtagtgttatgtattatgaaaaggcggatgtttataatagacggtagatttgacctggcggacgctagactaaggctgacaagatacagaacttcaggtttatctcgtgcttttaattcctgagttttcggtctcttgtccccttataaacactactcaggcctcctgcttgcttagcagaatacttcataaacaaatttataaaatcgtttctattcctctgaataaataaaactcctggtgcaagagctactcattctt

SEQ ID NO: 43682 - DNA, 370 bp, Homo sapiens
gggcctaggcacctcctcagtcactggctgtgccctttcactctgtcactgggagacagaatcctgagttttctgcttcagggagcctgcatggaaagagtaggtcactgccggaaatcaggctagttttagcaaaaggaacggacattaggcacctccaaagggacaaaggaccaatatacctggttggggacaggattctgtcatttgattattcctgactcatgttttcatgaggtagtcccccacctcatataaaagcctcagtgttggcttctgaccatggtgtatgaaaagcccttgtctaaaggttactgccctgagaaaataataaaggaagaagaggatagacatgaagacactttaaagg

SEQ ID NO: 43683 - DNA, 381 bp, Homo sapiens
  misc_feature (1)...(381): n = a,t,c or g
gcaacactgctgacaccttgatcttggacttctnnnnnnnnnnnnnnnnnnnnnnnnnnnnnnnnnnnnnnnnnnnnnnnnnnnnnnnnnnnnnnnnnnnnnnnnnnnnnnnnntggattttggtattgggannnnnnnnnnnnnnnnnnnnnnnnnnnnnnnnnnnnnnnnnnnnnnnnnnnnnnnnnnnnnnnnnnnnnnnnnnnnnnagtatttgtnnnnnnnnnnnnnnnnnnnnnnnnnnnnnnnnnnnnnnnnnnnnnnnnnnnnnnnnnnnnnnnnnnnnaagcttagaaaataggagagctgttgagaaagcttctgtcatcttagaggtatacatatgtcaccttgaataaatattggtagaaatatgaatg

SEQ ID NO: 43684 - DNA, 376 bp, Homo sapiens
  misc_feature (1)...(376): n = a,t,c or g
gaaaacattccatggctagcacatttatcccaggaggaggataaaagacatgtggaacagaacttcccatgtaagcctagccagaagcaactgattcttaaatgactcaaggaagcatgaactaaatgaatgcttctggtactaaagtcttgtggttgtttgttatgcagcagtatctactgatgcaatgaccattgatggcaactcagttttccattttgtgtcttccatcacccaagaaggactgtcacaagtagtttctggtctggtaaagacctctgattggctcatcactaattgtaaattancaagttagcnnnnnnnnnnnnnnnnnnnnnnnnnnnnnnnnnnnnnnnnnnnnnnnnnnnnggntgga

SEQ ID NO: 43685 - DNA, 365 bp, Homo sapiens
  misc_feature (1)...(365): n = a,t,c or g
gcagaaagatgagcagaattcacaaatatgtggaaattaaataacacccttataaataaccagtggaacaaagaggaatcacaaggagaactggaaagtactttgnnnnnnnnnnnnnnnnnnnnnnnnnnnnnnnnnnnnnnnnnnnnnnnnnnnnnnnnnnnnnnnnnnnnnnnnnnnnnnnnnnnnnnnnnnnnnnnnnnnnnnnnnnnnnnnnnnnnnnnnnnnnnnnnnnnnnnnnnnnnnnnnnnnnnnnnnnnnnnnnnnnnnnnnnnnnnnnnnnnnnnnnnnnnnnnnnnnnnnnnnnnnnnnnnnnnnnnnnnnnnnnnnnnnnnnnnnnnnnnnnnnnnnnnnnnnacacagag

SEQ ID NO: 43686 - DNA, 371 bp, Homo sapiens
  misc_feature (1)...(371): n = a,t,c or g
gagagaactgcatgtgcccacatcaggccctgagaagcccccttagctgctgcaaaggttggggacattttttgctgagtaggtgaaagctgccagggagggggacatatgtgtccctagagatggcgggtcagcaggttggggtttggggcagtcttcaggcctggagccccgagtgccctcaggcagcctgctttcagatagagtctgaggatgagcacggagtgcaggggtcccctttacctgcatccaggggtgtggccatgttgcccctgaccagcatggctgctttgtttggcagcattnatcananaagtgcantgaaagatcncccanggnctccacctgtnanacaccacnctggggaaggg

SEQ ID NO: 43687 - DNA, 374 bp, Homo sapiens
gtgaaaggagcctaaggccattgttgatatccactctcttctttccacttccttctcatctttttctccatgttttatgcttctctgattccctcttctgcctgcaccagaccagccccagccctttattcctctccattttcactccttccagcctctgtccctgaactgccactggcaacccatgggacctcaggaccagagactgcttgactcatctggggagggtaagttcacgggggacaaaaaaatgattcctaaagaagaggcttcctagaccagcacaggctcgagaaagacatcccctaggcctggacttctgagcagctttagccaggctccggacggcagccagaggaggcctttcccattgt

SEQ ID NO: 43688 - DNA, 364 bp, Homo sapiens
gcatagggctcggcgtgggatttttcagctttgtacttatcaaacttaatttttgtttcattataggatttggtgacaaaatctaatgcattgtttctgtttttttcaaaatgcctgtcaaaggatttgatgctctgactgataaactcacaaagcacagccaaaggatttgtgatggaatgcctgtgtttgtttttcttatactgagcttttacacttaaatcaaatgattgctttgtcgttttcaagaattccttcaagcctgttttttcccatagagagaaatctttcagtggaggagttgtgattattgtgtaaggtagacgcatttcaggaattgttaaaggaatgtttaagaaatcca

SEQ ID NO: 43689 - DNA, 373 bp, Homo sapiens
  misc_feature (1)...(373): n = a,t,c or g
gtgggtggttttccatattttgttgtgcggcctcattcatcatgacctctattggcatggcacttttggccaacatcctctctgtgtcaagtatctttatcgaagcatcagcagacccagtagctattaactgtccatctctactataggtagctacacggcatggtcctttatgtgatgtgacatagcatgtttcgtactcagaagcctctggggacatagtctgaacatctgcatcaaattccaggtcaatccctgtgccaggggcaacagtatctgaacgaccaattgcatactgaactgcngngncatcnntntccatttcgagnntgangananccangancttgtccgaaggtgcacacacagactg

SEQ ID NO: 43690 - DNA, 394 bp, Homo sapiens
  misc_feature (1)...(394): n = a,t,c or g
nnnnnnnnnnnnnnnnnnnnnnnnnnnnnnnnnnnnnnnnnnnnnnnnnnnnnnnnnnnnnnnnnnnnnnnnnnnnnnnnnnnnnnnnnnnnnnnnnnnnnnnnnnnnnnnnnnnnnnnnnnnnnnnnnnnnnnnnnnnnnnnnnnnnnnnnnnnnnnnnnnnnnnnnnnnnnnnnnnnnnnnnnnnnnnnnnnnnnnnnnnnnnnnnnnnnnnnnnnnnnnnnnnnnnnnnnnnnnnnnnnnnnnnnnnnnnnnnnnnnnnnnnnnnnnnnnnnnnnnnnnctgttgataaagtggcagcaaggttggagaggactgagaccaattttgaaaaatgttctctgtgaagtcagtgctatcaaagagcattgcatgctgcacanagtccttttgt

SEQ ID NO: 43691 - DNA, 181 bp, Homo sapiens
  misc_feature (1)...(181): n = a,t,c or g
gcactggggaacttgttagaaatgcagatcttgggctccctcannnnnnnnnnnnnnnnnnnnnnnnnnnnnnnnnnnnnnnttctcagcttctgcttttttttttttttgnaannggattttngtttngnggnncnaccngggcnaanggnnnnaaantttnntttaaaaaaaaaaaaaa

SEQ ID NO: 43692 - DNA, 248 bp, Homo sapiens
  misc_feature (1)...(248): n = a,t,c or g
gctggaagtttggtgaggggtagtgtcaggagctagccttttcccagtgcttccttgggctctctggcatgttgagttcttagcatacctcatgtgatttaattctcatattcatcctgcaaaatgtgtgacatcactgttttacagcaaaggaagctgcaattcaaagaggttaagngactnatccaanaacctntcanntcattanagtncanananggaattggnnnccnnttntntttntactc

SEQ ID NO: 43693 - DNA, 378 bp, Homo sapiens
ggatcttttgttgcccttcctttttaagcctttcctgtgcatagtgaagaataccatgactactagtagtttggtgttaccgcctttatttgtgctaaagtgccagcgtttttacccaccattgtatctgcacccttacagcatatgtcaacatgttagtattcttgtaaaaatagtttggacctgggggtctgaggtccccactttgggaaccattgaaataggtacttagatctacagtgtatcatatcttttcatctacaagattaaaaacatgatttcagttaattgtttttgtaattttcttaatatggttttgaggggtttcagtccagagtgaagacatgtatgtttcttggcttatgctgaagtttacta

SEQ ID NO: 43694 - DNA, 241 bp, Homo sapiens
  misc_feature (1)...(241): n = a,t,c or g
ggcaggtagatgaagggtcctgagccctgcctgcgtgggtactcatctgcaaactgctgcaggcatctgctgctctggactcgtgccttagaagttcccaaaactctgatggccacgtgttccctgtttttaagtgagatcctgtcctgggtcttcagcatctggtgccatccagctgacctaggacaagagaacaggtcctgttttgnggtgatanctganncattgtngtccgnnaacg

SEQ ID NO: 43695 - DNA, 378 bp, Homo sapiens
ggagagagctagcttcacctgtctttaacaatgaatctttggcggattccaacaaagcctcagagttaactatgtgcagatcctgggtcagctaaggctcacagtaaagatttcttcctaattgcctctatctccactcttccttccccttccctctccacctccagaggggagttcccgctggaaattgcacaattctttgtgcagagagaaacaacaagcttagttcctgttgacctgaagagcataatgttctggcacagaatcttccaccttcatagaagagtaacaaactcaattgggattatttttctaactaaaactgtcatttgatgtcttcttttatctcaccaagatacaaccttctgagccactcat

SEQ ID NO: 43696 - DNA, 377 bp, Homo sapiens
  misc_feature (1)...(377): n = a,t,c or g
gaactggattcacagtaaccaactgtgtcatgtaaacaaagcaatcttcagattcaccttgtaggatggtgacaggtaaattaacaaggaagttgagaacaagaaggaaagctacctgggataaattcacggtttttttttttngttttttngtttngtttngtttcnttcagngactttcaaaacgtcagcantcanccntnaagngtttgnaangcntactgaattgntacngggataaatatnccattgccanaatnttntgtaggacantnttantanaaatcagnantcctgaggntgaccncaggggntgtnnnnnnnnnnnnnnnnnnnnnnnnnnnnnnnnnnnnnnnnnnnnnnnnnnnnnnnnnnnn

SEQ ID NO: 43697 - DNA, 294 bp, Homo sapiens
  misc_feature (1)...(294): n = a,t,c or g
gtactgctggaaaagaaggctcaagaggaagaatccaggttgtgaggttttgctgaagatattcctgaagaatcatcccaggtgccacactaaaaaaatgtccagttgacagctacccctgtgagtgcacttgttgatgagccagtgcatatccaagctacaggcctgattccctttcagatggtgagttttcaggcatcactggaagatgaaaacggagacatgttttattctcaagcccactatagggccaatgaattcnngaggnggacctgaatnatgcttnttnncttg

SEQ ID NO: 43698 - DNA, 401 bp, Homo sapiens
  misc_feature (1)...(401): n = a,t,c or g
ggaactgaacagcgcaacagataatcctatggtctttgccaataggggagagacaatttctggaggaaacttccatggtgantacccagccaaagccctagactacttggccattggcatccatgaacttgctgcaatcagtgagagaagaatcgagcggctctgcaatccctccctcagtgagctgcctgccttcctggtggctgaaggtggtctgaactctgggttcatgatagctcactgcacggcagcagcccttgtttctgagaacaaggctctgtgccatccctcgtctgttgactccctctccaccagcgcagccacggaggaccacgtctccatgggaggatgggcagcaaggaaagccctcagggtcatcgagcatgtggagcaagtgctgc

SEQ ID NO: 43699 - DNA, 298 bp, Homo sapiens
  misc_feature (1)...(298): n = a,t,c or g
gcttagacagaattcttgtttttgcttgagaaagggcagaagtagagaggaaactgaggcaagaatgattagtctttatcacaaatcagaagactgcgnnnnnnnnnnnnnnnnnnnnnnnnnnnnnnnnnnnnnnnnnnnnnnnnnnnnnnnnnnnnnnnnnnnnnnnnnnnnnnnnnnnnnnnnnnnnnnnnnnnnnnnnnnnnnnnnnnnnnnnnnnnnnnnnnnnnnnnnnnnnnnnnnnnnnnnnnnnnnnnnnnnnnnnnnagaggntgangcnnganaattgcttgaactc

SEQ ID NO: 43700 - DNA, 106 bp, Homo sapiens
ggagtttcttccttaacactgattaaatgatcttaactccctcagctaaaactggcattactgactcccagctatatttctccagacttgcatttttttttttttt

SEQ ID NO: 43701 - DNA, 370 bp, Homo sapiens
  misc_feature (1)...(370): n = a,t,c or g
ggtaatcttctgagagaaacattcaggaaatgagcctctcagagtttgccaagagagcaggaaggttggtggataaggaccaccttagtgttatcaaatccacatctctcctgcagtcagagtaaagcctgtaccaggtaatcttaggactagaaagggtctaccgtaggggttttatccacccctgtctagagaaggagggaatgaggccagctgagcaccaacaaggtagatggttggtcactattttatgggnaaangagnnngagcttcnnagagagaaaatgatttatccaaaatcacactgctagaaggaaatggaaccaggacacaagcctggcttgctgaagctaangcccgtgttctttat

SEQ ID NO: 43702 - DNA, 369 bp, Homo sapiens
ggagagttcacactcgagaaaagccctacaagtgcactaagtgtggcaaggccttcacccgcagctccaccctcactctgcatcacagaatccatgccagagagagagcctctgagtacagcccagcctcccttgatgcatttggcgcgttcctgaaaagttgtgtgtaaaggaagaatttgccatcaagccatttcccccttttgtttctaaaattatttcagagatgtgtgctcctggagggaaaaagaaatacagcctcaacagattaaaaaacaaaagtcacacttaaggatccttctagtcacatcagcagtgttctgcctttatgtagtagttgggcatataatccttccacacagcccctgc

SEQ ID NO: 43703 - DNA, 376 bp, Homo sapiens
  misc_feature (1)...(376): n = a,t,c or g
ggacaacaaaattttaatagctgactccgacctcagaagagtgattgctacctttctggaaagactttaattaccagagctggcttctcccagctcagaaatgctgagaagccaacgtgaggcctgaggacacacaaagggatgacggggcaggaggggatgaggtcagggtagcagagtgtgtgacgacggatttgggggcctagaggtgtcctggttcctgggctgggattttggactctggatttgaagggagctggagcttccagatgtagcaggggtagggggccagatgttagaagagggtgtgtgtgttgggaggaaattangntatctntgaangnggagnnaannnnctttatnnnntttnnnattc

SEQ ID NO: 43704 - DNA, 390 bp, Homo sapiens
  misc_feature (1)...(390): n = a,t,c or g
gcaccgctgcccacgtggcctctttccaggcagcagacagggcttctggcacgtgggtcgccagcactgtcgcttgtggccacagcccgcagagcttcagtcccttgagctcctcctccagagcagggccgagggtctcgccccagcccgactggctgtgcctgcagatgatgctgatcacgcagcttttcgtttcccggaacgcaggtgggatagcagtgcccttttctgtcagtgcggcattctctctggcagtcattccgcccggagaggctcatcttgggcggttctgggcgacagctgtgtggctgcncagnggccagtgagaggcatctgggaaggtggcccttgtgtagggagtcactctccttacgtcacggtcacacctca

SEQ ID NO: 43705 - DNA, 290 bp, Homo sapiens
  misc_feature (1)...(290): n = a,t,c or g
gnnnnnnnnnnnnnnnnnnnnnnnnnnnnnnnnnnnnnnnnnnnnnnnnnnnnnnnnnnnnnnnnnnnnnnnnnnnnnnnnnnnnnnnnnnnnnnnnnnnnnnnnnnnnnnnnnnnnnnnnnnnnnnnnnnnnnnnnnnnnnnnnnnnnnnnnnnnnnnnnnnnnnnnnnnnnnnnnnnnnnnnnnnnnnnnnnnnnnnnnnnnngacttncccttttnctaattgaatatnctttattnntttntnctgcctgactgncctggncanaacttnnnncnctatgnngaat

SEQ ID NO: 43706 - DNA, 378 bp, Homo sapiens
  misc_feature (1)...(378): n = a,t,c or g
ggataagttgttcttgttttccctgagatcttgcnnnnnnnnnnnnnnnnnnnnnnnnnnnnnnnnnnnnacagaagcttttatactttgttaagaaaactaacttttgtggttttatatagactacattcattttgtcaaacttaaggtctacagtaagcattttattcacttaagtgaatctgagtagtagcaacattatagttcaaattagatagccaaatatgtaccaaaattttggacctttaaagtaatagttggnnnnnnnnnnnnnnnnnnnnnnnnnnnnnnnnnnnnnnnnnnnnnnnnnnnnnnnnnnnnnnnnnnnnnnnnnnnnnnnnnnnnnnnnnnnnnnnnnnnnnnnnnnnnnnnnnnnnn

SEQ ID NO: 43707 - DNA, 376 bp, Homo sapiens
  misc_feature (1)...(376): n = a,t,c or g
gnnnnnnnnnnnnnnnnnnnnnnnnnnnnnnnnnnnnnnnnnnnnnnnnnnnnnnnacggcnnnnnnnnnnnnnnnnnnnnnnnnnnnnnnnnnnnnnnnnnnnnnnnnnnnnnnnnnnnnnnnnnnnnnnnnnnnnnnnnnnnnnnnnnnnnnnnnnnnnnnnnnnnnnnnnnnnnnnnnnnnnnnnnnnnnnnnnnnnnnnnnnnnnnnnnnnnnnnnnnnnnnnnnnnnnnnnnnnnnnnnnnnnnnnnnnnnnnnnnnnnnnnnnnnnnnnnnnnnnnnnnnnnnnnnnnnnnnnnnnnnatncttnganaatgcnataatctgattaattnccgttngggtannggntgantgcntttntccnaacaattg

SEQ ID NO: 43708 - DNA, 355 bp, Homo sapiens
  misc_feature (1)...(355): n = a,t,c or g
ggaagccagctagttctacaacatgcgaggtgtgggaagatgattgtagctgggggttgngnggantaaaggggntnatatgcatgacagttnttantngcttgcttnccangnccggttcntacttnanncncctttganntccgagnnaanntggatgngctnnggttcncnttttnaatcccttaagggntcnggcaggatgccggnnttngcgnnngagtgggcggannccngaagnccnctgtttcatgtctccctcnnncnnagatnntnnctgngttgtntctgananncnactgccnaccttgnccgtgtcgatcntttgtgctnnctccactcnttcgntngtttt

SEQ ID NO: 43709 - DNA, 381 bp, Homo sapiens
ggcagatgtggctactgctgtatctcaacgacctgaaggcggtctctgtggagagtctgctggcgttctcagggctctccgcagacatgctcaatcaggcgattgggcccctcacctcttcaagaggccccctggaccttcacgagcaaaaggatataccaggaggggtcctcaagattcgagatggcagcaaggaacccaggtcgagatgggacattgtgcggctcatcccacctcagacgtacctgcaagctgagggtgaagacggccagaacttggagaagagacggaatcttctgaactgcctcatcgtccgaatcctcaaggcccatggagatgaggggctgcacattgaccaacttgtctgtctggtgctggagg

SEQ ID NO: 43710 - DNA, 372 bp, Homo sapiens
gagaagcaggagaagggcccatcagccacctggctaccactgctctccagagatatgatctccctttcataactgatgaggtgaagaagaccttaaacagaatataccaccaaaaccgtaaagttcatgaaaagactgtgcgcactgctgcagctgctatcattttaaataacaatccatcctacatggacgtcaagaacatcctgctgtctattggggagcttccccaagaaatgaataaatacatgctcgccattgttcaagacatcctacgttttgaaatgcctgcaagcaaaattgtccgtcgagttctgaaggaaatggtcgctcacaattatgaccgtttctccaggagtggatcttcttctgcta

SEQ ID NO: 43711 - DNA, 371 bp, Homo sapiens
  misc_feature (1)...(371): n = a,t,c or g
ggagagctaccatgagcttcaatacctgttaacagaaagccataaatagatttcacatgtacctgatggaagaccatatattacctatgaagtcggtttttctgcctaagggagagaacaggggatcagacctcaatctgatcaagcctctggctccaactaccaatttataggaaatacaaaggacagaggaacacatgaaagtacaacatagtnnnnnnnnnnnnnnnnnnnnnnnnnnnnnnnnnnnnnnnnnnnnnnnnnnnnnnnnnnnnnnnnnnnnnnnnnnnnnnnnnnnnnnnnnnnnnnnnnnnnnnnnnnnnnnnnnnnnnnnnnnnnnnnnnnnnnnnnnnnnnnnnnnnnnnnnnntg

SEQ ID NO: 43712 - DNA, 253 bp, Homo sapiens
  misc_feature (1)...(253): n = a,t,c or g
gcggcacgagcccatacccttcccattatataggaaaagatatgtggttatataagtcttgcagaattctctgccatttcaatattcgctttactaggaaagttaagttgtacctttatttaaactaaggcacacgtagaaggaaactaatcaaacttgggcaaaggtaggttgtgcctagagcttgcttgagttctgagtgggacagttagttttttggtattggggtttgtttgtttgtttgtggntttac

SEQ ID NO: 43713 - DNA, 375 bp, Homo sapiens
  misc_feature (1)...(375): n = a,t,c or g
ggccttttctggagtgagcctgtttacaagaggacaatatactcaagtcttgacaacatgtttggatctccaaggccagnnnnnnnnnnnnnnnnnnnnnnnnnnnnnnnnnnnnnnnnnnnnnnnnnnnnnnnnnnnnnnnnnnnnnnnnnnnnnnnnnnnnnnnnnnnnnnnnnnnnnnnnnnnnnnnnnnnnnnncttaaaaataattttaaatagannnnnnnnnnnnnnnnnnnnnnnnnnnnnnnnnnnnnnnnnnnnnnnnnnnnnnnnnnnnnnnnnnnnnnnnnnnnnnnnnnnnnnnnnnnnnnnnnnnnnnnnnnnnnnnnnnnnnnnnnnnnnnnnnnnnnnnncgaaggcagtcttttttaa

SEQ ID NO: 43714 - DNA, 355 bp, Homo sapiens
  misc_feature (1)...(355): n = a,t,c or g
gcttttcagacaatttcaccatctttagtctcatgcattccaaaacgttcttgcttttaaatggcaacgaatcttatctctagtaactgtgtgaaagtatcaaaaaaaacctagaaaacaatttacatttaaggcatagtttacttttattaatttttttgaccagtttaatgttgcaaggccactgcaggtataccatgttgccaattatttgaataccaaatctcagtaacctaggaggctggggaaaggctcaaattcataccttcacagcatggaaaacttgtatcatttacagttagtgttgcttgcttatttattgattgatcgactgattgttttgagncngagtact

SEQ ID NO: 43715 - DNA, 375 bp, Homo sapiens
gcacaaattcaacatctcaacttagccgccaaagccacttctgtgtcttgtctattctgaatatgctttaaggttaaattagccatgaatctgttcagatcagtcattcctgaaaatgatgatgatattagccatcctttaccgggcaccttactcagtgcccggcattatactaggtctgcaggtacatttgctcatttaacacctagctcagtccaatgaggtggatgccattgtcatctccattttatcatttaatcaactcagccttcctctctcctgttccccactctgcttctagctgccactcacctgactctcctcttgatctgggctgacgtggctgagtgggtttagcagaactcttgtgtcctt

SEQ ID NO: 43716 - DNA, 369 bp, Homo sapiens
  misc_feature (1)...(369): n = a,t,c or g
ggaaagcataacatgttagacaaatttcattcttaaacattaggttagtgttttctgtcaacagattataagaacttttattgtttttattgtcatttttttcctaaatcgtgtgtggaaaaatattgaatgtcttcaaatgtataatacacacagtaacacaataagctacaaaacaaaaacaaagttgattaacccactatcaagctgatgttaatttcacagagcttgggcattttaatttttattcagaaaagagattttgaagtgaactatgggatgattttaaaaaagagaggcnnnnnnnnnnnnnnnnnnnnnnnnnnnnnnnnnnnnnnnnnnnnnnnnnnnnnnnnnnnnnnnnnnnnn

SEQ ID NO: 43717 - DNA, 371 bp, Homo sapiens
  misc_feature (1)...(371): n = a,t,c or g
gnnnnnnnnnnnnnnnnnnnnnnnnnnnnnnnnnnnnnnnnnnnnnnnnnnnnnnnnnnnnnnnnnnnnnnnnnnnnnnnnnnnnnnnnnnnnnnnnnnnnnnnnnnnnnnnnnnnnnnnnnnnnnnnnnnnnnnnnnnnnnnnnnnnnnnnnnnnnnnnnnntacggtaggggaagaaagacactgttaaataaactgcagctctaatagaagctgttgactgagatggttctgagtaaaaggcctattctctccttattcaaaaaagaattggcaagttttagagagctagagctgttacagataagatttcttttgcaaaagcagaattgtaagatattttttaaaataactgtttttgtacttcaat

SEQ ID NO: 43718 - DNA, 369 bp, Homo sapiens
ggtcatagagctggttgttgaggtggaatcctgcgtcgttgactgcatttcgcatctcgtagctgttgatggtgccggactggtctgtgtcatagtgtttgaaaattttctgccaggccttaatcttgttccagaggtggtggaactcctgcaggttgagctttccagagccatctgtatccatgagcgcaatcatgctacggcaggactccagtgtgaacccgtgtgtcttcaggtccttgtgtttgttcacgactgtgttaaggaccttcttgagctcatctgcacagatctccatgtcatctcctgctatctgcttgaaaatgttccggaattggtgctgttcctcactttcctgatcagagctgc

SEQ ID NO: 43719 - DNA, 390 bp, Homo sapiens
gtaaaatttaaaatttcatagagaaactgcttgaataagtgttccatatactcactcactctgaattttttggcatctgaatgtgtagaaagtttgcaggtgaacatgtgcttgtcaatacattgtcactgacctcctcccattcatgttgctggtcattggcaatttcttcttctggatgctggaattttttcactgagtcctatgagaagctattaaggggccagagacccaatgtattcggtctactacccactgtcccatgtttttcatccctatcagtgtaagtgatctgtcctgagagcaccgtcatctattaagcgaaatgcagatccccgggactccaagtaaaggacattcaggcataattgaggtgaaatatatggtatg

SEQ ID NO: 43720 - DNA, 378 bp, Homo sapiens
gcggcacgagcggcacgagaaaacctgtatttctcttttacatgacagtcctgggtgggggcacaggttagtgtggtagaattcatcttatagtattctaggactaaagttgaccaaagttcagccatcttcagcatgtggcttcgaaggtcctgccaagggatgggaaaggaaaactcatggaggagaaccatgcggatggtatttataggccagacctggaagtggtgtacatcactcacatcccattggctacagctcagtcacatgactatagccaattgcaagggaggccaggaaacattgcttctggctgggcagctatttacccagcagtgacactgtattatagaagatggaccacaaatttttgatgga

SEQ ID NO: 43721 - DNA, 377 bp, Homo sapiens
gaaatctctcactccttattctctttgaagggtctggaaatcctgttaatatttaattggcttttaaattattgacacatcaaagtgttcaacctattgttgtcctttgaagagctagcgcctagtggagctcctggcaggtgttccaagttcttgggcttagagcaccattagagaaaggatggtggagagaagtcaggaccactccattttggaagcagaaagccttggaacctagttaattggatcacactttttccatctagtttccaggtgttagatattcaagtcttgtctttttttaagagagtaatattaattagttcattgatcatgctccctgaggaaagggccatagcttgaacttcttgttatct

SEQ ID NO: 43722 - DNA, 378 bp, Homo sapiens
gctgagatcagaacaaggtgggagtcatatctgggggaataagaaaggaaagaataaaccttgaatgtttcagtagcatcaataaattctggtttattagaaggtgccaagagatggagagggtggagggaaatgaggttggcaggtgggcaggagcctagacatttgggccctataggccaaggaaagtggatctacattttattttaagtcaggtattcttacttgtttctgtgttatatacttcctaggcagcctgctgaaccctatggacctctgcttgcaaaatgtttttaaatggcgaagacaaaaacaaaaaaatgtaggattatgaaagaccaaggatgggactgtgggggcagggagattaatggagtg

SEQ ID NO: 43723 - DNA, 379 bp, Homo sapiens
gggtggagctgagtgccttgtagaaatccgtagcatagtctcagagtcagatgtttcatcatttgaaatccaacatagtggatttgtgaagcagctgttgctttatttgacatctaaaagtgaaaaggatgctgtgagcagagagatcagattaaagcgatttcttcatgtatttttttcttctccacttcctggagaagagcccattggaagagtggaaccagtgggtaatgcacctttgttggcattagttcacaagatgaacaactgcctcagccagatggaacaatttccagtcaaagtacatgatttccctagtggaaatgggacaggaggcagcttttctctcaacagaggatcacaggctttaaaatttttt

SEQ ID NO: 43724 - DNA, 382 bp, Homo sapiens
  misc_feature (1)...(382): n = a,t,c or g
ggagcagactaggggaatagatggaagagcaaatgctgtacctgatgtaggacattattatttcaaatgtgcatcacttttatgataatgtttgcatcacatacgaattctttttttaaaattgtggtgnnnnnnnnnnnnnnnnnnnnnnnnnnnnnnnnnnnnnnnnnnnnnnnnnnnnnnnnnnnnnnnnnnnnnnnnnnnnnnnnnnnnnnnnagatcactagcttgttttcatcttgcaacaatgaacctctatacccactaaatgctaattcccccttctccccccagcctnnnnnnnnnnnnnnnnnnnnnnnnnnnnnnnnnnnnnnnnnnnnnnnnnnnnnnnnnnnnnnnnnnnnnnnnnnnnnnnnncttt

SEQ ID NO: 43725 - DNA, 397 bp, Homo sapiens
gggtggacgtgcttatggaagcagccgcacacggtgagagtgaccccatgaagggggtctctgagaatatcatgctgggccagctggctccggccggcactggctgctttgacctcctgcttgatgcagagaagtgcaagtatggcatggagatccccaccaatatccccggcctgggggctgctggacccaccggcatgttctttggttcagcacccagtcccatgggtggaatctctcctgccatgacaccttggaaccagggtgcaacccctgctatggcgcctggtcccccagtgttgggagtggaatgaccccaggggcagccggcttctctcccagtgctgcgtcagatgccagcggcttcagcccaggttactcccctgctggtctccca

SEQ ID NO: 43726 - DNA, 379 bp, Homo sapiens
  misc_feature (1)...(379): n = a,t,c or g
ggnnnnnnnnnnnnnnnnnnnnnnnnnnnnnnnnnnnnnnnnnnnnnnnnnnnnnnnnnnnnnnnnnnnnnnnnnnnnnnnnnnnnnnnnnnnnnnnnnnnnnnnnnnnnnnnnnnnattttttattttttagtcttaacctagcaaaagatggttgatttaagcacactttaatatctatgcctatattagctctgtaatgtcagtaaattaagagtttcttccgtgagctccagttaggatggtacatcccagtgaagagaaccttacgatgtgatttggtatgttgttgtttcaacttttctgcatgtcctttcctagcaaagaagtctaaagctgtattggtgccttagaggaagtcnaaaaatccccatctgct

SEQ ID NO: 43727 - DNA, 350 bp, Homo sapiens
  misc_feature (1)...(350): n = a,t,c or g
gaaacccatatgtttggagtattaatggttgtatttctaatttgttaccctggcccaaatgatgaagtaatagaatgttgcatatttccttccacttaacatttaatttgtgttaatgaaaccaaatgtcacttttaactctggaacttctaaaatgaactacaccgggaagccctctgtattctttgtggtttcccatgttccatgagccagcaaccgggtgttcacttgcagtgactctggtttactcagcccctggggatgcattactgctcggaaatgggaagggagagtancaggtggngcgtaattgananctgngnnngantgnnactgancnngngcccctg

SEQ ID NO: 43728 - DNA, 312 bp, Homo sapiens
  misc_feature (1)...(312): n = a,t,c or g
gcggcacgagggccaagacctccaagaagaagaagcgctccaaggccaaggcggagcgagaggcgtcccctgccgacctccccatcgaccccaacgaacccacgtactgtctgtgcaaccaggtctcctatggggagatgatcggctgcgacaacgacctagtgccccatcgagtggttccacttctcgtgcgtggggctcaatcataaacccaagggcaagtggnactgncccaagtgccggantgagancgacnagatngtggncaaagccntgttgaangtctaatcanananggnttnncncnnggag

SEQ ID NO: 43729 - DNA, 323 bp, Homo sapiens
  misc_feature (1)...(323): n = a,t,c or g
nnnnnnnnnnnnnnnnnnnnnnnnnnnnnnnnnnnnnnnnnnnnnnnnnnnnnnnnnnnnnnnnnnnnnnnnnnnnnnnnnnnnnnnnnnnnnnnnnnnnnnnnnnnnnnnnnnnnnnnnnnnnnnnnnnnnnnnnnnnnnnnnnnnnnnnnnnnnnnnnnnnnnnnnnnnnnnnnnnnnnnnnnnnnnnnnnnnnnnnnnnnnnnnnnnnnnnnnnnnnnnnnnncttttggctttngcntcntttcnntnggaattcagggaagttaaaaatngggctttnttcnntaattagatagacntaagactcttgacctgatttt

SEQ ID NO: 43730 - DNA, 369 bp, Homo sapiens
  misc_feature (1)...(369): n = a,t,c or g
gnnnnnnnnnnnnnnnnnnnnnnnnnnnnnnnnnnnnnnnnnnnnnnnnnnnnnnnnnnnnnnnnnnnnnnnnnnnnnnnnnnnnnnnnnnnnnnnnnnnnnnnnnnnnnnnnnnnnnnnnnnnnnnnnnnnnnnnnnnnnnnnnnnnnnnnnnnnnnnnnnnnnnnnnnnnnnnnnnnnnnnnnnnnnnnnnnnnnnnnnnnnnnnnnnnnnnnnnnnnnnnnnnnnnnnnnnnnnnnnnnnnnnnnnnnnnnnnnnnnnnnnnnnnnnnnnnnnnnnnnnnnnnnnnnnnnnnnnnnnnnnnnnnnnnnnnnnnnnnnttcaaattactcctgtcnannggacaananaaataaggctacttcacat

SEQ ID NO: 43731 - DNA, 265 bp, Homo sapiens
  misc_feature (1)...(265): n = a,t,c or g
gcttttattgactgttgtcagagaacatgctgtgtgatttcaagccttcaaaatttgttacggcatggcatacagtctgttttgtgaatgttctcatacacttgaaaagaatgtgtattctgcagttactggataaagtgtcagttaggtcaagctctttgatagtactgttcaagtctatccagctataagtgggttcatcttgcttccttaaggtctgtcaatnnnnnnnnnnnnnnnnnnnnnnnnnnnnnnnnnnnnnnnn

SEQ ID NO: 43732 - DNA, 253 bp, Homo sapiens
  misc_feature (1)...(253): n = a,t,c or g
gctgtagcagatttggcagagagtataatgaagaatcttaggcgggtgcacccagtttccaccatgattaagggtctttacggaataaaggatgatgtcttccttagtgttccttgcattttgggacagaatggaatctcagaccttgtgaaggtgactctgacttctgaggaagaggcccgtttgaagaatagtgcanatctctttgggggatccananngtgcntnnantttnaagcttngatggcatatg

SEQ ID NO: 43733 - DNA, 354 bp, Homo sapiens
  misc_feature (1)...(354): n = a,t,c or g
gaaannnnnnnnnnnnnnnnnnnnnnnnnnnnnnnnnnnnnnnnnnnnnnnnnnnnnnnnnnnnnnnnnnnnnnnnnnnnnnnnnnnnnnnnnnnnnnnnnnnnnnnnnnnnnnnnnnnnnnnnnnnngcctgtgctctagaaatggaacaaagcctagatgacagnnnnnnnnnnnnnnnnnnnnnnnnnnnnnnnnnnnnnnnnnnnnnnnnnnnnnnnnnnnnnnnnnnntaattttcaatactggtcattaacaatccacttaagcccccaagagctctgatggaaaggttcacggacntgaatgntntnttcntncctnctanctncnnnntcnnttcttaaccccctg

SEQ ID NO: 43734 - DNA, 364 bp, Homo sapiens
  misc_feature (1)...(364): n = a,t,c or g
ggaaagaataggcactgtttgcactcttcggtgatgacgtttaatcttttaatctccccttattcttccccatgggaagacaaaaatgggaagattcagataattatttgtagggttggacattgagtgggtctgcgaacctaatacgttccagaatcctaatgttgtaggaattctcagttaccaaccttggtactgaaataaataaagtaggagggaggtggagaatcacaggtcaagcatgaataaggccacatctggcagaactgggacatatcttcaatacaacagtgataatagtaacactatccacatgtttatctaagtgacnaattattaagtannncattnacattccttattg

SEQ ID NO: 43735 - DNA, 368 bp, Homo sapiens
gctggactgggagcaccttgagaacagagactaaaccacattcttccttttttgttgcattgggaagctctgttcctggtactcataaaacaggtgttcacaaatggaggtcagcatagttagtaaagcgtaggatttcctcttaatattctaggcatgctctgcatttatttcgctgaatcttgtctttagaattgtctgtgacaaaaagcgactacaacacttttattcaactttcatcataaagcatcactggcagaagtgatcaatctaccgagtgaatattttgatttgtataacctcatttggaataagaacattcaagaatcagttcctgagctacagtcatgctcctttgcctcatcctg

SEQ ID NO: 43736 - DNA, 338 bp, Homo sapiens
  misc_feature (1)...(338): n = a,t,c or g
gctgagtttgatttagaaatccagttatacctgcaggtactgatgactaattccttctttgaagacaaaataagcagctgtgtaacttcagtggctctcaaatggataatagattcagtgtatactcgctttgaactttcctgttntntgancacctcgataaatgactttaaagggnanatgncnntcnccngaaccaaattgngaccnngacccatntattctactgnncngntganactgnantntcnagatgnctttctaccgangnnngnttntnannnnnnnatnnatntcgnnatntacatttangnnnctaatccncncctnnnncatgc

SEQ ID NO: 43737 - DNA, 369 bp, Homo sapiens
  misc_feature (1)...(369): n = a,t,c or g
gttttaatatacannnnnnnnnnnnnnnnnnnnnnnnnnnnnnnnnnnnnnnnnnnnnnnnnnnnnnnnnnnnnnnnnnnnnnnnnnnnnnnnnnnnnnnnnnnnnnnnnnnnnnnnnnnnnnnnnnnnnnnnnnnnnnnnnnnnnnnnnnnnnnnnnnnnnnnnnnnnnnnnnnnnnnnnnnnnnnnnnnnnnnnnnnnnnnnnnnnnnnnnnnnnnnnnnnnnnnnnnnnnnnnnnnnnnnnnnnnnnnnnnnnnnnnnnnnnnnnnnnnnnnnnnnnnnnnnnnnnnnncagcgatcttttaatattttagcgtgtgctatttctcattgtgacaaataaaagtcattcttcttgctatattttgg

SEQ ID NO: 43738 - DNA, 319 bp, Homo sapiens
  misc_feature (1)...(319): n = a,t,c or g
gcaaattcaggactattgttaacagttaccaaggtgccttttgatgctacctaagaaccttcaaaacagatgctctccgtctcatcataattgacatgaactatagttctgctggctgtatatgtgagagtggagtatctgnnnnnnnnnnnnnnnnnnnnnnnnnnnnnnnnnnnnnnnnnnnnnnnnnnnnnnnnnnnnnnnnnnnnnnnnnnnnnnnnnnnnnnnnnnnnnnnnnnnnnnnnnnnnnnnnnnnnnnnnnnnnnnnnnnnnnnnnnnnnnnnnnnnnnnnnnnnnnnnnnannnncntaccnncctg

SEQ ID NO: 43739 - DNA, 357 bp, Homo sapiens
  misc_feature (1)...(357): n = a,t,c or g
gcggacatcgagaaagggctgcagttcattcagtaagcctgcatgcggcaggggctggacggctgggtgggcaagggtgggttctctgagagccatgccctcccagcgctcccttttcttgctgctgagcctttgctgccaaggctcctgtgtgcgctggggtgcgggcaggtgggaggagccaggaaggggctggtgtggctgtgcgtgaactccacatgcacacatgctccctggcccangttacccttnaatcttgtncantangnaattntgccctnacccttacatttgcactncctgtaattntnttgcatgactgnncnanntttntnatnnannaangnncctntgtac

SEQ ID NO: 43740 - DNA, 353 bp, Homo sapiens
  misc_feature (1)...(353): n = a,t,c or g
gtgtaatatacagtaggagaaatgatcttcagaattttatattttatggttagataaacagaaaggttgcaagtccaggcactgtagcgtatnnnnnnnnnnnnnnnnnnnnnnnnnnnnnnnnnnnnnnnnnnnnnnnnnnnnnnnnnnnnnnnnnnnnnnnnnnnnnnnnnnnnnnnnnnnnnnnnnnnnnnnnnngatagcttgcagtctatttgtagctgtgctctgtagatatctctatgtactaagagtgctgtgcctggttagaaaatatatgnnnnnnnnnnnnnnnnnnnnnnnnnnnnnnnnnnnnnnnnnnnnnnnnnnnnnnnnnnnnnnnnnngangtca

SEQ ID NO: 43741 - DNA, 183 bp, Homo sapiens
  misc_feature (1)...(183): n = a,t,c or g
gccgcctgtggttcttggtgtccgcggtgccagaggtttccagtttacagccctctcaaggcatgcccgcctctcaggcattcctgttctgcaaatgctcctgggtgttctgctggagccgtggggagtcagnctnnaggacctnangngacanncnaantnccatnacctaaccctaactga

SEQ ID NO: 43742 - DNA, 353 bp, Homo sapiens
  misc_feature (1)...(353): n = a,t,c or g
ggacaagatccagaagggattctttaagaacgtttttatgttaacaaccttgtaccaatgaaatctgttgtatacaaaaaggaagcaggaggnnnnnnnnnnnnnnnnnnnnnnnnnnnnnnnnnnnnnnnnnnnnnnnnnnnnnnnnnnnnnnnnnnnnnnnnnnnnnnnnnnnnnnnnnnnnnnnnnnnnnnnnnnnnnnnnnnnnnnnnnnnnnnnnnnnnnnnnnnnnnnnnnnnnnnnnnnnnnnnnnnnnnnnnnnnnnnnnnnnnnnnnnnnnnnnnnnnnnnnnnnnnnnnnnnnnnnnnnnnnnnnnnnnnnnnnnnnnnnnnnnnnnnnnnnnnnnnnnnnnn

SEQ ID NO: 43743 - DNA, 381 bp, Homo sapiens
gccaggtggtccggagcaaagcagtcagccacaggaccatcagcgaggacagtattgaagtcctcagtacctgcccctctgaggccctcatccctgatgactttaaggccagctacccaagtgccattaatgaagaagaatcatatccagatggcaatgaaggagccatccacttccaggcaagcatcagtcctccagaactgggtgagacagaggaaggcacgcatagaaaacaccccatcacaaatagactcctcctgctgtattgggaaggagagcgatggtcagttggtgctggcctccactccagcccacacacactctgacgaggatggggtggtgagcagccccccacagcgccacaggcagaaggccaggggg

SEQ ID NO: 43744 - DNA, 378 bp, Homo sapiens
gcatttattgagtggaaacagttccctacttattgacaattcatttattggataggtaatcagtaaatacattttgtatcaatctaacaattaggcataaactacagcctcctacacccaatatctgaggtgttctaagatttaactactcaaatgtttgatatttgataaattgtttaagttctctgcaattcagttccacctcctataacagcacttctgaaaatgtggtctgtgaacctctgaggggttcctgagacactgtcagggagcaagtgagacatggctatttttataatattaaactattagcctttgtcactgtgttgcatttacctaggataggtacaactgctggcacctgagcacagatcaagg

SEQ ID NO: 43745 - DNA, 381 bp, Homo sapiens
gatgctgttgaaaagttgatttgagaaggaaatgccaataaagactcaaaagaaaatactagaaattaaaaagaaaactaacagaaacaaggaatgcctttgataggttcatcaatggactggacacagctgaggaaaaagatcaatgagctaaagatatgtcagtagaaacctctcaaactgaaatgcaaatagaaaaaaaagactaaaaaataaaacagaagagaatatccaagaactatgggacaatttcaacacaagtaacatgtgctaaattggaataccagaagaaggaatagagaatgaagcagaagaaatatttgaagtaataatggcagataactttccaaaattaatagacaccaaacaatacatcccaga

SEQ ID NO: 43746 - DNA, 368 bp, Homo sapiens
  misc_feature (1)...(368): n = a,t,c or g
nnnnnnnnnnnnnnnnnnnnnnnnnnnnnnnnnnnnnnnnnnnnnnnnnnnnnnnnnnnnnnnnnnnnnnnnnnnnnnnnnnnnnnnnnnnnnnnnnnnnnnnnnnnnnnnnnnnnnnnnnnnnnnnnnnnnnnnnnnnnnnnnnnnnnnnnnnnnnnnnnnnnnnnnnnnnnnnnnnnnnnnnnnnnnnnnnnnnnnnnnnnnnnnnnnnnnnnnnnnnnnnnnnnnnnnnnnnnnnnnnnnnnnnnnnnnnnnnnnnnnnnnnnnnnnnnnnnnnnnnnnnnnnnnnnnnggaaattttctgtatatagaattatgatatctgcaaatagagatcgttttactactctccttgcatttggattttt

SEQ ID NO: 43747 - DNA, 283 bp, Homo sapiens
  misc_feature (1)...(283): n = a,t,c or g
gcatgaacctaacataatgggggcagggaacgggcagaagaggcttcccagaggagacacttaggcagagactgggccgctgagtgggcgtttgggaggtgagggtgttccaggctgaggggaggtttgtaggaaggtcctgagtgggaaggcactgcctgcagtagcgcatggcctggaggagacagcanggcggnccagggtcanagaggccaggacacacacatnactgtgtccttgagggagatctttcttntntaggaatatanntgancttacccca

SEQ ID NO: 43748 - DNA, 353 bp, Homo sapiens
  misc_feature (1)...(353): n = a,t,c or g
gggccagtcagggagtatattcagggtggtgcctatatccttttgaaatacctgtcattcttttaagcacttccatactgtctggcacagtaagattgttattttgtgctttctgggctccagcnnnnnnnnnnnnnnnnnnnnnnnnnnnnnnnnnnnnnnnnnnnnnnnnnnnnnnnnnnnnnnnngagacttgagtatgcttgatgctactgaggngtaattgcttntagcttctttcaacaggcagaactangaaatttacatacatgcntacctacatacacacaccataaancacatnnacntcgatatatgtatatatttnaaaaaactntgtcntatcaccacat

SEQ ID NO: 43749 - DNA, 342 bp, Homo sapiens
  misc_feature (1)...(342): n = a,t,c or g
gcctttgggtatcaccaaattgaaatggtattcttccttaactcttggttctttcctttatttgtttagacgtgcttcatcctgaagtggtgctatggtctgttaaacagggctggcatcaggtagagggagcagagtggtgacctgatagctcctgtcatcgtgttagntnttgattctatttaagggaagtagctgtnatttananggatgtagatgctctttgnntgnatgnaatcataancntatnnngtgctctnngntgatnntcatcgananattgttatnanatgtntnnnttntatatnnnctgnttgcnttngngnnttaangatttttatc

SEQ ID NO: 43750 - DNA, 371 bp, Homo sapiens
  misc_feature (1)...(371): n = a,t,c or g
gaaacaaacaaacaaacaagcnnnnnnnnnnnnnnnnnnnnnnnnnnnnnnnnnnnnnnnnnnnnnnnnnnnnnnnnnncnnnnnnnnnnnnnnnnnnnnnnnnnnnnnnnnnnnnnnnnnnnnnnnnnnnnnnnnnnnnnnnnnnnnnnnnnnnnnnnnnnnnnnnnnnnnnnnnnnnnnnnnnnnnnnnnnnnnnnnnnnnnnnnnnnnnnnnnnnnnnnnnnnnnnnnnnnnnnnnnnnnnnnnnnnnnnnnnnnnnnnnnnnnnnnnnnnnnnnnnnnnnnnnnnnnnnnnnnnnnnnnnnnnntcttaanganantgaattttcaanccnnaatttnantntncagtctnnntanatntttatagg

SEQ ID NO: 43751 - DNA, 353 bp, Homo sapiens
  misc_feature (1)...(353): n = a,t,c or g
nnnnnnnnnnnnnnnnnnnnnnnnnnnnnnnnnnnnnnnnnnnnnnnnnnnnnnnnnnnnnnnnnnnnnnnnngccacacctggctaatttttgcgtgtgtgnnnnnnnnnnnnnnnnnnnnnnnnnnnnnnnnnnnnnnnnnnnnnnnnnnnnnnnnnnnnnnnnnnnnnnnnnnnnnnnnnnnnnnnnnnnnnnnnnnnnnnnnnnnnnnnnnnnnnnnnnnnnnnnnnnnnnnnnnnnnnnnnnnnnnnnnnnagttttaatttttgttancagagntggtggggatctccactgttgacttttgtctctctgtcttctggtcattnntgcttctattattngactccta

SEQ ID NO: 43752 - DNA, 305 bp, Homo sapiens
  misc_feature (1)...(305): n = a,t,c or g
ggttaagataagcacagacttgcagaaaaggactgatcctcactgtgcctagaaatgaatggtaaatggtctcagccttaggctggttctggagcttcagaaaaatatcctgggcactttcaagctcgctaataagctatgagcttctaggatgtacgatgagtttctttgaagggccgtttattgttagagttgctggtttactaggaatnnnaatgacttccacangtagttnngtnangttactntactatnncattactgtaannggctgcttnctgcntaatggaaanngnannanagtc

SEQ ID NO: 43753 - DNA, 329 bp, Homo sapiens
  misc_feature (1)...(329): n = a,t,c or g
gcctagtcagtggtattaatttatctaaataaaatggattaactgaagggagatgttaagtatgaaaggaaaatgaggaatcaaaatgagtctggtttggcaggagggaggattctgacaaatgaaaatgatctgaggcctccagagtttggctttgatgtgagttaagtattttcttaggttttctttttttttttttggnanaaaanntttntaanccttttngtnggaattnnggnatnnccntcccaacctnnngggggnanaaattgggntnccanggcncntngccccctgnaagggtnacccccnttttcngnaaanntttt

SEQ ID NO: 43754 - DNA, 316 bp, Homo sapiens
  misc_feature (1)...(316): n = a,t,c or g
gggcaccttctagagttgctgaggagcaggggacaaacgtgtagaatcatgaaggaccacatttccacatatccaaaacaaccattctgcaggagaaatgaatatatagtattaagatatctgacttccttctgggacttgttttagagtngnatannttatngnaaatggnaantactangtatnctcnacnacnaatnantntnanaatantnttntcnggctnctnttanttgtatngntttcaantttnatcnttcnatnnntctaanantaatannnatnnnnntaatnttannnngnntncacncgtatt

SEQ ID NO: 43755 - DNA, 323 bp, Homo sapiens
  misc_feature (1)...(323): n = a,t,c or g
gcacaaccagttgtaccataaccatgtcatttgcatataaggcaactcagcccgggattgtgggattatttgtccattgtcacctagcggattagaatcagctgggaatggatctcatgtccctttaatgccttgcctgctgaaccctgagtggaaccctggccctttgctcttggtttaactttcacaggagtgcatataggtggttgagttgtggcatgtttctctagacttactcttaagttctaccctgnttcagggataactcatagncttggatggangaagaatggtgttggncacatggagaggtantatttata

SEQ ID NO: 43756 - DNA, 323 bp, Homo sapiens
  misc_feature (1)...(323): n = a,t,c or g
gnnnnnnnnnnnnnnnnnnnnnnnnnnnnnnnnnnnnnnnnnnnnnnnnnnnnnnnnnnnnnnnnnnnnnnnnnnnnnnnnnnnnnnnnnnnnnnnnnnnnnnnnnnnnnnnnnnnnnnnnnnnnnnnnnnnnnnnnnnnnnnnnnnnnnnnnnnnnnnnnnnnagagtggtaagggagaattctgtgaggagggggcattgaattgagactcaggtgaccgttgttgataangatgnatttccntgagccnatggactttgnnnctncnnngaggcnncnccncgntnatgnantnantnngngtttctgcangttcgatgt

SEQ ID NO: 43757 - DNA, 334 bp, Homo sapiens
  misc_feature (1)...(334): n = a,t,c or g
gaaaaaggaaagaaaatagtttaactacataccattcatgacttctgggtgctcacagttttctaagggaaatggacaagtaattcagtaataagacacagaaaatgacatgtttccaaaattccttgannnnnnnnnnnnnnnnnnnnnnnnnnnnnnnnnnnnnnnnnnnnnnnnnnnnnnnnnnnnnnnnnnnnnnnnnnnnnnnnnnnnnnnnnnnnnnnnnnnnnnnnnnnnnnnnnnnnnnnnnnnnnnnnnnnnnnnnnnnnnnnnnnnnnnnnnnnnnnnnnnnnnnnnnnnnnnnnnnnnnnnnnnnnnnnnnnnnnnnnnnnng

SEQ ID NO: 43758 - DNA, 322 bp, Homo sapiens
  misc_feature (1)...(322): n = a,t,c or g
ggtcactttgacgagaccgtcaataggtacaagcaatcccgggacatctccaccctcaacagtggcaagaagagcctggagactgaacacaaggccttgaccagtgagattgcactgctgcagtccaggctgaagacagagggctctgatctgtgcgacagagtgagcgaaatgcagaagctggatgcacaggtcaaggagctggtgctgaagtcggcggtggaggctgagcgcctggtggctggcaagctcaagaaagacacgtacattgagaatgagaagctcatctcaggaaagcgccaggactggtcaccaanatcga

SEQ ID NO: 43759 - DNA, 347 bp, Homo sapiens
  misc_feature (1)...(347): n = a,t,c or g
gacttcacacaaactggagacaaggttgcaaaacgaatgctaatatatttggcacactttctcacacttgtccttctgtgaacttttcttgttgctaatttgttatgtcagcccatgttagtaggtttcaaaagtccaaactggcaagtgtggtgacccaaagagaaccagcctttggaagatctttaaattgaaacataggagatgggcagattattanctggncctattntccnataatgnnnctngnnanctnggnnngtgcncnncctnntnnactnancctnnatnntnannncnttnntctngtnnnnnngnantcnnnnnncctntnnnnttntnnatta

SEQ ID NO: 43760 - DNA, 353 bp, Homo sapiens
  misc_feature (1)...(353): n = a,t,c or g
ggaagacaaagtcaaaaggtttcaagtccaagggttgagaagaaaatggtatcattatagaaccccattctaaagaagaaactggctttgggaaaaaagtaagctttggttttagatactttacatttgaaatgcaaagggaaatacccaggaggtgacttgaacttttctttcctacctgagggaagacaagagctggacatatgggaatcatctttctagaggtggtagttgaaacttccatgtgaacgagatcctcaaaagagtgaatggtgaggagggagaaagacaagggtggagggtaagatcttgggacgactcttacgttaaaccttggtaggaaatttanagac

SEQ ID NO: 43761 - DNA, 258 bp, Homo sapiens
  misc_feature (1)...(258): n = a,t,c or g
gagatgatgaagccgaggtagaagaagcctgtgaagacctgtgtggctgggaagcagggtgtgaggatgaggctngagangcaggggncgnccncccntagtgnatcttgtggntccctttacagattttatttatttatnactgngnntnttattncattgcccnggctatagtagnattggtngtaattgtactatanngcnccntgtgcctctggnggntngannattnnttnnacctgngaggnntnggntgtt

SEQ ID NO: 43762 - DNA, 269 bp, Homo sapiens
  misc_feature (1)...(269): n = a,t,c or g
gttcctgcctcgccctcccaaagtgtgattacgggcatgagccactgtacaatgtacaactatagctcagccatagccnnnnnnnnnnnnnnnnnnnnnnnnnnnnnnnnnnnnnnnnnnnnnnnnnnnnnnnnnnnnnnnnnnnnnnnnnnnnnnnnnnnnnnagttttactttttcaattttatatggctagaatcatactatatggttccttgtgttactgtgtcttcagtgttatgtttgagttttgtattattgctttnntttt

SEQ ID NO: 43763 - DNA, 374 bp, Homo sapiens
gcctagatgaatgaatgcattggccatgtcataggaaaaccacacagtcctgttacagccattcatcggaacagcccccgtcctatgaaggtacctcgatgccatagtgaccctcctaacccacacctcattatccccactccagagggattcaggggttccagcgttcctgaaaatgatcgattggcttccatagctgctgaattgcagtttaggtccctgagtcgtcactcaagccccacggaggagcgagatgaaccagcatatccaagaggagattcaagtgggtccacaagaagaagttgggaacttcggacactaatcagccagagtaaagatactgcttctaaactaggacccatagaagctatcca

SEQ ID NO: 43764 - DNA, 357 bp, Homo sapiens
  misc_feature (1)...(357): n = a,t,c or g
gagtgtcatcacctttgtaaaatcaactagatggatttagtgaaagaatttatgaccctgaatgcctccgcacccctgcggtcaagcttctcagacactatgatcagactacccgctctgaggnatntgttatnccnagcncncnctacnngtnccngntattnagannaaccttgannttctatatctgctgtattgcagnatncngcctnnggcntgntcaggcnccacggnnnatcgagangntncagggtannnatgncgagatnnaagngggtccacgctangaaggagggancttnggcnctatgcngncnnatnanatactgcttnnaactangncccntaaagcttttc

SEQ ID NO: 43765 - DNA, 353 bp, Homo sapiens
  misc_feature (1)...(353): n = a,t,c or g
gcatagggctcggcgtgggcaatctctgtaccctccactctgttttgctgtgaacctagaactactctaaaagnnnnnnnnnnnnnnnnnnnnnnnnnnnnnnnnnnnnnnnnnnnnnnnnnnnnnnnnnnnnnnnnnnnnnnnnnnnnnnnnnnnnnnnnnnnnnnnnnnnnnnnnnnnnnnnnnnnnnnnnnnnnnnnnnnnnnnnnnnnnnnnnnnnnnnnnnnnnnnnnnnnnnnnnnnnnnnnnnnnnnnnnnnnnnnnnnnnnnnnnnnnnnnnnnnnnnnnnnnnnnnnnnnnnnnnnnnnnnnnnnnnnnncttactncncatggccacanancnngaccctgct

SEQ ID NO: 43766 - DNA, 259 bp, Homo sapiens
  misc_feature (1)...(259): n = a,t,c or g
gaaaagcaaaggaaatatttaaccaatatgagatgctcagtattctcaggttgtaaagatctcttaaaaataggcaaaattattcccttgtaatagataaatgtacaaaaaacatatatatagttcatgaaagaagaaactgtaatgacctgtaattatatgaaatattgttcatctttaattttaaaaagcattaacatttttgcttaccaaattggcaaagattttaaaactttatggtgaaatgggtgnttntatt

SEQ ID NO: 43767 - DNA, 348 bp, Homo sapiens
  misc_feature (1)...(348): n = a,t,c or g
gaatttatttccaatagcattgtagttccccaaaatatttatgtatataatgtcaaataaaatagttgtactagatgatgtcatttttttaaaaattccgtaagcctgtgattttataatttccttacagcttaatatttccttgtnnnnnnnnnnnnnnnnnnnnnnnnnnnnnnnnnnnnnnnnnnnnnnnnnnnnnnnnnnnnnnnnnnnnnnnnnnnnnnnnnnnnnnnnnnnnnnnnnnnnnnnnnnnnnnnnnnnnnnnnnnnnnnnnnnnnnnnnnnnnnnggtatatccctgtggcccagctactanggaggctgangnggcangatcacttgannctgg

SEQ ID NO: 43768 - DNA, 366 bp, Homo sapiens
  misc_feature (1)...(366): n = a,t,c or g
gnnnnnnnnnnnnnnnnnnnnnnnnnnnnnnnnnnnnnnnnnnnnnnnnnnnnnnnnnnnnnnnnnnnnnnnnnnnnnnnnnnnnnnnnnnnnnnnnnnnnnnnnnnnnnnnnnnnnnnnnnnnnnnnnnnnnnnnnnnnnnnnnnnnnnnnnnnnnnnnnnnnnnnnnnnnnnnnnnnnnnnnnnnnnnnnnnnnnnnnnnnnnnnaagagaagggaaaatccaggagagtgtctaaatttgggaagtggtagactaccttaggtagaaataagacccannnnnnnnnnnnnnnnnnnnnnnnnnnnnnnnnnnnnnnnnnnnnnnnnnnnnnnnnnnnnnnnnnnnnnnnnnnnnnnnnnnnnn

SEQ ID NO: 43769 - DNA, 358 bp, Homo sapiens
  misc_feature (1)...(358): n = a,t,c or g
gcagaaatcaatggcatttgaaccaccagaaagaaatnnnnnnnnnnnnnnnnnnnnnnnnnnnnnnnnnnnnnnnnnnnnnnnnnnnnnnnnnnnnnacatatgcttgaacccagnagtgcctncacctnctgcncagcatgntcgatncctgtatctacaaaaaatacttgtattatncagagcatggcgcttacagtntcccatttgattntntannacnntnccnatnantgctttntnatntctngnngngtaaggnannnntttntnctncnnntganattngnnctntnntttggcnatnttcttctctctctntatnntannttttnatnnncttttttnnantanttca

SEQ ID NO: 43770 - DNA, 358 bp, Homo sapiens
  misc_feature (1)...(358): n = a,t,c or g
gcctgaactagaaggatgtcagtccctaaaacggaactgtctgattgttgaggagaacttgctcaatactcttcctctccctgtaacagaacgtttacagacgtgcttagacaaatgttgacttaaagaaaagagacccgtgtttcaaaatcatttttaaaagtatgctnnnnnnnnnnnnnnnnnnnnnnnnnnnnnnnnnnnnnnnnnnnnnnnnnnnnnnnnnnnnnnnnnnnnnnnnnnnnnnnnnnnnnnnnnnnnnnnnnnnnnnnnnnnnnnnnnnnnnnnnnnnnnnnnnnnnnnnnnnnnnnnnnnnnnnnnnnnnnnnnnnnnnnnnnnnnnnnnnnnnnnnnnnnnc

SEQ ID NO: 43771 - DNA, 245 bp, Homo sapiens
  misc_feature (1)...(245): n = a,t,c or g
ggatatagaaaagtttgtagaccggaggaactgaaattttttaagtttttgtagatctgacaatagtgggagtagaattaagatcactttaatgtttgtccagtgctttttttaaaaaaaaaatagactttattttttagagcagtttcaggtttacaatcangcnnagggtagggttccnatatgcctantntncntnnnctnanttttctntattactannntntgncnttantgnnnattat

SEQ ID NO: 43772 - DNA, 270 bp, Homo sapiens
  misc_feature (1)...(270): n = a,t,c or g
ggtctgtcactttggtattcctcattttcctgtgttcagaacagttcaggtcctctcttctgactactttgaaatacnnnnnnnnnnnnnnnnnnnnnnnnnnnnnnnnnnnnnnnnnnnnnnnnnnnnnnnnnnnnnnnnnnnnnnnnnnnnnnnnnnnnnnnnnnnnnnnnnnnnnnnnnnnnnnnnnnnnnnnnnnnnnnnnnnnnnnnnnnnnnnnnnnnnnnnnnnnnnnnnnnnnnnnnnnnnnnnnnnnnnnnnnnnnnnnnn

SEQ ID NO: 43773 - DNA, 362 bp, Homo sapiens
  misc_feature (1)...(362): n = a,t,c or g
gaacctgagcctcaggttcttactctgtaaaataggtgggatattaaacattgcattagtgagtggctggaaagtccccaaaggaactttgaagtagaggagacaatcgatccatgagagacaaggcctcactcacacacacacgcacaaacacacacacttggtctagtcctaggcactcctcacaaccccggttcctctcatctcccgagttagtggcagagcttgccaccagccagagcacaggccctgtgatgacacagtggaaagaatacgcctgcctgcccctgctgcagacacccaggaaggctcacgcccattaccagcccccatcaggccaccaacgccgtacctnctgctgg

SEQ ID NO: 43774 - DNA, 276 bp, Homo sapiens
  misc_feature (1)...(276): n = a,t,c or g
gcaaatacattttcaaaaatgattgaatttaaagaacaaaggatgcctgtaccagcatcaaatcatgaatcataagggctaatgctttaaattttgatttcgttgattattgacagattgcttctcacatggacagcactgtgcagcagctaaacgttagataacagcaataattttatttaaaagcatttataatagtactgagatccactgggaanaacagttgataaaatcnnaataacatctatnctatganngtnncctattgnntnccgg

SEQ ID NO: 43775 - DNA, 280 bp, Homo sapiens
  misc_feature (1)...(280): n = a,t,c or g
gggcagtttaacctatggcttagaatcatccagaaatagacctaatctcggaatgtattacagatatatttgtgacaggtactttgaatatatggaatttacttatcgtattttaatcaaataagagtatttgaagacaagttatttttagagtatcttattggactatttggtagcattttcgtttctattttcttgatgttctanctacttatttaaataatttccagntagcatancnnaattganngactgacctttnttntttcatgccttctgt

SEQ ID NO: 43776 - DNA, 366 bp, Homo sapiens
  misc_feature (1)...(366): n = a,t,c or g
gcagcgtcttcgctgctgctggatagtcgtgttttcggggatcgaggatactcaccagaaaccgaaaatgccgaaaccaatcaatgtccgagttaccaccatggatgcagagctggagtttgcaatccagccaaatacaactggaaaacagctttttgatcaggtggtaaagactatcggcctccgggaagtgtggtactttggcctccactatgtggataataaaggatttcctacctggctgaagctggataagaaggtgtntgcccaggaggncangaagganaatcccctncantaagttcggccaagntntaccctgaanangngnntgnngannnntncnnnanntnnncnnannntttt

SEQ ID NO: 43777 - DNA, 374 bp, Homo sapiens
  misc_feature (1)...(374): n = a,t,c or g
gaactgaccactaactaacaaactataaattcacccattgtgggttgacctggtaagttcccccagggctgtgtccttggcccctcctttgatattagtgacagatgactttttttatgccttacccattccacaaaagaatttgaagccatttacacaagagatagtactagtaaattaggagtgctgatcaaatttttagataataagaaacccttaggaaggatgacaatttagaatccaaatttaggatccaaacaaataccattacaaactataaaaatgagcagaatctaaatgtaacatttcaataaatgcagattgataataacatctgtgcanagttgaggactatagagtactgtgctgcctaa

SEQ ID NO: 43778 - DNA, 377 bp, Homo sapiens
  misc_feature (1)...(377): n = a,t,c or g
ggtaagatttggggaaacagaaataaggaaataaaaacatcccaagtgtgtctggtgcaggttaagtggcttagtgtgtggtaaggagtatagaaaatagtttgcaactagtttgtgaaaatcctgctaagacatctagannnnnnnnnnnnnnnnnnnnnnnnnnnnnnnnnnnnnnnnnnnnnnnnnnnnnnnnnnnnnnnnnnnnnnnnnntatctttatagatcnncctatcnatcttgggtnatatcttatntntgctaanatactannnttanttgtcttngnntanctcttcnattngantntnantcnnntncttncntatnnntgnnntnttcttattnttntnntcttttctttngnctnctattcc

SEQ ID NO: 43779 - DNA, 86 bp, Homo sapiens
gggcatgtggtaggtgaagcccaccattgtcaagtacctacctagagggtttggggtagagggtcctgtggcttcttctatttttt

SEQ ID NO: 43780 - DNA, 96 bp, Homo sapiens
  misc_feature (1)...(96): n = a,t,c or g
gttttgcttggctatcattccatcatagtatatatgtgtctactataccttttgcttcnnnnnnnnnnnnnnnnnnnnnnnnnnnnnnnnnnnnnn

SEQ ID NO: 43781 - DNA, 284 bp, Homo sapiens
  misc_feature (1)...(284): n = a,t,c or g
ggtggctgaagaggcaggaggaacagtgtatccacagcgtgggaccatgccaggcacaaaacggtttcaacatgtcattgagaccccggagcctggcaagtgggagttgactgggtacgaggcagctgtgccaatcacgnagaagtcanaccnactgacccangatctagacaaagcagatgctnagaacatngttcnactgctanggcaatgtnatnctgatanntttcaggaggannngnannccctgtnccataccanagactntacantnnntnattttg

SEQ ID NO: 43782 - DNA, 337 bp, Homo sapiens
  misc_feature (1)...(337): n = a,t,c or g
ggcacattatttagaaggcagtggggagacatgggtgagtttgaggccttacattagcatgtagtggatcactgtggctgcagaatgaaggagagggggcgaggcaggaacagaacctagttgggagttgctgcactttggtcaagagatggtaactcctgaaccagatctttggctganacaatganaggtgattatagaggctatganccnnatcttcggctanngcnattantctgaggtnatacttnactcngnaannnttnnggnccnnananntnnnttcntttttnnnntttcntttnnnntctctcttgnccntgnntatanttnttct

SEQ ID NO: 43783 - DNA, 355 bp, Homo sapiens
gggtgcagtcactggtcagggatacgagttcttttcggggaggcaagtgtgttctaagcgtgttctggatggggagaggtgcagtcactggtcagggacacgagttcttgtgggaagaggagtgtccgggagccagatggcagtgatgggtggacggccccgtggatggactgaccaccgacccatgctctgcactcatgaggcgtggctattgctgtgtgaatcacatctccatggaaacgggagtgggagaaacgggccccaaggatgttgtgaagatggccttatggggctgcactggtgacttggacagtgctggccaccggccctgctcagtgaacaagagccatggtca

SEQ ID NO: 43784 - DNA, 357 bp, Homo sapiens
gggctgaggaaagccaatgtcaatacatacacgaggtgaaaagatgactttctgcacattcaaatctctggccaaaggctggagtaggggcaggggcaggggtgaaagccttagacttgaagccagtccatttagggtttgcttgtttcgcttccttctccctcctgcggctgcttcactgatggccctgaggaaatgacagtgtgaggcccagcttcgttcagacccctgtctctcaagtgatgacaggcctccgttccctggagagaactcaggtcaggagcacctgtccccctggcctgctggttccagctaagtcctcccctccttcacagggaatatggaccggcaccatta

SEQ ID NO: 43785 - DNA, 353 bp, Homo sapiens
  misc_feature (1)...(353): n = a,t,c or g
gaagatgatgttaaatggcacattgtccacatcattaaataacatccaatcccatatagagagaattattccactttcagttctctctcaggcttccaggtgaggaaagttagttgttggaggtatgatttaaacacctcttcangccctgctaanctttttaagcntncnagagcnnanctacgngngcatagctttnantncacngtgnntatgtntanntnnccnttatcnnattggntttnattngctnntncntaantncttcnttctcnntnnccgnnttttnntctnntnntaannctccantnnntnnttncnnancnttnnctnatctctntnnnncncacttg

SEQ ID NO: 43786 - DNA, 356 bp, Homo sapiens
  misc_feature (1)...(356): n = a,t,c or g
gnnnnnnnnnnnnnnnnnnnnnnnnnnnnnnnnnnnnnnnnnnnnnnnnnnnnnnnnnnnnnnnnnnnnnnnnnnnnnnnnnnnnnnnnnnnnnnnnnnnnnnnnnnnnnnnnnnnnnnnnnnnnnnnnnnnnnnnnnnnnnnnnnnnnnnnnnnnnnnnnnnnnnnnnnnnnnnnnnnnnnnnnnnnnnnnnnnnnnnnnnnnnnnnnnnnnnnnnnnnnnnnnnnnnnnnnnnnnnnnnnnnnnnnnnnnnnnnnnnnnnnnnnnnnnnnnnnttggannctgtnnangatgattgtctncacanttgtnnttctactgtnatcctataaatcncngtctntnantgcattacc

SEQ ID NO: 43787 - DNA, 362 bp, Homo sapiens
gcaaattttcaaataaagttgtgaaatctgccctgtatttatggttaaacaagatgattcacattattcattttgtcatgctccatctaaaaattatctcggcagttaatgacagataacattaatttaaactttattttggaagagtaagtatttcgcgtctaacaaggttgattgtaattcttttagaacattgctttggttgtgtcctattatgttttctgatggtgatggtctagagaaatgagagtatttcggctgaaatttatgctttaagtcaaaggtatgtatcaacttggttttagtgggtttttttgttttttttcttttggatggagttttgctcttgtagcccaggctgg

SEQ ID NO: 43788 - DNA, 319 bp, Homo sapiens
  misc_feature (1)...(319): n = a,t,c or g
ggacaaggaaggaatgcacccgattccaatcactgcttatgatggccagtgattaaagatgggaggaaatcccacggtggctcaagggaacaggaacaagttttcagaatggtcagactttgccccccttgtggcattgggcaaaacacttaagtgggtcacctcactgaggcctttcccttccacatggagtttcctggctttgctgtccatggtgntgtnattcntactttntnancnannttttnncnttnagntttntnncaantttnnaagttncttntatcttttttntctattnnttnctattatnntgttt

SEQ ID NO: 43789 - DNA, 327 bp, Homo sapiens
  misc_feature (1)...(327): n = a,t,c or g
ggtgttcatagaacgggtaattttaaaaaaagaaaaaagaccgcaacgagggatatgggaatgatgaaccaactatatatcataacaccacaagcagaaaccaattaaagagaaagctgacatacacaggagaaaatcaacaaacccaaaagttggttctgataaactctagtgctgcctgatgggttcatcttacctgctgcccagaaagcccaacacactgagaacagcaggttttttgcagcaaagnnnnnnnnnnnnnnnnnnnnnnnnnnnnnnnnnnnnnnnnnnnnnnnnnnnnnnnnnnnnnnnnnnnnnnnnnnnnnn

SEQ ID NO: 43790 - DNA, 325 bp, Homo sapiens
  misc_feature (1)...(325): n = a,t,c or g
ggaagccactggagctgagtgtaagagctgggagggccgaggcagccaccctggggcctgagcaagctgttcatccaggggtatagagaggcccagctgcaaagaagggctgggactgggatatggagctctaagggaccaggtcattgaacttgcttgaaatggccctgtggaccaaagggaactttcctgtgcagcgcgggcccctaattcttcactgaggcccagggtgacaggtccagcttgtcgatggctgagcaatccacgaagtcataggggtagctgttggcccanaatgggtcccgtgggaccttggtgatgcggg

SEQ ID NO: 43791 - DNA, 344 bp, Homo sapiens
  misc_feature (1)...(344): n = a,t,c or g
gagattggtgtctcagaccagtctgtttgtcacagtggtctaggtaggagaagacaatggcaaaggggatgagaagtggattgatttgagagatatttaagcaatnnaatcnntngaacttgattgatcacatacatgagatatgaaaggaggnangantggtcanttttctggctcanntagntnggnagacggtgctnttcccnaatctggtgtatcngattatttattatanntttgnngttnntatnnttntncnctnttntgnnctnnncctttgnctctncttcntgntnatacccanctctngnncncctnnttnntccnnngacncnactacgtcg

SEQ ID NO: 43792 - DNA, 326 bp, Homo sapiens
  misc_feature (1)...(326): n = a,t,c or g
gacccagtgaccctacggacagagcggaggtggagaaggactcggggcacggcagcacttccgtggattctgaggggttcagcatcccagacacgggcagtcactgcagcagcgagtatgcggccagctccccaggggacaggggctcgcaggaacatgtggactctcaggagaaagcgcctgaaactgacgactctttttcagatgtggactgccattcaaaccaggaagataccggatgtaaatttcgagttttgcctcaaactaatctcgnaaccccaaacacaaagcgttttaaaaaagaagaaattctttccagttcttgg

SEQ ID NO: 43793 - DNA, 349 bp, Homo sapiens
  misc_feature (1)...(349): n = a,t,c or g
gggataataaagtaatactactttataacctttatttaaaaacttactattgtttatcatagcatgtctcatgcttatacatgtaattctacatcatcatttttaacgacagcatagcattctgatcttttgagcaatacaatttatttaagccattttataaattgcatttagaatgcaattagaaaaattaattactttttggttctttgagttggannnnnnnnnnnnnnnnnnnnnnnnnnnnnnnnnnnnnnnnnnnnnnnnnnnnnnnnnnnnnnnnnnnnnnnnnnnnnnnnnnnnnnnnnnnnnnnnnnnnnnnnnnnnnnnnnnnnnnnnnnnnnnnnnn

SEQ ID NO: 43794 - DNA, 349 bp, Homo sapiens
gggaaaccctgtcagctgcacctacagaacctctccaaaatctgaactcttctccccgtccactgcccccaccctgctccagcccccttcccctcccctctggacatcccagagcctcctccctggcctccctgctcccatccctgccccccaatcatatcccacaaaggggatatgactcactcacttaaccggcaattctggagggtcttaaaacctggctgcctcaagaggctttaaaatgttatcagatgggggccaggtacagtggctcatgctggttccccacttgcagccagagggagctggtgaccacctgagtcaggtcagggccctcccctggctgcac

SEQ ID NO: 43795 - DNA, 268 bp, Homo sapiens
  misc_feature (1)...(268): n = a,t,c or g
gactggagtctttcaaaaatatattcatgagcttcgtagagattccatttttcggtggctctttcaagtcctcaacgttccacagccagctctctgggaactcacttcgggaaacgatgttctcttctgcaatgatgtcctcatccaggttactcctggccaggcccaggtggctggcccgcgcgtgctgccgccgcagctctgtgatgnantgcngcagncnngaanaccttcttgcacncctnnnccangnanannancngnccgg

SEQ ID NO: 43796 - DNA, 375 bp, Homo sapiens
  misc_feature (1)...(375): n = a,t,c or g
gttgttttgaacagaactgttttttccccttcctgtaagacgatgtgactgcacaagagcactgcagtgtttttcataataaacttgtgaactaagaactgagaaggtcaaattttaattgtatcaatgggcaagactggtgctgtttattaaaaaagttaaatcaattgagtaaattttagaatttgtagacttgtaggtaaaataaaaatcaagggcactacataacctctctggtaactccttgacattcttcagattaacttcaggatttatttgtatttcacatattacaatttgtcacattgttggtgtgcactttgtgggttcttcctgcatattaacttgnttgtaagaaaggaaatctgcgctgct

SEQ ID NO: 43797 - DNA, 401 bp, Homo sapiens
  misc_feature (1)...(401): n = a,t,c or g
cccacgcgtgcggttgttttgaacagaactgttttttccccttcctgtaagacgatgtgactgcacaagagcactgcattgtttttcataataaacttgtgaactaagaactgagaaggtcaaattttaattgtatcaatgggcaagactggtgctgtttattaaaaaagttaaatcaattgagtaaattttagaatttgtagacttgtaggtaaaatacaaatcaagggcactacataacctctctggtaactccttgacattcttcagattaacttcaggatttatttgtatttcacatattacaatttgtcacattgntggtgtgcactttgtgggttcttcctgcatattaacttgnttgtaaganagganatctgngctgcttcngtaagacttaa

SEQ ID NO: 43798 - DNA, 376 bp, Homo sapiens
  misc_feature (1)...(376): n = a,t,c or g
gcattttaagagcaacgtctgatatttttggataaaaatgctaactctgtgatgttgattcataaaatgttcccaagaattggtatattaaaattattcnnnnnnnnnnnnnnnnnnnnnnnnnnnnnnnnnnnnnnnnnnnnnnnnnnnnnnnnnnnnnnnnnnnnnnnnnnnnnnnnnnnnnnnnnnnnnnnnnnnnnnnnnnnnnnnnnnnnnnnnnnnnnnnnnnnnnnnnnnnnnnnnnnnnnnnnnnnnnnnnnnnnnnnnnnnnnnnnnnnnnnnnnnnnnnnnnnnnnnnnnnnnnnnnnnnnnnnnnnnnnnnnnnnnnnnnnnnnnnnnnnnnnnnnnnnnnnnnnnnnnnnnnnnntactccatc

SEQ ID NO: 43799 - DNA, 393 bp, Homo sapiens
  misc_feature (1)...(393): n = a,t,c or g
gcattttaagagcaacgtctgatatttttggataaaaatgctaactctgtgatgttgattcataaaatgttcccaagaattggtatattaaaattattcnnnnnnnnnnnnnnnnnnnnnnnnnnnnnnnnnnnnnnnnnnnnnnnnnnnnnnnnnnnnnnnnnnnnnnnnnnnnnnnnnnnnnnnnnnnnnnnnnnnnnnnnnnnnnnnnnnnnnnnnnnnnnnnnnnnnnnnnnnnnnnnnnnnnnnnnnnnnnnnnnnnnnnnnnnnnnnnnnnnnnnnnnnnnnnnnnnnnnnnnnnnnnnnnnnnnnnnnnnnnnnnnnnnnnnnnnnnnnnnnnnnnnnnnnnnnnnnnnnnnnnnnnnnnnnctccatctccaaaggaaaaacaaa

SEQ ID NO: 43800 - DNA, 390 bp, Homo sapiens
  misc_feature (1)...(390): n = a,t,c or g
gcattttaagagcaacgtctgatatttttggataaaaatgctaactctgtgatgttgattcataaaatgttcccaagaattggtatattaaaattattcnnnnnnnnnnnnnnnnnnnnnnnnnnnnnnnnnnnnnnnnnnnnnnnnnnnnnnnnnnnnnnnnnnnnnnnnnnnnnnnnnnnnnnnnnnnnnnnnnnnnnnnnnnnnnnnnnnnnnnnnnnnnnnnnnnnnnnnnnnnnnnnnnnnnnnnnnnnnnnnnnnnnnnnnnnnnnnnnnnnnnnnnnnnnnnnnnnnnnnnnnnnnnnnnnnnnnnnnnnnnnnnnnnnnnnnnnnnnnnnnnnnnnnnnnnnnnnnnnnnnnnnnnnnnnnctccntctccaaagganaaac

SEQ ID NO: 43801 - DNA, 363 bp, Homo sapiens
  misc_feature (1)...(363): n = a,t,c or g
caagtgggggcagagggcagaggctggaggcagggccttgcccagagatgcctccaccgctgcataagtggctgctgactgatgttgagggaacagacaggagaaatgcatccattcctcagggacagagacacctgcacctccccccactgcaggccccgcttgtccagcgcctagtggggactccctctcctgcctactcacgataaataatcggcccacagctcccaccccacccccttcagtgcccaccaacatcccattgccctggttatattctcacgggcagtagctgtggtgaggtgggttttcntcccatnactncncnacctnncacctctctcacctnctganagacccact

SEQ ID NO: 43802 - DNA, 380 bp, Homo sapiens
  misc_feature (1)...(380): n = a,t,c or g
caagtgggggcagagggcagaggctggaggcatggctcttgcccagagatgcctccaccgctgcataagaggctgctgactgatgttgagggaacagacaggagaaatgcatccattcctcagggacagagacacctgcacctccccccactgcaggccccgcttgtccagcgcctagtggggtctccctctcctgcctactcacgataattaatcgggccacagctcccaccccacccccttcagtgcccaccaacatcccattgccctggatatattctcacgggcagtagctgaggngaggagggntntcttcccatcactggagaancaggcactaacctacctgctgagagacccaaagaggatatacagacaaa

SEQ ID NO: 43803 - DNA, 377 bp, Homo sapiens
  misc_feature (1)...(377): n = a,t,c or g
gcgtgtgtgtgtgaattgcattcatcacaaagatattgaagacaataaataatctttataacaaactccttgggttggactattaaacaatagcagagccaagaaataggacttttaaaagtcctattattnnnnnnnnnnnnnnnnnnnnnnnnnnnnnnnnnnnnnnnnnnnnnnnnnnnnnnnnnnnnnnnnnnnnnnnnnnnnnnnnnnnnnnnnnnnnnnnnnnnnnnnnnnnnnnnnnnnnnnnnnnnnnnnnnnnnnnnnnnnnnnnnnnnnnntgngcacccgtantcccacctatttgacgaagctgangcagaacgaatancttgaacctgnnagatgnangctacagtnagcctccattgccccac

SEQ ID NO: 43804 - DNA, 377 bp, Homo sapiens
attatttcagaggcaacctgcagctgtccatgctttgatagatgatactcaaaactgtgatgatattgccatgaattttatcattgccaagcatattggcaagacttcagggatatttgtgaagcctgtaaacatggacaatttggaaaaagaaaccaacagtggctattctggaatgtggcatcgagctgagcacgctctgcagaggtcttattgtataaataagcttgttaatatctatgatagcatgcccttaagatactccaacattatgatttcccagtttggttttccatatgccaactacaaaagaaaaatataaaagtaaaacaaacaaaaacaaacctgaaaactgcttggcatttgagtagcttctt

SEQ ID NO: 43805 - DNA, 382 bp, Homo sapiens
  misc_feature (1)...(382): n = a,t,c or g
ctatttccgaggcaacctgcacactgtccatgctttgatcgatgatactcagagctgtgatgatattgccatgactgttatcattgccgggcatattggcaagacttcagggatatttgtgaagcctgtatgcatggacgatttggaaactgaaaccaacagtggctattctggaatgtggcatcgagctgagcacgctctgcacagggcttattgtataaataatcttgttaatatctatgatagcatgcccttatgatactcccacattatgagttcccagtctgggattccatatgcatctacanacgaatnacntntantgganacagacnatgacnaacctgaaaactgcttggcatttgagtagcttctccatgct

SEQ ID NO: 43806 - DNA, 370 bp, Homo sapiens
  misc_feature (1)...(370): n = a,t,c or g
caaaagaatccagaaacattaaggcagggacagcagtcagaatcgacataaagctttaaaaactcaaggttttttcaacctactgaggagtacttttctctagttgttaaatagctggagtttttcttattcaggtttaatggaggttgaattgatttttaaacacatataacagtaggaaatgaataaatgggcttcctgcantnggctttctacctgttccaaggctanatcggaactggtagactacgctgtnngcnggatntcactacctctcttacntgtttagcaaacttctanatagcccattttaagggagaacntactaactttattgcgaaaggtctaaangcccacttgactgaagctg

SEQ ID NO: 43807 - DNA, 383 bp, Homo sapiens
caaaagaatccagaaacattaaggcagggacagcagtcagaatcgacataaagctttaaaaactcaaggttttttcaacctactgaggagtacttttctctagttgttaaatagctggagtttttcttattcaggtttaatggaggttgaattgatttttaaacacatataacagtaggaaatgaataaatgggcttctgcatttggctttctacctgttccaaggctagatcggaactggtagactacgctgtaagcaggatttcactacctctcttaaggtttagcaaacttctaaatagcccattttaagggagaacttactaactttattgtgaaaggtctaaatgcccacttgaatgaagctgagagagagatctaag

SEQ ID NO: 43808 - DNA, 368 bp, Homo sapiens
ggaaccacctggacgaagagcaggccagcccggacctctggagtgcccccagcccagagcccggtgggtccgcatccctgcttctggcgccccacccaccccacacctgcagtgccagctccctcgtcttcagctgcatttcacatgccttgcaatggatcagccaaggccgagaccccatcttccagccacctagtcccccaaagggcctcctcacccaccctgtggctcacagtggggccagcatactccgtgaggctgctgccatccatgtgctagtcactggcagcctgcacctggtgggtggtgtcctgaagctgctggagcccgcactgtcccagtagccaaggcccggggttggaggtggg

SEQ ID NO: 43809 - DNA, 383 bp, Homo sapiens
ggaaccacctggacgaagagcaggccagcccggacctctggaatgcccccagcccatagcccggtgggtccgcatccctgcttctggcgccccacccaccccacacctgcagagccagctccctcgtcttcagcatgcatttcacatgccttgcaatggatcagccaaggccgagaccccatcttccagccacctagtcccccaaagggcctcctcacccaccctgtggctcacagtggggccagcatactccgtgaggctgctgccatccatgtgctagtcactggcagcctgcacctggtgggtggcgtcctgaactgctggagcccgcactgtccagtagccaaggcccggggttggaggtgggagcttccacacctgcc

SEQ ID NO: 43810 - DNA, 448 bp, Homo sapiens
  misc_feature (1)...(448): n = a,t,c or g
tcagtgtaantttntgnaangaccnntttgaacggccctcccacgcgtccgggaaccacctggacgaagagcaggccagcccggacctctggagtgcccccagcccagagcccggtgggtccgcatccctgcttctggcgccccacccaccccacacctgcagtgccagctccctcgtcttcagctgcatttcacatgccttgcaatggatcagccaaggccgagaccccatcttccagccacctagtcccccaaagggcctcctcacccaccctgtggctcacagtggggccagcatactccgtgaggctgctgccatccatgtgctagtcactggcagcctgcacctggtgggtggtgtcctgaagctgctggagcccgcactgtcccagtagccaaggcccggggttggaggtgggagcttcccacacctgcctgcgttctcccc

SEQ ID NO: 43811 - DNA, 330 bp, Homo sapiens
ggaatcagtcctggctctaccactggcatatgacttgggcaagttacttatgattgtgcctcagtccctaatttgtaaaataagcacttactggatttgtaattggttatttatagtcccttccctttttattaagataattctattagaacacattttctgtaagataatatatacgtaatactagaagttggctagaatttgatgatattaaccatgtattattttcagtatttattgaattctgtggtctttgaccttttggctatagttacatattacagttatattatctgtaatagaaaggaagataaactttttttttttttt

SEQ ID NO: 43812 - DNA, 340 bp, Homo sapiens
  misc_feature (1)...(340): n = a,t,c or g
ggaatcagtcctggttctaccactggcatatgacttgggcaagttacttatgattgtgcctcagtccctaatttgtaaaataagcacttactggatttgtaattggttatttatagtcccttccctttttattaagataattctattagaacacattttctgtaagataatatatacgtaatactagaagttggctagaatttgatgatattaaccatgtattattttcagtatttattgaattctgtggtctttgaccttttggctatagttacatattacagttatattatctgtaatagaaaggaagataaacttttttttntnttttttcnctttc

SEQ ID NO: 43813 - DNA, 348 bp, Homo sapiens
  misc_feature (1)...(348): n = a,t,c or g
ctctttctggctgctctgtgggtcttcctgttctgacttaggttcctgtcaagtacttaaatgcacccttaacatcccatacagtcttgtccccacagcttcatgtgaacatctccatgggccatgcatatattgtccctgcagtgcgcaaagtgtgctcacctgcactgatgcacaggcaaccaacatacttagtgcccagagccttctctctgggcccangactcagngatggggccttacttanncctgcctcctggnaggggagggngannctctccaccnnncacaactctccntcaanccaacnnancccncccncacctccccttcaacnncnccnacccc

SEQ ID NO: 43814 - DNA, 350 bp, Homo sapiens
gataaaattaaaaattaatcagtatctaatttaatatccataactatttttccttagattttagtcacgtacagtgggctatgtggatgtcacttgtgcttcaccatagtttaccactaggtgtcactgtggctctgcactgcgcttgttttgtagcaaagaacagcggcatcccctcgggagagaggagctgcttccagggcaacaggcaagcgggctcagaggttcaggagaaggcaacagaggcctggaaggggtcttcgtgcatctgtgccagttgtgcaagacgaactctttgaacactacatgctttggacttcagccaggcagaggctggaagaaggttgacc

SEQ ID NO: 43815 - DNA, 347 bp, Homo sapiens
  misc_feature (1)...(347): n = a,t,c or g
cccacgcgtccggnnnnnnnnnnnnnnnnnnnnnnnnnnnnnnnnnnnnnnnnnnnnnnnnnnnnnnnnnnnnnnnnnnnnnnnnnnnnnnnnnnnnnnnnnnnnnnnnnnnnnnnnnnnnnnnnnnnnnnnnnnnnnnnnnnnnnnnnnnnnnnnnnnnnnnnnnnnnnnnnnnnnnnnnnnnnnnnnnnnnnnnnnnnnnnnnnnnnnnnnnnnnnnnnnnnngtaccgttttgaggtcagtcttaaacatttgctttaagaaaacagtcttgaatttcacatgctgctatttttatattttgccattttacagtactgttttgttttgaattcatgcatatcat

SEQ ID NO: 43816 - DNA, 332 bp, Homo sapiens
  misc_feature (1)...(332): n = a,t,c or g
atgctcgaaataacaacgctattcctgtggtgggagaaggccttcatgcagcccaccaagccatactccagcagggagggcctgttggctttcagccttaccgccgacctttaaattttccactcaggatatttctgttgattgtcttcatgtgtataacattactgattgccagcctcatctgccttactttaccagtatttgctggccgttggttaatgtngcnnnggacggngactgccaaaatccatgagctctacacagntgcttgtggnntctatgtttgctggctaaccatatggnctgnganngtgatggngncntgnatgcct

SEQ ID NO: 43817 - DNA, 357 bp, Homo sapiens
  misc_feature (1)...(357): n = a,t,c or g
catggctgttgtgtacactgcggacatccatacctcaccacagaccaaagatgacctcgtgtcagactgtgggctgatgagaggtagagcagcatgcatcgaggcctgagggtgcagggcgccctctcttggcctggaggaattgctcctaactagagtaagtttccacgagggtcccaggcagagctgcagagctggaaccggaggctccacagtccttgcctgctcatggacctccttcagagcacctttctacagactggactgcccagctccgtgnggtggcatctggtttctggngctattctgncnagttatcnagctgntgctcatgtcccaacattccatnttnccgtt

SEQ ID NO: 43818 - DNA, 351 bp, Homo sapiens
  misc_feature (1)...(351): n = a,t,c or g
gaactctgggatgattttaatcttgaagtagtaggtggtatagtcataaaaccattcatccccttcttgattgtatcttaattttctggctttaaggcgacatctgagaggtaatgcattcttttttatattgaaatcataaactatcacccgctgcttctctgagttacttttaattttgccttgtggttatggcttggcgtttccttctgtttggttttcaaagccccatgtctatctagtcctgagtgcaagtaattactatacttgtaaatgangatcagtatttctgcctanatctgataaaaaaattttcttgncttanntataaaaattcaaagaaatgtgttc

SEQ ID NO: 43819 - DNA, 353 bp, Homo sapiens
cccacgcgtccgcctgtctcccagcaggagtttgacaagaacaccttggatctcaggcaacagaacggaactgcctcatcacggaagaccctctggaatcaagaactctacatccagcaggacaactcagagaggaagcggaaacaccttccagaccgacaggatgggcctgcagccaagagtgagaaagcagcccccagaagtcagcactggttgcacagggacctgcgtgtgcggtttgtggacaacatgtacaaaggaggccaatattacaacaccaagatgataattggagatgtcctaagcccagatacctgtgtatgtcggacagatgaaggccgagtcctggaagg

SEQ ID NO: 43820 - DNA, 152 bp, Homo sapiens
  misc_feature (1)...(152): n = a,t,c or g
cccacgcgtccgctatatagggatctcactatatagagcaatacagcgggatcacccgacctcgggtgatccgctcgttggcctcccaaagtgctagtgttacaagtgtgagccaatgcgcccagccctattcttttntttttttttttttt

SEQ ID NO: 43821 - DNA, 361 bp, Homo sapiens
  misc_feature (1)...(361): n = a,t,c or g
ggtttttttagtccctagtgaaacagtttttcctgcacaaagcatataatccaaactgtctatttttctctttaaaaaacttcttgtatatatttctttagagacnnnnnnnnnnnnnnnnnnnnnnnnnnnnnnnnnnnnnnnnnnnnnnnnnnnnnnnnnnnnnnnnnnnnnnnnnnnnnnnnnnnnnnnnnnnnnnnnnnnnnnnnnnnnnnnnnnnnnnnnnnnnnnnnnnnagagtaaacagagagcaaaaggatcctataaataaaacattttgcttattttgaaaaaacaaacaaactgtactttgacattatctcccttgtccacacatgcatctttttacataagagtattc

SEQ ID NO: 43822 - DNA, 361 bp, Homo sapiens
  misc_feature (1)...(361): n = a,t,c or g
ccacacctgnnnnnnnnnnnnnnnnnnnnnnnnnnnnnnnnnnnnnnnnnnnnnnnnnnnnnnnnnnnnnnnnnnnnnnnnnnnnnnnnnnnnnnnnnnnnnnnnnnnnnnnnnnnnnnnnnnnnnnnnnnnnnnnnnnnnnnnnnnnnnnnnnntgaatcttgtcttttgacaataccaaagaaatagggggtagctagagtaaagaacctagggcctggacctgggctggacagtgtatccctttaggtgtgggaactgggtatttccctggggtctgtatgcctttgtcttgtcatttgcttttagggcagatgacactttttcccacccttttaaagctacaagtctatcttctttc

SEQ ID NO: 43823 - DNA, 318 bp, Homo sapiens
  misc_feature (1)...(318): n = a,t,c or g
cgtgcatgcgacgtcatagctctctccctatagtgagtcgtattataagctagcttnnnnnnnnnnnnnnnnnnnnnnnnnnnnnnnnnnnnnnnnnnnnnnnnnnnnnnnnnnnnnnnnnnnnnnnnnnnnnnnnnnnnnnnnnnnnnnnnnnnnnnnnnnnnnnnnnnnnngctgcatatgcttgctgcttgagagttttgcttactgagtatgatttatgaaaatattatacacaggagctaggattcnnancccnntnnnttananntcngnnantgcttnantnacntttnancnnannnntgnnnnantgat

SEQ ID NO: 43824 - DNA, 378 bp, Homo sapiens
cccacgcgtccggggttgctcctgctcccgtctccaagtcctggtacctccttcaagctgggagagggctctagtccctggttctgaacactctggggttctcgggtgcaggccgccatgagcaaacggaaggcgccgcaggagactctcaacgggggaatcaccgacatgctcacagaactcgcaaactttgagaagaacgtgagccaagctatccacaagtacaatgcttacagaaaagcagcatctgttatagcaaaatacccacacaaaataaagagtggagctgaagctaagaaattgcctggagtaggaacaaaaattgctgaaaagattgatgagtttttagcaactggaaaattacgtaaactggaaaag

SEQ ID NO: 43825 - DNA, 364 bp, Homo sapiens
attttggcatatttaccacaagaacttctaggcacatcgtgttatgaatattttcaccaagatgacataggacatcttgcagaatgtcataggcaagttttacagacgagagaaaaaattacaactaattgctataaatttaaaatcaaagatggttcttttatcacactacggagtcgatggttcagtttcatgaacccttggaccaaggaagtagaatatattgtctcaactaacactgttgttttagccaacgtcctggaaggcggggacccaaccttcccacagctcacagcatccccccacagcatggacagcatgctgccctctggagaaggtggccaaagaggacccaccccactgt

SEQ ID NO: 43826 - DNA, 365 bp, Homo sapiens
gcgagccatttaacatggcggaggatgtttcctcagcggccccgagcccgcggggctgtgcggatggtagggatgccgaccctactgaggagcagatggcagaaacagagagaaacgacgaggagcagttcgaatgccaggaactgctcgagtgccaggtgcaggtgggggcccccgaggaggaggaggaggaggaggaggacgcgggcctggtggccgaggccgaggccgtggctgccggctggatgctcgatttcctctgcctctctctttgccgagctttccgcgacggccgctccgaggacttccgcaggacccgcaacagcgcagaggctattattcatggactatccagtctaacagct

SEQ ID NO: 43827 - DNA, 365 bp, Homo sapiens
cccacgcgtccgcacggtctctgaaaccttcatgagcaagcccagcattgctaagaggagagccaaccagcaagagacagagcagttttatttcacagtaagggagtgctatggcttttaaagagcgtcagcatgcactgcagcactcaagggagatttggaactcagagtccttgttaagtgtctgaaggacaggcattgaatatcttagatacgaatgtgggcatactcagagaccatccctacacttaaaggtgcaaacattaaaagttgtatatgtctaacagggatccgcccaagagaaaggatgctcccaagtatacaactaagaagattttcttttttaagaaatttttaactagcta

SEQ ID NO: 43828 - DNA, 366 bp, Homo sapiens
ggagaacatggaattgtggttttctctttgggatcaatggtctcagaaattccagagaagaaagctatggcaattgctgatgctttgggcaaaatccctcagacagtcctgtggcggtacactggaacccgaccatcgaatcttgcgaacaacacgatacttgttaagtggctaccccaaaacgatctgcttggtcacccgatgacccgtgcctttatcacccatgctggttcccatggtgtttatgaaagcatatgcaatggcgttcccatggtgatgatgcccttgtttggtgatcagatggacaatgcaaagcgcatggagactaagggagctggagtgaccctgaatgttctggaaatgact

SEQ ID NO: 43829 - DNA, 356 bp, Homo sapiens
gtccaccctggcggggtcgcagggttgggatggcggctggaggcgatcatggttcgcccgacagctaccgctcacctcttgcctcccgctatgccagcccggagatgtgcttcgtgtttagcgacaggtataaattccggacatggcggcagctgtggctgtggctggcggaggccgagcagacattgggtttgcctatcacagatgaacaaatccaggagatgaaatcaaacctggagaacatcgacttcaagatggcagctgaggaagagaaacgtttacgacatgatgtgatggctcacgtgcacacatttggccactgctgtccaaaactgcaggcattattcaccttggtg

SEQ ID NO: 43830 - DNA, 361 bp, Homo sapiens
gaaattaccaatctcaggcttggggtggaagcatgctgtttggcctgtggttggagacctctccgttgtcattctgtcatcccgttgatttaaacttcctggaccctaattgccagttgaggaaattattttggccaagaagaatatgctgaattcatatagagctgggaaagatctcactaatacaggaagttcctaaggacataggctcagaaatgggactgcactgacatttgttagcagatgctcacctctgagcctcagttttctcatttattagctgggctgttgtgaaaattacataagacaatccacgtaaaatgcatagcagagcggcaggcacgtagtgctaaagaaaaat

SEQ ID NO: 43831 - DNA, 369 bp, Homo sapiens
tatagatcattttatttcctcttaatgtttatactgattactgttacattagctggatttttcaaaacaatgttgaagagtgatgacagacgtgactgtcttgttcttaattttcatggaagtaagaatgcaaaatattaatagggaatagtattccctattagtatgacatttacttttggttattagtaggtagtcattaacatgtttaagagtttccgctattcctgttttatagtgttattgctagaagtggttcctgaattttataaaatgccttttcagcatctattgataaaattgtatgattttttttctctttaatttgttgatgtaatgaattagaatggtaggcatttgatgtggaac

SEQ ID NO: 43832 - DNA, 319 bp, Homo sapiens
ctcagcagtgcccatggagacctgcgtggtgtcagagcagcagtatctcttggagctggtgcagacaccaaggctgcccagtggtacaacgtggtccacctcccctagggaagctgctgcactcagaggctgtcctgcccagtggcccctgagccgtgtgagcctgcaggaggcgtctgagcagagcctcaagcccggtatggcgccatctccatgttgccatcactgcgttctcacctgaagccttaatctttgcgacacctgccagtgagcgctcggtttcaataccaaagtgtgtcttcttctttttttttttttt

SEQ ID NO: 43833 - DNA, 251 bp, Homo sapiens
tctgacccttgggcctgggcctctgcccctcccaacccagccgtcgtctccctcgacagcgcccctgctgtcttccccaccgcagtcaccaccacccgaaatgccacgtggtcactgtgcactgccctgttcatgtgcctctgcggggcagggccttcctggttttgtacactgctgtacccagatgcctacaaccatccctgccacatacaggtgctcaataaacacttgtagagcaaaaaaaaaaaaaa

SEQ ID NO: 43834 - DNA, 378 bp, Homo sapiens
cccacgcgtccgcccacgcgtccgaagaaaggtagttgtgtcaactaacatagcagagacgtctttgacaatagatggtgtggtgtttgtgattgatcctggatttgcgaaacagaaggtctacaatcctcgaatcagagttgagtcccttttggtgacagctattagtaaagcttcagctcagcaaagggctggtcgagctggacgtaccagacctggaaaatgcttcagactttacacagagaaagcttataaaacagaaatgcaggataacacctatcctgagattttgcgttctaatttaggatcagttgtgttacaattgaagaaacttggtattgatgacttggtacattttgattttatggatccaccagc

SEQ ID NO: 43835 - DNA, 361 bp, Homo sapiens
  misc_feature (1)...(361): n = a,t,c or g
taacaactggcctgatcaacctgatggtagatacattacacagcagtaccttgtgggccttatttgtggtcaatctctatatgttttccaactgtttaattgtatatgtactatatttgcaagataagactgtacaattttggtgatcagcaggagtaggatatataagtatttgggcaatatttaatgaggaatattaattgtaaagaaattgtgcttttggcaacagtgttaaccatattttattataaaatagtttcagtcatctaaacagcagtgatgcttannnnnnnnnnnnnnnnnnnnnnnnnnnnnnnnnnnnnnnnnnnnnnnnnnnnnnnnnnnnnnnnnnnnnnnnnnn

SEQ ID NO: 43836 - DNA, 366 bp, Homo sapiens
cccacgcgtccggttctagatcgcgatctagaactagtcttcaggctctgcctctcccactaggtctggatggaggataccttaaagtgaaatgacagaccaggagaataacaacaacatctcaagtaacccctttgctgctctttttggctccctggctgatgccaaacagtttgcggcaatccaaaaagagcagctgaagcaacaatctgatgaactcccagctagcccagatgactcggataatagcgtgtcagagagcctggatgaattcgattactctgtggctgagattagccgctcattccgatcacagcaggaaatatgtgagcaactcaacatcaatcacatgatccaaaggatctt

SEQ ID NO: 43837 - DNA, 365 bp, Homo sapiens
cccacgcgtccgctttgactccagtcgtgtgtatgctgtctgcaattgccttttcaaatgtttttgagcactatttgggggatgacatgaaaagggaaaatccacctgtggaggacagcagtgatgaggatgacaaaagaaaccaaggaaatttgtatgataaggcaggtaaagtgaggaaacatgcaactgaacaggaaaaaactgaagagggattaggccctaatataaaaagcattgtcaccatgttgatgctgatgctattgatgatgtttgctgtccactgtacctgggtcacaagcaatgcctactctagtccaagtgtagtcctggcctcatacaatcatgatggcaccaggaatatc

SEQ ID NO: 43838 - DNA, 361 bp, Homo sapiens
cccacgcgtccgcgagctgccatgagcctctgggtggacaagtatcggccctgctccttgggacggctggactatcacaaggagcaggcggcccagctgcggaacctggtgcagtgtggtgactttcctcatctgttagtgtacggaccatcaggtgctgaaaaaaagacaagaattatgtgtattctacgtgaactttatggtgttggagtggaaaaattgagaattgaacatcagaccatcacaactccatctaaaaaaaaaattgaaattagcaccattgcaagtaactaccaccttgaagttaatcctagtgatgctggaaatagtgaccgagtagtcattcaggagatgttgaaaa

SEQ ID NO: 43839 - DNA, 367 bp, Homo sapiens
acatcctgaagatggtatcttcattcgccaagtgacagatgcagaaacaaaacccaagtcaccatgtacttgacaagatttcatttacttaagtgccatgttgatgataataaaacaattcgtactccccaatggtggatttattactattaaagaaaccagggaaaatattaattttaatattataacaacctgaaaataatggaaaagaggtttttgaatttttttttttaaataaacaccttcttaagtgcatgagatggtttgatggtttgctgcattaaaggtatttgggcaaacaaaattggagggcaagtgactgcagttttgagaatcagttttgaccttgatgattttttgtttccac

SEQ ID NO: 43840 - DNA, 362 bp, Homo sapiens
cggcgctgccgggtgaaatcgtaggacagtgaagatgctgctggaattgtccgaggagcataaggaacacctggccttcctgcctcaagtggacagcgcggtggtcgccgagtttgggcggattgctgtggaattcctgagacgcggcgcaaacccaaaaatctacgaaggcgccgccagaaaactcaatgtgagtagtgacactgtccagcatggtgtggaaggattaacgtatctcctcactgagagctcaaagctcatgatttctgaactggatttccaagactctgtttttgttctgggattctctgaagaattaaacaaattgttgcttcagctttatctggacaacagaaaagaag

SEQ ID NO: 43841 - DNA, 367 bp, Homo sapiens
aggaggtctaccccgactcaggttctgccgatgatgagaggatcttgaggttcttggaattggcaggcctgtccaacttggtggcaaggacagagggcctggaccagcaggtggactggaactggtatgatgttctgtccccgggggagatgcaacggctctcctttgcccgactcttctacctgcagccgaagtacgcagtgcttgatgaagccaccagtgccctgacagaggaagtggagagcgagctctatcgcatcggccagcagctggggatgacgttcatcagtgtgggacatcggcagagccttgagaagtttcattccttggttctgaaactctgtggaggaggaagatgggagctgat

SEQ ID NO: 43842 - DNA, 378 bp, Homo sapiens
  misc_feature (1)...(378): n = a,t,c or g
cctgcatgtagagccaccagctacaaatgaaaatcaatgtgtgtattggcaacagaaaatcacggtgttgtcattggatgtgactttctgaagtggtgggcaattcttgttaatgttttaaacnannaanaaaaccctnacagtcttgccctgattnacncagcagncacnttccnggaaaattcangggttnattaaanctatncancagttactgggggttatncgttgaanggncttcactaanatntnactaagtaanganaatgcctacatntcaaantttttttttncgggacccanncncanatncngatttgnaaaagggcccaggtngctcacttnatttgctttctaccctgctggcccttgntggtt

SEQ ID NO: 43843 - DNA, 368 bp, Homo sapiens
aaaagatggactacatgtgatactcctatggacgttaattgaaaagaaagattgttgttataaagaattggtttcttggaaagcaggcaagactttttctctgtgttaggaaagatgggaaatggtttctgtaaccattgtttggatttggaagtactctgcagtggacataagcattgggccatagtttgttaatctcaactaacgcctacattacattctccttgatcgttcttgttattacgctgttttgtgaacctgtagaaaacaagtgctttttatcttgaaattcaaccaacggaaagaatatgcatagaataatgcattctatgtagccatgtcactgtgaataacgattcttgcatatt

SEQ ID NO: 43844 - DNA, 377 bp, Homo sapiens
  misc_feature (1)...(377): n = a,t,c or g
gagctggtgtccgtgggccttggagacagtaggacaggggagatgacagtcctgggacacgtgaagcacaaacttgtatgttcccctgattttgaatccctcttggatcacaaacaccggtaaaatgagcaggtggaggaggacggcgcctgtgcccacggctgctgcctgctccagacattttgttcttgaatctgtgagacccagaaggggcccactgagcccactcactccagcctttggcaaccattgttccaggtcccccagggcttcctcccacagcagctgtgaatggcacagtgaccttcctgcagcgtggagatggcacatccttgctgctggggacttggccctgctatttatttttgnatttatgg

SEQ ID NO: 43845 - DNA, 377 bp, Homo sapiens
  misc_feature (1)...(377): n = a,t,c or g
gttatagatacatagaaaattgaagtaaaatgttttcattttagcaaggatttagggttctaactaaaactcagaatctttattgagttaagaaaagtttctctaccttggtttaatcaatatttttgtaaaatcctattgttattacaaagaggacacttcataggaaacatctttttctttagtcaggtttttaatattcagggggaaattgaaagatatatattttagtcgatttttcaaaaggggaaaaaagtccaggtcagcataagtcattttgtgtatttcactgaagttataaggnttttataaatgttctttgaaggggaaaaggcacaagccaatttttcctatgatcaaaaaattctttctttcct

SEQ ID NO: 43846 - DNA, 369 bp, Homo sapiens
gccgcggcgagataacatcgtttttccaatctgtccgcggctgccgccacccaagacagagccagaatgttcaggatgctgaacagcagttttgaggatgaccccttcttctctgagtccattcttgcacaccgagaaaatatgcgacagatgataagaagtttttctgaaccctttggaagagacttgctcagtatctctgatggtagagggagagctcataatcgtagaggacataatgatggtgaagattctttgactcatacagatgtcagctctttccagacaatggaccaaatggtgtcaaatatgagaaactatatgcagaaattagaaagaaacttcggtcaactttcagtggatccaaat

SEQ ID NO: 43847 - DNA, 363 bp, Homo sapiens
  misc_feature (1)...(363): n = a,t,c or g
tgtctatgttcattctatagaagaaatgcacactatcactgtattttaatatttgttattctctcatgaatagaagtttatgtagaagcagaccaaatacttttacccacttaaaaagagaatataacattttatgtcactataatcttttgttttttaagttagtgtatattttgttgtgattatctttttgtggtgtgaataaatcttttatcttgaatgtaaaaaaaacaanaaaaaacaaaaaaaaaaaggnganaaaaagaaaatnaanaaangggnggngccccntnnggatnncctnggngggncnaaanatcccnctgcntgaacnactncttctctccctaangaggnccagga

SEQ ID NO: 43848 - DNA, 373 bp, Homo sapiens
ctcctgaggagattcgcaagaccttcaatatcaaaaatgactttccctcttttttgtaaagcaatgtctgcctagtttattgtccagttaactttagtgaccttttaaaagttggcattgtaaataaaacaacttgcaaaaaagttttctggaatagaattaacaaaatattatctttattcatgagttggaaactggaaaaaggcttcttgaagtaaatgttctgagtggagctactaggatgtcttccagcctcctgcagtcaaggagtaccactgtattgattagcctgtatgtagcagggctcccttcattgcatctgaggacttgttttctttttctttatttttaatcctcttagttttaaatatat

SEQ ID NO: 43849 - DNA, 366 bp, Homo sapiens
  misc_feature (1)...(366): n = a,t,c or g
cattactattgtgcggctgcaggaggtgtcgagcggcgttatttttttttgcggnnnnnnnnnnnnnnnnnnnnnnnnnnnnnngaacccggggtnnttaaaanccnnggggaaccnggaanngggcnnccaanncctanccnttttccnnccaatttgggancccnaaaaggannaangggggnccnnttttggnngnncccnnggncttngcnaaacnngggcccnantaanggcccngaaagggnacccaangggggnnattnncnaaaaccnggaaggggccnaaaccccccgcnggaancntnggggnaaanantnggcntttaancnggaangtgctnaaaaancaggnggtccaaatgc

SEQ ID NO: 43850 - DNA, 446 bp, Homo sapiens
  misc_feature (1)...(446): n = a,t,c or g
tttgaccccngcaggtaccggtccggaatttgaactccanccacgcgnccgcncacgcgtccgcaacccttgcctgcgcatgagtagatgctcagtaagtggtgcacagggttggtccctatggtggaggccccctaacaccgcccaacccccctccatgttctcacagctccacgcactgagcacgggcatgaaggccatgatgtcagaattctgcacccagggagctgagatgtgccgcagggcctgtggcggacatggctactcaaagctgagtggcctgccatcactggtcaccaaattgtcggcctcctgtacctacgagggtgagaacacagtgctctacctgcaggtggccaggttcctggtgaagagctacctgcagactcagatgtcccctggctccacgccacagagatctctctctccatctgtcgcatatctca

SEQ ID NO: 43851 - DNA, 115 bp, Homo sapiens
cccacgcgtccgcccacgcgtccgaatttaaaagtaggaaagtataagaaaataaaagtgcctctaattctatccaaacacaactgttaatttttcttttctttttttttttttt

SEQ ID NO: 43852 - DNA, 355 bp, Homo sapiens
  misc_feature (1)...(355): n = a,t,c or g
cacggggctcttctactctgcagagatcatctgtgccatcgagtacctgcactccaaagagatcgtctacagggacttgaagccagagaacatcctgctggatagggatggccacattaagctcacggactttgggttcgccaagaagctggtagacaggacttggaccctctgtggaacacccgagtacctagcccccgaagtcattcagagcaagggccacggaagggccgtggactggtgggccctcggcatcctgatattcgagatgctttcggggtttcctccgnttnttgatgacaanccgnttggcattnatcataaaatnctngcangcnnaatanatttcccagac

SEQ ID NO: 43853 - DNA, 369 bp, Homo sapiens
  misc_feature (1)...(369): n = a,t,c or g
cccacgcgtccgcccacgcgtccgaaggaattaaatgtcctagtgattataaagtaaaaccacagaccaatttgcaaatgatcttcaatgttaagcacttgctctaagattaaaattccttttctttttaaggttaaggntgtgtnnttttnnttntgattgntnantttttngtttttttntttntnanttnanttttngnnnttaatnttgattttttnttttnttntttttttntttnttntantttantttttttntttttttaattngnattttnttnttttnanttnttatgtnncttnnntttantttttttattctntttntgttnntnnnttnttttatnttntttttnntngttttatt

SEQ ID NO: 43854 - DNA, 372 bp, Homo sapiens
  misc_feature (1)...(372): n = a,t,c or g
tgcatgtttactttattagagtaggaaggctactggcattaattattaataccaaatattttagccttaaatttttgtcattttaaaatctgatttaatgnttnctgctgtttaaggtcttgggaggctttcaantgnattttatatgacagaatcacncttnttngtgctanntatggncttgnttnnatatanacctttacatgtttaaattgnngnnttttatatcttaccnnttctcanttntatatttaacnngtntnntgantctcnanatnttnttagtntatgntgancttattcgtngtttantttntnnctctagcccntntgnngtntnngnnnnnngaannctnttnnttcantgnttac

SEQ ID NO: 43855 - DNA, 376 bp, Homo sapiens
  misc_feature (1)...(376): n = a,t,c or g
nnnnnnnnnnnnnnnnnnnnnnnnnnnnnnnnnnnnnnnnnnnnnnnnnnnnnnnnnnnnnnnnnnnnnnnnnnnnnnnnnnnnnnnnnnnnnnnnnnnnnnnnnnnnnnnnnnnnnnnnnnnnnnnnnnnnnnnnnnnnnnnnnnnnnnnnnnnnnnnnnnnnnnnnnnnnnnnnnnnnnnnnnnnnnnnnnnnnnnnnnnnnnnnnnnnnnnnnnnnnnnnnnnnnnnnnnnnnnnnnnnnnnnnnnnnnnnnnnnnnnnnnnnnnnnnnnnnnnnnnnnnnnnnnnnnnnnnnnnnnnnnnnnnnnnnnnnnnnnnnnnnaaaaaaaaagaaaaagggcggccgctctagaggatccctcgaggggcccaagc

SEQ ID NO: 43856 - DNA, 390 bp, Homo sapiens
  misc_feature (1)...(390): n = a,t,c or g
nnnnnnnnnnnnnnnnnnnnnnnnnnnnnnnnnnnnnnnnnnnnnnnnnnnnnnnnnnnnnnnnnnnnnnnnnnnnnnnnnnnnnnnnnnnnnnnnnnnnnnnnnnnnnnnnnnnnnnnnnnnnnnnnnnnnnnnnnnnnnnnnnnnnnnnnnnnnnnnnnnnnnnnnnnnnnnnnnnnnnnnnnnnnnnnnnnnnnnnnnnnnnnnnnnnnnnnnnnnnnnnnnnnnnnnnnnnnnnnnnnnnnnnnnnnnnnnnnnnnnnnnnnnnnnnnnnnnnnnnnnnnnnnnnnnnnnnnnnnnnnnnnnnnnnnnnnnnnnnnnnnaatagtnnngaatnagggcgnccgntctagaggntccntcgaggggccnaagctacgcgtgcatgcg

SEQ ID NO: 43857 - DNA, 370 bp, Homo sapiens
  misc_feature (1)...(370): n = a,t,c or g
cgagctctcggtgcaggatctcaacgacctgctctcggacggcagcggctgctacagcctcccgagccagccctgcaacgaggtcaccccgcggatctacgtgggcaacgcgtctgtggctcaggacatccccaagctgcagaaactaggcatcacccatgtgctgaacgcggctgagggcaggtccttcatgcacgtcaacaccaatgccaacttctacaaggactccggcatcacatacctgggcatcaaggccaangacacacaggagttcaacctcagcgcttactttgaaagggctgtcgacttcattgacnaggctttggctcaaaagaatggccggntgctcgncactgncggtaagnttata

SEQ ID NO: 43858 - DNA, 359 bp, Homo sapiens
gtccatggttaggaagaactgttccacatacacctgacattggagtcagtttattgatatgtttggagattggcctttcaacagttttcatatttgaagaattagaaatgaagtccgttcagattctccaaagaacctccagccactggtgggggacattcttaattcacattcctatcagttggtatctcctgtccctgaagacactgatgaggcttgggaggagaatcccacctttccctgcagggggttaggctgggcagggcagggaggtgagggcgctggtccagaacactggcaagggatgggaacctaacttcttctgtgcttctgatttgcccttgcaggtgtttttccag

SEQ ID NO: 43859 - DNA, 358 bp, Homo sapiens
cccacgcgtccgcccacgcgtccgcccacgcgtccggtggtacagaactggactgtggcattgagacagacagtggtgttgatgatgacatggcgtgtcataaaataccagtggaggccgacttcttgtatgcatactccacagcacctggttattattcttggcgaaattcaaaggatggctcctggttcatccagtcgctttgtgccatgctgaaacagtatgccgacaagcttgaatttatgcacattcttacccgggttaaccgaaaggtggcaacagaatttgagtccttttcctttgacgctacttttcatgcaaagaaacagattccatgtattgtttccatgctcacaaa

SEQ ID NO: 43860 - DNA, 357 bp, Homo sapiens
agatgggttctggaggcccctgaacagagggctatggctgtggagaaggttcttggcccgttggactcacacagaccctgtaccctctcggcaagcatcttcagtcagattatcctcagtttcagatacttcataataccttgtgttgtgtggggtcatacatcatcgtgtttgtaagagaagatggtcattttattctctgtataaaacttagctctaaagcagaaactaaagcagcaaatgcaggaaggctgtctcgccatcctcaagactcagcagctctcattctccagtggtgagcacaccatttgtgctgctgctgttgtcgtgaaatataataacagtggaagtcacaaa

SEQ ID NO: 43861 - DNA, 364 bp, Homo sapiens
gaagcattgcctggcagatgtcacaacagaataaccacttgtttggagcctggcacagtcctccagcctgatcaaaaattattctgcatagttttcagtgtgctttctgggagctatgtacttcttcaatttggaaacttttctctctcatttatagtgaaaatacttggaagttactttaagaaaaccagtgtggcctttttccctctagctttaaaagggccgcttttgctggaatgctctaggttatagataaacaattaggtataatagcaaaaatgaaaattggaagaatgcaaaatggatcagaatcatgccttccaataaaggcctttacacatgttttatcaatatgattatcaaa

SEQ ID NO: 43862 - DNA, 363 bp, Homo sapiens
tgaagaagatggctcctgccatggaatcccctactctactgtgtgtagccttactgttcttcgctccagatggcgtgttagcagtccctcagaaacctaaggtctccttgaaccctccatggaatagaatatttaaaggagagaatgtgactcttacatgtaatgggaacaatttctttgaagtcagttccaccaaatggttccacaatggcagcctttcagaagagacaaattcaagtttgaatattgtgaatgccaaatttgaagacagtggagaatacaaatgtcagcaccaacaagttaatgagagtgaacctgtgtacctggaaagtcttcagtgactggctgtccttcaggcctctg

SEQ ID NO: 43863 - DNA, 363 bp, Homo sapiens
  misc_feature (1)...(363): n = a,t,c or g
cccacgcgtccgcaaggctcctccgtgacactgtccactgaggcttttctctacgtgggcaccatgttggatgggggcgacctgtcccgatttgcactgctcatgaccaactgctatgccacacccagtagcaatgccacggaccccctgaagtacttcatcatccaggacagatgcccacacactagagactcaactatccaagtggtggagaatggggagtcctcccagggccgattttccgtccagatgttccggtttgctggaaactatgacctagtctacctgcactgtgaagtctatctctgtgacaccatgaatgaaaagtgcangcctacctgctctgggaccagattccgaagt

SEQ ID NO: 43864 - DNA, 362 bp, Homo sapiens
  misc_feature (1)...(362): n = a,t,c or g
gtaaatgacgcagagaaatgcctaaaaaggacaggtggtttgactcatggatgatgatgatgtcactgtgccacttggacagggcgttttctctgaattgaagggaaagccaatggtgtttgtaaacaaatgcttctgagagcaaagaaaagtcttctgtgtgggaacacaagatagtaaacttatttaaaaacctattagtagaattagtggaaacacttaggttaaagtgaatcttgtccatataaattatnnnnnnnnnnnnnnnnnnnnnnnnnnnnnnnnnnnnnnnnnnnnnnnnnnnnnnnnnnnnnnnnnnnnnnnnnnnnnnnnnnnnnnnnnnnnnnnnnnnnnnnnnnnnn

SEQ ID NO: 43865 - DNA, 375 bp, Homo sapiens
gcggctacctacgcttggtgcttgctttctccagccatcggagaccagagccgccccctctgctcgagaaaggggctcagcggcggcggaagcggagggggaccaccgtggagagcgcggtcccagcccggccactgcggatccctgaaaccaaaaagctcctgctgcttctgtaccccgcctgtccctcccagctgcgcagggccccttcgtgggatcatcagcccgaagacagggatggagaggcctctgtgctcccacctctgcagctgcctggctatgctggccctcctgtcccccctgagcctggcacagtatgacagctggccccattaccccgagtacttccagcaaccggctcctgagtatcaccag

SEQ ID NO: 43866 - DNA, 371 bp, Homo sapiens
ggcaccaccagtggtggggacagcgatgccaagagcctgcgtatcgtggaaagggagagtggccactatgtggagatgcacgcccgctatatagggaccacagtgtttgtgcggcaggtgggtcgctacctgacccttgccatccgtatgcctgaagacctggccatgtcctacgaggagagccaggacctgcagctgtgcgtgaacggctgccccctgagtgaacgcatcgatgacgggcagggccaggtgtctgccatcctgggacacagcctgcctcgcacctccttggtgcaggcctggcctggctacacactggagactgcaacactcaatgccatgagaagatgccagtgaaggacatctatttc

SEQ ID NO: 43867 - DNA, 361 bp, Homo sapiens
cggacgcgtgggcggacgcgtgggcttgggaaactggcatatctatgagatttgaagtatacggttgcaagataacagattatccttgctctggaatgttgggtatggtgtctggacttatttctgactcccagatcacatcatccaaccaaggggacagaaactggatgcctgaaaacatccgcctggtaaccagtcgctctggctgggcacttccacccgcacctcattcctacatcaatgagtggctccaaatagacctgggggaggagaagatcgtgaggggcatcatcattcagggtgggaagcaccgagagaacaaggtgttcatgaggaagttcaagatcgggtacagcaacaa

SEQ ID NO: 43868 - DNA, 373 bp, Homo sapiens
gctttttacagtacaaagaatgaaaagaattcctgttgtccaaagcctattctcctacactctaaacaaatcttggattgttttactttggtataagaaagcacttcgtaaggttgactttttctttctttttggccacaaatttactagcttagacctgcttagaaaaatattatggtgagcatatagtaactattaattgttacttttcaccttgtcatttttcctgtgtagttattaatgaagtgtggcaagaagaaacaattgggcgtctactacaacttgtagaccttccacttcttgactccttactgaaacagcaagaggctgtacctaaaattcctcaacctaagaggcagtccaccatggtcaa

SEQ ID NO: 43869 - DNA, 364 bp, Homo sapiens
  misc_feature (1)...(364): n = a,t,c or g
gatatttataattttgaatttgaaattaagagtttctctgtcatcttttcctaagatacaaccttccaaaatggaatacaataataaactactatctgcctttggagggcaatggagggaggtggaggtagctaagaagttaaaattatacccttttttcatacagtagaaggtaagaatttaaaaccagaagtagccaagtaacacaattattttaagagaggttttaaagccaatcttccatgttaaaaattatatcnnnnnnnnnnnnnnnnnnnnnnnnnnnnnnnnnnnnnnnnnnnnnnnnnnnnnnnnnnnnnnnnnnnnnnnnnnnnnnnnnnnnnnnnnnnnntcatgccactgc

SEQ ID NO: 43870 - DNA, 365 bp, Homo sapiens
  misc_feature (1)...(365): n = a,t,c or g
nnnnnnnnnnnnnnnnnnnnnnnnnnnnnnnnnnnnnnnnnnnnnnnnnnnnnnnnnnnnnnnnnnnnnnnnnnnnnnnnnnnnnnnnnnnnnnnnnnnnnnnnnnnnnnnnnnnnnnnnnnnnnnnnnnnnnnnnnnnnnnnnnnnnnnnnnnnnnnngaagccagaggatcgattgaaccagggagatcatggtcacagtgaactatgattacgccaacctgggtcacatagcaagactctgtttcaaaaaaaaagggggggccgggggacggnnnnnnnnnnnnnnnnnnnnnnnnnnnnnnnnnnnnnnnnnnnnnnnnnnnnnnnnnnnnnnnnnnnnnnnnnnnnnnnnnnnnnnnnnn

SEQ ID NO: 43871 - DNA, 365 bp, Homo sapiens
cccacgcgtccgtgcacagtggccccatcatagcctgcagcctcatcatttcccatctggacctggtacaaatgcacgtcacaggctcagctcctccccactagcatcttctctaccttcaagaaccaggcagccctgccatgtcacaataggccaggggagtttccaaagatgtgggtggcaaatgcccctatagaaacaccagtacctgaaagcactgtagccctggacctgcctccttccctcggggccatacttctgtttccatctgctgggccaccagccactttagtgacccctgcctacttccttcctgttggatatcatacttccatctggctgcctttgcttaagccatctttgtg

SEQ ID NO: 43872 - DNA, 374 bp, Homo sapiens
  misc_feature (1)...(374): n = a,t,c or g
gctgttgggtgtccgcaggcttctgcctggcacgccgccgcctataagctaccaggaggagctttacgacttcccgtcctgcgggaagtggcgggcacgatcgcaaggtagcgcataagcttctcaatggccagcgccagctgcagccccggcggcgcactcgcctcacctgagcctgggaggaaaattcttccaaggatgatctcccactcagagctgaggaagcttttctactnagcanangctgtgngntttgatgttgacagcacggtcatcagttgaagaaggaatcggatgctttcattggctttggaggaaatgtgatcaggccactngtcaaggataacgccaaatggtatatcactgattttgta

SEQ ID NO: 43873 - DNA, 371 bp, Homo sapiens
cggtcaagaaatctagaggtaaccttctccaaagagtgaaatatgtaaatatatggacgtttttcattgaatcaaaatggaagttttgccaaatgatcaaagtgttagtccaatggtatttaaatattaaaaagagatgattattataagcataatgtcagaattaatttaaacaaattataattaatgtaatatgattttaggaaagatgaaacactttatgagaagttaccaggctgaatgatttacatatatagtgctaatgtgtgaagagaaagtttaactcttcacccactatgttgtttttagttattttgggctgccatattgaattttttgtttgtttgttttgagaaggcgtttcgctcttg

SEQ ID NO: 43874 - DNA, 351 bp, Homo sapiens
cccacgcgtccgcccacgcgtccgcggacgcgtgggttgtgatccacttcatggaggagattgacaaggagatcagtgagatgaagctgtcagtcaatgcccgtgcccgcattgtggctgaagagttccttaagaatttttaaaccatctggctggatctcgtggccttccccctcagactacccatgtctccacgaaggcgtcctggagtcactccccgagcagcgcggcggcggcagggagttgggttggggtgggcatttgatgcgggaggtgggtggtgtgcttgctagctgggcaagaaagcagcagtggacctgccccaaggccacacgtgcctggtcaggctgg

SEQ ID NO: 43875 - DNA, 360 bp, Homo sapiens
ggcaaaaggcatggggatattgctagaatggaagacagttactgaaaaagagctctatgaagcactagtgaaggttatcaataatcccagctaccgtcagagggctcagaagctttcggaaattcacaaggatcaacctggtcaccctgtcaatcgaactatctattggatagattatattattcgtcacaatggagcccatcacctacgtgccgctgtccatcagatctccttttgtcagtattttttactggatattgcctttgtgcttttgcttggtgctgccttgttatactttctcttgtcttgggtgacaaaatttatctacagaaaaatcaaaagtctgtggtctagaaataa

SEQ ID NO: 43876 - DNA, 350 bp, Homo sapiens
caaagagtaaaggtgctagtgctggaagagaatggactgaacaggagacccttctactcctggaggccctggagatgtacaaggatgattggaacaaagtgtcggaacatgttggaagtcgtactcaggatgaatgcatcctccactttttgagacttcccattgaggacccataccttgagaattcagatgcttcccttgggcctttggcctaccagcctgtccccttcagtcagtcaggaaatccagttatgagtactgttgcttttttggcatctgtggtggaccctcgcgtggcatctgctgcagcaaaagcggctttggaggagttttctcgggtccgggaggag

SEQ ID NO: 43877 - DNA, 363 bp, Homo sapiens
gcaaatggaagcctccatatttatattttcagtgcataaagccaccttcttgctttacttcagagtaacatgccaagctattttgtgttcactaaatttagctatcagttaaacactgcagaaaatattagctactcaaataagtaggcttctgaaatagttttaactgcaagtgtgttaacttgtgtggtggtttgaagccatttttccaaataaagttattaaacaccactttatgtactgaagcatgaacagaaaaatcaagagctgagcagaccacctcctttatgtaggcaaaacttccatcattttggcttttgttctaaacagaactaaatgacatgcatagcatggtaacttaca

SEQ ID NO: 43878 - DNA, 377 bp, Homo sapiens
gtgctctgagtaggctgtcatcagaacaaagggctccactgctgacaaggtttgagaactgctggcttgaggtgagaacccctttaacctctgcgggacagcatgtctttccctatccaccttcgattcttttctcttttttttcttcattggctccttcttagtggattctcttctctactgccctgggcttcagcctttgtgcagtactctcgatgccctgaacacacaccttccctttgcccaggcggtgcaaacaatccacttcttcaagctccaacacaaatgctgcctcctttaggatgcctgctctgtgctctccctgcctcccctagcccatacctctgctggcaccttctgtaccatgccttcagaaa

SEQ ID NO: 43879 - DNA, 370 bp, Homo sapiens
ggagacattactatagcatagattgtcaaatgtaaatttactgagcgtgttttataaaaaactcacaggtgtttgaggccaaaacagattttagacttaccttgaacggataagaatctatagttcactgacacagtaaaattaactctgtgggtgggggcggggggcatagctctaatctaatatataaaatgtgtgatgaatcaacaagatttccacaattcttctgtcaagcttactacagtgaaagaatgggattggcaagtaacttctgacttactgtcagttgtacttctgctccatagacatcagtattctgccatcatttttgatgactacctcagaacataaaaaggaacgtatatcacat

SEQ ID NO: 43880 - DNA, 342 bp, Homo sapiens
cccacgcgtccgcactcagagatggatcccattccctaaaggtctcacagcaaaggagcaggactcccaggcccctgtaccctgcctggcctgattcagggccttgtggcccccagcttctgtttcaagctgggcagaccccaggatcccttccctccctaaggactcagctgaggggcccctctgcccccttctacctccacctcagcaccctcccccagcttgatgtttgggtctccccagcaccctcctccctggccggtgcaaagtacagggaggtaaagcaggacccttgcagacatgttgcccagcacacagtaggccctcaataaaagccatttg

SEQ ID NO: 43881 - DNA, 353 bp, Homo sapiens
ctttcaggtaagtatcacgaaatccatttaataacctttcctgtgtgatttatttcacttggttatatttatttctgatagtttatttctgatggttatagattttgtaaatggcacctttatgatttcttttattaacagaattctgcttggtcagaatcgtgatggcattgtgttcagcactgatgactattttcaccatcaagatgggtacaggtataatgttaatcaacttggtgatgcccatgactggaaccagaacagaggtttgttttgggctaagtgtcccaggatagaatatttggctaggagtcaaaagacctagattttattttcagcttaggtttttacca

SEQ ID NO: 43882 - DNA, 351 bp, Homo sapiens
gtgataccgaagttgaaagcaagtcattcagctaatacaaagctgttttatgacccttggaactttgaagagtacaaacattggcaatcacgttgaaacaagtgcaagggagggcgtgaggtcttgcaggcatctgtctttttactggagagatttaaagaattctcttgctgtttggattattcctctacagattgtcatttttaaaccctttgttctctctcatttggacttgctgaattctctgctcagtgattaacttaagatttgctcatgtgggttcatgcacagtaaattctgcctttattgactacctgatgtgcagtttaatctttttctttacctccatgg

SEQ ID NO: 43883 - DNA, 358 bp, Homo sapiens
  misc_feature (1)...(358): n = a,t,c or g
ttccaacatgctttgttttaagaagccttgaagggaatgtcagattcatttttcttgatgtaatttatcaccataaaaaaaaaacccatgcaaacctgagtgagcacaggatttgcttttaggcccattatttttattaaaactgaaaaaatttaaactgaattttttgaccttggaaaatatttttcttactttaccaaggtgaagtttccttaattagactaattattttatccccatcccagggtataaacaggaattgttttgatagtggtggagttattcactgcaacaaagcancaatgttgnccatgattcaaaatctaancagtttcnattttgcctgngaatatggggg

SEQ ID NO: 43884 - DNA, 363 bp, Homo sapiens
cccacgcgtccgcgctcttcggacaccaggacgctgtggctgcactggatgccttgagccgggagtgctgtgtgacggctgggggccgggatgggactgtacgtgtgtggaagatccccgaggagtcccagcttgtcttctatggccaccagggctccatcgactgcatccacctaatcaatgaggagcacatggtgtccggcgcggacgatggctctgtggccttgtggggtctctccaagaagcgaccacttgccctgcagcgtgaagctcacgggctgcggggagagccaggcctggagcagcccttctggatatcgtcggtggcagccctcctcaacacagaccttgtggccacaggct

SEQ ID NO: 43885 - DNA, 363 bp, Homo sapiens
cccacgcgtccgcgctcttcggacaccaggacgctgtggctgcactggatgccttgagccgggagtgctgtgtgacggctgggggccgggatgggactgtacgtgtgtggaagatccccgaggagtcccagcttgtcttctatggccaccagggctccatcgactgcatccacctaatcaatgaggagcacatggtgtccggcgcggacgatggctctgtggccttgtggggtctctccaagaagcgaccacttgccctgcagcgtgaagctcacgggctgcggggagagccaggcctggagccagccttctggatatcgtcggtggcagccctcctcaacacagaccttgtggccacaggct

SEQ ID NO: 43886 - DNA, 363 bp, Homo sapiens
ctggaatggaaattggctggttgaaacctgtgataggttctcaatatccattggagaaggtggccgaggctcatgaaaatatcattcatggtagtggggctactggaaaaatgattcttctcttatgatgattaattctttcatggatttcctatgtaattagaggtactgtctttcccccagttgtacttaccctatcttttctttaattaacattcgattccatgagcttcttatgtgaaaaaataagatttttctttagagagcagaagcagaagagtaaaatttattgtatagctagcaatatttttttatgccatctgtctcaaatcaaagagtcatcatagtaggaaatagcatgtt

SEQ ID NO: 43887 - DNA, 363 bp, Homo sapiens
agcagcccgggctacagggttgcctgaggtgtgggtcccaggatggaggagccccaggccggcgatgctgctcggttctcttgtccccccaactttaccgcgaagcccccagcctcagagtcccctcgtttctccttggaggcgctgacgggtccagatacggagctgtggcttattcaggcccctgcagactttgccccagaatgcttcaatgggcggcatgtgcctctctctggctcccagatcgtcaagggcaaattggcaggcaagcggcaccgctatcgagtcctcagcagctgtccccaagctggagaagcgaccctgctggccccctcaacggaggcaggaggtggactcacctgt

SEQ ID NO: 43888 - DNA, 367 bp, Homo sapiens
  misc_feature (1)...(367): n = a,t,c or g
ctccattcacacctacctgtggcgtcgccagtgatggagcagatactcaaggaggcactgggctcagcctgggcattaaagggacagagtcagctcacacgctgtctgtgactaaagagggcacagcagggccagtgtgagcttacagcgacgtaagcccaggggcaatggtttgggtgactcactttcccctctaggtggtgccaggggctggaggcccctagaaaaagatcagtaagccccagtgtccccccagcccccatgcttatgtgaacatgcgctgtgtgctgcttgctttggaaactgggcctgggtccaggcctagggtgagctacttgtccgtacaaacacnagatcagggctgagg

SEQ ID NO: 43889 - DNA, 358 bp, Homo sapiens
ggaagctgtcatagcaggggcagagccctgtccttctaccccccctttcttttctcctaacctcttctccctctggattcctgagaacccttccctctttctggttctgtgggccgtcggatccttctgttctcccctgccccccacccgcagcctgcaacgacacagttacctcagaactgaaatattcctggaaacaccggcctcgtctggttaatttcatgagccgtttttttctgcccagatgacttagttcttgtctatccaaaggcttctccccctgctgtccctgtgtagggagctgatctcccctagggatgtcccacagggctcagaatgggagagggtaagttctgag

SEQ ID NO: 43890 - DNA, 355 bp, Homo sapiens
  misc_feature (1)...(355): n = a,t,c or g
ctctaaaggatccctccaggggcccaagcttacgcgtgcatgcgacgtcatagctctctccctatagtgagtcgtattataagctagcttnnnnnnnnnnnnnnnnnnnnnnnnnnnnnnnnnnnnnnnnnnnnnnnnnnnnnnnnnnnnnnnnnnnnnnnnnnnnnnnnnnnnnnnnnnnnnnnnnnnnnnnnnnnnnnnnnnnnngctgcatatgcttgctgcttgagagttttgcttactgagtatgatttatgaaaatattatacacaggagctagtgattantnncntntnaaaantnaaaanntttttntnnnngnntaaaaaaaaaaacntttnnntnnggggggttt

SEQ ID NO: 43891 - DNA, 339 bp, Homo sapiens
  misc_feature (1)...(339): n = a,t,c or g
gcggcacgaggtgctgaggttgaaaaactctgatctagaaaatgaggactcttaaaaaccctatctttatgttatcacacttttaaaaacaataatttatatatatatgtttatnnnnnnnnnnnnnnnnnnnnnnnnnnnnnnnnnnnnnnnnnnnnnnnnnnnnnnnnnnnnnnnnnnnnnnnnnnnnnnnnnnnnnnnnnnnnnnnnnnnnnnnnnnnnnnnnnnnnnnnnnnnnnnnnnnnnnnnnnnnnnnnnnnnnnnnnnnnnnnnnnnnnnnnnnnnnnnnnnnnnnnnnnnnnnnnnnnnnnnnnnnnnnnttccgtgnnnnncaccctg

SEQ ID NO: 43892 - DNA, 397 bp, Homo sapiens
  misc_feature (1)...(397): n = a,t,c or g
gaattctcaggccctgttcccatgagggctgacccggcctcaccctggtaacccgcaccagctggtgatgcccccctgctgttgtgccttcctcattgccgcctgccttgggcatggtccgtgctttcttatttctgccacctgcgtgtgtgctcatgtcgggttgtgtcactctacatgctgtgctcacttacatgtatctattaacctgctaccagtgtgatcataagacactcagagnnnnnnnnnnnnnnnnnnnnnnnnnnnnnnnnnnnnnnnnnnnnnnnnnnnnnnnnnnnnnnnnnnnnnnnnnnnnnnnnnnnnnnnnnnnnnnnnnnnnnnnnnnnnnnnnnnnnnnnnnnnnnnnnnnnnnnnnnnnnnnnnnnnnnnnnnnnng

SEQ ID NO: 43893 - DNA, 384 bp, Homo sapiens
ggagacattctgcgagatggtgaagtccaaccggctgtgcgaacggaagctcttcattcagttctgctgccgcacgtgcctcctggccgggtaagggtgcctagctgcccacagagggcaggcactcccatccatccatccgtccaccttcctccagactgtcggccagagtctgtttcaggagcggcgccctgcacctgacagctttatctccccaggagcagcatctctgagcacccaagccaggtgggtggtggctcttaaggaggtgttcctaaaatggtgatatcctctcaaatgctgcttgttggctccagtcttccgacaaactaacaggaacaaaatgaattctgggaatccacagctctggctttggagcagctt

SEQ ID NO: 43894 - DNA, 367 bp, Homo sapiens
  misc_feature (1)...(367): n = a,t,c or g
ggactgttttttaacagtcaatttcagttcagctaacatatattaatacctttgtaactctttgctatggcttttgttatcacaccaaaactatgcaattggtacatggttgtttaagaagaaaccgtatttttccatgataaatcactgtttgaaatatttggttcatggtatgatcgaaatgtaaaagcataattaacacattggctgctagttaacaattggaataactttattctgcagatcatttaagaagtnnnnnnnnnnnnnnnnnnnnnnnnnnnnnnnnnnnnnnnnnnnnnnnnnnnnnnnnnnnnnnnnnnnnnnnnnnnnnnnnnnnnnnnnnnnnnnnnnnnnnnnnnnnnnn

SEQ ID NO: 43895 - DNA, 373 bp, Homo sapiens
  misc_feature (1)...(373): n = a,t,c or g
gtgaagatataattagattagcagagtttttcacttttactctccaaagcacatgtctccatctggggcacagttatggagcacctcctgtatgccagcactatgctactgataaatggccagcctgtaattcatgggctctgccttcttgtaactcaaagtgacataagtatgatgctaggtctgtaattattcctttaaagacaaaagatggaggggcannnnnnnnnnnnnnnnnnnnnnnnnnnnnnnnnnnnnnnnnnnnnnnnnnnnnnnnnnnnnnnnnnnnnnnnnnnnnnnnnnnnnnnnnnnnnnnnnnnnnnnnnnnnnnnnnnnnnnnnnnnnnnnnnnnnnnnnnnnnnnnnnnnnnnnt

SEQ ID NO: 43896 - DNA, 365 bp, Homo sapiens
gagatgtggcccttgggcagtagtttgcagaccctgctctagaaaaggggagaatgaagatgggaaggcagtggtggtccctgccacacgtgcgtgcggcatccatgcacggagagtctccccccgcccatcctctgcgtgtggggcagttgggtcaggccagctcgcatccccaggtcttcagaggagcagctgagccgcgcctaccgcctgctgatagcacagctgacccaggagcacgccgagatccgtctctcagccttccagatcgtggaggaactcttcgtcaggtctcaccagttccggatgctggttgtttccaacttccaggagttcctggagctcacgctgggcacagaccccgc

SEQ ID NO: 43897 - DNA, 360 bp, Homo sapiens
  misc_feature (1)...(360): n = a,t,c or g
gcagtgggtggcacctttaaaagttgtttgcctgtgaaactcctccccgccccagtcatatacaccccagcactgaggtcctctaactgtgctgtccagcctgcagctattgagcagttgaaattcaagttgtccaaattgggatgcgctatagatgtaaaatatacattgggttttgaagacttctatgaaatagaatgtaatctcagtaacttaagtgactaattgaaaattttaaattatnnnnnnnnnnnnnnnnnnnnnnnnnnnnnnnnnnnnnnnnnnnnnnnnnnnnnnnnnnnnnnnnnnnnnnnnnnnnnnnnnnnnnnnnnnnnnnnnnnnnnnnnnnnnnnnnnnnnn

SEQ ID NO: 43898 - DNA, 367 bp, Homo sapiens
  misc_feature (1)...(367): n = a,t,c or g
ggacaactggaaaaaggaaagagccattcttctggaagacagcaactagaatcttagattctcaagcccatggagagcttttcaccactcattgtgttttgtaaggtttaccttgtgtagtttggtcagaagcagtagtgacagcagtatgtgccattaccgatctcttattctgtaccaagtgctgtgctaagtacctttatataccttatctcattgtttattagaatgtaatcacatgacttttaaaattattgtctccattttactgataagaaaactgagannnnnnnnnnnnnnnnnnnnnnnnnnnnnnnnnnnnnnnnnnnnnnnnnnnnnnnnnnnnnnnnnnnnnnnnnnnnnnnnn

SEQ ID NO: 43899 - DNA, 379 bp, Homo sapiens
  misc_feature (1)...(379): n = a,t,c or g
gaagggatgtaaacagctggaaagaactttgcttcaatcattacaacaaggaaactacaaactcgtaccgtacaacacggaaatggacaaactacaaaataatttttctaggacccttcagagaactgaggtcacagggcaaccaagtaatcttaaatctggggaaagaaagatgccagctgagagaaacaggactcaagctttacttacctgggatggactctgccagacaccatataagccagtaagaaaatacagctatcaagtttttaaacaaatttttaaagtgtgaatgtcagctaatgaaagtgtgaaaccactgggggacttgcaaaattagggaggtgggggttgcagnctnttgtaggcttttcctctg

SEQ ID NO: 43900 - DNA, 380 bp, Homo sapiens
  misc_feature (1)...(380): n = a,t,c or g
gtnnnnnnnnnnnnnnnnnnnnnnnnnnnnnnnnnnnnnnnnnnnnnnnnnnnnnnnnnnnnnnnnnnnnnnnnnnnnnnnnnnnnnnnnnnnnnnnnnnnnnnnnnnnnnnnnnnnnnnnnnnnnnnnnnnnnnnnnnnnnnnnnnnnnnnnnnnnnnnnnnnnnnnnnnnnnnnnnnnnnnnnnnnnnnnnnnnnnnnnnnnnnnnnnnnnnnnnnnnnnnnnnnnnnnnnnnnnnnnnnnnnnnnnnnnnnnnnnnnnnnnnnnnnnnnnnnnnnnnggtcaggtgtctttagaagtcaggagttcccaacattgtcaagtcactccactgtgtctttattaacacaattccttctgcctcaaaggttggtcccatt

SEQ ID NO: 43901 - DNA, 371 bp, Homo sapiens
  misc_feature (1)...(371): n = a,t,c or g
gactgcannnnnnnnnnnnnnnnnnnnnnnnnnnnnnnnnnnnnnnnnnnnnnnnnnnnnnnnnnnnnnnnnnnnnnnnnnnnnnnnnnnnnnnnnnnnnnnnnnnnnnnnnnnnnnnnnnnnnnnnnnnnnnnnnnnnnnnnnnnnnnnnnnnnnnnnnnnnnnnnnnnnnnnnnnnnnnnnnnnnnnnnnnnnnnnnnnnnnnnnnnnnnnnnnnnnnnnnnnnnnnnnnnnnnnnnnnnnnnnnnnnnnnnnnnnnnnnnnnnnnnnnnnnnnnnnnnnnnnnnnnnnnnnnnnnnnnnnnnnnnnnnnnnnnnnnngtgtatggtcgctttagatagtgaggccaggatggtctctgagaaggtgac

SEQ ID NO: 43902 - DNA, 368 bp, Homo sapiens
  misc_feature (1)...(368): n = a,t,c or g
nnnnnnnnnnnnnnnnnnnnnnnnnnnnnnnnnnnnnnnnnnnnnnnnnnnnnnnnnnnnnnnnnnnnnnnnnnnnnnnnnnnnnnnnnnnnnnnnnnnnnnnnnnnnnnnnnnnnnnnnnnnnnnnnnnnnnnnnnnnnnnnnnnnnnnnnnnnnnnnnnnnnnnnnnnnnnnnnnnnnnnnnnnnnnnnnnnnnnnnnnnnnnnnnnnnnnnnnnnnnnnnnnnnnnnnnnnnnnnnnnnnnnnnntatgcttacttttaaaggcacttgagattgtcatagttcagagtaaatatcttttcaaatatattaagtatagtgactgacttcattttatatacatgcactataaaataagtgaggtaa

SEQ ID NO: 43903 - DNA, 391 bp, Homo sapiens
gctacacaccagttgccaaaacaaacaaacaaacaaacaaaaatcaattaatccccacttgccaagcctgcctggttgtgagctactactctttcctgatagtccacaatagctatagccagcctggttgtgggctacttctctttcctgatagtccacaatagctagtctttaaagttttcttcaataagtcctgactagaaggagaaaaaaaaattaaaactactcacatgatatcattgagatgagctcagacaagaagatccacaacatataatttcttgctactaaattaaagtaaacccaaacaaggtactatcacttttaatttattctcagaatgtagtttgtgtttggggaaaatctgactaatgaatgaataaaatcaagc

SEQ ID NO: 43904 - DNA, 365 bp, Homo sapiens
gggaacgtctgaggttatcaataagctcctagtccagacgccatgggtcatttcacagaggaggacaaggctactatcacaagcctgtggggcaaggtgaatgtggaagatgctggaggagaaaccctgggaaggctcctggttgtctacccatggacccagaggttctttgacagctttggcaacctgtcctctgcctctgccatcatgggcaaccccaaagtcaaggcacatggcaagaaggtgctgacttccttgggagatgccataaagcacctggatgatctcaagggcacctttgcccagctgagtgaactgcactgtgacaagctgcatgtggatcctgagaacttcaagctcctggg

SEQ ID NO: 43905 - DNA, 372 bp, Homo sapiens
  misc_feature (1)...(372): n = a,t,c or g
ggaaagccacttagcaggacaaagagctaaaatggatagtacagtgtgttgagaggtaacacacatgacagaaaagataaggtatggggccaggcacggtggcttacacctgtaatcccaaagtgntgggattacnggcctganccaccntnnccngcnnnnnnnnnnnnnnnnnnnnnnnnnnnnnnnnnnnnnnnnnnnnnnnnnnnnnnnntaannncctggccttaagntatccntctgtctcagnnttccaaatttctgntattatnnncntnagcnaccntttctgnttgctatcttctttaaaactattactatnannctttnnttctattnattnacnttnnattnttntttnctttttnttta

SEQ ID NO: 43906 - DNA, 352 bp, Homo sapiens
  misc_feature (1)...(352): n = a,t,c or g
gatatggtgaaccatctgtagtgaagacaacaaaggagacaatgtagttcacttaaaattcaatagagagacatggagaaatacatactagataatgaaaggatccaaacagtgaagaagcactccctttatattttcgaattagtttttcaagagtaaagtgtgttatgatagtcatcttgatttgtttgaaatgatgttgcaaatgctattaaaattataggatcctacattttacttgtgaatattatggtctacctctctagttgtaaaatataaaaatcctagaagatcatatggattaacttcttggtggaatccttatnttgtnttgatgataggagcagtatac

SEQ ID NO: 43907 - DNA, 362 bp, Homo sapiens
gggctgtagaggtcgcgccgctcctgctggggcctgcccacgccaaggacctgcctctgtcgcctcctcttctattgcccagtttccccagccagaacatcccctgaagatggcagaggagagcagctgtaccagggattgcatgtccttcagcgtgctcaactgggatcaggttagccggctgcatgaggtcctcactgaagttgtacctatccacggacgaggcaactttccaaccttggagataactctgaaggacatcgtccagaccgtccgcagtcggctggaggaggcaggcatcaaagtgcacgacgtccggcttgaatggctccgcagctggccacgttttggtcaaagacaat

SEQ ID NO: 43908 - DNA, 350 bp, Homo sapiens
  misc_feature (1)...(350): n = a,t,c or g
gactatctggtctttacagaaacagtttgtcaactccttgtctggagtccacttggggctggcttaaagcatgacctaatcagagattcacgggtctcctcttcccttggaggtactctccttctccagtactgggccagctatgaagctaatgtctctcagctccaaacctacctgttgcatatactgtcaccagaaaactgattaaaagtccacgcccnnnnnnnnnnnnnnnnnnnnnnnnnnnnnnnnnnnnnnnnnnnnnnnnnnnnnnnnnnnnnnnnnnnnnnnnnnnnnnnnnnnnnnnnnnnnnnnnnnnaaggnaaccccggnntttantaaaaataaaa

SEQ ID NO: 43909 - DNA, 354 bp, Homo sapiens
  misc_feature (1)...(354): n = a,t,c or g
ggatagaaaaaccaaaacaacttttgaatgactatactttttttaaacttcatatttaggggtgtctgatttttttttcaactgaatactttttttnnnnnnnnnnnnnnnnnnnnnnnnnnnnnnnnnnnnnnnnnnnnnnnnnnnnnnnnnnnnnnnnnnnnnnnnnnnnnnnnnnnnnnnnnnnnnnnnnnnnnnnnnnnnnnnnnnnnnnnnnnnnnnnnnnnnnnnnnnnnnnnnnnnnnnnnnnnnnnnnnnnnnnnnnnnnnnnnnnnnnnnnnnctgtgccatgtgttctcattggnnnnnnnnnnnnnnnnnnnnnnnnnnnnnnnnnnnnnnnnnnnnnnnnnn

SEQ ID NO: 43910 - DNA, 350 bp, Homo sapiens
gggcctcatctcttgtgaccctgctctactgtcctgaagcacatgcaggtgcctggccttgcctgcctccctgctgtcactgctcatgacactggtctgtgaagcctcctgtcctgtcctgaggtccaccagacatttgctgtttgtcctttgtgctcctgttgctttgtgtggagattaacaaggtgctgcctttatttctctattgcatttgatgtgcccatatccaatgccagcctctcttctccttaagattagggtgttcctccactcagagtagcctcatctctgacccttcagtttgtttgtgtaacgttgcagtgatcttcaacattgcagttgaagatgac

SEQ ID NO: 43911 - DNA, 358 bp, Homo sapiens
  misc_feature (1)...(358): n = a,t,c or g
gctgtatccctgtcattatttgttgtgtgactgtgtagtctaggttgtgaattttaaaggatagttatgtttactaaaaacaagttgttgaagttctgactttttggtttttctgtgtagtttagagtagttatattttttaaaggactccattttacctcagggctctggccagttgaactttggaactgttatttcatacctggtttctttctacttgaaagagtacacatagaagcgaaggcccagcaggggtgactaatttaccagtgccatttgnttccagtcacttgctgnttggctaaaagggaaaatacataatttttgngtaaggaattanctgtggatatattttggg

SEQ ID NO: 43912 - DNA, 360 bp, Homo sapiens
gaggatactgttcaaaaattggcctccgaccacaaagacatccacagcagtgtttctcgggttggaaaagccattgataagaattttgattctgacattagcagtgtgggaatagatggctgctggcaggcagacagccaaaggcttctcaatgaagtgatggtggagcacttctttcgacaaggaatgctggatgtggctgaggagctctgtcaggaatctggctttctgtagacccaagtcagaaggaaccatttgtggagttaaatagaatattagaggcattaaaggtcagagttctgagacctgctctggagtgggcagtgtcaaaccgggaaatgcttatagctcaaaacagct

SEQ ID NO: 43913 - DNA, 360 bp, Homo sapiens
gccaactgtggcgcggcactgcttgaccgaggggctccggagcccagctgcaccggctgcggtttgagcgcccagggccggggtgcggggtggaccgcggcggcccttcgaccaaaggtgcttgaagctcgagcccattactttctgtggactctgactcgagctgcaaaagcttttctgcactgtttttctcatctatgttatgaagataataattccggccctaaccgtagtatgcttgcgagaatccaacaatatgatgtttctgaaagcgccggctgaactaagagcgcgtgaaatagaatgacagacagctctgcaagaacggaggccctgtctattttgtacccagctgtacgg

SEQ ID NO: 43914 - DNA, 360 bp, Homo sapiens
  misc_feature (1)...(360): n = a,t,c or g
gagcagctggacgcgcaccgacggcttggcgtggctgggggagctgcagacgcacagctggagcaacgactcggacaccgtccgctctctgaagccttggtcccagggcacgttcagcgaccagcagtgggagacgctgcagcatatatttcgggtttatcgaagcagcttcaccagggacgtgaaggaattcgccaaaatgctacgcttatcctatcccttggagctccaggtgtccgctggctgtgaggtgcaccctgtaacgcctcaaataacttcttccatgtagcatttcaaggaaaagatatcctgagtttccaaggaacttcttgggagccaacccaagaggcccnnactttg

SEQ ID NO: 43915 - DNA, 360 bp, Homo sapiens
  misc_feature (1)...(360): n = a,t,c or g
gcggcacgagggctcggcgtggtgtcctgcatgggatcccggaagagaaaagaaacacgaagaaaatctgaatacactgggcgtggtggctcatgcgagcaactcctgnnnnnnnnnnnnnnnnnnnnnnnnnnnnnnnnnnnnnnnnnnnnnnnnnnnnnnnnnnnnnnnnnnnnnnnnnnnnnnnnnnnnnnnnnnnnnnnnnnnnnnnnnnnnnnnnnttannnnnnnnnnnnnnnnnnnnnnnnnnnnnnnnnnnnnnnnnnnnnnnnnnnnnnnnnnnnnnnnnnnnnnnnnnnnnnnnnnnnnnnnnnnnnnnnnnnnnnnnnnnnnnnnnnnnnnnnnnnnnnnnnnnnnnnn

SEQ ID NO: 43916 - DNA, 360 bp, Homo sapiens
  misc_feature (1)...(360): n = a,t,c or g
gctggggtggaatctacaattcctaagagctagtgtggagctgtcaacaatacacaatgccagaggaatcttatttgtctttggggtcagcnnnnnnnnnnnnnnnnnnnnnnnnnnnnnnnnnnnnnnnnnnnnnnnnnnnnnnnnnnnnnnnnnnnnnnnnnnnnnnnnnnnnnnnnnnnnnnnnnnnnnnnnnnnnnnnnnnnnnnnnnnnnnnnnnnnnnnnnnnnnnnnnnnnnnnnnattacaggcatgcaccaccacgcctagccgataaaaatatttagtgggcccctagctttagcaaggctgatagaaatttgctttgtattattgatagtttagaactatttttcatct

SEQ ID NO: 43917 - DNA, 361 bp, Homo sapiens
ggtgattagagcaggaatggaagtgagacttttaatatacctttttatacaatttggatttttgaactacatacgttttgcatattgaaagattacactaaatttaaaaggtagttcttaaatgtgaaagttttagagactgatggttccagataagattgattacagatacttcttcctgttcctccctttaagtacagctaaaaccactagacattatatacaaaacacataagaagactttgaacagtgagagaaggacacagacaagctagggacattggaacccaagaaatgacacctctttctcagttttatttttgcctaatgtatcagcctgaaacaccaattggtacagaca

SEQ ID NO: 43918 - DNA, 359 bp, Homo sapiens
gctcagagataaagtaatctgcctacatttgcgcagctaggtggcagagctgggattcaaagacagtgactctagagtcttttaaccgttctactataaagcctatgtagtatttttcatttttgtatttttctttaaaggaatttagtacaagtcattaattttattctgaggttgagatagaaattaatttccctaatttacaagtgatggtaacgacataaaaaatgtaaagacttggccgtaactgtggagacagtttctgacgagatttggtatgtttagggtggcattgccatagattggaggtttcttgggtttctgttaagtcttggtcttctgctagtatgcattgtctc

SEQ ID NO: 43919 - DNA, 366 bp, Homo sapiens
gggtcatttcactcaacagctcggcccagctctgaaacttgggaaggtgagggattcaggggaggtcagaggatcccacttcctgagcatgggccatcactgccagtcaggggctgggggctgagccctcacccccccctcccctactgttctcatggtgttggcctcgtgtttgctatgccaactagtagaaccttctttcctaatccccttatcttcatggaaatggactgactttatgcctatgaagtccccaggagctacactgatactgagaaaaccaggctctttggggctagacagactggcagagagtgagatctccctctctgagaggagcagcagatgctcacagaccacactcag

SEQ ID NO: 43920 - DNA, 366 bp, Homo sapiens
gatttttcaagaaaaacacaatggaaagttataaaagtaattttactgggcagtaagtgaataataaattccattaaaatctattttgattaagcgaagaagataaaaaagtgcagtaatatatgtctgacactgataatctcaattcagggtatggtatcaccacacaacaaaagctgttcttgtgtctcatgattaaaccgcaaaaccatcatgccgtttcctttcaaaattaaaggatacaccacacctcagccattattctcaacatgaggggaaaagagatccaccaaatagaaatagatcacaggacaacacctgtgaaaagtgtgggaaaaaaaatagatcacagcataaagaggggag

SEQ ID NO: 43921 - DNA, 362 bp, Homo sapiens
ggagcttaataccctgaacctaagggaaattaaattgcacattttctgttcctggctaatcttctgaataatgtactgaacacagtaggagttaagaattaaaaatacctgtctgcagtttcagaaacaatcacacacaaaatatttgtttatttccagactgatgaaagactgaatttttggtctcatgtatttactgtattgtttcatatatttatctatatgctttggctgtattaacttgttgaaatagtttggggttctttatatttagcttttataaataattgaaaatctaatgaatgcttacttaataaccaatctaaactggggacttcaaacatagggagtcaagtaatctg

SEQ ID NO: 43922 - DNA, 358 bp, Homo sapiens
gcgacaccccagtgctggtgagccggaacacggagaaacggagccccaaggctcggctactgaaagtcagcccccagcagcctggaccttcaggttcagccccacagccacccaagaccaagctcccctcaactccctgtgtcccagatcctacaaagcaggcagaagaaatcttgaatgccatactacccccaagggagtgggtggaagacacgcagctatggatccagcaggtgtccagcacccctagcaccaggatggacgtggtgcacctccaggagcagttagacttaaagctgcagcagcggcaggccagggaaacaggcatctgccctgtccgcagggaactctactcaca

SEQ ID NO: 43923 - DNA, 364 bp, Homo sapiens
  misc_feature (1)...(364): n = a,t,c or g
gcgtaactcccctctccttaagtgtagaccacacatagccacttcctcccaaagagtgcaataaagaaaaggagggaaagagccactttattgtggagaaaactggcagactccacctcagccaagtgacgcaggtcagcctcacagttatagtcgaggtgacagtgtgtgtccctgatgtgatggggtgacagtggcacttcacccctagatgcttcctttctgtaacctgcagtcccagtctaaccaggagataatnnnnnnnnnnnnnnnnnnnnnnnnnnnnnnnnnnnnnnnnnnnnnnnnnnnnnnnnnnnnnnnnnnnnnnnnnnnnnnnnnnnnnnnnnnnnggagcctaaagact

SEQ ID NO: 43924 - DNA, 354 bp, Homo sapiens
gataaaagtttaataaagattaataattttgaatttttattttcttttcatcactaattttttaaacctctacttataaaacaaatttaaaacaaattattaagtaattataattcttagaacaataagaacaacggtagcaggaactaactctaaataactatcgcaaatagataagttatttagctttagcatggcattgaccaaaatttaagttatattataggtacatgctttttttaaagttctaatatgtgataattgcatttgaaatgtatcacttgatccaaagattaccatttaatccaacttaaatgaaacagagatttagaaaacagagatgtgagtagacaa

SEQ ID NO: 43925 - DNA, 353 bp, Homo sapiens
gtaaaagaaagacatcccaggagaaggacaaaccagaggagtgaaccaacaaagagtacctaggaatgggagttgagccctggaatggggctccatggagaggtgcataggactcggcagaaatggcctctccccaaagcctctttttgagaggagagggaagcctattttgttaactggtttgggatagggaatggggtttctttttctttaatctcccttgtttcttgggctgggggaggggtggggggaacaactggctattcagtaccaaggggccagagtggagggtaggagtgccactctctctttggtttaggtttttgaccttttcttcctttgttttttaaaag

SEQ ID NO: 43926 - DNA, 360 bp, Homo sapiens
ggtaattctcaaagatgcctcccaccgtcccacatggaaggcacttaagaaattggatctttctgtctctcggcttatatagaccttgagaatggaggtgggaggatatgctcctccctcttcctgtttagaaatgactaaatagggcacactccagggacttggagtatttcttagctggaaaatagggtagagtaggaggagactggcatatcaggtcttatgttgagctttttcgtctgtatctactatgcagaatgatgggctagagctctaccatctaaaatggtagccgctagccacatggctatataaatttcaataaattaaaattaaatactattaagaaattccattcct

SEQ ID NO: 43927 - DNA, 380 bp, Homo sapiens
  misc_feature (1)...(380): n = a,t,c or g
gattttgcaaaaatcctattctgatgaatctcaaagtaaggctggtaagagaagtgagtggtgtgactcttactccttaggtgcccagaatttaccatcatctctgaaggagttacagggaagtggtctccccaattctcccctccctccagtattgccccctctcactttagcatatattaattagcaggttgggctagagaaatcagctgctatgcgggttgattattattattatttctaatccttttccttatttgccttctactccccttaatctaatctaaaagctctgtccatgcaactggagttccttatcctctcttcccttccttatatattgagctatggggtangagnaaagtgcccacccccccacc

SEQ ID NO: 43928 - DNA, 391 bp, Homo sapiens
  misc_feature (1)...(391): n = a,t,c or g
gagctgcatagttcacgttaactgaagtctgaagtgtatttcgggagggggcatttttccatgtcagggcttctttaagaccacaaagctgaagtctgtgctcgctgctcagcggaggccgtgctctgcgcattgcgtgcatttgctgcctcctccctcctcctgaatggccacctcttccctgctgatccgcatgctgtctgcacctgaagcctctctccgtgttggtcagctgccgggccgcaagtacagccctgggtacaacaccgaggtgggagacaagtggatctggctgaagtgaacggccgcttctgctccagctgcatcacagtgatggccaaactgcatcaccgcactctctggacgccatatagctttaaancgggggagg

SEQ ID NO: 43929 - DNA, 397 bp, Homo sapiens
  misc_feature (1)...(397): n = a,t,c or g
ggggccttgcctcaggagttgctggttagcctatgaaggggttccctttgggttgatgacattgctcccatccagaaagtggctacttctaccctcctactcccaccactctgcatgcaggagctgttatcatcaaaagggaatgtccactgtctgctctgtaccagagaagtgctaggcttcataaatattggtaatcgatacctgaatgggatgaaaattggcaggtcctgggatggatggcctggttcatctgcatcagaactggaaaaacaaaatcacaccaaattgcagacttttttggaagancgtgttaaacaaggtttgtggattggttgatttttaccaagaaagaaagctttctcctaaaaaggtaaagatttctacttgagtgagc

SEQ ID NO: 43930 - DNA, 394 bp, Homo sapiens
gaaaaaaaagaatccttaataactcacttattaggttaccagaaatggttctgacatttgaagtaaatggcaaagtttactgactcctatgtcagttagtgataaaaaccaaagggaaaaacctacattccgggttactttgcagaacagtggtagattcttaggcctacaagggaggcatagactatactcaggagaaaagctgtttaataaataagattcaaggtgaggagtaggtagaaaagacagagttatttgattttcattttttaaggtattaaaattttttactttatatatgaaaatgtcatgaaatttataagcaataatgtattgatactcaaatttttaaaaatttttaaattttaaaatatttaatcacttctattatttt

SEQ ID NO: 43931 - DNA, 387 bp, Homo sapiens
ggagggaggtgccggagccagggacagccgcctcaggtcctggtgaaggtgagggttcagagtatggtgccagtggagaagatgcgctcagcaggatccagaggctgatggcggagggcggcatgacagccgtggtgcagcgggagcagagcaccaccatggcctccatgggcggcttcggcaacaacatcatcgtcagccaccgcattcaccgcagctctcagacgggcactgaacctggtgccgccacacctcctcaccccagccctccacctctcggggactgtcccagaggccggcaactggcagagcgaggcctaagcccccggacagcttctgggaccagcctggtacccctggcgggagccaacccagccaaccctgcct

SEQ ID NO: 43932 - DNA, 393 bp, Homo sapiens
ggttaatgacaataaacctgaaattaacatcaacctcatgtcccctggaaaagaagaaatatcttatatttttgaaggggatcctattgatacatttgttgctttggtcagagttcaggacaaggattctgggctgaatggagaaatagtttgtaagcttcatggacatggtcactttaaacttcagaagacatatgaaaacaattatttaatcttaactaatgccacactggatagagaaaagagatctgagtatagtttgactgtaatcgctgaggacagggggacacccagctctctacagtgaaacattttacagttcaaatcaatgatatcaatgacaatccaccccacttccagagaagccgatatgaatttgtaatttcagaaaag

SEQ ID NO: 43933 - DNA, 376 bp, Homo sapiens
  misc_feature (1)...(376): n = a,t,c or g
gcaaagtatttaagagttcttcggggaacatttcattgtactgttgcagtatttttgatcttcccaggacaaatattggcaaatttgacatgatttgggatagaggagcattagttgccatcaatccaggtgatcgcaaatgctatgcagatacaatgttttccctcctgggaaagaagtttcagtatctcctgtgtgttctttcttatgatccaactaaacatccaggtccaccattttatgttccacatgctgaaattgaaaggttgtttggtaaaatatgcaatatacgttgtcttgagaaggttgatgcttttgaagancgacataaaagttggggaattgactgcnntttgaacngttatatctacttaca

SEQ ID NO: 43934 - DNA, 367 bp, Homo sapiens
  misc_feature (1)...(367): n = a,t,c or g
ggtgtgtgccccttgggctactttggggacacagcagcaagacgctgtcgccggtgccacaaggggtgtgagacctgctccagcagagctgcgacgcagtgcctgtcttgccgccgcgggttctatcaccaccaggagatgaacacctgtgtgacccttttgtcctgcaggattttatgctgatgaaagtcagaaaaattgccttaaatgccacccaagctgtaaaaagtgcgtggatgaacctgagaaatgtactgtctgtaaagaaggattcagccttgcacggggcagctgcattcctgactgtgagccagcacctactttgantcananctgatcaagatgtggggaatgccntnacacctgc

SEQ ID NO: 43935 - DNA, 233 bp, Homo sapiens
  misc_feature (1)...(233): n = a,t,c or g
gattttatatacatattcctgttattaaattttacaatgctaaaaacatggtagttatcctcaaggtgtcatgaacttttcatagcaaagttatgttgattacttggaggaagttgaccagaagtcagcaagtcatttatctttttaatgatgatgatgatgatgataatacattgctaagttttagtttttctcatagaactctttttgatatttttgnnnnanaantatga

SEQ ID NO: 43936 - DNA, 352 bp, Homo sapiens
gattacatataacttgaggtctggaacctatgggaaactgatcattatggtttgaggatttttttccccctttaaggcaattttctgatatcagcttgaccatatcttaagttactgggtttttttgtttgtttgtttgttttttgcttatttatacttgtgtttttaggttgaaggagcaccagttgagtcggtggttttgaggaaaatttgggaggcaaataagttataatataaattgctttattgttgaacttactactcagtcactgagaatttctattaatgtccttctctcgtagttcaaatatcaacctttcccttcctatctataggattctattgtatttgg

SEQ ID NO: 43937 - DNA, 393 bp, Homo sapiens
gcttataagtaggtcagtcatatgagacctgatcaataaatatccaatacccagagtcctgctctcagagttcttctgtttcgtgacccacttttctaccagtaaaagacatagaccaatggggaggaggggaggagagatggatatttcagccctctccatcctagtcaacactggatccacctagtgcctctgggccataaggctgagcagagtgagcttgtattagttggtagcttttaaaaaatataataagaaaaaagtagagattctccaaactctagcctggtttcctagattgagaactatgatatttttctctgataatttaatatctactctcctacaaaagctcaagcctgaagatacaagactattagaagaaacatgact

SEQ ID NO: 43938 - DNA, 395 bp, Homo sapiens
  misc_feature (1)...(395): n = a,t,c or g
gnnnnnnnnnnnnnnnnnnnnnnnnnnnnnnnnnnnnnnnnnnnnnnnnnnnnnnnnnnnnnnnnnnnnnnnnnnnnnnnnnnnnnnnnnnnnnnnnnnnnnnnnnnnnnnnnnnnnnnnnnnnnnnnnnnnnnnnnnnnnnnnnnnnnnnnnnnnnnnnnnnnnnnnnnnnnnnnnnnnnnnnnnnnnnnnnnttagacaaacaaaaaaaatccctgtaccttaatttcagtgttcccaatagcctggagtggagttgtctcctaaatcctgtgtgactgaaaatgaagctagaaagcaattatttttaatttggccaaattttttacatttattatgtgctttaactgtcgttggataagataagctatgcatctttaaagtgccatttgtgc

SEQ ID NO: 43939 - DNA, 384 bp, Homo sapiens
gaagaagtaaaactatatggcaaaaatccatcatgaatttctatgacgtaaaaggactgagaactgcaaatgataccagttttctaatcgctaaacaggatattacttggtgaatcttcaataaattaaataaggtgtataagattatacttaaattttggagaacattacaactcttaaaagtctcacgctggtgtcctttagtcataaaaccattgcattaatgaggtgcaaggaacttgtatgagccagtgaaagtaaaaacagtatgctttggaaatctttgcctgcataatataggtgctttgaactggcaacagaatatcatctactttactgggtattttttggagatgttacctcttcctaaatcagaagaaaaac

SEQ ID NO: 43940 - DNA, 426 bp, Homo sapiens
  misc_feature (1)...(426): n = a,t,c or g
gcggcacgaggcaatacaaaaaaattgaggaagttgctttgcaatnnnnnnnnnnnnnnnnnnnnnnnnnnnnnnnnnnnnnnnnnnnnnnnnnnnnnnnnnnnnnnnnnnnnnnnnnnnnnnnnnnnnnnnnnnnnnnnnnnnnnnnnnnnnnnnnnnnnnnnnnnnnnnnnnnnnnnnnnnnnnnnnnnnnnnnnnnnnnnnnnnnnnnnnnnnnnnnnnnnnnnnnnnnnnnnnnnnnnnnnnnnnnnnnnnnnnnnnnnnnnnnnnnnnnnnnnnnnnnnnnnnnnnnnnnnnnnnnnnnnnnnnnnnnnnnnnnnnnnnnnnnnnnnnnnnnnnnnnnnnnnnnnnnnnnnnnnnnnnnnnnnagacttcgttcatanaacaaanttttttttanactcttcatttatttctgaannatgc

SEQ ID NO: 43941 - DNA, 425 bp, Homo sapiens
  misc_feature (1)...(425): n = a,t,c or g
nnnnnnnnnnnnnnnnnnnnnnnnnnnnnnnnnnnnnnnnnnnnnnnnnnnnnnnnnnnnnnnnnnnnnnnnnnnnnnnnnnnnnnnnnnnnnnnnnnnnnnnnnnnnnnnnnnnnnnnnnnnnnnngtacctatnnggggattntttgaaaccttnttanttctganctacntcnattttntaaangncttataaatagtaaatccttgaaaanatttnttcnttccnccntnggaaatcaaaactgagngtatncccttgttngttaatngtattaaagtatnctttgcagcatanncntatttattantaganttaanngtatatagtatngccctatcattattngggtaaaagtanttttaagggacnnatangacantnttcatnctattctgatcaaantactgngatcacccngggg

SEQ ID NO: 43942 - DNA, 332 bp, Homo sapiens
  misc_feature (1)...(332): n = a,t,c or g
gctcctggctctgcttacatacttccagggacggtgagctcacgctctctccgggcagccctgtgagtttcctatctgttccagactagtatcgccaatctctcccagctctcttctttcctccctggcctttgtcctgcaggaggtagcatcacctcttggcattttgtacatgcttttaaacaattggaggagctgcccaggcagttttatggcctcctgggttgtgtgccttcacacccgtctacagccccacctcaccatcaagcgctgagccaatgcggtgtggntgncctgagttnntgannnanntccttgnnangccannactg

SEQ ID NO: 43943 - DNA, 424 bp, Homo sapiens
  misc_feature (1)...(424): n = a,t,c or g
gtggcnnnnnnnnnnnnnnnnnnnnnnnnnnnnnnnnnnnnnnnnnnnnnnnnnnnnnnnnnnnnnnnnnnnnnnnnnnnnnnnnnnnnnnnnnnnnnnnnnnnnnnnnnnctcacataaaattgacagtcactgaactttgttcatttctgtatctaccatatgtattaatcgttatcactttctatgtgccagacacttacaaaaaccaggtgaaataggtgctattgatttcattttgtatttaagaaatctatacattctaaacctgcttgttgaaaacgtaaaggaataacaagcataaatctccaatgttaacattagctggtaaataagaggtcttacatggatattatccaggtttggtaacagaacagaaaaggtactatgggattgnattctgtaatgggtaaggcanncagca

SEQ ID NO: 43944 - DNA, 346 bp, Homo sapiens
  misc_feature (1)...(346): n = a,t,c or g
gactggcaaaaactgtccaggaaacaagaatctggctcttggtaggcatacaatatcatggctaggcgcagagtgccccactccctgccccgctcctccctgtcctcctgctcctctgttcccctacccctctcctctcctgtccagagtctcagtctccactggagtacttaagttgcccatcatcccgagactctcagacagcggcagcaagaggacatgatctattaagggggaatgcagatcacancanatattantgaatacctattatgcaccangcaaggtctanntattgganaatntnncnntnancccntanaccaantnctgactntattttaac

SEQ ID NO: 43945 - DNA, 383 bp, Homo sapiens
gaaagaacttaattgaacagcttgaacaagataaggtaaaacaacaaaacctatgatactaaaatttgtcaagaggccccaacatttacttttggaaacagttggaaacattcatgcttgtttctgttttctaaaaattattgcagctttttccatgaaaaatctttaatttctagatttttgtaactactagcattagttttgtgtcatgtaaaactgattctctgatttcttgatcccagtcagcattatgatttgtagactagaataactgttgcaaaggaagtttatatttatagtacataactactttacagagaaaagttatttatagttaaggcattataaatgtgaatgatatcagtatgttctttcagataata

SEQ ID NO: 43946 - DNA, 384 bp, Homo sapiens
  misc_feature (1)...(384): n = a,t,c or g
gtgcaaagatacttatttctcttttttactctagatggccctctacctgacccaagtatgatccgtggcagtgtgccaaaccagatgatgcctcgaataactccacaatctggtaaatagtgaaaaaaatttttttattttaaaagaatccccggtgtactgcaagataatacttgctacctgaacacccgctttatgccaacagcaagtgtcatgattacctgcccatagaggaagagggggtgaagagcaggttggctggcagatcacagggcaggtgacattaaatgatcaagtatccattaaaaaannnnnnnnnnnnnnnnnnnnnnnnnnnnnnnnnnnnnnnnnnnnnnnnnnnnnnnnnnnnnnnnnnnnnnnnnn

SEQ ID NO: 43947 - DNA, 382 bp, Homo sapiens
  misc_feature (1)...(382): n = a,t,c or g
gggaagttcacgttcagagaaagggagtcagtcgcctggccagtgccaacctgggattggagccagggccacctgacaccaccttccagctggcacggggcaggggagggggccaggcgaggactcagatgcttaaaatacaacttgagtgtgcattataatgggggcaaagccccacgcctttgccaaatgtacagaccttggggactcatttgtgggcctagagatggggcaggctgctggcatagttaagagcccagctttggtttaacctgactgactcaaatctctgccacttattattannnnnnnnnnnnnnnnnnnnnnnnnnnnnnnnnnnnnnnnnnnnnnnnnnnnnnnnnnnnnnnnnnnnnnnnnnnnn

SEQ ID NO: 43948 - DNA, 353 bp, Homo sapiens
ggacagcaggaagaggggagtggaggcagcccattcacctggggaaatgactgggttgtcgatggacggtggcggcagccccaagggggacgtggacccgttctactatgactatgagaccgttcgcaatgggggcctgatcttcgctggactggccttcatcgtggggctcctcatcctcctcagcagaagattccgctgtgggggcaataagaagcgcaggcaaatcaatgaagatgagccgtaacagcagcctcggcggtgccacccactgcactggggccagctgggaagccaagcatggccctgcctctggcgcctcccttcttcctgggctttaaacctttgtcccc

SEQ ID NO: 43949 - DNA, 352 bp, Homo sapiens
gcagttatttttattattcttgatacacaatgaaaagatttgatttagtattattttctttttaaatgtaaaaatgaatatctgtgtttcctgtctaatttcagtgtttattttttaattacagaattattgtttttagggaagaaaacttaactttggcataatttaagccctcccccacattgccaaaatatgttcttgaatgtatataaagcccttcctggcctttttcccacttgaaagtggggaagtaaaatggaaatgctcttaggggcttgtaaaaagcagcccattgacctgaaaatggattttaatagttgcacaggtttgctgataacaaacaagaaaaccc

SEQ ID NO: 43950 - DNA, 350 bp, Homo sapiens
ggaaattgctgaacttcaggggcaagcagcagtgctcaaggaggcacatcatgaggccacttgcaggcatgaggaggagaaaaaacaactgcaagtgaagcttgaggaggaaaagactcacctgcaggagaagctgaggctgcaacatgagatggagctcaaggctagactgacacaggctcaagcaagctttgagcgggagagggaaggccttcagagtagcgcctggacagaagagaaggtgagaggcttgactcaggaactagagcagtttcaccaggagcagctgacaagcctggtggagaaacacactcttgagaaagaggagttaagaaaagagctcttggaaa

SEQ ID NO: 43951 - DNA, 350 bp, Homo sapiens
  misc_feature (1)...(350): n = a,t,c or g
gaggttgtagtgagctgaaacgctatcttgagtgtggggctaccatgatgagactagtgtcctcgtaagaagagaaagagaaagaagagaagacaaggccgtctgcaagccaggaagaagnnnnnnnnnnnnnnnnnnnnnnnnnnnnnnnnnnnnnnnnnnnnnnnnnnnnnnnnnnnnnnnnnnnnnnnnnnnnnnnnnnnnnnnnnnnnnnnnnnnnnnnnnnnnntgttatagcatccaaactgcctgagacagggaatgactgctgaatgggcacaaggtctaccttgggggtgatgaaaatgtttttgagctagataaaagtgatggttgtacaacattgtgaa

SEQ ID NO: 43952 - DNA, 357 bp, Homo sapiens
  misc_feature (1)...(357): n = a,t,c or g
gagtgggtggtggggcctggggtacggggctgccccgggaaataaagtgtctccctgacaagcgggatcggagagggcagcgctggacttaagccttcctgtctcccggggaggcagtgtggagccctgggaaaagcacccggccggttggaatctccggctcttcacgtcgagcctcagtttcactttctgtaaaacggggtaatctannnnnnnnnnnnnnnnnnnnnnnnnnnnnnnnnnnnnnnnnnnnnnnnnnnnnnnnnnnnnnnnnnnnnnnnnnnnnnnnnnnnnnnnnnnnnnnnnnnnnnnnnnnnnnnnnnnnnnnnnnnnnnnnnnnnnnnnnnnnntggcccg

SEQ ID NO: 43953 - DNA, 358 bp, Homo sapiens
gctccagctgaatgcactgtgatgggtatccccagtgtgaccacgaatctctccgggtttggctgtttcatgcaggagcacgtggctgatcctactgcttacggtatttacatcgttgacaggcggttccgttctccagatgattcttgcaatcagctgactaagtttctctatggattttgcaaacagtcacgccgtcaaaggattatccagaggaacagaactgagaggctctcagatcttctggattggagatacttaggcagatattaccagcatgccagacacctgacattaagcagagcttttccagataaattccatgtggaactaacatcaccaccaacgacagaaggat

SEQ ID NO: 43954 - DNA, 422 bp, Homo sapiens
  misc_feature (1)...(422): n = a,t,c or g
ggggtgatgaccctctttgtcctaggtgtaccctttcctcatctctattaaattgtaaacaggactactgcatgtactctctttgcagtgaatttggaatggaaggccaggtttctataacttttgaacaggtactttgtgaaatgactcaatttctattgtggtaagctcattggcagcttagcattttgcaaaggaattgctttgcaggaaatatttaattttcaaaaacataatgattaatgttccaattatgcatcacttcccccagtataaatcaggaatgtttgtgagaaaccattgggaactatactctttttatttttattttttattttttttattattttttttttggggacggagtgccnnnnnnnnnnnnnnnnnnnnnnnnnnnnnnnnnnnnnnnnnnnnnnnnnnnn

SEQ ID NO: 43955 - DNA, 425 bp, Homo sapiens
gggagaagcgcgtcacctcctcgcccaggcccgcagcttagtggctcagtttgctggagatgcgcggtgtctgcctcagcagtctcagcagtttctaactaaagctgacttttagttagaccgaaaccgaacacatggcatcctgccaggatgacctgaagtcatcctcacgtttcctttccacataaagccgacccatgcaccttttctttggaactaacccaccagatcttagaaaatgtacatgtgcttctttcctttttcctactctacctggctagtctttacatatgttttcttcgtatgtggtgtttatacatttcacatgaatatatcaaacttttcattcaagtctgcagtttttattttgcttatttttaaaaagtagagtctaatgagtgtaatcttagaaagctgtgtggtag

SEQ ID NO: 43956 - DNA, 425 bp, Homo sapiens
  misc_feature (1)...(425): n = a,t,c or g
gctgagattatattaaagccttaatgattctttgtgaggttgaaaaatattttgcttttattagtattaatatatgtctagtatttaaaagagatagatcttatacctaatttttgtgattttttttttttganaccagcctggccaacatggcnaanccctgnannnnnnnnnnnnnnnnnnnnnnnnnnnnnnnnnnnnnnnnnnnnnnnnnnnnnnnnnnnnnnnnnnnnnnnnnnnnnnnnnnnnnnnnnnnnnnnnnnnnnnnnnnnnnnnnnnnnnnnnnnnnnnnnnnnnnnnnnnnnnnnnnnnnnnnnnnnnnnnnnnnnnnnnnnnnnnnnnngaangaaaantgaaggaaantncaantnttacccggccntggnaagtgtccccctgtagtcccagntactcaggaggctaag

SEQ ID NO: 43957 - DNA, 424 bp, Homo sapiens
  misc_feature (1)...(424): n = a,t,c or g
ggaatgatgacaaaaaaagaaaaaaaaaagcctgtacgtgtttggtacagaggtagccatccattattttttctgcatannnnnnnnnnnnnnnnnnnnnnnnnnnnnnnnnnnnnnnnnnnnnnnnnnnnnnnnnnnnnnnnnnnnnnnnnnnnnnnnnnnnnnnnnnnnnnnnnnnnnnnnnnnnnnnnnnnnnnnnnnnnnnnnnnnnnnnnnnnnnnnnnnnnnnnnnnnnnnnnnnnnnnnnnnnnnnnnnnnnnnnnnnnnnnnnnnnnnnnnnnnnnnnnnnnnnnnnnnnnnnnnnnnnnnnnnnnnnnnnnnnnnnnnnnnnnnnnnnnnnnnnnnnnnnnnnnnnnnnnnnnnnnnnnnnnnnnnntgaatattttctttctttctgttttgtgagacacgttctgttgcccac

SEQ ID NO: 43958 - DNA, 416 bp, Homo sapiens
  misc_feature (1)...(416): n = a,t,c or g
gaatacatttgagagagatgttagatctttggaaaataaattaacatccagtgtatttgaaacaattttaagattcaaataaaagcagagaaactgtttctaaatcaagaatattggcaaattatttgactaaaagtaagatttttgggtttaacctctaacttccaaaatttctagtgatttattttatagtgattctgtaatgagaagtctcgtcctactaaatatcaaaaggttttaaagcaagaatgtctaaaacagtgatgatgatgtaagaataggtgtgttacccagataccataagagacttctctgtctgttggagatttaagtatacattnnnnnnnnnnnnnnnnnnnnnnnnnnnnnnnnnnnnnnnnnnnnnnnnnnnnnnnnnnnnnnnnnnnnnnnnnntc

SEQ ID NO: 43959 - DNA, 422 bp, Homo sapiens
gatctgttaatcccatacagtatgtttttaaactagacattgtagttttcatctctgaaagtttgatttggatcttttttatactttgcttgctctgcttaatatgttgggatgcagtttaataaatgttttgtttctaattatttcatctcttcagataataagctggggcagatctggggtgcacattttgtttttcatttctaggggatcactgtcttttattgcctaatatcaaatgcttcaaattgttgatccatatattttttcagagttttagttgtgtcagatgggtggtaaatctaatccctgttcctctatcttaattggaagtgaaagttctacttactcatttatattacttcattgtctaccccattcaagtaatccacatagaaaacctgcatttatacacacatgct

SEQ ID NO: 43960 - DNA, 424 bp, Homo sapiens
  misc_feature (1)...(424): n = a,t,c or g
ggttttacacaggaatacaaatttgcctgaactcaaaaggggcttgtttacagtactttaatcttgtttttcacttcataagccctctgtaaactgaaatacagagctacaggcaaacctcattttattgcacttagctttattgctctttgaagatactctgttttttttttnattcaaattacanannnnnnnnnnnnnnnnnnnnnnnnnnnnnnnnnnnnnnnnnnnnnnnnnnnnnnnnnnnnnnnnnnnnnnnnnnnnnnnnnnnnnnnnnnnnnnnnnnnnnnnnnnnnnnnnnnnnnnnnnnnnnnnnnnnnnnnnnnnnnnnnnnnnnnnnnnnnnnnnnnnnnnnnnnnnnnnnnnnnnnnnnnccccataaaccatgcgcatataacgtggcaaaccttatcaataagttttg

SEQ ID NO: 43961 - DNA, 340 bp, Homo sapiens
  misc_feature (1)...(340): n = a,t,c or g
gcggcgtgggagtttccaggaacactgaggttcaggtctgggggcggaagagaaaagcagctcattctcagaaagcactgagnnnnnnnnnnnnnnnnnnnnnnnnnnnnnnnnnnnnnnnnnnnnnnnnnnnnnnnnnnnnnnnnnnnnnnnnnnnnnnnnnnnnnnnnnnnnnnnnnnnnnnnnnnnnnnnnnnnnnnnnnnnnnnnnnnnnnnnnnnnnnnnnnnnnnnnnnnnnnnnnnnnnnnnnnnnnnnnnnnnnnnnnnnnnnnnnnnnnnnnnnnnnnnnnnnnnnnnnnnnnnnnnnnnnnnnnnnnnnnnnnnnnnnnnnnnnnnnnnn

SEQ ID NO: 43962 - DNA, 352 bp, Homo sapiens
  misc_feature (1)...(352): n = a,t,c or g
nnnnnnnnnnnnnnnnnnnnnnnnnnnnnnnnnnnnnnnnnnnnnnnnnnnnnnnnnnnnnnnnnnnnnnnnnnnnnnnnnnnnnnnnnnnnnnnnnnnnnnnnnnnnnnnnnnnnnnnnnnnnnnnnnnnnnnnnnnnnnnnnnnnnnnnnnnnnnnnnnnnnnnnnnnnnnnnnnnnnnnnnnnnnnnnnnnnnnnnnnnnnnnnnnnnnnnnnnnnnnnnnnnnnnnnnnnnnnnnnnnnnnnnnnngggaaaaataatctgcatgttaccccaggataatcctcattcctcaggccgtgagaaattcatttctgaccttcctggcattttatggcatgacattttgta

SEQ ID NO: 43963 - DNA, 321 bp, Homo sapiens
  misc_feature (1)...(321): n = a,t,c or g
gagtaaaatgttggtcttgtttatttaatgccctttcttctgttttatgttttctttaaataccaacttttgttttgaagtcaattaattgtattctcattaaaaattctgtagtgctcattttggtagtggaatgggttgctttgtttacattcttcaattcttagtgttagtctgtttcacagctgttcagtagctttgttggcatttgaagngnggnaaccaacaaagcatttggatgtgcttttgccgcnttannggctttcctgctgtnntcttttnaaccnngnnncntagnattacctnaccaggagtnnctgg

SEQ ID NO: 43964 - DNA, 345 bp, Homo sapiens
  misc_feature (1)...(345): n = a,t,c or g
gacannnnnnnnnnnnnnnnnnnnnnnnnnnnnnnnnnnnnnnnnnnnnnnnnnnnnnnnnnnnnnnnnnnnnnnnnnnnnnnnnnnnnnnnnnnnnnnnnnnnnnnnnnnnnnnnnnnnnnnnnnnnnnnnnnnnnnnnnnnnnnnnnnnnnnnnnnaaataattttacctttttccaaactaatgtaattgcttacagctcatatttgagcttctaaatgcaatgctattggacgtatttgccacttcatatttaaggcctcttttactgtgtacggtatttattaccgtggagccatgagaccaaactgcaaggctctaatctcagttcagctatatgttta

SEQ ID NO: 43965 - DNA, 393 bp, Homo sapiens
  misc_feature (1)...(393): n = a,t,c or g
gaactggagatagggtagcctgctttgcctgtggtgggaagctcagtaactgggaaccaaaggatgatgctatgtcagaacaccggaggcattttcccaactgtccatttttggaaaattctctagaaactctgaggtttagcatttcaaatctgagcatgcagacacatgcagctcgaatgagaacatttatgtactggccatctagtgttccagttcagcctgagcatgttgcaagtgctggttcttattatgtgggtcgcaatgatgatgtcaaatgcttttgttgtgatggtggcttgaggtgttgggaatctggagatgatccatgggtagaacatgccaagtggtttcaangtgtganttcttgataccaatgaaagccnagagttg

SEQ ID NO: 43966 - DNA, 394 bp, Homo sapiens
  misc_feature (1)...(394): n = a,t,c or g
gaataccctgttcagttctttaggtgccgaggataagacacaataattttatgaggatttttctgagctctaagcataaatccatctttcatattagatgctaccacctatgtgcaggatgttttaattattttaatttcataccgtttcaaagacatcatcagatagatagtgctcctcaagggaaattttggcttggggtggaggcacatgttcaaatttctgcacttannnnnnnnnnnnnnnnnnnnnnnnnnnnnnnnnnnnnnnnnnnnnnnnnnnnnnnnnnnnnnnnnnnnnnnnnnnnnnnnnnnnnnnnnnnnnnnnnnnnnnnnnnnnnnnnnnnnnnnnnnacnntcnnagnattacncggacatggngatntgcacctgta

SEQ ID NO: 43967 - DNA, 361 bp, Homo sapiens
  misc_feature (1)...(361): n = a,t,c or g
gagaccctctgccctacttttcagcgaagtcagcaaagtagagagtttctcttattacagcctgcttttaaatgcagtttaggaaaggcagagagttgggttcaatcagggttggacacttggcaggcaaatttgacaaagaaaagaatatgtgagcagtagttctatataaaaaggaattgaagatataatggattctaagctagaaaatgaagttaaggacatgagggtgattatggacagtggaaaaggagttggtgggttagaggnnntncnnnnncnnantatggnnnnnaacntanntaangatgncnnnannctnnnnngnctgnnnangncngngcngnggtnangnnngaac

SEQ ID NO: 43968 - DNA, 340 bp, Homo sapiens
gcggctccctgtctgggcaggcgtaggcccaggccatcagcacgttctgagctggtgacaggagacccacagccaccccagcttggccctgccagccccttttccctcctcaaaccccgggtatctgagggctatgagctgacagctttccctccctccattgttgactcccctctcagccctcctcagtcttaccccaccctgcccccttccaggctgtgtccactcacaggccaggggactgagccctgacccagtcccaacagcctcagggctgagatgggtttttatttatatttttggtgtgggagggtatacattcacggagacaaagctctcc

SEQ ID NO: 43969 - DNA, 335 bp, Homo sapiens
gccgatatagaacatttctaccatagtagaatgctcttttggatacatctgctttaaagcattagtccccaaagtgtgaaggatgaaccacttgggttccgagaggaaacattataacttctgtttatccattaaactctttcatttattattaaacatctcaacacatttattgggtggcaggtactgttttaagtgttttgcatatatttacatgtactgtcctttcaaatattctttgaaataggactattgttgtccatatttcacagatgaggaaagagatgtgctaagaaaagaggtggcagagtagggattccagctcagtagccact

SEQ ID NO: 43970 - DNA, 343 bp, Homo sapiens
gtgatgttttactgaagttttattttaatagagacaaagcgtgttgttgggtggcctctgactcttagggtcagggtggccactctcagaatttcagttgtagagtctgacagggatttggcctggaatatggcctaccttgcaagctatagtgagtcactctagcagtgacatgaaagtgtgccatggttctgagctctgtggacaggtgagaaggtggggctgctgtaggtgtggacacaggaagaatgcgcaaggagtggaggacttgctggtccatggaaggctcgggggtggctttgggctggccctggggatgtgctgtgggacagcagcaacagtg

SEQ ID NO: 43971 - DNA, 343 bp, Homo sapiens
  misc_feature (1)...(343): n = a,t,c or g
gtggtctctgaattctgaagccttattttcttgtgaataacacatgatgctgttgatcttacagtttttttttaaaattaattttcagtcttagtttgaccagtgaagattttattatagtgtgaaaatacacagtgaactttgtgccacttgtacatgtaatgcttctaaaggaattggaccannnnnnnnnnnnnnnnnnnnnnnnnnnnnnnnnnnnnnnnnnnnnnnnnnnnnnnnnnnnnnngagcccaagagttggnnnnnnnnnnnnnnnnnnnnnnnnnnnnnnnnnnnnnnnnnnnnnnnnnnnnnnnnnagataaaggaattgggctgtatta

SEQ ID NO: 43972 - DNA, 334 bp, Homo sapiens
gcacgtaactacaaatatagatttaatataaatttatggtatccagtgtccactgggacttcaatgctgcattttctttttttctttagcatttctcgggtaagtttctcttttactctccaaaggccattttaaacttttggctttcctgcctctgtgcctcaagcttaacagggtacattgattcaaacctagcaatgattatataaatttattatcaccagaccaacagacttgcctgtatccacacccattgttttctctttccctccttttaaaatagaaggtaatctttctttggtctcctggagccattctatcaattctttttagg

SEQ ID NO: 43973 - DNA, 342 bp, Homo sapiens
  misc_feature (1)...(342): n = a,t,c or g
nnnnnnnnnnnnnnnnnnnnnnnnnnnnnnnnnnnnnnnnnnnnnnnnnnnnnnnnnnnnnnnnnnnnnnnnnnnnnnnnnnnnnnnnnnnnactgcacctggctggccttccatatttacttataaatgtggactnnnnnnnnnnnnnnnnnnnnnnnnnnnnnnnnnnnnnnnnnnnnnnnnnnnnnnnnnnnnnnnnnnnnnnnnnnnnnnnnnnnnnnnnnnnnnnnnnnnnnnnnnnnnnnnnnnnnnnnnnnnnnnnannncnaannnattatccagtcatgnngncanccactcgtanncctggctacttggnangttgangtgnnaggattcct

SEQ ID NO: 43974 - DNA, 345 bp, Homo sapiens
gaaaattaaataatttttatttcaacaaaatccctgggtaatttgtatgtacattaaattttgagatgcatgatcttttaaggttcattctaatccttaaaattctgttttaataatgtgtacaatgaagtgctgcatggcaaactacacagaaactaaaggcatgttccaaaaaggaaaagttccatgtggctaggggaataaaagcttcatcagggaaccaggagttgggctggttcttaaaacctggagaaagaagatggttacatcaagagataaatagagtgaagcagaactagtggtgcggaccagctcgccagcaacagaagggtttgtagtcggccc

SEQ ID NO: 43975 - DNA, 358 bp, Homo sapiens
gcttgttggattttttagtcatagcagttctcagaatagcaagcaattccatggaatggatgatttcctaagagcctgatgaggattgtcattctaagattctctgtgggctgtaagaatttcttaaaatctggcatatttgtccttgtcaattttttttactgataaagcaggataagtctgaacttaaatttctgacttaggcatactgaaatgaaaaccagcatataacatttttatctctggagatgagagttttaagaaggaattaagaaccaaaattaatttgaggctaaaaatttttcaagcgtgttttttggtggttttgttttggttataaagtagcccagatatttac

SEQ ID NO: 43976 - DNA, 350 bp, Homo sapiens
gcacaccctgccccatgtccgttagcacctggaatgcgctgtgtgctaggggtgcccctgtggtcagcttgcctgtcctgaagaaagccttccttgggcagcctgtggcttctttgtaggcctgtcccaggtgttatgtaaccattgtttaagagggccttgaccgctgtctcctcagctgtaagctccctgagggtaggaactgctttttgtcttggttttctttcttcagtgcctaacagtacgcactgcccacatgcatgtggggcaggaggtggcagtggcccagcaggtggcaggggtggcacacatggccgcctctgctccctgtgttgggttatgctgtgcag

SEQ ID NO: 43977 - DNA, 354 bp, Homo sapiens
  misc_feature (1)...(354): n = a,t,c or g
gcatttatttagtaactattttctgacaagcacattttactgatgaggaaactgaagtgtgtggaggtaacaactggccagtgccacatggctggtgagtgaccgcctggaggagaaggcaggcagctgccccagtgctctcccatagcagtgtgcaggctccgacccacacaggccttgtcagatttcactaaggaagggtaaaccagaggatataagtgagcttgcttttaacaataattattgcctgtctcagaggaagttaaattttaatcctccattatgatttttatctatagttagctgcattttcaaatcttaaggtccttctcttaggtttggntngggttattt

SEQ ID NO: 43978 - DNA, 343 bp, Homo sapiens
  misc_feature (1)...(343): n = a,t,c or g
gccaggtataatacaaattattgatacaataaaccttaaaatatcttaattttaaaaatcaattggtgaaactccatccacttggaagataaaaaggaagaaacaaaggaagataaactaccaggaaagaacctaagaggaaatatgcaagatacatatgaagaaacattaagacatacaggatcttggaaaagaagactcaacatcctaaattagtctataagttaaaatcagtcccaataaaaatattaacaggnnnnnnnnnnnnnnnnnnnnnnnnnnnnnnnnnnnnnnnnnnnnnnnnnnnnnnnnnnnnnnnnnnnnnnnnnnnnnnnnnnnnnnn

SEQ ID NO: 43979 - DNA, 357 bp, Homo sapiens
  misc_feature (1)...(357): n = a,t,c or g
gagatatttaattcatttaaaaataacaataagcacatgaaatattacctaaatagcattatgaaaagtaacagcatttccaaaacaaaaaacaagttagtgagaaaagtggcattgttttaaatttttgccaatgtctggtttagtaaaatacatacagattctgttggaatatcacacatcatgtatctcctgaaaaaatcaactgtgtgcatgtgtgagaatgagtgagananggtaantaatgtcttagntggnttnatggaaaangactttgacctcatggactcactaatagtcacaggtccctcaagggtccctggaccacccttggacaaggctgagnttattgctaat

SEQ ID NO: 43980 - DNA, 324 bp, Homo sapiens
  misc_feature (1)...(324): n = a,t,c or g
ggggtacattatcttttttttttaagagtacattatcattgaaatcaaagaggccaggaatctttggatgtagggaggtttttgcttcctgttgttgacattcagtatatgaatgctcctgaatagccctgtagagagaggatgctagcgaatgtgaggcttttgatttaaaggtgcttctaagcaaatgatgctttgataattagacaccattggttgtcttttatttcatttttatattgttacagtgatcctccccaggaattctcaacagagtttcctttggaactataggaangggnnctatntggntaatgctntaaa

SEQ ID NO: 43981 - DNA, 61 bp, Homo sapiens
gccaggtgtttgtggatacctataggaggatgtaaagaagaagagggtttggggggtgggg

SEQ ID NO: 43982 - DNA, 337 bp, Homo sapiens
ggacgattcagaacacaattaggagaatgagctggagcgccagcaccacgatggccccaggacgttgtttaagatctgagatcccttggtttctctcttgttgatctgagatgctacatcagggcccttgctgctgtattacctctgcccgggtgtttgagacaggtcacaagcgcgtggatgtttcctggaagtgtattcccctggggctcagcgatgctctgggaacccttggggtttggggaaggacagtgtggttgtgactattggcttgaaacgttatggatatggttggagtcacccatgtggatatgattttcagctttgtctgccagaa

SEQ ID NO: 43983 - DNA, 354 bp, Homo sapiens
  misc_feature (1)...(354): n = a,t,c or g
gttcttgcagtgcctttggctgtcatatctggtcccttttagattagtctggtgcttgctgggtttctttgcttctcttgagctcacttcccccatgtccccaaaggctccattgctccttagtgcaaaaaaatgattctctttgataggaaacagaggtgaaaaggcctgagggaattctgctttctctgttacctccaacctgacccctcaggcccaaagaagcctagctttttctttgttcttgttgcaaatataatgctttttaaattgtccttcgggnnnnnnnnnnnnnnnnnnnnnnnnnnnnnnnnnnnnnnnnnnnnnnnnnnnnnnnnnnnnnnnnnnnnnnnn

SEQ ID NO: 43984 - DNA, 353 bp, Homo sapiens
  misc_feature (1)...(353): n = a,t,c or g
gttccattttttttcctccttaatcttgtgtgtgttttcaaattttttaaagatagagatctgtagcagtgttggggtgaggaaactgttgctaaggggaatttgctctttcccccatttctttttctgtctctcttcctctttctttttcctggtcaaggttttaaatataccaagaagttgagaagcaggatggccgtgtacaaccgtttccggccaaatttatagtttttttttcttttttttaaatcacattttaagaactggtagatttttgtggttgagggactttaaaaatttagccgcttgggaagtncanaantttttaagcgggctgaagggataangtaaat

SEQ ID NO: 43985 - DNA, 344 bp, Homo sapiens
ggtgtattgtctgtttcccctatgcaagctccttgaggacaggggctgctgtatctccagcccctaggagagcccctggtacatagaaggtgtgcactaattatctgttaaatgaatgacctggacaaagtattgtccaggagaaaggggggcactgagggaggggtacatacacagggctatgaaggtatgagagaatggccatcttgcagtgctggggctcaggagaggaggggagctgagagcacaggtacttggtgtcaggttttggggagtctgggaagaatttttggccagggagtgactgaatccgatttgcatgatacacatttgcctctgccagg

SEQ ID NO: 43986 - DNA, 333 bp, Homo sapiens
  misc_feature (1)...(333): n = a,t,c or g
gagaaggaatttccctctgtcgctcaggctggagnnnnnnnnnnnnnnnnnnnnnnnnnnnnnnnnnnnnnnnnnnnnnnnnnnnnnnnnnnnnnnnnnnnnnnnnnnnnnnnnnnnnnnnnnnnnnnnnnnnnnnnnnnnacactacgcctnnnnnnnnnnnnnnnnnnnnnnnnnnnnnnnnnnnnnnnnnnnnnnnnnnnnnnnnnnnnnnnnnnnnnnnnnnnnnnnnnnnnnnnnnnnnnnnnnnnnnnnnnnnnnnncctggaatgtttttataagaaattttaggagaagcgatggggactccatatcagagccccctctctctct

SEQ ID NO: 43987 - DNA, 348 bp, Homo sapiens
gaaccattgaaacaggaagaagcaactgctacagagctaactacaaagtcatcccttgctgcttcctcaagtctctcatcgatagttggaccacttgttgaaatgaatacaggcgaagctgagtcaagaaattcaaactttgcaactgtaggagcaggttcagaggactgggtgaatgctattgagtttgttcctgggcaaccctactgtggccgtactgcgccttcctgcactgaagcacccctgcagggctcagtgaccaaggaagaatcagagaaagagcaaaccgccgtggagacaaagaagcagctgtgcccctatgctgcagtgggagagtgccgatacggg

SEQ ID NO: 43988 - DNA, 360 bp, Homo sapiens
gggagaagggatggaagaatctcagagccccatgaaaacagatctgcttctggttaaccacaaacctagtccacagatcataccatcaatgtctgtgtccatataccccagctcagcagaagttctgaaggcatgcaggaatctaggtaaaaatggcttatctaacagtagcattttgttggataaatgtccacctccaagaccaccatcttcaccataccctcccttgccaaaggacaagttgaatccacctacacctagtatttacttggaaaataaacgtgatgctttctttcctccattacatcaattttgtacaaatccgaacaaccctgttacagtaatacgtggccttgctgg

SEQ ID NO: 43989 - DNA, 343 bp, Homo sapiens
gtctgagtgcaggcaccacaggcctgtgtgctctgcctgtctggctttggtggtggccagccctgcctctgtgaactcatctctctttgtttgggagacactgccgtgtcctggttctcatcctctgcccgtggcccaggcccttacgtggctctaccaggagtctgtccttggcactttcccatctcacttctaccaagtctgttctttccagaagccagactcgtgggtgagccatgtcacctcgccgagcctcagtttttccttctgtaaaatggggtacagccttcatttagtggggtgagtaagcctcatgtctcttctgctggggcactgatgtgct

SEQ ID NO: 43990 - DNA, 344 bp, Homo sapiens
  misc_feature (1)...(344): n = a,t,c or g
gatttttaaatgtttgctaatctggtggatgaaaactggtaaactattgttattttttttccttttcatcatttttatgaaaaaaaaatcaagcatatactgaaaggaagaagtttgatgaatccctatgtgcctgtcagctagcttcaacaattaccaactctgagctactcttttatcaataataccctactcatatctctcactccccacaagatcatttgaagcaaacctcagaaatcactttattcctaaatatttaagtatgcatctctaacttattaaaatttttttggttttggnnnnnnnnnnnnnnnnnnnnnnnnnnnnnnnnnnnnnnnnnn

SEQ ID NO: 43991 - DNA, 343 bp, Homo sapiens
gggatctcgataagctctatgagctgaagtccaaagctcggcagattatgaaccagtttggcccctcagccctaatcaacctctccaatttctcatccataaaaccggaaccagccagcacccctccacaaggctccatggccaatagtactgcagtggtaaagataccaggcactcctggggcaggaggtcgtcttagccctgaaaacaatcaggtattgaccaagaagaaattacaggacttagtaagagaagtggatcctaatgagcagttggatgaagatgtggaggagatgctgctgcagattgctgatgattttatcgagagtgtggtgacagcagc

SEQ ID NO: 43992 - DNA, 342 bp, Homo sapiens
  misc_feature (1)...(342): n = a,t,c or g
gagaagaagaagaaggaaaaagtattcagtgtccccctagagggttggtggacggttggggctgggacgggggttgaattgtctcttggacctgggcatgcttacttcagtacgctggtgttgtaaaattctgtgttcttttatactcatgagcactgaaggctcctgatggctggatagcactcatttaagctgagcctccgaaagagcattttaacaagtctgaggaggaggggctgtgaaaacttggtgaatttggataaagagtatataaattttcnnnnnnnnnnnnnnnnnnnnnnnnnnnnnnnnnnnnnnnnnnnnnnnnnnaaaaaggggcag

SEQ ID NO: 43993 - DNA, 346 bp, Homo sapiens
ggaatgggtagaagattgataagagtgggtggacgggtggatggataggtagatagatgcattaaagagagataagtaaactgagactaatttcattcaatgaatattgattgagtatccaccttgtgcttgatgctgggaaactatgataccaagacagacaaggtccctgccttcctgacactcctatgacagataatatatgactggctggatgaggcattgtctccatttacagaaaggaaaatttcagctctgagaagggacaggctccccaggtcagttaaacaatcttcctggcagaaccaagaactgagccgggccaggaccattcagggaccgtggc

SEQ ID NO: 43994 - DNA, 366 bp, Homo sapiens
  misc_feature (1)...(366): n = a,t,c or g
ggagatgggtttatggtacggcaggagctgaacctcagttctgatgagcttggactccgagctaaggggaccagggaagagccagggaggcacatctgtgttgtcctatccaagcccctctctctccatagtagccacgttctgaggcatcaggaagacctgtgaaccccatacccaaccgtatctcctgtctcatggtcacctgcagagtcccagggggcttctagcctcttgctgcacatgtgtgtgattcaccctgtccctgttcttatgcccagtgcctgtttttgcctttgggcttgggtcatatgggncatgccattcctgctcntgacccagncttanggaccttcntananctcttct

SEQ ID NO: 43995 - DNA, 380 bp, Homo sapiens
gatcgattattatcccagttttatatgctgggagcaggtagaatacttgcttcatttttgttgttttaagcatggcccctaaacactaagcacctatttaatgtgtgatgtaactgaagaaagagccaatcatgaaatgctggagggaatgcaagtatgtgagacttctggagagttggtgtgtttgtaaacagtcatgtttacaaaagcatgtacttttgagtgactcaaattattttcatggtttatttgactacatgtgtgattattactttgcaggttgattttagaacctaacatcagccttagaggcagtagcaagccttgaacaagtgtttctccagtagtggtaccttgcagtttttcttttatttaatgct

SEQ ID NO: 43996 - DNA, 375 bp, Homo sapiens
  misc_feature (1)...(375): n = a,t,c or g
gaataccctgctaannnnnnnnnnnnnnnnnnnnnnnnnnnnnnnnnnnnnnnnnnnnnnnnnnnnnnnnnnnnnnnnnnnnnnnnnnnnnnnnnnnnnnnnnnnnnnnnnnnnnnnnnnnnnnnnnnnnnnnnnnnnnnnnnnnnnnnnnnnnnnnnnnnnnntactgagctttgacatgctcccacccactacattatatttcatccctgcttcccagctgctttaaaatttacagattccatttccagctctctctggaagntcttncttgtattgaactcccaaacttcctaggtgcctggaccatcactttcccattatattntatnnancangcctaanaaactccatccactttcncaattttncgac

SEQ ID NO: 43997 - DNA, 380 bp, Homo sapiens
ggtcaaatgtatctttaattatggggctaaaagaacagaagtatccagtgaagtatctttagtgatccaagtaagattccctctcatcaaagagtttcacttaacatggtttccgaagactttaaaaaataaaacagcaggcgctgagtgttgtgtttactttcgctctgcctgtgttcacattccctctcgtgaatatttattgactttctaccgcctgcaagaggctgggctgggtgcatctcgtgacgagtcacccagaacggtcagcacagttctgccggcccctgttgagtgtgattatcgaggccagtgctccgctgcctctcacgtaccattcgctgctggtcactcctcattagtgcctttcctaagggtaa

SEQ ID NO: 43998 - DNA, 382 bp, Homo sapiens
  misc_feature (1)...(382): n = a,t,c or g
gcggcacgagcaattaccagctcctgtacaaataccccttaaatatttcagggttttggcttctttcctaccctcatctaaaccatcattatctgatcacaatcatttatcactccccaacttaaaaccnnnnnnnnnnnnnnnnnnnnnnnnnnnnnnnnnnnnnnnnnnnnnnnnnnnnnnnnnnnnnnnnnnnnnnnnnnnnnnnnccaggtgttttgaggccagcctggttaacatggttaacttcttcaannnnnnnnnnnnnnnnnnnnnnnnnnnnnnnnnnnnnnnnnnnnnnnnnnnnnnnnnnnnnnnnnnnnnnnnnnnnnnnnnnnnnnnnnnnnnggacgagactgcagtgagatcgcaccactgcact

SEQ ID NO: 43999 - DNA, 380 bp, Homo sapiens
  misc_feature (1)...(380): n = a,t,c or g
gcaaccccctgcacacaccaccggccaccaggggcccccttgtgcgccttggctttataactcctctgggggtgatattggtggtgatcacagctcctagcataatgagagttccatttggtattgtcacacgtctcctgcctcgcttgggttgccatgtttgagcgatggccctgctgatttcaccctgccttttactgaatctgcaaattgttgtgcaattgcggttatagtagactgtaccacattgccttttataaactgctacatgtttataatcatcattnnnaaagtangtgtaatttttttaagnatgnantctattnatatggantgntngacagagaacccgacttgcttaatatattcctttaaatcaa

SEQ ID NO: 44000 - DNA, 348 bp, Homo sapiens
  misc_feature (1)...(348): n = a,t,c or g
ggtaggagtggggtggggggaggttcttgtgactggtgtatctgggaaatggtaaaagtagagatttagagttgaaaaccaggnnnnnnnnnnnnnnnnnnnnnnnnnnnnnnnnnnnnnnnnnnnnnnnnnnnnnnnnnnnnnnnnnnnnnnnnnnnnnnnnnnnnnnnnnnnnnnnnnnnnnnnnnnnnnnnnnnnnnnnnnnnnnnnnnnnnnnnnnnnnnnnnnnnnnnnnnnnnnnnnnnnnnnnnnnnnnnnnnnnnnnnnnnnnnnnnnnnnnnnnnnnnnnnnnnnnnnnnnnnnnnnnnnnnnnnnnnnnnnnnnnnnnnnnnnnnnnnnnnnnnnnnn

SEQ ID NO: 44001 - DNA, 334 bp, Homo sapiens
  misc_feature (1)...(334): n = a,t,c or g
gccagccctggcagggaaggagggcaggatctgtacattttcttttttttgcattttgagacagagtcttgctttgtcacctcagcctcctgagtagctgggaataacgggcgtgcatcaccccgtccctactnnnnnnnnnnnnnnnnnnnnnnnnnnnnnnnnnnnnnnnnnnnnnnnnnnnnnnnnnnnnnnnnnnnnnnnnnnnnnnnnnnnnnnnnnnnnnnnnnnnnnnnnnnnnnnnnnnnatgttgttagatggacacagcagagcctctgttcccacaggatcctagtgctctggtggnccagggtagggtgccctggtgccccc

SEQ ID NO: 44002 - DNA, 347 bp, Homo sapiens
  misc_feature (1)...(347): n = a,t,c or g
gaaatgttgttacgatggagcctgcgttaataatgatgaaacctgtgagcagcgagctgcacggattagtttagggccaagatgcatcaaagctttcactgaatgttgtgtcgtcgcaagccagctccgtgctaatatctctcataaagacatgcaattgggaaggctacacatgaagaccctgttaccagtaagcaagccagaaattcggagttattttccagaaagctggttgtgggaagttcatcttgntccagaaanaaaacagttgcagtttgcctacctgattctctaaccacctgggaaattcaaggcgttggcatttnaaacacngggattntgggtgg

SEQ ID NO: 44003 - DNA, 330 bp, Homo sapiens
  misc_feature (1)...(330): n = a,t,c or g
ggaaccaaattatctccatcttttgatggaatggggcccagcataagctgggagtctgtggcatctgaaggctcaaaccagacaagcggctaccagtccggatatcactccgatgacacagacaccaccgtgtactccagtgaggaagcagaacttttaaagctgatcctttattcagaataccacaaagaaaggacattcagctcaaggctccctgccgtgttgaagagttctgactgcacaaaccagcttctggtttcttctggaatgaataccctcatatctgtcctgatgtgatatgtctganactgaatgcgggaggttcaatgt

SEQ ID NO: 44004 - DNA, 338 bp, Homo sapiens
  misc_feature (1)...(338): n = a,t,c or g
gcggcacgagcaaagaaggagtctaggttatttgcacagaatatatataagacctcaatccgtgttctgcaaaagggaaactaaaacccnnnnnnnnnnnnnnnnnnnnnnnnnnnnnnnnnnnnnnnnnnnnnnnnnnnnnnnnnnnnnnnnnnnnnnnnnnnnnnnnnnnnnnnnnnngggctcaaacgatcctcccaccnnnnnnnnnnnnnnnnnnnnnnnnnnnnnnnnnnnnnnnnnnnnnnnnnnnnnnnnnnnnnnnnnnnnnnnnnnnnnnnnnnnnnnnnnnnnnnnnnnnnnnnnnnnnnnnnnnnnnnnnnnnnnnnnnnnnnnnn

SEQ ID NO: 44005 - DNA, 192 bp, Homo sapiens
  misc_feature (1)...(192): n = a,t,c or g
gaactggatactgagaatgtaggtagtactagtagtagtagtagtagtaattgtcttcctcaagacatcaaacacacaactgcaacttcagctcctaaagcagcttttttttttcttttttttganacanagtctnattctgncccaggctgaacggcggngnnntgannnnggntnantgnncctnnactt

SEQ ID NO: 44006 - DNA, 237 bp, Homo sapiens
  misc_feature (1)...(237): n = a,t,c or g
ggctccacaagctccttgaattccacctccgaaaatgttctttccttctctacctaccacatggccaggctgcaaatttccaaattgttatgctctgcttcccnnnnnnnnnnnnnnnnnnnnnnnnnnnnnnnnnnnnnnnnnnnnnnnnnnnnnnnnnnnnnnnnnnnnnnnnnnnnnnnnnnnnnnnnnnnnnnnnnnnnnnanaatcacttgaaccccaacagnggggngagg

SEQ ID NO: 44007 - DNA, 353 bp, Homo sapiens
gcagctcaccaacaacacagccactgccccctctgccacgcccgtgtttgggcaagtggcagccagcaccgcaccaagtctgtttgggcagcagactggtagcacagccagcacagcagctgccacaccacaggtcagcagctcagggtttagcagcccagcttttggtaccacagccccaggggtctttggacagacaaccttcgggcaggcctcagtctttgggcagtcggcgagcagtgctgcaagtgtcttttccttcagtcagcctgggttcagttccgtgcctgccttcggtcagcctgcttcctccactcccacatccaccagtggaagtgtctttggtgccgcct

SEQ ID NO: 44008 - DNA, 326 bp, Homo sapiens
  misc_feature (1)...(326): n = a,t,c or g
nnnnnnnnnnnnnnnnnnnnnnnnnnnnnnnnnnnnnnnnnnnnnnnnnnnnnnnnnnnnnnnnnnnnnnnnnnnnnnnnnnnnnnnnnnnnnnnnnnnnnnnnnnnnnnnnnnnnnnnnnnnnnnnnnnactccgtctaaaaaaatgaaaaggaaaagaaaacaaatttcatttcataggatcatgtatgaagctttctgctctttttctatttaatgatttaatatattgaaggacatgtacttacccagaaattctgtggttttatttgctttttgtttatggctcaactaacaaagaaactgtaactttatattttatgaag

SEQ ID NO: 44009 - DNA, 301 bp, Homo sapiens
  misc_feature (1)...(301): n = a,t,c or g
gaggatgtaaatatataagacataggctctgctaattgtgatagaacggagttaatgtcatgtagacctgtggaaaaggattagtggaggtgcagacaagctctcgaagagacttcccagctcctgaatccttcccagaagaagtatgggaggtcagttttgagctgtacctaaacaggtggagagcacttctagcaggcagattaggattgccaggtgnaanaganggacactcccnattaaaggancagctcctttttttttttnnngnnnngnaactnnnggntnnnnanncccttta

SEQ ID NO: 44010 - DNA, 315 bp, Homo sapiens
ggaagttttaatttttgcttgaaagcccaaaatttgtctttagcaacaaataccgtcagttttccttgaaataacaggctcactgtatttatttttgacaaagtgtctataaatacccaaatctgagtaatcatagtttttctcagtcattctttcaaggaaagatggtgttctgtgaaaacagtggctaagcttgcagctcagtcacacaagtactttttcttcccaaagacaaccaccgcactctggcctgcagcggaagtgccgaatgagtgcgcttaacattttggtacgtggggatattaaaaagatgtg

SEQ ID NO: 44011 - DNA, 326 bp, Homo sapiens
gcagatatcgagctgttgcttcttggagtagaattaaaggaattggggttccaaaatggacagcagtagaaattgttttgatttgggtggtctctgtggttctggctgtccctgaagccataggttttgatataattacgatggactacaaaggaagttatctgcgaatctgcttgcttcatcccgttcagaagacagctttcatgcagttttacaagacagcaaaagattggtggctgttcagtttctatttctgcttgccattggccatcactgcatttttttatacactaatgacctgtgaaatgttgagaaagaaaagtggc

SEQ ID NO: 44012 - DNA, 354 bp, Homo sapiens
gggctgataagtaaatggacaagcaatataaaaaaggctgagaagcaagtctctgcataatgacagggaagttaagtctaaatctgaccctaaagggctgggacactggacagtggaagcagaagaaaaggtcaggaaacaaactatgaagaagacaatatctgacgtggatatcaaaggatgagaaaatattggatgcctgctggagaaagttgccaaataagaggcgagtattctagcaaaggaatccatctgcaacagcaaaagtctggtgacttgaaggaatgtgtcaggcactgggtactaagacagtatcaacagcaatgaagagaacaggaaagattcaagagataa

SEQ ID NO: 44013 - DNA, 344 bp, Homo sapiens
  misc_feature (1)...(344): n = a,t,c or g
ggggagagacagacattttggtggggggggccatggagtcactgaggatagcaaaggggttttgggaacagccagggatctaggatctgctgtcaccctcagacaggcaggcgctgaggccatggtcaggatcactgtttctgacgtgtaccacctgcagggccggagggctccacgttcatcccctactcagctctgcggccttgagcaagtgaaagaacctctccgagcctcaatatgctcctcctaaagtgaggagtggggcagtgatagatcgccctctgagaggtgttggaccaggctgagcacatgggaggtgccagttgtcttaggcntggtgtcct

SEQ ID NO: 44014 - DNA, 139 bp, Homo sapiens
  misc_feature (1)...(139): n = a,t,c or g
gggataagggtctagttccactggctttttatttggggcagcggctcagcagtccctgggggaagccattgacgtgtaccaggcgtctgtggggtttgtgtgtgagaggtanagaggcctnnnnttntcctggnggggg

SEQ ID NO: 44015 - DNA, 331 bp, Homo sapiens
  misc_feature (1)...(331): n = a,t,c or g
ggtgaagggaggcaagggtatcagcaggaagataattataggttcctgtagtgactatgatgagaggtgatggtgtgtaaacagaggatattgagtactggaattctgaatatatttaaattctggcaagatttgctggtggatgaggaatgagagagagtaaagtatgactccgaagttgtatgaaatacatgtntataagtcacttttanaatcanatcctctcttagatncaacaggatacaacttgtaccttgnngcctactacccccccactgttccctgtcccaccananatncctaccatttcctattanatttgantccccca

SEQ ID NO: 44016 - DNA, 338 bp, Homo sapiens
  misc_feature (1)...(338): n = a,t,c or g
ggctagctaagcgacaaagcttgattttagagtcaggtcaaatctgaaaattattctttccaccataccttgctgtttgctcaaaaataaacaagaaccaagaaataagaacatctaaattattttattaagggcagagggggaagaaacccaccaaacaaagcagtaatccttgataccatgttcactattatcatctcatcaagagtagaacactcaaaaaggctcagacaagtaacataagagtcatcnnnnnnnnnnnnnnnnnnnnnnnnnnnnnnnnnnnnnnnnnnnnnnnnnnnnnnnnnnnnnnnnnnnnnnnnnnnnnnnnnnnnnnn

SEQ ID NO: 44017 - DNA, 348 bp, Homo sapiens
gccctaaatgccgagctgcagctggaccggcagaagccccgccagggccggcgggtgctgctgctgggctctcaacaggcaggcaccaccctgaacctggatctgggcggaaagcacagccccatctgccacaccaccatggccttccttcgagatgaggcagacttccgggacaagctgagccccattgtgctcagcctcaatgtgtccctaccgcccacggaggctggaatggcccctgctgtcgtgctgcatggagacacccatgtgcaggagcagacacgaatcgtcctggactgtggggaagatgacgtatgtgtgccccagcttcagctcactgcagcgtga

SEQ ID NO: 44018 - DNA, 344 bp, Homo sapiens
gctcgaggcgagaagggagaagctgcactgacggaggatgacatccggggctttgtgcgccaagagatgagtcagcactgtgcctgccagggccagttcatcgcatctggatcacgacccctccctagttatgctgcagacactgccggctcccagctccatgctgtgcctgtgctccgcgtctctcatgcagaggaggaagagcgggtaccccctgaggatgatgagtactctgaatactccgagtattctgtggaggagtaccaggaccctgaagctccttgggatagtgatgacccctgttccctgccactggatgagggctcctgcactgcctacaccct

SEQ ID NO: 44019 - DNA, 328 bp, Homo sapiens
  misc_feature (1)...(328): n = a,t,c or g
ggcatctcttaagtcaaacttaggaagnnnnnnnnnnnnnnnnnnnnnnnnnnnnnnnnnnnnnnnnnnnnnnnnnnnnnnnnnnnnnnnnnnnnnnnnnnnaccgtgtcttctaggttcctccaaattgttgcatattgcaggagttccttctttttgaggctggattttttattgtgtatatataccacttttccnnnnnnnnnnnnnnnnnnnnnnnnnnnnnnnnnnnnnnnnnnnnnnnnnnnnnatggcttatttnnnnnnnnnnnnnnnnnnnnnnnnnnnnnnnnnnnnnnnnnnnnnnnnnnnnnnnnnnnnnnnnnnn

SEQ ID NO: 44020 - DNA, 202 bp, Homo sapiens
gctggaggatagagactataaagaaaaaggcatatttaaagaagtagttttctaggattttccaagataacaaaaagcatcaagctgtagattcaaaaattgctatgatcatcaaacagattaaacacaaagaaagctacatctaaaatactacaccataatagaactactgaaatccaaagacagaatttttttttttttt

SEQ ID NO: 44021 - DNA, 345 bp, Homo sapiens
ggacaagtctaagaagagaaagcttcatgaagaactttctagcagtcaccataaccgggaaaaagccaaggaaaagcccaggttcttaaaacacgagagttctagggaggacagcaaatggagccattctgattctgacaaaaagtccagaacccataaacatagcccagagaagagaggctctgaaagaaaggaggggagcagcagaagccacggcagggaggaaaggagccggagaagccggagcagaagtcctggtagttacaagcaaagggagacaaggaaacgggcacagcgaaatcctggtgaagagcaaagcagaagaaatgacagcagaagccatgg

SEQ ID NO: 44022 - DNA, 344 bp, Homo sapiens
gaaagtctggcgggacacaaaagccctgtcacagctgtctctgccagtgaaacctcaggtgatattgctactgtgtgtgattcagctggcggaggcagtgacctcagactctggacggtgaacggggatctcgttggacatgtccactgcagggagatcatctgttccgtggctttctccaaccagcctgagggagtatctatcaatgtaatcgctgggggattagaaaatggaattgtaaggttatggagcacatgggacttaaagcctgtgagagaaattacatttcccaaatcaaataagcccatcatcagccttacattttcttgtgatggccaccattt

SEQ ID NO: 44023 - DNA, 344 bp, Homo sapiens
  misc_feature (1)...(344): n = a,t,c or g
gaactggagtattatgttcagctctgtttcacattttggtagacacagaaagactgaaaaagactagaagannnnnnnnnnnnnnnnnnnnnnnnnnnnnnnnnnnnnnnnnnnnnnnnnnnnnnnnnnnnnnnnnnnnnnnnnnnnnnnnnnnnnnnnnnnnnnnnnnnnnnnnnnnnnnnnnnnnnnnnnnnnnnnnnnnnnnnnnnnnnnnnnnnnnnnnnnnnnnnnnnnnnnnnnnnnnnnnnnnnnnnnnnnnnnnnnnnnnnnnnnnnnnnnnnnnnnnnnnnnnnnnnnnnnnnnnnnnnnnnnnnnnnnnnnnnnnnnnnnnnnnnnnnnnnnnn

SEQ ID NO: 44024 - DNA, 333 bp, Homo sapiens
gggaagtggtaccaaataactgtgtgcctgagttccaccgcaagattactaaaagcaggaccagaccagaaactgctaaagaacatggcctgtttgacatgttcatgagtcacctgacccacagcatatatgcttatgactaaaccctccactcctgattctcaagagtgtatcacctgtcagcaaaatgaatagtgggatattttgggccattttaaatgtgaaattttgcctctttaatgttaattcaaaactatatcaatgttttcttgttcccacctctaacccaaggaaaaaagagaaaacatactatgcaaaggaagtttaaactta

SEQ ID NO: 44025 - DNA, 346 bp, Homo sapiens
gcacccatgccccatgccccatgccgcatgctagcccagcgccccttttgcaggctcccctcatacactaactcgtttaattctcacagcagctccatgaagtggtatgtcagggccccaagaccactcccaggtttgatgactcttcactgggaggatttacaagagtcaacacacagtagtaccaaagccgagatttatcacagcaaaaggatctgaggcaaaatgagcagaaggattcacgcaaaggcgagcaggtgcaggcacggacctccaagagtcccttcccagtggagcacacaggacgcaagttccgtaactcctccacgactgacttgtacaacat

SEQ ID NO: 44026 - DNA, 331 bp, Homo sapiens
gccgagtggaggtgcgaggggctcaccacttccctccctcgcagccctatgttgttgtctccaaccaccagagctctctcgatctgcttgggatgatggaggtactgccaggccgctgtgtgcccattgccaagcgcgagctactgtgggctggctctgccgggctggcctgctggctggcaggagtcatcttcatcgaccggaagcgcacgggggatgccatcagtgtcatgtctgaggtcgcccagaccctgctcacccaggacgtgagggtctgggtgtttcctgagggaacgagaaaccacaatggctccatgctgcccttcaaacg

SEQ ID NO: 44027 - DNA, 352 bp, Homo sapiens
  misc_feature (1)...(352): n = a,t,c or g
gctcggcgtggtgtaccggggggcctccaggtcttattgccaagtctgtcacacagttccctccaaatagtgttttcaggaggcnnnnnnnnnnnnnnnnnnnnnnnnnnnnnnnnnnnnnnnnnnnnnnnnnnnnnnnnnnnnnnnnnnnnnnnnnnnnnnnnnncnnnnnnnnnnnnnnnnnnnnnnnnnnnnnnnnnnnnnnnnnnnnnnnnnnnnnnnnnnnnnnnnnnnnnnnnnnnnnnnnnnnnnnnnnnnnnnnnnnnnnnnnnnnnnnnnnnnnnnnnnnnnnnnnnnnnnnnnnnnnnnnnnnnnnnnnnnnnnnnnnnnnnnnnnnnnnnnnnnnnnnnnn

SEQ ID NO: 44028 - DNA, 350 bp, Homo sapiens
  misc_feature (1)...(350): n = a,t,c or g
gctgtttgggggtccgaggggaggtttttgttttctnnnnnnnnnnnnnnnnnnnnnnnnnnnnnnnnnnnnnnnnnnnnnnnnnnnnnnnnnnnnnnnnnnnnnnnnnnnnnnnnnnnnnnnnnnnnnnnnnnnnnnnnnnnnnnnnnnnnnnnnnnnccttaggtgtgtactnnnnnnnnnnnnnnnnnnnnnnnnnnnnnnnnnnnnnnnaggtctcagttcactgttgatttcctctggaagatttctgtgactctcttggagcctctgggccaaagtgcttctccgctctttagtaacctgccttttccgaggtaatagtttaaggctgtttggcaatgatgtga

SEQ ID NO: 44029 - DNA, 354 bp, Homo sapiens
ggtcagtgaacctagatatattatttataataactgaattataaaccattgtctgaatatttaggtagaattcaatttctcagcattacaaaaatgccatgctaagtatccttattacatgcctttctgttcatacaaatgataaatttctggaactgaaattgctgggacaaagggtatcagggtacacagctttacatgatgctatgtactaccaaatggacccccaagaaagacagtttaagtggcatgtcattgtcttcccaagtctgttcctaatgcagtcccacatgttcagtaaaacatcaagacacatcagttgggccaggcacggtggctcgcacttgtaatccc

SEQ ID NO: 44030 - DNA, 306 bp, Homo sapiens
ggctagcaccatgacaataccctgtatctttaaaaaaatgaattggtagtttaaaaaaatcttcctgcaaagaaaactccaggcccagatggctttattgataaactctacaacacatttaggggagaaataacaacatctccacacatacttttccactaatttaaagaggtggcagtacttctcaactcattctctaaggtcagcaagcattactctgacaccaaaaccaaataaagacattatgagaaaagaaaactatagtccaatatcctcatacatatggaatcaatttttttttttttt

SEQ ID NO: 44031 - DNA, 352 bp, Homo sapiens
  misc_feature (1)...(352): n = a,t,c or g
gttatgagggtgctgctagggtttgaacgtgttctccagacttcatgtgtgggaaacttgatctccagtgcagcagtatacggaagtggagcctaatgggacgtatnnnnnnnnnnnnnnnnnnnnnnnnnnnnnnnnnnnnnnnccattattgctggagtgggttcataataaaaggatgagtttggtcccttcttgctctctctctcaccttgtaatgccttcgaccagcttatgatgctgcaggaaggcccttgccagatgctaagtcctcgatcttggaattccaagcctccagaactatgagccaaataaatttctgttccttacaaatgacccagtctcgggtatt

SEQ ID NO: 44032 - DNA, 354 bp, Homo sapiens
ggtgggaaagagtgtaaatgcaggccccatgattgtcggggctggcacccgtgatcctactgaacacaaggcttctcctcaggactccggcgcaccacacaggttcccagtgttcccagtatttggctggggcagggcacgccatagcaggcagtttcccttccatcccccttgggccatactggatcggtccttctggaaacaatgactgataaagcagagaaggttgctgtagaacctgaaaatgtgtttaaacgtcccagggaatctgagactccttcatctcagaaaaggcagaagatggccctgttgttaaggaaacaaagagcaggagacagccttattggaggctct

SEQ ID NO: 44033 - DNA, 343 bp, Homo sapiens
  misc_feature (1)...(343): n = a,t,c or g
ggtgaatggggaccaacctcaggagatgctgggtcccagaagcaccatgtgcttctcctttggtgagacttaattactctctaaaatgtaaggctactcccacttatcaaattatagatgagtttaattacagcacactgagtaaccacactgggctccttcagaaatagcagcaggctggttgctcttctcagcttcagctgtagccaccccagtttcaggagaagtgcccgtggttcctggggccctgaagtgccgctcaactctgctgccagacaagtgcgncgtggtggactgcactgggtacactgctgtaccggccaccaccctccggccactctca

SEQ ID NO: 44034 - DNA, 352 bp, Homo sapiens
gcaggcctggacattggcggtttgcttagaagctgcccgggtggttctcatagcagccagggtcaagcaccacggcctgttcttacctggctccccaggccccctttaatctccctctgcagcagattggcacacatcgcattgtggagcaagccatctgataattttccttaatcgtctttgaagatcttccctctgcctgttgatcctttaagggagaagtctccttgccaggatcggcctctccagtctctggatcccttcttgcttgctctcttcagaacccatgaaacctctctggctgccttgacgtcagccagattggactgcccaaatagaaaggcagaaatcc

SEQ ID NO: 44035 - DNA, 345 bp, Homo sapiens
gcactccttcaaggtgcagaccttggccagaagtctgggcctccagatgcccgtggtggtgcagagcatgtacatctttaagcaacctcactttggcggtgaagtctcccctcatcaggacgcctccttcctgtacacggagcccctgggccgggtgctgggcgtgtggatcgcagtggaggatgccacgctggagaacggctgtctctggttcatccctggctcccacaccagtggtgtgtcaagaaggatggtccgggcccctgttggctcagcgcctggtaccagcttccttgggtcagagccagcccgggataacagcctctttgtgcccaccccagtgca

SEQ ID NO: 44036 - DNA, 220 bp, Homo sapiens
  misc_feature (1)...(220): n = a,t,c or g
ggaaaatttgacaaattgccagtaggtcagtcataatatttttttatttctaaacaattcnnnnnnnnnnnnnnnnnnnnnnnnnnnnnnnnnnnnnnnnnnnnnnnnnnnnnnnnnnnnnnnnnnnnnnnnnnnnnnnnnnnnnnnnnnnnnnnnnnnnnnctgcctcagcctcccgagtanctgnnattgcnngcnnntgccaccanncccnnntaat

SEQ ID NO: 44037 - DNA, 336 bp, Homo sapiens
  misc_feature (1)...(336): n = a,t,c or g
gatcttttttttgctttctacctgtgggaagctcaatcagcattctgaggagttatttgcatggtgataggctcttacataggaattgacaagcgcctgagagaagagcgaatctgcctagttgagattccaatcccctccatgtaggccagggtcttgcaaatagaaggtactcaaaatgtcattgctgagttcagggtttggngagtaagtaatgtagaaaggtctgtatnnnnnnnnnnnnnnnnnnnnnnnnnnnnnnnnnnnnnnnnntttaaaaaagttagccnggcgtggnggcntgtacctgnggtcccagctgctgnggaggctgag

SEQ ID NO: 44038 - DNA, 341 bp, Homo sapiens
gcggcacgagagcctctacaactgagttaaagaaagagagtaaaaaagaaaggccagaggaaaccagcaaggatgagaaagtcgttgaaaagcgaggactatgaagatcctctacaaaaacctttagaccctacaatcaaatatcaatacctaagggaggaagacttggaagatggctcaaagggtggaggggacattttgaaatctttggaaaatactgtcaccacagccatcaacaaagcccaaaacggggcccccagctggagtgcctaccccagcatccacgcagcctaccagctgtctgagggcaccaagccgctttgcctatgggatcccaggta

SEQ ID NO: 44039 - DNA, 343 bp, Homo sapiens
gcaaaacattgatcaccctctcacaaagtcatccagtaagagagatcaccggcgttctgttgattccagaaaataccctcaattgatctcctgaagcatctgaatgacccaaatagtaaccccaaagccatcatgggagacatccagatggcacaccagaacttaatgctggatcccatgggatcgatgtctgaggtcccacctaaagtccctaaccgggaggcatcgctatactcccctccttcaactctccccagaaatagcccaaccaagcgagtggatgtccccaccactcctggagtcccaatgacttctctggaaagacaaagaggttatcacaaaa

SEQ ID NO: 44040 - DNA, 330 bp, Homo sapiens
ggagaatccttgaaataaagcatatagtaccatgtttctaatgctacagttaaccctcaacttactattttcccatgtgccagtagtagaaaaaccttgaataacacgtgaggaaataattatttttgtcgtatagatcttcgaagaccttgctctgtcttcttgacagagcttgtttttttcatttctaatgatgttcctgtgcacccatagcagagttaaaatttcttcttaaaagtgccaggattgattactacggtctctctctgtctgaagttgcatatctctctctctttttctttctttctctttctttctttccttctttct

SEQ ID NO: 44041 - DNA, 350 bp, Homo sapiens
  misc_feature (1)...(350): n = a,t,c or g
gggaagtgggggctcgtggagtatgtgagtggaaggggatggatctggcctatggaccccgtgggttgctgtgtaaggtgcactnagcatgcgnggacctgtctggaggtcactgcatcanctcttntanagntngcttnttaannttttgttatnannttntnctctnctntctntctcctnctcnnnnccttnnctntntaccttccctctntccctnnnncntnccntctcctnngcnctcacttcntttcnantancctccnntntncnctcttncttnnncntcccnccctnctntcntttntnancttncctcctnttcctnatnacntntatcnctcnctact

SEQ ID NO: 44042 - DNA, 260 bp, Homo sapiens
  misc_feature (1)...(260): n = a,t,c or g
ggtgatataatcatggcttcagaggagaaagtgcttcctatctttttcttactttatagacggaatgctgctgtaaacatttgtatacaggtttctgtgtgaatataaattttgaagtgcccaggagtgcattcattgggtcatatagtacttacatgtttggagtttttttgtngcntatttnancacncnnnctnntgntnncncnantgnnnaangnnatngnnactnnncannntnnncccncanncnnnnntccc

SEQ ID NO: 44043 - DNA, 340 bp, Homo sapiens
  misc_feature (1)...(340): n = a,t,c or g
gcctgcctgtgcagtggacactatactgctcttacccttcctggttatttgttactgctcacctggttactgcttaccacatttggttatttggtatcccttcccatgaggggagggatttnnnnnnnnnnnnnnnnnnnnnnnnnnnnnnnnnnnnnnnnnnnnnnnnnnnnnnnnnnnnnnnnnnnnnnnnnnnnnnnnnnnnncggtcaggacaaggtagagatatggacctattattccacactgtcctgaagcaccttgccatacagttggacaagatatcaataagatcagagagacaagnnnnnnnnnnnnnnnnnnnnnnnnnnnnnnnnnn

SEQ ID NO: 44044 - DNA, 343 bp, Homo sapiens
  misc_feature (1)...(343): n = a,t,c or g
ggagacatatttctgaaaatactggaaacaatcacagccaaataagaaatccagttcatttcaacactgaatagttgggcactgtagcgtattcaaggataatttttaaaaattaaaaagnnnnnnnnnnnnnnnnnnnnnnnnnnnnnnnnnnnnnnnnnnnnnnnnnnnnnnnnnnnnnnnnnnnnnnnnnnnnnnnnnnnnnnnnnnnnnnnnnnnnnnnnnnnnnnnnnnnnnnnnnnnnnnnnnnnnnnnnnnnnnnnnnnnnnnnnnnnnnnnnnnnnnnnnnnnnnnnnnnnnnnnnnnnnnnnnnnnnnnnnnnnnnnnnnnnnnnnnnnnnnnn

SEQ ID NO: 44045 - DNA, 346 bp, Homo sapiens
  misc_feature (1)...(346): n = a,t,c or g
gcggcacgagnnnnnnnnnnnnnnnnnnnnnnnnnnnnnnnnnnnnnnnnnnnnnnnnnnnnnnnnnnnnnnnnnnnnnnnnnnnnnnnnnnnnnnnnnnnnnnnnnnnnnnnnnnnnnnnnnnnnnnnnnnnnnnnnnnnnnnnnnnnnnnnnnnnnnnnnnnnnnnnnnnnnnnnnnnnnnnnnnnnnnnnnnnnnnnnnnnnnnnnnnnnnnnnnnnnnnnnnnnnnnnnnnnctngtgcagnagtnaactgnctaacaccacnttttctnagaaacggatanccatcntttantaacacancnactacngttggctcaanncagcncncnctgaggnactgg

SEQ ID NO: 44046 - DNA, 333 bp, Homo sapiens
  misc_feature (1)...(333): n = a,t,c or g
ggggttcttcctcgacatcatgtgccagttaaaagtttcagttcttgattgtgtgctgtttagggatttaanaaccanannnnnnnnnnnnnnnnnnnnnnnnnnnnnnnnnnnnnnnnnnnnnnnnnnnnnnnnnnnnnnnnnnnnnnnnnnnnnnnnnnnnnnnnnnnnnnnnnnnnnnnctctgtggntnctaaaaatacggaaattaaccangtgtgntggngnacacctgnngttncagntacttgagaggctgacgcatnanaattgcttgaangctgaangnngaggttgnctganttgagattgtgcnactgcattccannctgg

SEQ ID NO: 44047 - DNA, 339 bp, Homo sapiens
  misc_feature (1)...(339): n = a,t,c or g
gtgtgtacagtacttaagaaaaattcagactgatgccagtttaatgtattgggatcttgaagactatgccaaattctatatctttgtgttaaggaacttgaattatttggaaaatgcaaggaaatactgagttaaaatacctgacatcacccttgtgacccaaggctagttacctgtgtttctatggaccattgactcaaatattttaatagatggcacccactgatctgatagttcgaaacatggtttcaggagtatatttaattactagatgtcttctgcttactgaaaaacatnnnnnnnnnnnnnnnnnnnnnnnnnnnnnnnnnnnnnnnnnnn

SEQ ID NO: 44048 - DNA, 336 bp, Homo sapiens
ggaaaaaagaaagaaaagctctttagggtcctcaataatttttacaataattgttaagagaataaagaggtcctgagatcaaaaaagtttgagaaccactgagttggggcaatagggcaccatagttaaaatcttgggctctggagttagcctttctttaaattcagactccattccttgttaactgtgtgcctcttggtaagttacttaagctctctaagcttcagttttttcatctgaaaaataagggcaataatgtgaattttctaattgttaaatcagaaaatttatataaagtgattagtacaatgacagtatatagtgagagttcaaata

SEQ ID NO: 44049 - DNA, 338 bp, Homo sapiens
gctagaaaaccagcttgagcccacctctctagttaataggtgagaaatgtttccctctactggatgaaaaacacctagatcctggttagaagatttaaatgtatgttttgtttgaggatgaaatgtttatatagagtacaaatggaagtaaaagagtaattgcaatttgaccccaaaaaagctacgtggcgctcccatctggctgttcctgtactgaagttctcagtaagtttctactttaaaacagattgttctaggaaagaaggttgttctaagagcagagttattcttttaaggtggctttatatattaaatattttccattttatctttttctg

SEQ ID NO: 44050 - DNA, 336 bp, Homo sapiens
  misc_feature (1)...(336): n = a,t,c or g
gtccaaatagtgagaagctctcttctccttacctcccccaaccccataatgtgcctataaaacccttgcactcacccaccctatggtgaagataaaatatgaattttttgttacagaatccaaagaagtaccattcttgtattattagcttcaggatgatacacataaacatcaagaagctaagaactaggctaaggacacagatcggttgatacttagaggtgttttggataaagttttggnnnnnnnnnnnnnnnnnnnnnnnnnnnnnnnnnnnnnnnnnnnnnnnnnnnnnnnnnnnnnnnnnnnnnnnnnnnnnnnnnnnnnnnnnnnnnn

SEQ ID NO: 44051 - DNA, 335 bp, Homo sapiens
  misc_feature (1)...(335): n = a,t,c or g
ggagacgataacactctttaccatcggggttttacagaggaccagttagttctggtggagcagaacacactgatggtggaagagcgggaacgagagattcgccagattgtacagtccatttctgacctgaatgaaatattcagggacttaggggcgatgattgtagaacagggtacagtccttgacagaattgactataacgttgaacagtcctgtatcaaaactgaagatggtttgaaacagcttcacaaggcagaacagtatcaaaagaagaatcggaagatgcttgtgattttaatattatttgtcatcatcattgtgctcattgntgcctc

SEQ ID NO: 44052 - DNA, 326 bp, Homo sapiens
gtttggagggagccgtaactatctttactgatggctctcagaatggaaaagcagcttatacaggaccggaagaaaagattattcaaactcagtttcattctgcacaaagagctgagctacaagcagttatatctgtattggaagattgtaatcaacctgttaatataatctctgactctgcttacgtattccaagctgccaaaatggtaaaaacagctttagtaaaacatatttctgatgatcagttaaatttcttgtttagttcacttcaacaagcagttaggactcaaaattttcccttttatattacacatatttaggctcac

SEQ ID NO: 44053 - DNA, 325 bp, Homo sapiens
  misc_feature (1)...(325): n = a,t,c or g
gaactggaagaaagtgtgtctcaaataaacaaataaaagaatgctaggagaactaaaaaggacaatgtccatataagcatttcccaggaaagttaccatataaaattccagnnnnnnnnnnnnnnnnnnnnnnnnnnnnnnnnnnnnnnnnnnnnnnnnnnnnnnnnnnnnnnnnnnnnnnnnnnnnnnnnnnnnnnnnnnnnnnnnnnnnnnnnnnnnnnnnnnnnnnnnnnnnnnnnnnnnnnnnnnnnnnnnnnnnnnnnnnnnnnnnnnnnnnnnnnnnnnnnnnnnnnnnnnnnnnnnnnnnnnnnnnnnnnnnnnnnnn

SEQ ID NO: 44054 - DNA, 332 bp, Homo sapiens
  misc_feature (1)...(332): n = a,t,c or g
gggaactgcaatcaccagcaaaggaacacagtgaccatcaatgtctgaggactggcacaatgaaggataagaaagaacctctctgtacgaggcctactccctttcagttccctttcttccccattgtgtcccagtggaggacctgataatacacctgacccatatctaagacatgcagttggcagggctgatagtaggtaaggttcacagtatgttaaaaagtcacacgaggccgggtgcagtggctcannnnnnnnnnnnnnnnnnnnnnnnnnnnnnnnnnnnnnnnnnnnnnnnnnnnnnnnnnnnnnnnnnnnnnntttgggcaacat

SEQ ID NO: 44055 - DNA, 324 bp, Homo sapiens
  misc_feature (1)...(324): n = a,t,c or g
gaagggtgggaggagggaaagagtcagaaaaaaaaaactattggggactaggcttagtacctgggtgatgaaatatctgtacaacaaactcccattacatgagtttacctatataccacaactgcacatgtgcctctaagcctaaaagttgtttttagaaaataatatttccnnnnnnnnnnnnnnnnnnnnnnnnnnnnnnnnnnnnnnnnnnnnnnnnnnnnnnnnnnannnnnnnnnnnnnnnnnnnnnnnnnnnnnnnnnnnnnnnnnnnnnnnnnnnnnnnnnnnnnnnnnnnnnnnnnnnnnnnnnnnnnnnnnnntg

SEQ ID NO: 44056 - DNA, 330 bp, Homo sapiens
gctgggaaataatgatctgtacagacaggacagaatgaaactcctgcgggtctttggcctgaaagttgggaatggttgggggagagaagggcagcagcttattggtggtcttttcaccattggcagaaacagtgagagctgtgtggtgcagaaatccagaaatgaggtgtagggaattttgcctgccttcctgcagacctgagctggctttggaatgaggttaaagtgtcagggacgttgcctgagcccaaatgtgtagtgtggtctgggcaggcagacctttaggttttgctgcttagtcctgaggaagtggccactcttgtggcaggt

SEQ ID NO: 44057 - DNA, 323 bp, Homo sapiens
gagtcaggttccctggtggccccacgatctcgcccaccatgtcagcatgggctgcccggtgagcatagctgagatgcaccaaggccacataagtcacctactttgccttggctgccccatctgcatctatcaaaggaagccttggacacccaccagaggagccagcatgagggagtgtatgcctttatacaaattcactccaacttcagaaaaacgtccgcagctcatgctccccctgccagagcagcagtgtgagcagctgtgtaggtttggaagcaccccagtcacttgggcattgatatggtttggctgtatccccaccc

SEQ ID NO: 44058 - DNA, 331 bp, Homo sapiens
gattgtttcactgcagaaggaacactcagtagcttgtccaaggttatgccaaaggaagtctcctctctctcgcttatctgaatcctatccttccaaaagaacatgcccaggtccaataaatggagttcctaaaaggacggatgtctcccattaaaaaaatatttcccagagtctctaggttcaatgtcctacaaataatcagcattcaagatatgaatttactaacttttaaaatctatacaaatttaaaattttcaatattattttatacgcaattatcctatctataatattactgtctagcattattataaaagtatcatcacaaatc

SEQ ID NO: 44059 - DNA, 315 bp, Homo sapiens
  misc_feature (1)...(315): n = a,t,c or g
gaatctattggcgattcctgctgactctccaaaaagtatcggaatcagagagctctctcctcctgcactgctacatctggtccggtgtnnctatccctactnaccctagtnnantggctnctngntgntnnttctgcttncanctnntnannnacnccanactnngggccccnnatnccgttacccanggccnaggtgtnnncntggnccttaatcnnnnantctgcctancngnagcntgncccctcctatntccggncccattnttncangantgctntngcccctnttnannactcnnacncattgatttcc

SEQ ID NO: 44060 - DNA, 342 bp, Homo sapiens
gggcatttttccacattcgcatgtggattagaaaccgtcaagtcacggaggctagtttgccatatctccatagatcgttcccagagtcttagtatagcctaattatgagtgctcctaaggggaagatgattttaaatttaatgaatttaaagttttccttacaaaaatggctttttaaggaggcacctagtatttgcctggtgggtatggggaatgatccaaggacaagaatgatcaatcagataattggggactgtttatcccccaggagaccagtgtctcttaggagagttaaatttgcatattgaaactataattttggtttctttatcccatcgaata

SEQ ID NO: 44061 - DNA, 348 bp, Homo sapiens
  misc_feature (1)...(348): n = a,t,c or g
ggaaaaatctattagaaaaatctaagctctcagagtagccattttcttacgttgactctgttctccttttccagtctccaccacgtactagatcttatgcttattgttactgcagtgtaacaagttactccaagaataagcagctcaaaacagttaatattatctttcagtttccgaggatcaggagtctattagtgannnnnnnnnnnnnnnnnnnnnnnnnnnnnnnnnnnnnnnnnnnnnnnnnnnnnnnnnnnttcaagactcaactgcttccctactcacatagttgttaacaagactcactttcctactggctgttggctggacacttcagctcctggctct

SEQ ID NO: 44062 - DNA, 319 bp, Homo sapiens
gggctcggcgtggggtctgtgagcgtcatttccagccacagtcaagcccctgttgtcttctagcctggggctgtgccttctgccctctgggtgttggctcttgctattcccttaacctccagtgcctttttctccaccatccccacttcggagaatattcagcaaacgctactgctcctttctctgtgctgggccaagaccgaaagatggaaaaggaagagggaggccttcttgagcctctggtgcatgggagcaggggagtgacaactcaggagggctgcccagggaggggccttcttgctcccaagtctctcttaag

SEQ ID NO: 44063 - DNA, 326 bp, Homo sapiens
ggaaaaattcagttgccttctcatgtctttctttcctgctctacatccagcccatcagcaaattcagtttaccttttagttaccttcaatattgattcaggattaactattccttactctgtctcctctatgatcgtggttcgagccaccttcatcttctgtctgcattgctgctgtcacctctgcactggcctcctggcttcctcccctgctccttataaactgctttgcacacaggatccagagagacctcttcaaatggaagtcaggtcatgttccccttctgggcaggatcctcttgtagctcccagctcactcgaaaccaa

SEQ ID NO: 44064 - DNA, 319 bp, Homo sapiens
gaggtgattgtatagtttcctttcaagatcattttattgagtacttcttttgcacattacagttaaaccaagtcagctgtccctataccaaatttggaggcatttagagatacagatagttaggttctattcaattcttttctgtactgtaagagatggaataatggtaaaagggactaaacggtcacatgtgtaaacggtgttagatatttgtaaaagcctgtatgtataattggcttgtaggtttacaaggggaagatacaagtaagtctcaccatagactgatcaataactatattatctgtccagtgactaattg

SEQ ID NO: 44065 - DNA, 405 bp, Homo sapiens
  misc_feature (1)...(405): n = a,t,c or g
ttgaaanccttnnnnnnnnnnnnnnnnnnnnnnnnnnnnnnnnnnnnnnnnnnnnnnnnnnnnnnnnnnaattccgcacgagttttgctagatttatgcctaataacttaatgtcttattttgtttttctttgttttggtactcttgtaaatggtagttttatttaattgcatattctaatagttcgatgcacatatataggaaagctattgacttgcatatgtgaaccttttattccatgatcttgctatacttgcttattaatttcggggttgctgttctttcttttttcttttaattctttggtatataatatcaccagcaaatacatttggcattatagcttccttgccaatgtgtatatgtgtatatttatctttttcttttcttacctattttcagaga

SEQ ID NO: 44066 - DNA, 352 bp, Homo sapiens
gatcagatgcaggaatacaggccctgctcataacctgcctgactctcgctgtggctctgccccagtcacactggcctcctcctgtttctccaacaccccaggcgaggtcctctctcagggcctttgcatgggctgtgccctctgccactacggcaggtccgagggcgccaactttgaaacataacaagctccctggatgggccggacccaggacctgcacaggcaagggctgggaggggcagaggaggggccgctcagggacgctgtacctatggaaaccgtgaacaaagggctgtctccagccacacaaacacctgggtgaatcgggcactggccagaggctggagcaacc

SEQ ID NO: 44067 - DNA, 352 bp, Homo sapiens
  misc_feature (1)...(352): n = a,t,c or g
gcggcacgagattagacttatcaaattgaacaccaaaagagcatttcagtatgtaattattggtacagatgacccatgtcaaaaaacttttaaattaaagccaaagtatctaatgcacttagaaaagtggaccatcgcgnnnnnnnnnnnnnnnnnnnnnnnnnnnnnnnnnnnnnnnnnnnnnnnnnnnnnnnnnnnnnnnnnnnnnnnnnnnnnnnnnnnnnnnnnnnnnnnnnnnnnnnnnnnnnnnnnnnnnnnnnnnnnnnnnnnnnnnnnnnnnnnnnnnnnnnnnnnnnnnnnnnnnnnnnnnnnnnnnnnnnnnnnnnnnnnnnnnnnnnnnnnnnnnnnnnnn

SEQ ID NO: 44068 - DNA, 347 bp, Homo sapiens
  misc_feature (1)...(347): n = a,t,c or g
nnnnnnnnnnnnnnnnnnnnnnnnnnnnnnnnnnnnnnnnnnnnnnnnnnnnnnnnnnnnnnnnnnnnnnnnnnnnnnnnnnnnnnnnnnnnnnnnnnnnnnnnnnnnnnnnnnnnnnnnnnnnnnnnnnnnnnnnnnnnnnnnnnnnnnnnnnnnnnnnnnnnnngtagtcatgttaaaaaaaaagtttaggctgggcacggtactttatgcctgtaatccctataatctcagnnnnnnnnnnnnnnnnnnnnnnnnnnnnnnnnnnnnnnnnnnnnnnnnnnnnnnnnnnnnnnnnnnnnnnnnnnnnnnnnnnnnnnnnnnnnnnnnnnnnnnnnnnnatggta

SEQ ID NO: 44069 - DNA, 350 bp, Homo sapiens
ggactctagttgtgccagtacagaaatgggcagacagtcattggaacagttttgagaagaaagatgcccatataggaaagagcccatagaatggttataaaatatgcctggatttgtggaaccagttctaaagctggcattactttcagattcttagtatcttagaggtgggtgtgatcttgtagatcctgtttcagtctcctcagaagcggggaaaattggtatcatttggaggctattgtttaggttggggcaaaaaaatataatggggggagacattatatataaaggtgatatttacttcttagacttgagagaagctggctttcttaataatctctaactgattt

SEQ ID NO: 44070 - DNA, 166 bp, Homo sapiens
  misc_feature (1)...(166): n = a,t,c or g
gtgcagagagaatgagcacaggctgcttccccaccaatggctaagcaggtcctgccagctcatgtctcctgccagctcatgtctcctgccagctcatgtctcctgccatgggggtcctgaggacatgcgtggcaagccccttgacagttgggaggatgngggtgag

SEQ ID NO: 44071 - DNA, 353 bp, Homo sapiens
  misc_feature (1)...(353): n = a,t,c or g
gaagacagctgaacctttgaaattcccaaagaagagaggtcccaaacctggcagcaaggtaggtaaaatgtgggtttcccagaaagggataagggattataaaggggtcattcggccaggcgtgagccaccgcgcctggccttcaactaacatttttaaagaaactaccacttgctgagtttcagagtgagctttttaatttttttaacttttaatttaaaaaattatttttaattgtaggtatgtaattgttatacnnnnnnnnnnnnnnnnnnnnnnnnnnnnnnnnnnnnnnnnnnnnnnnnnnnnnnnnnnnnnnnnnnnnnnnnnnnnnnnnnnnnnnnnnnnnnnnn

SEQ ID NO: 44072 - DNA, 278 bp, Homo sapiens
  misc_feature (1)...(278): n = a,t,c or g
gcttgattcatagtgacattccataagtggggtgacagcaaatgacttgcaggtagtctcattgtaggtttgtgcaccagagtgaccctgtgagcctttgttaataggttgggagctcagggtgtttatgtccacctgtctggtctanccaaacagntnttttntgggnatcaantttctncggggatcccaccctttanctgntgacttgnnagnatacntttnngncnctagntnnanaccnnctgnccanngnnnnnnancntgnntntntaact

SEQ ID NO: 44073 - DNA, 338 bp, Homo sapiens
gcacatcctttagccaaccatctgagagtaggttatagatatgatgcttcattatgtatccctcgaaaacagaaacattctacacaacggagaaaaatcaacattaattcactatcatcatctacatatagttcctattcaaatttcgcaatttgagccatcagtttttaaagaaaatcacattacaaaatcattttatgagtctggtgtgctttctcttatagaataaagtgactatgtttactgttcacttactctagtttttttctttgtggtttagcttcttacatccgtgtttgacaatagcatcaagacttttggagtaattgagagtgacc

SEQ ID NO: 44074 - DNA, 317 bp, Homo sapiens
  misc_feature (1)...(317): n = a,t,c or g
gaaggccattgcagtgtaaaagtattgagttaatgtgttcagatgaatttgggcctttggagcaaaaacaattatccattctcaaactgatgaaattagtgccatgctttgtaatttggccctcagactacttaactgtgtatctgcctgnnntatgaatntncnactnaaangtnngccgnctcccngtcacgaatnnaaagtctgatgccctgacnntgatgccanngccttcanctttccggatttctnaccangntcgcttagaactncnggtccgnccctgnnnatgtgntcccngcngccttcacnntttc

SEQ ID NO: 44075 - DNA, 332 bp, Homo sapiens
ggacaagcatttctaagctcaatagaagggctatatataccaatccaagcaattacattttgcataacctaaaatcctctatagtcctatctaaaaggtctctttgttagccttgaaaggacagagaccgtatttgttcctaaataccataattttaatatgttagtatctggtgagttataactctaatttataaaacactgcaagcacccttcactataaaaaattgatgcaccaaagaagctagatggaaacagtttgctaggaaaagtgtcccagttattttaatccatttgatagttttactatgtgcaatgcacattttattataa

SEQ ID NO: 44076 - DNA, 332 bp, Homo sapiens
  misc_feature (1)...(332): n = a,t,c or g
gacatcatagtcacctggggagcttttaaaatggttatgtccaggctgccctnnnnnnnnnnnnnnnnnnnnnnnnnnnnnnnnnnnnnnnnactctcaggtaattccagtgtgcagtcaaggttgacaactggtggcttagaacagagtttctcaaaccttaatgtacccacgaaacacccggggctcaggttagagattaaannnnnnnnnnnnnnnnnnnnnnnnnnnnnnnnnnnnnnnnnnnnnnnnnnnnnnnnnnnnnnnnnnnnnnnnnnnnnnnnnnnnnnnnnnnnattttaagtagcaaggacttaagagaggatgccagc

SEQ ID NO: 44077 - DNA, 321 bp, Homo sapiens
  misc_feature (1)...(321): n = a,t,c or g
gtgcattttttgtagatggggttttgccatgttcnnnnnnnnnnnnnnnnnnnnnnnnnnnnnnnnnnnnnnnnnnnnnnnnnnnnnnnnnnnnnnnnnnnnnnnnnggagtcactgttaatttcttctgttggtccatggcaaggtttacagatgactttgtttggaaagcctgaatctgtttttaaaagcagggatggggagtgggaaatcacagtagttactacttgagtctatttagtggactataaaaattactatagcttcagtttaacctaatcagagcttgccatgaattcgagcctgcttgcctctcttcag

SEQ ID NO: 44078 - DNA, 320 bp, Homo sapiens
  misc_feature (1)...(320): n = a,t,c or g
gcggcacgnnnnnnnnnnnnnnnnnnnnnnnnnnnnnnnnnnnnnnnnnnnnnnnnnnnnnnnnnnnnnnnnnnnnnnnnnnnnnnnnnnnnnnnnnnnnnnnnnnnnnnnnnnnnnnnnnnnnnnnnnnnnnnnnnnnnnnnnnnnnnnnnnnntggccaacagccatattcctgattttaaaattgtgattgtgttttgtaattggtttatctatgcacatacacatacacaaatagattttgtttttgttctcctaaactatttgggttttttgtttgtttgttnnnnnnnnnnnnnnnnnnnnnnnnnnnnnnnnn

SEQ ID NO: 44079 - DNA, 321 bp, Homo sapiens
  misc_feature (1)...(321): n = a,t,c or g
ggctcggcgtgggagtacaagagaagccaggagttcaagacaagcctagactgtnnnnnnnnnnnnnnnnnnnnnnnnnnnnnnnnnnnnnnnnnnnnnnnnnnnnnnnnnnnnnnnnnnnnnnnnnnnnnnnnnnnnnnnnnnnnnnnnnnnnnnnnnnnnnnnnnnnntggannttgaanctacngatncntatnnncttanctttgcnttctgactnactttnccttgattncntgggnnttantcatacatatctcggtatanngcanngttgcaanngaatngttctattancnnnnatgaggnnctaanatttca

SEQ ID NO: 44080 - DNA, 323 bp, Homo sapiens
  misc_feature (1)...(323): n = a,t,c or g
gcgtaatatgagagtgctcccttagtcttgccaacacaatgttgccaacagtgtgtatgtatacatatatatttttacatatgtgtatacttaaaatatatattatgtatgtttatatagtttatgtatgtatataaatgtatatttttatatatgtataaatatatacccnnnnnnnnnnnnnnnnnnnnnnnnnnnnnnnnnnnnnnnnnnnnnnnnnnnnnnnnnnnnnnnnnnnnnnagcccggatnnnnnnnnnnnnnnnnnnnnnnnnnnnnnnnnnnnnnnnnnnnnnnnnnnnnnnnacacacaccaccntgctc

SEQ ID NO: 44081 - DNA, 323 bp, Homo sapiens
gaatttttatgtttcttggctcaaaaaccagttccatttctaatgttgtcctcacaagaaggctaattggtggtgagacagcaggggaggaggaagagctgtggtttgtaacttgttcaactcaggcaataagcgattttagctttatttaaagtcttctgtccagctttaagcactttgtaagacatggctgaaagtagcttttctatcagaattgcagatagtcatgttgggctaacagtcaattggatatattcctttacctcacatgaccccagcaactgtggtggtatctagaggtgaaacaggcaagtgaaatggac

SEQ ID NO: 44082 - DNA, 318 bp, Homo sapiens
gctcgtgtgataggaattaggttactgtgttgtttgtacagcgtgtgtttggtagcatgcacatgggcttcttagtgacgacctggtgatgcaaacagtcttccagtagctactggacacctactgtttgccagttgaccccctaaagagttactgagggctcagtgggtgctaggcatatagatgacaccaaaatatttgtcattgatctccatctgccctgaaattatgttctccagatagtcaaggctaaaacccacatcaaaaatatgtatgaaaacctaagagagcagggaatgacattggccattgtattta

SEQ ID NO: 44083 - DNA, 313 bp, Homo sapiens
  misc_feature (1)...(313): n = a,t,c or g
ggtggggcggggcaagccggcccctctgtccacgatgacgcgccgcgtgcggattcgcttgctgatcacctgtgcttggttcccgcgcaggcaaaccccgcggggcccctgaggacctggagcccatttaacagggggtgaggtgacctgcccaaggtcaccggctccaaagtcagaccctcctggggggaaaagcccgtaatctgggtggcagctgatgccccaggacagagagaggcnacagaaggggagggggnaggcttngaanctnttcnttanntnnnnttctnacncanactttgannnnnntttt

SEQ ID NO: 44084 - DNA, 321 bp, Homo sapiens
ggcatgttctgattaagtaattctatagcttgaaggcattgaggaatttccttctgtttcttgagttctgttttcttctggtatcacaggttgggttccccaggaccaacacctgtaggggagaagacatgaaggcaggatagggcagaggaagcagtccagctgtgatgcagttacaatgcctcagccaacactacagggacctctgacatttcagagacgtcccaagatgctgcaaaggggctgagccctaatacccctgtgttgatcagtctgggaggtgcgcatgaccttgggtaagatggctcctttagctgccac

SEQ ID NO: 44085 - DNA, 321 bp, Homo sapiens
gaactggcttaaggcatgtgcatgaccaggacaaacctgagcttttgttcagttgctagaaaacttccagagtcaactccacttccagaaagtagggttcaagaaacacgtcatgggctaaatccctgacaaatgccactcacaccctcctaggttcccctactgccaccgtgacccaaaaaattagcttatttcagtttcagcccagggaacagaatcctaagcagggagtggaaagtggtaactcgggttgtgaatgcccgttagattccaaggctggatgtgagcttacacagcaaatcacagcctcccattgttcta

SEQ ID NO: 44086 - DNA, 321 bp, Homo sapiens
  misc_feature (1)...(321): n = a,t,c or g
gcaagatcgcaaagcaagggataaatcagtacaacaaagtgcaaaagtaggggccnnnnnnnnnnnnnnnnnnnnnnnnnnnnnnnnnnnnnnnnnnnnnnnnnnnnnnnnnnnnnnnnnnnnnnnnnnnnnnnnnnnnnnnnnnnnnnnnnnnnnnnnnnnnnnnnnnnnnnnnnnnnnnnnnnnnnnnnnnnnnnnnnnnnnnnnnnnnnnnnnnnnnnnnnnnnnnnnnnnnnnnnnnnnnnnnnnnnnnnnnnnnnnnnnnnnnnnnnnnnnnnnnnnnnnnnnnnnnnnnnnnnnnnnnnnnnnnnnnnnnnnnnn

SEQ ID NO: 44087 - DNA, 318 bp, Homo sapiens
  misc_feature (1)...(318): n = a,t,c or g
gttggaacaaaggttatatggtcacaatttaactcatagttatttgaaaattattggtttataaggaaacagatttagacaaagctagaacttatgcaggtaagttacaaagctagaacttactcagnnnnnnnnnnnnnnnnnnnnnnnnnnnnnnnnnnnnnnnnnnnnnnnnnnnnnnnnnnnnnnnnnnnnnnnnnnnnnnnnnnnnnnnnnnnnnnnnnnnnnnnnnnnnnnnnnnnnnnnnnnnnnnnnnnnnnnnnnnnnnnnnnnnnnnnnnnnnnnnnnnnnnnnnnnnnnnnnnnnnnnnnnnnnnnn

SEQ ID NO: 44088 - DNA, 322 bp, Homo sapiens
gggaacgtctgaggttatcaataagctcctagtccagacgccatgggtcatttcacagaggaggacaaggctactatcacaagcctgtggggcaaggtgaatgtggaagatgctggaggagaaaccctgggaaggctcctggttgtctacccatggacccagaggttctttgacagctttggcaacctgtcctctgcctctgccatcatgggcaaccccaaagtcaaggcacatggcaagaaggtgctgacttccttgggagatgccataaagcacctggatgatctcaagggcacctttgcccagctgagtgaactgcact

SEQ ID NO: 44089 - DNA, 314 bp, Homo sapiens
  misc_feature (1)...(314): n = a,t,c or g
nnnnnnnnnnnnnnnnnnnnnnnnnnnnnnnnnnnnnnnnnnnnnnnnnnnnnnnnnnnnnnnnnnnnnnnnnnnnnnnnnnnnnnnnnnnnnnnnnnnnnnnnnnnnnnnnnnnnnnnnnnnnnnnnnnnnnnnnnnnnnnnnnggtaacagaagaggtaaacgtgtgggtaaatctaaatgaacgttattggtataaaattatagtagtatagaaaatgatatcttgtggggcttaaaataaaacatactgaaatatgtatgggtaaagttatatatctgggatttgcactgaaataatgtagggtanaggg

SEQ ID NO: 44090 - DNA, 339 bp, Homo sapiens
  misc_feature (1)...(339): n = a,t,c or g
gnnnnnnnnnnnnnnnnnnnnnnnnnnnnnnnnnnnnnnnnnnnnnnnnnnnnnnnnnnnnnnnnnnnnnnnnnnnnnnnnnnnnnnnnnnnnnnnnnnnnnnnnnnnnnnnnnnnnnnnnnnnnnnnnnnnnnnnnnnnnnnnnnnnnnnnnnnnnnnnnnnnnnnnnnnnnnnnnnnnntcccagacagtgaaagagaagctactcgtctagtacaactcttaacttgtaccaaataggtatcaagggcaagaaaaggtggcttatgtgagatcacagtgcacattaatggcagagcttggtttaagcccagctgctttgtcttctaaactgtgcca

SEQ ID NO: 44091 - DNA, 323 bp, Homo sapiens
gggcgtgggaaatactaaaatgaaatcagccttttggcattttgtaaactaagaaaattcactcatgttgcacaaagtagtaatgttttattccttgatcaagggcaacaataagttggcaagttttccagaatcctggctacatttttcaggaaaatgaaaaatggcttctgggaccttggattattcaggaagtacagaaaattcagaaagtgtcaaatgtgtttaacgaggtactttcctgtgacaagttctttctcagaattgcttagagaggacaaaaggcactgtagcaatacatcctctcataacccctccatgct

SEQ ID NO: 44092 - DNA, 334 bp, Homo sapiens
  misc_feature (1)...(334): n = a,t,c or g
gnnnnnnnnnnnnnnnnnnnnnnnnnnnnnnnnnnnnnnnnnnnnnnnnnnnnnnnnnnnnnnnnnnnnnnnnnnnnnnnnnnnnnnnnnnnnnnnnnnnnnnnnnnnnnnnnnnnnnnnnnnnnnnnnnnnnnnnnnnnnnnnnnnnnnnnnnnnnnnnnnnnnnnnnnnnnnnnnnnnnnnnnnnnnnnnnnnnnnnnnnnnnnnnnnnnnnnnnnnnnggttaaaacaacctaaatgtaagacctaaaactataaaactccaggaagaaaatatagaggaaaaacttcatgatattggatttgacaatgatttcatggatatgacaccaag

SEQ ID NO: 44093 - DNA, 329 bp, Homo sapiens
gccagagcctgctgagcccccttgtcctggaggtggaccccaacatccaggccgtgcgcacccaggagaaggagcagatcaagaccctcaacaacaagtttgcctccttcatagacaaggtacggttcctggagcagcagaacaagatgctggagaccaagtggagtctcctgcagcagcagaagacggctcgaagcaacatggacaacatgttcgagagctacatcaacaaccttaggcggcagctggagactctgggccaggagaagctgaagctggaggcggagcttggcaacatgcaggggctggtggaggacttcaagaacaag

SEQ ID NO: 44094 - DNA, 342 bp, Homo sapiens
  misc_feature (1)...(342): n = a,t,c or g
ggaannnnnnnnnnnnnnnnnnnnnnnnnnnnnnnnnnnnnnnnnnnnnnnnnnnnnnnnnnnnnnnnnnnnnnnnnnnnnnnnnnnnnnnnnnnnnnnnnnnnnnnnnnnngtgtgagtgtatttactaattgctaagttactgtgttcaatacgtgtccgttgaactcctccatgtgccgggcattgttctgaatgccttatatgcactaattcacttaatttttagagcagctctattattgtgatccttttacagcgaagaaactgaacgacagagaggctggggacgttgtccaacatcacacagccagtgctgttggaattgaggtttgaacccgg

SEQ ID NO: 44095 - DNA, 340 bp, Homo sapiens
  misc_feature (1)...(340): n = a,t,c or g
ggccaaaaaagcattcgctatcaaaatgaaannnnnnnnnnnnnnnnnnnnnnnnnnnnnnnnnnnnnnnnnnnnnnnnnnnnnnnnnnnnnnnnnnnnnnnnnnnnnnnnnnnnnnnnnnnnnnnnnnnnnnnnnnnnnnnnnannnnnnnnnnnnnnnnnnnnnnnnnnnnnnnnnnnnnnnnnnnnnnnnnnnnnnnnnnnnnnnnnnnnnnnnnnnnnnnnnnnnnnnnnnnnnnnnnnnnnnnnnnnnnnnnnnnnnnnnnnnancaaaaccaaaancaacttntccctcctccacagactcctccctgtcaccantagggatccaccttatgga

SEQ ID NO: 44096 - DNA, 336 bp, Homo sapiens
gcaaaataataaaaccagcttttatttcttcctagcctgtctgaacatgcagtcatctggttggttagcagttgaaaaggcccaaacctttatctcaccataagaacatgggcttggaaatcagacaaacaaacctagattcacgcctcatctctgcacttactatgagtaaaaactctgtaatttacttaaaggctctgaacctcggttcaggacatggtggtagttctgcccctggcttcccagaatggtggcattcttacgctaacctgccatggcatgcataagaagcatacccccagtgagaggatcccctgctgcagtcactagttgtgt

SEQ ID NO: 44097 - DNA, 332 bp, Homo sapiens
gtaaacatacacattcagaacatttttaaaatattaaaacattaaactgctcttctcacccactccaagtcaaatagcattttttcagtcaggtgtctgggagctcgatgcaagataacaaaatctggtctctgcctcagggaacatgaaatctgtttggggaagccagagcaaaaataaaggttttaatagcaagctctcactaactggccctggaaatccaccccacatcctccaggaagcctttctctacccccagtgccctcaggagcttctccaaggcaggcccttcccagagcgcagtgtgctccccagctcacaggagatgcttt

SEQ ID NO: 44098 - DNA, 331 bp, Homo sapiens
  misc_feature (1)...(331): n = a,t,c or g
gcactattcacagacatgtatatcaaatatatatctgataatttaagcaaatagaaattctttgctcggaaatctttaagaatatgagaagaaattagcagcatatagtgtccagaaaaggtgggagagaacttcttaggtatggaaagtttatgtaataggtaatgtgtaactatttaccactaattctgtacctggggtaaaggtggtgttcaagaaatggagagccnnnnnnnnnnnnnnnnnnnnnnnnnnnnnnnnnnnnnnnnnnnnnnnnnnnnnnnnnnnnnnnnnnnnnnnnnnnnnnnnnnnnnnnnnnnnnnnnnnnnnt

SEQ ID NO: 44099 - DNA, 342 bp, Homo sapiens
gccagaataaaaagaaagaagagtgaatgatgaggaaacagaattaataactgcttttgaggagccatttaatcataatttccacaaattcttaatcagcaactatccagctctgccatatactgtacacactcctaatgaagcagaccccaaacccgaccacttcctccttcttccccaccactctttagtccagccccccatcatctcccaactggacagctgcatcagccccctagcagcttctgctgcatctaagcttgccctcaccacagtggccctctacagagggcccagaggatcccttcaaaatagatagctcagtgcaccactcctctactt

SEQ ID NO: 44100 - DNA, 341 bp, Homo sapiens
  misc_feature (1)...(341): n = a,t,c or g
gaaatacatgtgagctattatatacatttcaggaagatgaataaaaacaagtaagatcattatctatacaagttttggtgagtgatgacagtgagtgatgacagtcatggtggtaggnnnnnnnnnnnnnnnnnnnnnnnnnnnnnnnnnnnnnnnnnnnnnnnnnnnnnnnnnnnnnnnnnnnnnnnnnnnngacaaaagcggtgggctggctgagtgcttcttactgcatagtttattgtcatgtgtttgtgtgattatcgtagacttgatgactttttagtaggcagttacctgtattcattcatgcgttttccagcttgcttattccagttcaatgg

SEQ ID NO: 44101 - DNA, 327 bp, Homo sapiens
gggaagctgaacaactcatcatcctgccagcactggcgaaccttctctttggtgggcggtgaaaggaggatatatgtaccacagcctgcatatcccttctccaaaatctaccccaggggttcaggtatataaccctccctgaacccagcttctgcgttttcattctcaaggcctctctgagttgaccagatatgataaggtctcttcttgcaaagagttacgggggactgtggagtgtgatgagtcatccagaggggccattaagggattatggagacctcggggaaccactgaccagccagggcactcttctggccccagaagatc

SEQ ID NO: 44102 - DNA, 320 bp, Homo sapiens
gatttttgcagggggtctaaagcttgaccaccgctgttgtatatgtcacctttcctagttccttctcagaagtccagcattttgacagaagcataaagcagggcacagggtcctgcctttgcacacccttcctgtgcccattgtcctatcacaccacctccctggtgcagccagactctaggccctgggccctccagtgattctacgtggtgcggatggatgcttccatggtgagacccaaaagtctcatctgtccagttacagagcctatgtttttggaaaggcatatccagcagctccccgaccggcatttttttttt

SEQ ID NO: 44103 - DNA, 331 bp, Homo sapiens
gccatgagcttcaaccctgagtaaactttattgaagcccctggcctagatgggctaaacattcttcctaagtgctcctggaacacatcatccatctctctctaccatgaaaattctccattcaaaaatccatctatctctaccaccgaaattctccatctacaagtcccatctctctctatcacagaaattctccatttacaagtccttctccctcaccaggccatgacttcctgagggcaaggacccatctttcatcttttctttcttccttagggcatggcacagagtggactcttacaaagaaactccaggcctagaaaatcacaaac

SEQ ID NO: 44104 - DNA, 319 bp, Homo sapiens
gacactttatagggtttctgtagagaacaccttagaattagttaatgtgtttcataaagcacatggcgtggtacccagccaagagtaacactctgaagtgctcctccttacctggacattacagcatcctttgtataaatcaggatgctcaggaaataccttgtttggaataggaataggctcctccctttttttctcacttgccttgattgctctgtattaaaattcataaaggctcatgaattatcaattagatagcatttggtttggtaattttaagttcttctatagcaggcatgtatgcatgtgttaaaaatgg

SEQ ID NO: 44105 - DNA, 328 bp, Homo sapiens
gcggcacgaggacatctctgggcaaggtgtaagccatttcagggtttgaagcagaggcatgacatgagtgtgggctcctctggagcataggttgtatccatagcttagtcatccccccagtaccttgataatttcttatacgtattaggtcctcaataaatgtctgtttaattgtgctgtactattaatgccagaaaaaggcaaatgtctcaaagggatcaggggacacaaatttgactcgattcaacctatttcctagtttgtgcacaattttttaatggataacttcctcctaatagtggtttaaatatcagtactataagacttc

SEQ ID NO: 44106 - DNA, 320 bp, Homo sapiens
gcactgagaccactgagaagggctgtgtccttctgagctacctgaatgagacagtgactgtaagtgcttccttggagtctgtcaggggaaacaggatcctcttcactgacctggaggcggagaatgacgtactccactgtgtcgccttcgctgtcccaaagtcttcatccaatgaggaggtaatgttcctcactgtccaagtgaaaggaccaacccaagaatttaagaagcggaccacagtgatggttaagaacgaggacagtctggtctttgtccagacagacagatcaatctacaaaccatggcagacagtgaaattt

SEQ ID NO: 44107 - DNA, 323 bp, Homo sapiens
  misc_feature (1)...(323): n = a,t,c or g
gccgggtagaagctggaagagcctagaggggtggctgctgccttccagggaacaggtcaaagggtatccaaccagagtggtctcagtgcagatggggaggagactctagacccaggacaagcagtggagggggcatccaaggatttcctgatgatcagatgtggtttgagaaagacagggggccggtggcgcatgcctgtaatcccagactttgggaaaccaaagcgggaggacgcttgagcccaggagttcgaaaccagctggcaacatgcaagacctggtctctgcnnnnnnnnnnnnnnnnnnnnnnnnnnnnnnnnnct

SEQ ID NO: 44108 - DNA, 327 bp, Homo sapiens
gggaacgtctgaggttatcaataagctcctagtccagacgccatgggtcatttcacagaggaggacaaggctactatcacaagcctgtggggcaaggtgaatgtggaagatgctggaggagaaaccctgggaaggctcctggttgtctacccatggacccagaggttctttgacagctttggcaacctgtcctctgcctctgccatcatgggcaaccccaaagtcaaggcacatggcaagaaggtgctgacttccttgggagatgccataaagcacctggatgatctcaagggcacctttgcccagctgagtgaactgcactgtgac

SEQ ID NO: 44109 - DNA, 339 bp, Homo sapiens
  misc_feature (1)...(339): n = a,t,c or g
gtatttagtagctttaaggcaagacaaagttattgcaagaggtaaaactttacttnnnnnnnnnnnnnnnnnnnnnnnnnnnnnnnnnnnnnnnnnnnnnnnnnnnnnnnnnnnnnnnnnnnnnnnnnnnnnnnnnnnnnnnnnnnnnnnnnnnnnnnnnnnnnnnnnnnnnnnnnnnnnnnnnnnnnnnnnnnnnnnnnnnnnnnnnnnnnnnnnnnnnnnnnnnnnnnnnnnnnnnnnnnnnnnnnnnnnnnnnnnnnnnnnnnnnnnnnnnnnnnnnnnnnnnnnnnnnnnnnnnnnnnnnnnnnnnnnnnnnnnnnnnnnnntgaaataaataat

SEQ ID NO: 44110 - DNA, 320 bp, Homo sapiens
ggtccggcgtccagagcatgctgggagggaagccttctttcctgagggatgctgggaaatggagttccgcgaagaaatcgtgcccctgagggtttcaaaccctaagtaggaccgaggtgcagagcattctggggaatggagttcgtgttcctgagcatactgggaaacgaagtcctcgacccctggcgtgctagttaatgggctcgaaagtaaatcagtggtgctggggagggagtcttaggcggtggacttggcgtagtctgcccgggagtcagggcttgctggggaagtccacggcctggacgttgagagaaagggag

SEQ ID NO: 44111 - DNA, 318 bp, Homo sapiens
  misc_feature (1)...(318): n = a,t,c or g
ggatttatccattttgcagaactctctaggaatcttcagaaaagcagtagggcttaccctgctgttccccagcagatcacagtatggagaccggttctgagtcatgctccctataactggaataacacagggaattcttcacatgtttcataatgtgtgtgagtgaaaggacaacccacacttgttattgaaaaacccgacagtggtcaggcatcattattggaatgtcttctccacactgcccattctgtaaacatcctggggaaatgtcgaggttactttctgtgtgaggcttgagctttcttttcctgnntgtaa

SEQ ID NO: 44112 - DNA, 338 bp, Homo sapiens
  misc_feature (1)...(338): n = a,t,c or g
ggagacaggtatcccatttggtcttggaacgcacagatctcgtggacaagtgatgggaaaaaatgatctcacagcgtgatgacgaaagtaactcagggggccagatnnnnnnnnnnnnnnnnnnnnnnnnnnnnnnnnnnnnnnnnnnnnnnnnnnnnnnnnnnnnnnnnnnnnnnnnnnnnnnnnnnnnnnnnnnnnnnnnnnnnnnnnnnnnnnnnnnnnnnnnnnnnnnnnnnnnnnnnnnnnnnnnnnnnnnnnnnnnnnnnnntaactcannnnnnnnnnnnnnnnnnnnnnnnnnnnnnnnnnnnnnnnnnnnnnnnnnnnnnnnnnnnnnn

SEQ ID NO: 44113 - DNA, 368 bp, Homo sapiens
  misc_feature (1)...(368): n = a,t,c or g
ggaaccacgtattcagcttttctagccaagctgaaagtatggctgaagtatgactttagtgttagacaaatgggtttaaatctaggttttacagatactaggtgtgcaacttaacccttctgagtttcatttctttaatatgttaaatgagtgtaatgagattagctgtaacatacaataatcatctaactcatttctttaggtacttaggtgttcagttaatgatagctattttttgtattgtgatttaaaattctcatatgcnnnnnnnnnnnnnnnnnnnnnnnnnnnnnnnnnnnnnnnnnnnnnnnnnnnnnnnnnnnnnnnnnnnnnnnnnnnnnnnnnnnnnnnnnnnnnnnnnnnnnnnn

SEQ ID NO: 44114 - DNA, 357 bp, Homo sapiens
  misc_feature (1)...(357): n = a,t,c or g
gattccaggcacctgtataaagtatggggtccagcattttagttagagaccgactannnnnnnnnnnnnnnnnnnnnnnnnnnnnnnnnnnnnnnnnnnnnnnnnnnnnnnnnnnnnnnnnnnnnnnnnnnnnnnnnnnnnnnnnnnnnnnnnnnnnnnnnnnnnnnnnnnnnnnnnnnnnnnnnnnnnnnnnnnnnnnnnnnnnnnnnnnnnnnnnnnnnnnnnnnnnnnnnnnnnnnnnnnnnnnnnnnnnnnnnnnnnnnnnnnnnnnnnnnnnnnnnnnnnnnnnnnnnnnnnnnnnnnnnnnnnnnnnnnnnnnnnnnnnnnnnactcanggatggtaccaaggnagatggt

SEQ ID NO: 44115 - DNA, 317 bp, Homo sapiens
ggcggccgccaatgccctctcccgtttagtaggggtagggggacacggcgatgagcaagacgaagacgctttggtggcgcggtgccgcagcgcgcacgggcttgacccccgacctgcacttgaagatctgcgtcagccaggctctcggggacaacgccattgaccaccacgtcgaggagcaggaggccatcgggatccagaccccgggccacctgggtcatcatcccttctggaccagccccggtttgttccaaaccgtttgaaaaaagaaccaaaaaatggccctggacgtggattctcagatcttcttcatgtga

SEQ ID NO: 44116 - DNA, 327 bp, Homo sapiens
ggaagaaaatatccacaaataaccttgagaaaagacaagcctgtgtaagattcagaagcaccattgaaagacataaaagaagctgtacacgcagagggtgttgccacgtgcccggacctgaagacacaccctgtgagctgtctgctgacatgacaggcagccccaccgttcccacaggaatccgttcattaccagtaaaaatacccacatgcttgttggagatttttctggaactctatgaatggatctgaagttgatccagtagaggaaacatgtgagaatatcccagaaaatgtggggagagaaaaagcttgcaggattccacat

SEQ ID NO: 44117 - DNA, 326 bp, Homo sapiens
  misc_feature (1)...(326): n = a,t,c or g
gctgtattacaaatcccatttttgtccctgaaagcagtgctaatgatagattactgggcacaaaagtagaaattgtgtaaaaatttgatagtgagaaacaccgatttagatatatcattggacgataagaannnnnnnnnnnnnnnnnnnnnnnnnnnnnnnnnnnnnnnnnnnnnnnnnnnnnnnnnnnnnnnnnnnnnnnnnnnnnnnnnnnnnnnnnnnnnnnnnnnnnnnnnnnnnnnnnnnnnnnnnnnnnnnnnnnnnnnnnnnnnnnnnnnnnnnnnnnnnnnnnnnnnnnnnnnnnnnnnnnnnnnnnnnnnnnnnnn

SEQ ID NO: 44118 - DNA, 334 bp, Homo sapiens
ggtcttttgcatttttaatggcttgattcatttgtgcttattaaaaatgttagtgattacgccaatgttaacatccaaaaatcatcagaatggcctgtgttatgcttttcatggttcctgaatagtgatttaaagaaagttacacttttgatcttctttcttcttgtgctagatattacatgtctttcttaaaaacagaaatatatgcattaaatataaagcactaggcagttatgcattactttgtacatttcttaggtaactgaatattttaaggttattgaggaaaactggaactcgatgtttacttgagtaatagttctaagttgagttc

SEQ ID NO: 44119 - DNA, 337 bp, Homo sapiens
gtgaataagtgccaagtcttgctgcagagtttccttcataagttttgtttgcaacctggccatttcttttctaaggtcactttgttcatcagtaagatgaactctgattctcttctaggtcctccaaactccgtaggaattgctgatttcagtttaatttgtttcagtgtctctgtctctgaaccattctagcttatagacaactcttttgttgctctcgaaacattgtagctagtttttgttcctctggttcctcagccttcactgttcgtgttccaatcttgaaacaaagtcagaaactgcttagaatatttgtaatgaagtttctgcctttcct

SEQ ID NO: 44120 - DNA, 332 bp, Homo sapiens
ggccacctggtttaatagtcgcgaaacctggcctccctcatttacagtctcttgaacttcttccacatgtgcctaatcacatttatcttcgtaaattctaaagataaccatattttcaggcgtttgcagggttgttacccccatgtatttcccaacggtgagattagagtgtgcgaggttagaggactcggaaagctaattaggggatttctaacttgatgtttcacctcgatcatattagcaaaaaacctggttttgccatttatgattgtgatttttaaaaatgattattttaggccgggctcggtggctgaggcctgtgatcccagcac

SEQ ID NO: 44121 - DNA, 328 bp, Homo sapiens
  misc_feature (1)...(328): n = a,t,c or g
gnnnnnnnnnnnnnnnnnnnnnnnnnnnnnnnnnnnnnnnnnnnnnnnnnnnnnnnnnnnnnnnnnnnnnnnnnnnnnnnnnnnnnnnnnnnnnnnnnnnnnnnnnnnnnnnnnnnnnnnnnnnnnnnnnnnnnnnnnnnnnnnnnnnnnnnnnnnnnnnnnnnnnnnnnnnnnnnnnnnnnngtttttctttatacctctaatcactatctgatgtggtaaatattttttttttttactattccccaccctctccctactttcctgttagaatataagagtcagtgacttggtctattgggtttattgctatattctccaataacta

SEQ ID NO: 44122 - DNA, 327 bp, Homo sapiens
  misc_feature (1)...(327): n = a,t,c or g
ggagatgtgtgagagtgaaggttatcccttctcgacctggaggtctcgaagctagaagccccgcagggcaagacagaaggctgggagctttgccgcagggaggggatgcgcccccactcacagaggcccgccccgncagcggtggggagcctctcagacagtgtccccctctggagcctgaatcantccagccaatgttgaggtggnaaggagatggcgccctcttccctcacttcagcaaagtcagcccnagttcanaggcagccattgccccaaattaagataaagcccagtgccaagaatagggaaagccggaaatgggattgc

SEQ ID NO: 44123 - DNA, 325 bp, Homo sapiens
  misc_feature (1)...(325): n = a,t,c or g
gctggaatatgggaaaatgtgtagcagtgtgggctaagatactcaagatagaagtgcctaggnnnnnnnnnnnnnnnnnnnnnnnnnnnnnnnnnnnnnnnnnnnnnnnnnnnnnnnnnnnnnnnnnnnnnnnnnnnnnnnnnnnnnnnnnnnnnnnnnnnnnnnnnnnnnnnnnnnnnnnnnnnnnnnnnnnnnnnnnnnnnnnnnnnnnnnnnnnnnnnnnnnnnnnnnnnnnnnnnnnnnnnnnnnnnnnnnnnnnnnnngngcttatacccatgcaggaatttttctggngctcanggnaaggggatnttttatcacaaga

SEQ ID NO: 44124 - DNA, 331 bp, Homo sapiens
  misc_feature (1)...(331): n = a,t,c or g
gcagaggaggaaacagttacagaggttgtaacaaagccacccggatcggggagatgtattaattttctgtnnnnnnnnnnnnnnnnnnnnnnnnnnnnnnnnnnnnnnnnnnnnnnnnnnncttgtagttctagaggtcagaattccaaagcggaatctggttgcattccttctgaagactataggggagaatccatttcttttgccttttccagctgttagaggccacctatgtatattggtttatggccccttcctctatttttaggtcagcaatggctggcaagtcagcaacagcatggaagcctgttttgacttgatttctcggggc

SEQ ID NO: 44125 - DNA, 324 bp, Homo sapiens
ggagagcagcaccatgagcttctaccctgagagggcattgttgtcccctgcccggcatctctcagcaacaccacttgctggtgtccctcagccctctgccttggagcctgcttcacagagtggctgtaagaactgaactaggtcctgcaggctccgcctcactgccggctctaggaagcagccccaggtaggcgagggacagacagcagcctgggccatctgcagttcaggccaggctccctgtttctcttccagagcagctgggggagggagccgtcatttgtttaggcctctgcagtgtttaatcagcacgcagctctctcc

SEQ ID NO: 44126 - DNA, 327 bp, Homo sapiens
ggattgtggcccggtgcctgtgggaagaatcacgccttctacagactgcagccactgcggcccaggtgagacctgagacaaaacaaatccctggtctgggaggaatggaaaatcaaacaactttataatgagataaattattagatctactaaaaaagaaggaaaagaaattaaatagatcaataatcataaaaatacattgaaaaactctaaaaaaaaagaaagttccaccccccaaaatacattgaaaaactctaaaaaaaagaaagttccaccaaaagaatccaacagacccaatggtttaaaagttttgttttgttctgacaa

SEQ ID NO: 44127 - DNA, 332 bp, Homo sapiens
gatattctagaaggattgagctgggtattgaaaggtgaagagtgaggtttggctttaattttcagtgacccagatgctaaaagaccacagatggaagccgtagtattagatcaggacctcactaggctgtgcagtaaccatcatgttttgtttgcaacagataattcgtgtccagtccccagatggagtgaagcggatcacagcaacaaagagagaaacagcagcaacatttttgaaaaaggtatctgtggcctgggtattgaccctcaggatatttttcatcctctactcttactgccatcgataccttttctcttttcctcgttttctta

SEQ ID NO: 44128 - DNA, 331 bp, Homo sapiens
  misc_feature (1)...(331): n = a,t,c or g
gaagaaagagacgcacattttctaaaggagaattaagaattacctgtgggtttctttcaactagcataaaatgttcttattccagatatccgtatacctaagtccctcaccaccctgccatcttgctccaatgtgaactcttctaaagagcttacatcgatgattatttaaaatcaacctacgtctatactaccacagacctcttttcttttttatctattttagtttgtccttttttgctgtaatactaatcatcttgcaccaatctactataatttacatatttactgnnnnnnnnnnnnnnnnnnnnnnnnnnnnnnnnnnnnnnnna

SEQ ID NO: 44129 - DNA, 336 bp, Homo sapiens
gggcagctcaagcaggtttccaagttcctgaagtatttgcatttgtaattaataaactggatgtagaaggcttgtttggggtgggggtagggtggtggtataactagtatagttctctttttctcctcacttctggaaggtagctggttgctgatatagtggatgggtatgccattattatctcagaacagttaagggaagaaaatgtttggcttctaccctgttctgaatgaattattagagcacaatattagcatacatgaatcttcaaatttgagaatcctacttcatggatttctcttgaatcaaatcctgttgggaatcatggaagtctag

SEQ ID NO: 44130 - DNA, 336 bp, Homo sapiens
gcggcacgaggtgaaatagaatgaacaaaatgaagtttgcagacctacctttgccaacccctcatctcttaggacccagagttcaacaatacagatcagattgacctgtatgatgatgtgctgacagccacctcacagccctcagatgacagaagcagcagcactgaaccacctcctcctgttcgccaggagccatctcccaagcccaacaacaagacccctgcaattctgtatacctacagtggcctgcgtaatagacgagctgccgtttatgtgggcagcttctcctgggtgagtgtgggtaaccaaaaatgcttaggggtgggctggagggag

SEQ ID NO: 44131 - DNA, 333 bp, Homo sapiens
gcacaacttttactggtatcaatatttggctggctggagctggtattgagagaacaaatatgacaactgtcttagaagtgacagatgttccaagaggcagttttcctcccagaggtgtgtttgcatgtatttatttctccttcgtagatttccttcatctttagcattctgattctagttcacgaaagaatatcttagggaattaaaaaggagaaatgaaaagagtatctcacagaaaacaaaaaggacaaacttcagcagcagccacctgagagtctctacaataagcctgatatcgcaagtaaagcccgactcgtttcgtggggacattga

SEQ ID NO: 44132 - DNA, 329 bp, Homo sapiens
gctggaattctcaaacactgacagaggaagtgtaaatcaatactaccactttggaataacgttgggtattatatactaaagctaaatataggtataacccatgacccagcaattcctttcttagttttatacccatcagaaatgcatacacatgcatactaaaagacaagtatgagaatgtgcataacaacactattcataatggctataaactaaaaattcaaatgctcataatcagaagaagagaaggcaaattttggtattttacataatgattactatacagcaatgagaatgaacatctgcagctacacacaacatggataaat

SEQ ID NO: 44133 - DNA, 329 bp, Homo sapiens
ggggtgctcgaacctcagcccttgtccccaatgggagctggacccagccataggtgggcagggaaaaggcctgaaagaaagttggccaggcaggcttccctaaagtgtgtccatcatcagtcccacttctgggactatggggtagatttcgggaactgtatataacctgccttctgagcctgctctgccataaaaatttggcttaagatcctctagcttaaaacctccaagagctaaatgtagaatctaggtggtaggtatatgggagatcacgctacagttctttttacttttctgtgtttgaaaatgttcataataaaatatgcagg

SEQ ID NO: 44134 - DNA, 337 bp, Homo sapiens
  misc_feature (1)...(337): n = a,t,c or g
gnnnnnnnnnnnnnnnnnnnnnnnnnnnnnnnnnnnnnnnnnnnnnnnnnnnnnnnnnnnnnnnnnnnnnnnnnnnnnnnnnnnnnnnnnnnnnnnnnnnnnnnnnnnnnnnnnnnnnnnnnnnnnnnnnnnnnnnnntcaatgtttcagtgtaggtattataagagaaacatattaataacacttaaatgcaagtattataaaagaaacaagtgttaatcttatgatacctgttatttattgatttttacggtttttaaatctgattctacttgtattttaaaacaattttaccttaaaattaacaatgtggaatttacacagatacacntaatta

SEQ ID NO: 44135 - DNA, 337 bp, Homo sapiens
gcggcacgagaaattaatattccttgggtctttcaaatgaatgtttcaatgtgaggagcgaagtactgggaaatcgagggattttccacaatccccaagcagcttactcagtggaacctctgtttccccagctatgaaggaaatagcatcctacattccgtaaagtgcttgaagaagctctagctgagaatgctgaattttacagtcattgttttatggttacaagggtatgtcttcagggctctgttcattttccctcttgattttctcttttgaagatgccttgcccagtggcatggaaagaagcccacttgatgataggagcctgactatgaat

SEQ ID NO: 44136 - DNA, 325 bp, Homo sapiens
gctggaagaatgttttcaggcaaaccttacactggaatgaactgctgcagaggaaatataactctcactgtagacctacagagctagaactgggatcaggcttctcttccaattgaagtctttgagtcttctaggtgaaacctaatggttattgcaagaagcaatgttgtcattctaaaatccagaatcttgaatctataatcattctagaataacacagggctcatggtgagccagtagaaaacttcctggatccctttatctccttggataaacaaaataatagataagtttctgttgatttctgtaattctgtatttgctgg

SEQ ID NO: 44137 - DNA, 331 bp, Homo sapiens
ggtggacaacacaaacctggtccccaggctctggcccagagcaggggctgttgccgaaaggctgtggagcaacaagttgacatctgacctgacatttgcctatgaacgtttgtcacacttccgctgtgaattgctgaggcgaggtgtccaggcccaacccctcaatgtaggcttctgtgagcaggagtttgaacagacctgagccccaggcaccgaggagggtgctggctgtaggtgaatggtagtggagccaggcttccactgcatcctggccaggggacggagccccttgccttcgtgccccttgcctgcgtgcccctgtgcttggaaa

SEQ ID NO: 44138 - DNA, 340 bp, Homo sapiens
  misc_feature (1)...(340): n = a,t,c or g
gaagagaaggaaggacattctgtctgactaaatgggaaatcagagtgagcataagctcaaagaaagaatgcacagaagcgcagaagattttttcagaaaaaaatgagcccagctggctaaagtacagagaacatttatggcattgcggtagcattgaaatatggtcannnnnnnnnnnnnnnnnnnnnnnnnnnnnnnnnnnnnnnnnnnnnnnnnnnnnnnnnnnnnnnnnnnnnnnnnnnnnnnnngtgaggactgtaaaaactacactagaattgataattaagaagtcactattgtttttaagaattcaattttagttcatcagccangtggaagc

SEQ ID NO: 44139 - DNA, 338 bp, Homo sapiens
ggactgcatagggctcggcgtggaggtgatgtcaattaaagtgtctagcccagcatctatggcataaaatagggacccagaaaatgtcccttccctatgaatgccctttacgtttggaaacagctatcatatgtctcccctgtctcctatttcttgttaaatatttcagctaatttaatggtatccttaaatgacttgatttcagagccctcttctatccctcccctctgcaaagtctccatctgttaaaaccccactcggggtattgcataaccagctcgcagaatcagcagcacgctcctgtttgctcattcatctgttaattcattcactgagta

SEQ ID NO: 44140 - DNA, 339 bp, Homo sapiens
  misc_feature (1)...(339): n = a,t,c or g
gggctagcaccatgagcttcaataccctgtcattaaaaatgtaaaaggtatggtttcattaacttcttaaaaagtttgnnnnnnnnnnnnnnnnnnnnnnnnnnnnnnnnnnnnnnnnnnnnnnnnnnnnnnnnnnnnnnnnnnnnnnnnnnnnnnnnnnnnnnnnnnnnnnnnnnnnnnnnnnnnnnnnnnnnnnnnnnnnnnnnnnnnnnnnnnnnnnnnnnnnnnnnnnnnnnnnnnnnnnnnnnnnnnnnnnnnnnnnnnnnnnnnnnnnnnnnnnnnnnnnnnnnnnnnnnnnnnnnnnnnnnnnnnnnnnnnnnnnnnnnnnnnnnnnnnnnn

SEQ ID NO: 44141 - DNA, 326 bp, Homo sapiens
gctctttgtggttgctgctgataaaactcctttgacctgacgattgctctaagtcctaattgccatatttatattcccatagtaagagtgtttggagatagtgtttgagcttttttgctggtgttaaaaatgcataatgaaagatggcagagagaggcatattatatccaattcatgagttgtttgtgttaacagaaagcttattttaatcacttaacattgttgatttgtctaatcacagtagcgctattgattaggagcctgacctttagatggttgacttgtgagtgtattcaatatggtgaaatatggtgttgatatatggc

SEQ ID NO: 44142 - DNA, 324 bp, Homo sapiens
  misc_feature (1)...(324): n = a,t,c or g
gccgagagagggtaaataatttgctcaaatgttcacagttagtgatttaactggttttggatcctgctgtatctacttgaccaagagtacttcattacagagctgttatttaaaaagccaannnnnnnnnnnnnnnnnnnnnnnnnnnnnnnnnnnnnnnnnnnnnnnnnnnnnnnnnnnnnnnnnnnnnnnnnnnnnnnnnnnnnnnnnnnnnnnnnnnnnnnnnnnnnnnnnnnnnnnnnnnnnnnnnnnnnnnnnnnnnnnnnnnnnnnnnnnnnnnnnnnnnnnnnnnnnnnnnnnnnnnnnnnnnnnnnnnnnnnnnnn

SEQ ID NO: 44143 - DNA, 331 bp, Homo sapiens
gcaaggctactatcacaagcctgtggggcaaggtgaatgtggaagatgctggaggagaaaccctgggaaggctcctggttgtctacccatggacccagaggttctttgacagctttggcaacctgtcctctgcctctgccatcatgggcaaccccaaagtcaaggcacatggcaagaaggtgctgacttccttgggagatgccataaagcacctggatgatctcaagggcacctttgcccagctgagtgaactgcactgtgacaagctgcatgtggatcctgagaacttcaagctcctgggaaatgtgctggtgaccgttttggcaatcca

SEQ ID NO: 44144 - DNA, 331 bp, Homo sapiens
gggagcctagagaatcccttactctgttccttacctttcaggaactgtgtgaaccacagagctactgccctatgcatcatcaggaccacaagactgagttgctgaggtgtcgaagccagagcaaagtgcaggaaggggagcggcagctgcgggagcagattgcccttctggtgaaggacatgagcccatgataacattccagccactggctgctaacaagtcaccaaaagacactgcagaaaccctgagcagaaagaggccttctggatggccaaacccaagattattaaaagatgtctctgcaaaccaacaggctaccaacttgtatcca

SEQ ID NO: 44145 - DNA, 332 bp, Homo sapiens
gggaaaaatataaatatttaatatcaataaaaattaacttcatgttatcttcaatcagaggaactaaaaaagtaacattaaaatttattattcaaaattaacaaaactagttgtgtagaaaagacataattatttaatatttccagtgatctttgttgtaagtttttagcatttatatttctgaaattattaaagctcaaaatttcactgagactcttgagacattctctatagaaaacagtagattttttttcaaacagaatataaagtgtataatagtctgttttcttttgcagtagaaaggatagtgtggcatggtggaaaagtctcat

SEQ ID NO: 44146 - DNA, 331 bp, Homo sapiens
ggtgtgagtgcaaaatgccaggtgtatttgtgagattaaccatgttaaggtggactttgtgtttcatagccacataaccacaaacgagttcaaggctagtaacccacagcttagcacacaagatctcatgtaggctgcacctttgctgacatttttgagccaactgagtgaactttacaaaaatacaacagcaaaaagtcacagatttttagttttccatttttgaattgtgagtgttccaaaattatatggatagcacctgttcttgatatttgggaaaaagcatacttctttaaaaaaaagatgtatgattagatttttatctcatgat

SEQ ID NO: 44147 - DNA, 325 bp, Homo sapiens
gcaatctggtgctattttgcagttttgtaagtggatttcctagggtctggagagggaactaacttggtttgttgtgagaagagcagcatttaaagtgaattttgtctgcagaagccaggattccagcagtatctagtgttgcattttctagtccagttccccattacactggatattgatttctttttgttgctgcctctcataaatgaaattaatttgtggtgtgtgctgtaatgttaggaaccaatagctttctttccctgcccctaccctctgagtcttcccatcttattatagtctgtgtggaaagaaaaagtaaacacct

SEQ ID NO: 44148 - DNA, 328 bp, Homo sapiens
  misc_feature (1)...(328): n = a,t,c or g
gacagattgatctggttcccatgcctgaaaccctgtcatctagcaggtctaccagtgttcctgggccannntcttagctncatgagtgagttnagctcttttngngttgactttnagggcctccagcagctccatgattntccaggacttnccagnctggcccccacggaattcacaggatgattctcatccagccctaagtcatgtatctagcctgnctccagcgggtaagccaggccctgagaaccatatgaaagggctcnccaganaaaatcagaggtgctaatgccagaatgctgcantancctccgtttgnccacaggctcac

SEQ ID NO: 44149 - DNA, 335 bp, Homo sapiens
  misc_feature (1)...(335): n = a,t,c or g
ggagctgtagctaatgagaatcataagatgcatcttagcctcaatgttctgagaaatgttgatgccagagattgtatttcaacagttaagatgctttaaggaatacaacttttgttgttatttactttggattaatgagctaatgttaatttttatagcttttctaattccagtagagtataagggtaattccttacaaaaaaagacaaaaaacaaactaacaaaaaatcctgtatcaatagggtaagnnnnnnnnnnnnnnnnnnnnnnnnnnnnnnnnnnnnnnnnnnnnnnnnnnnnnnnnnnnnnnnnnnnnnnnnnnnnnnnnnnnnnnn

SEQ ID NO: 44150 - DNA, 337 bp, Homo sapiens
gggtcttgagtcccacagactttctcagctgtagctgcttaattgattagtaatttcagggaacccctttgaaaaacagacaaatactagggctatgtttttaccaaatattttctcctcactgggtaaacaaagcaaaggttctgtaaatgttgcagggattacactcaaataacatgcagggatcaccatggcccatatcccattaacctgaaacatcatgaaccagaagcaagccctgggatctaggcctgtctttcctgcccacccagaaatggcaggtgacaggtagtgtggaccagggtgctggggtggatgctaggagataagcctgggt

SEQ ID NO: 44151 - DNA, 337 bp, Homo sapiens
  misc_feature (1)...(337): n = a,t,c or g
gcagtaacttatatggaattgtcatcattttgaaaaacctaaatccactttgaaatattttcaatgttctaattataaattgaagcttctatttagtaccttaccatattcagctgtgatacattgcattatattgttttcagatcagtggttctttctttggttcataggttaaattgtgatataaaaatgtaacagttaaaagaatacttnnnnnnnnnnnnnnnnnnnnnnnnnnnnnnnnnnnnnnnnnnnnnnnnnnnnnnnnnnnnnnnnnnnnnnnnnnnnnnnnnnnnnnnnnnnnnnnnnnnnnnnnnnnnnnnnnnnnnnnnnnnnn

SEQ ID NO: 44152 - DNA, 340 bp, Homo sapiens
  misc_feature (1)...(340): n = a,t,c or g
gaactggctaaaaacttgttctaagaacagtcactcctaccactctgggtcacagtcatccaaaggagaggaatgagaaaggaattagnnnnnnnnnnnnnnnnnnnnnnnnnnnnnnnnnnnnnnnnnnnnnnnnnnnnnnnnnnnnnnnnnnnnnnnnnnnnnnnnnnnnnnnnnnnnnnnnnnnnnnnnnnnnnnnnnnnnnnnnnnnnnnnnnnnnnnnnnnnnnnnnnnnnnnnnnnnnnnnnnnnnnnnnnnnnnnnnnnnnnnnnnnnnnnnnnnnnnnnnnnnnnnnnnnnnnnnnnnnnnnnnnnnnnnnnnnnnnnnnnnnnnnnnnnnn

SEQ ID NO: 44153 - DNA, 345 bp, Homo sapiens
gctgagagaaggcggtcctctggcacacctaggatggggaaggtactcccttggaagtcccaagctggcacttctggatctccatggcaattttcttgcccatcactccatggagatcagaatatcactctattgtgtcccctcaacactgaaggagtgtctcaataagaaaagttgagtcaaaacactgtaggaattgagaggttccccacttgcactacccttgtaaaccaagagaagatgttaaaaaataaaacgataatgcttcctgaaggtgtcttcccatctttacactagatgggttcaattgagaggaattactggactgtggaagttgaagactgt

SEQ ID NO: 44154 - DNA, 342 bp, Homo sapiens
ggtagtgtgaagattttctccagacacgactgctgaagttagagaatagatgcaaggggctggctggtgctcagggtgttggggggttaaaaagggtggacacctagagagataacagcttctgcaaagaccacggggcactagtggacattggcatatttggggaacagcatagagagtactttgacatggttggagtgtcgtgtgcttaagggaagaaataatctgagaaatgagaggtaagctgaaaaactaagccttgaccagatgcagaagagtgtataagccacgtttgaaagtctttttcctgagaacagttgaagggttttaagtgggaaagtc

SEQ ID NO: 44155 - DNA, 341 bp, Homo sapiens
gcacatgaataaatcgctatcttggccaatatttttccctctcaaactctatggacttggtccagcccttaaggttgattgtaaatgggcggggaagaatttggtgggttagaaccttccattatgctctgtgtgtgctggggatactgtgttcatagcttccctctgaacagctgtgcagggcaggcagggagatctcaaacctgagtctggaaatgggagggcatatagccatttttaagtgttttccacctttggtcaaataaaaagaaatctgtggtgcatgctcactctttctctctctatccccatctctagccatctccctttctttctctctt

SEQ ID NO: 44156 - DNA, 334 bp, Homo sapiens
  misc_feature (1)...(334): n = a,t,c or g
gcggcacgagaaagaaaaaaagaaaaagaaaaagaaactgacctcagtgatagattagcctctctttatagcacagaacccctgagagtgtaagnnnnnnnnnnnnnnnnnnnnnnnnnnnnnnnnnnnnnnnnnnnnnnnnnnnnnnnnnnnnnnnnnnnnnnnnnnnnnnnnnnnnnnnnnnnnnnnnnnnnnnnntccccacccccatctnnnnnnnnnnnnnnnnnnnnnnnnnnnnnnnnnnnnnnnnnnnnnnnnnnnnnttgctgctttagagagtctaggacaaatggttcctctgtgctttgtaaatacttagagaagtgcattc

SEQ ID NO: 44157 - DNA, 343 bp, Homo sapiens
  misc_feature (1)...(343): n = a,t,c or g
gattgttcaggttttttattttgaactgtgaaatgtatgcttttcaaaccttggagcccccgttctggtgtgataaagttaggccctggaatgatgaggcagacccatatctaccccatnnnnnnnnnnnnnnnnnnnnnnnnnnnnnnnnnnnnnnnnnnnnnnnnnnnnnnnnnnnnnnnnnnnnnnnnggagagctgggtggcaaaaagaaattgaagaattaagagtaggaaaaacacnnnnnnnnnnnnnnnnnnnnnnnnnnnnnnnnnnnnnnnnnnnnnnnnnnnnnnnnnnnnnnnnnnnnnnnnnnnnnnnnnnnnnnnnnnnnnnnnnnnnn

SEQ ID NO: 44158 - DNA, 340 bp, Homo sapiens
  misc_feature (1)...(340): n = a,t,c or g
gtagctatgtgttcttggtcaagttgcttaaactcttttttcatctacctaataattatcgtaacagaacctcagaagacttttgtgaaaatgaaataaaatgtaaannnnnnnnnnnnnnnnnnnnnnnnnnnnnnnnnnnnnnnnnnnnnnnnnnnnnnnnnnnnnnnnnnnnnnnnnnnnnnnnnnnnnnnnnnnnnnnnnnnnnnnnnnnnnnnnnnnnnnnnnnnnnnnnnnnnnnnnnnnnnnnnnnnnnnnnnnnnnnnnnnnnnnnnnnnnnnnnnnnnnnnnnnnnnnnnnnnnnnnnnnnnnnnnnnnnnnnnnnnnnnnnnnnnnnnnn

SEQ ID NO: 44159 - DNA, 341 bp, Homo sapiens
gtgcacatctcagcccaagtctgagggctgccagactttgagaactgggcagtgaagaggtgaatgcaatagaggactgatatgagcaactgaagacaaatgaatccatgcaagggagccacgggaaataacacaatcacttccgggtcatctccttgcatactgaatgaagaaaatggattgaaactaagattctgcattggaacaaacaccatgcaccaggtccaaagatggacttgcctgaaatacttgcctatttatgcaaaattattcttagaatgagagggccgttttctaattttcttagcctgacacaggatcaatagaaaactgaatgtgcc

SEQ ID NO: 44160 - DNA, 327 bp, Homo sapiens
gccattctgatattaaatctgatattaaatcttttgttagaagcttgtaagattttcagtgttctgaaacttcttgttactatggcttgatgtgagtgtgtgttcattcatggtattggtcacttggtgggccttttctatctagaaaacagtgtcctttgggaattttttggaattatttctttgatcatttcctccctgttttctctgttcccttttttaggaatgtttgttatgcagatataacttgcctgaactggtcttcgaatttaaaagtaacctgttcttattttacggttgcagtttcattctttatatatttgagga

SEQ ID NO: 44161 - DNA, 347 bp, Homo sapiens
gggagccgacaagaacaactccaaaaggagcaagagaaagcctttttcgctcagttacaactagatgaagagacaggtgaatttctcccaattcagccagcccagcacatccagtcagaaaccagtggatctgccaactactcccaggttgcccacattcccaaatcagatgctttgtactttgatgactgcatgcagcttttggcgcagacattcccgtttgtagatgacaatgaggtttcttcggctacgtttcagtcacttgttcctgatattcccggtcacatcgagagcccagtcttcattgctactaatcaggctcagtcacctgaaacttctgttgctca

SEQ ID NO: 44162 - DNA, 330 bp, Homo sapiens
gagttaactttctttgctgctccctccaagtctcttctgcccttgctccctttaatgagtattttggcatttatttgtcttgttagttaggcttttattccatgctttatggccattgactttcttcaccactgtgaatctaatgttctgtgcttagtgttaaaaaatgttgagcaaataaatgctgtttctttttttactgttcaaaactgattcagtcaaggaatatgattgtgattaatcatattcagttccagataccgcagtcaacatggcaccacacatagtatgcatagtgtatagcactttatattataatagttagtactg

SEQ ID NO: 44163 - DNA, 333 bp, Homo sapiens
gctttccaattctcataacagttcttctgaggctctttattaaaccgctttctactgtgtatctcagtactttgcattcatgcctcaccacttctgcttgagggcaggatctgtgtgaggtgtagagtcatagcctccaatgggcctagcacatactaaacacctttaaaagatcaagattttccacatcattgtgagccactcactttaccactgcagataccactgcaggtgtccacagtggtacagacttccttttctccaaatgcactgtgcaagaagtaagtagaataattgcgaacatctttttcacatatctcccaacttcatctc

SEQ ID NO: 44164 - DNA, 259 bp, Homo sapiens
  misc_feature (1)...(259): n = a,t,c or g
gtgaagtggctaaagtgttgattgattaagactgagaaggatggttggctgggtggggaggctggatagagggaaaaaggctgggcaggcagtatttttggtgttggagtgagaaagaactcctcactctactcctcagagtcaacttcagggatgggacaggaaatggtacctgaggttcatttctggtccattntgtccttttttccatttcctcagaaccctantgganaantccatgaacctttncgtggggcct

SEQ ID NO: 44165 - DNA, 332 bp, Homo sapiens
gcatttaactaagagtcagtttcctcttccataaaatggggataataattctatccttgtttttctctctagattgttgtaagaatcaaatgagataacgttgtaaaagcacttatttgtttattggaaaacactgtataggtgtgagtggtctattattatactaccattgcttagttgggggccagtttgtcactgaaattcactgtccattgtgtctgttgagactctctttagcttctgctctagagctttatgcttgagctccagccaacacttgggctcatttcccaggctctttaaagatcagaaaacctttaaagatcttcaaa

SEQ ID NO: 44166 - DNA, 322 bp, Homo sapiens
gacctccagtccattcccaagaagacccagcactacttcctgctctgcttcctgctcaagttcagcctcaccatcagctcctgcctcatctgctttggcttcacactgcagagcttctgtgacagctcccgggaccgcaacctcaccaactgctcctccgtcatgctgcccagcaacgacgacagggctccagcctggtttgaggactttgccaatggactgctgtcggctcagaagctcacggccgccctgattgtcctgcacactgtcttcatttccatcacccatgtgcatcgcaccaagcccctgtggagaaagaccc

SEQ ID NO: 44167 - DNA, 330 bp, Homo sapiens
  misc_feature (1)...(330): n = a,t,c or g
ggtgacctttctccctgggatgtggagtcttcggcaacgtgtcctgaagggactggcccgcactccaggaccccacttggcatttcttgtctgttgccttcagactatctcagataggcctgtgcccctgactagcccagtagcacttgtctctagaaaaaggaagctcctgcccaacctggcttgtggaccagtaatatctgtggcctaccacccattcaagaaaacgttacagcnnnnnnnnnnnnnnnnnnnnnnnnnnnnnnnnnnnnnnnnnnnnnnnnnnnnnnnnnnnnnnnnnnnnnnnnnnnnnnnnnnnnnnnnnnnnnn

SEQ ID NO: 44168 - DNA, 336 bp, Homo sapiens
  misc_feature (1)...(336): n = a,t,c or g
gtgagggccaaggggagctggaagggtctctcttgttagcccaggaagcccagggaccagtgggtccccccgaaagcccctgtgcttgcagcagtgtccaccccagtgtctaacagtcctcccgggctgccagccctgactgtcgggcccccaagtggtcacctccccgtgtatgaaaaggccttcagccctgactgcttcctgacactccctccttggcctccctgtggtgccaatcccagcatgtgctgattctacagcaggcagaaatgctggtccccggtgccccggaggaatnnnnnnnnnnnnnnnnnnnnnnnnnnnnnnnnnnnnnnn

SEQ ID NO: 44169 - DNA, 327 bp, Homo sapiens
ggcagccttggagaaggagcatgaggcgatcaccaaggtgaagtatgtggacaagatccacatcgggaactacgaaattgatgcctggtatttctcaccattccccgaagactatgggaaacagcccaagctctggctctgcgagtactgcctcaagtacatgaaatatgagaagagctaccgcttccacttgggtcagtgccagtggcggcagccccccgggaaagagatctaccgcaagagcaacatctccgtgtacgaagttgatggcaaagaccataagatttactgtcagaacctgtgtctgctggccaagcttttcctgga

SEQ ID NO: 44170 - DNA, 326 bp, Homo sapiens
gggttagggttgggacgtgtggggtaggtggggatctgggctgtatgtcatttccatttgtctgccctggaattgtttctggtaaactgataaatgtaagtaaagagtttttctgagttctgtgaattgtagtaaattactgaacctgatgcaggtgtgtgggatcccctgagtaggtagaggcactggcagaaatacgggtaacctggacaccccattctctgcttgcatctgtgggaacagtcttgtgggctccacactaagtctaggtagatataatggaattgaatcgttggacaccccggtggtggtgacttggtgtcccg

SEQ ID NO: 44171 - DNA, 204 bp, Homo sapiens
  misc_feature (1)...(204): n = a,t,c or g
gagaagacttgagggtcctattgatgaactttgaaatattgattcagagaagtctgcttttctattttgttttagctttaaatttccctgtggcaagtctagattttttttcagttaaaattatttctgctgtatttgtagaacagaagttttgggattttgtanaannntgaccnnagactannanttnccatgccnccccgt

SEQ ID NO: 44172 - DNA, 338 bp, Homo sapiens
  misc_feature (1)...(338): n = a,t,c or g
gnnnnnnnnnnnnnnnnnnnnnnnnnnnnnnnnnnnnnnnnnnnnnnnnnnnnnnnnnnnnnnnnnnnnnnnnnnnnnnnnnnnnnnnnnnnnnnnnnnnnnnnnnnnnnnnnnnnnnnnnnnnnnnnnnnnnnnnnnnnnnnnnnnnnnnnnnnnnnnnnnnnnnnnnnnnnnnnnnnnnnnnnnnnnnnnnnnnnnnnnnnnnnnnnnnnnnnnnnnnatttgcggagggaaaaaaaagtcacgcttcagttgttgtagtataaccttggtatattgtatgtatcatgaattcctcattttaatgaccaaaaagtantaaatcaacagcttgtaat

SEQ ID NO: 44173 - DNA, 332 bp, Homo sapiens
  misc_feature (1)...(332): n = a,t,c or g
ggatgaatacataaagcacagaaaannnnnnnnnnnnnnnnnnnnnnnnnnnnnnnnnnnnnnnnnnnnnnnnnnnnnnnnnnnnnnnnnnnnnnnnnnnnaaatgtacaaaaccgaaagtaaatgctaatgtaatctatggactttgggtgacaatgatatgtcaatatagtttcgtcaattgtaaaaaaggtaccactgtggtgtaggatgtccacagtgggggagcttgtgactgtgtggaggtaatgggnnnnnnnnnnnnnnnnnnnnnnnnnnnnnnnnnnnnnnnnnnnnnnnnnnnnnactctttgaaaaaaaagtttattaac

SEQ ID NO: 44174 - DNA, 338 bp, Homo sapiens
  misc_feature (1)...(338): n = a,t,c or g
gccattttatattactttactcttctctgccatggacgactcccctcctccttaaacatgtcttaggacctttgcacttgcgcaaacatataacttggacattccttagttatattagacacactgcacataattagaatttggttcctggagttctgttgtaatctttctctagtgagcattgtgattaagaaattcgaggannnnnnnnnnnnnnnnnnnnnnnnnnnnnnnnnnnnnnnnnnnnnnnnnnnnnnnnnnnnnnnnnnnnnnnnnnnnnnnnnnnnnnnnnnnnnnnnnnnnnnnnnnnnnnnnnnnnnnnnnnnnnnnnnnnnnng

SEQ ID NO: 44175 - DNA, 330 bp, Homo sapiens
  misc_feature (1)...(330): n = a,t,c or g
gagaacttgtagtttgcatagtatccgacagatgtcaccgtatttaccttgaaaatttaaaatattttgcagcatccttgtgaatttgatgtgataccccaaggcacctgagcacacagtttgggaaccattgccttggaatattaatcatagttacctccagagagtgaaattttggataattaaaaaaannnnnnnnnnnnnnnnnnnnnnnnnnnnnnnnnnnnnnnnnnnnnnnnnnnnnnnnnnnnnnnnnnnnnnnnnnnnnnnnnnnnnnnnnnnnnnnnnnnnnnnnnnnnnnnnnnnnnnnnnnnnnnnnnnnnnnnnnnn

SEQ ID NO: 44176 - DNA, 339 bp, Homo sapiens
gaaacaaaacgtttgtatgaaattatgttttttctttccaactttagcattttgtgatgtttaccaatgtgtttgtaatccaatgttatcattttctctagaggaaggagacctttgtaccccacatcacctaagagacctagctaattactctttcacctttagtttatcccttcccccctttactacatgccacttcatcgaaggaatgaaacttaacaagtgcgttttagcttaacatctacagtatattgtttagtttactgtttgacttgaaaatattctgaggggttaaagtactgtaaggtacatgtcagggcttacttgaatattctaatt

SEQ ID NO: 44177 - DNA, 329 bp, Homo sapiens
  misc_feature (1)...(329): n = a,t,c or g
ggcaccacattccggaacgggaagaaggagctgtctctctcttctgaggggtaggcaggtgcttccgaatcgcggaatgtaggtgctcataagctggagacccacggaaagaacctagaagctccgagcggttgcagacagcactgcattgagccaacgactcctgctctactgatggtgattccacagctttgtgaggaataagttaagatgaagtcagtgaagttttctgcgaattgcaaacattgtatcaggcgttaccaattttattanttcgaccacnacttnactcctatatttngaaaanctgctnncaaaccgaacatagc

SEQ ID NO: 44178 - DNA, 334 bp, Homo sapiens
  misc_feature (1)...(334): n = a,t,c or g
gcttacttatggagttatctcccaaggagaggactcagacacaggtggttgctgtgtaatatgttacttcccaacaatggacctcatttggctaggcatcacaatcacctagggagtcggtgcaaaacaaaatatcccagtcccctcccctgaaacactgactcaggaggtttggttgggggccaggagtctgttcctaaatattccaggtagttctggtgcaggtaagtggccctgagacagtatgttgggaaatgctgacgtaaaggtatcagnnnnnnnnnnnnnnnnnnnnnnnnnnnnnnnnnnnnnnnnnnnnnnnnnnnnnnnnagg

SEQ ID NO: 44179 - DNA, 333 bp, Homo sapiens
gctgatgctcaatcggaagaggtgaataactgcaaccttagttgtttttctagagagtgagagtagaattaggcaattgtccttcaaatactgttggaaggaaaattccaggctgtcaaagggaattgttaagtgtgcacgttgctcaacggatccatccctctccactttctccacaaaaccaggtgaccacaccttcccctcctaccctaccgaaccacgggacctaggtccccaggaacagctgtatgtgtaagagaaagccacttggaggggctaccgtgctgggagtgtgggtgcgcgtgggtcccggggagctatctgcaggctcga

SEQ ID NO: 44180 - DNA, 329 bp, Homo sapiens
  misc_feature (1)...(329): n = a,t,c or g
gagtctctcacatttaatcccaacacaatgctgtatacaaaccaagtgactcagaataagaatgcaaaagtaaaccagacaaatgcaagccgaagtagtctnnnnnnnnnnnnnnnnnnnnnnnnnnnnnnnnnnnnnnnnnnnnnnnnnnnnnnnnnnnnnnnnnnnnnnnnnnnnnnnnnnnnnnnnnnnnnnnnnnnnnnnnnnnnnnnnnnnnnnnnnnnnnnnnnnnnnnnnnnnnnnnnnnnnnnnnnnnnnnnnnnnnnnnnnnnnnnnnnnnnnnnnnnnnnnnnnnnnnnnnnnnnnnnnnnnnnnnnnnnnnnnnnnnn

SEQ ID NO: 44181 - DNA, 337 bp, Homo sapiens
  misc_feature (1)...(337): n = a,t,c or g
gatctgcagtgggccagctagagatccaggagagctgatggtgtagttccagtctgaaggccagcttggataccctagaagagctgatgtttctgttccagttcagaggcaggaaaagactgaggtcttagttcaagcagtcaggcaggaggacttctcccttacnnnnnnnnnnnnnnnnnnnnnnnnnnnnnnnnnnnnnnnnnnnnnnnnnnnnnnnnnnnnnnnnnnnnnnnnnnnnnnnnnnnnnnnnnnnnnnnnnnnnnnnnnnnnnnnnnnnnnnnnnnnnnnnntactgtatgaccaaatatctgggcatcatgtggcctagtcaagt

SEQ ID NO: 44182 - DNA, 326 bp, Homo sapiens
  misc_feature (1)...(326): n = a,t,c or g
gcattcaagtgcctgtgttttttcatcttgtttaggaatgttttgagattaatgtgcttaaaagtcctacgtgactgattttaaacattgtgataaaattaattttcagtagaatagttgaatgtgttaagataggattttatgttagagataccagaatgctggtattctactacttgtgcaatatatatgttttaaaaaacaaatttgagaatacatttaatcatagggatatagatataagcacctctctaaagaatctttagtttccgacgttgaattatagaccagtttgagtaagtactgcttttttttttngganacgg

SEQ ID NO: 44183 - DNA, 335 bp, Homo sapiens
ggaggttatcaataagctcctagtccagacgccatgggtcatttcacagaggaggacaaggctactatcacaagcctgtggggcaaggtgaatgtggaagatgctggaggagaaaccctgggaaggctcctggttgtctacccatggacccagaggttctttgacagctttggcaacctgtcctctgcctctgccatcatgggcaaccccaaagtcaaggcacatggcaagaaggtgctgacttccttgggagatgccataaagcacctggatgatctcaagggcacctttgcccagctgagtgaactgcactgtgacaagctgcatgtggatcc

SEQ ID NO: 44184 - DNA, 335 bp, Homo sapiens
gacttgctagctctttccctgtgccgggcgccccgccaggtgctggggccacatcagggagcacggcagacacacctacagtctcacagagctcacaggccagcagtcacgggcatgccttagatgcccacatgcgcatcccactccgctgctgcctggctggaggagactggcccgtgcgctcgtccgcaccgcccccatggcgctcttccttcccaccctctcctccctttgcctcccctcggcaccccgacttcagttctcccaggtccctctccctgtggttccctcgcctctcctgcatgctcttccctcaagttcgagtctctgcaccc

SEQ ID NO: 44185 - DNA, 333 bp, Homo sapiens
ggatttcataagcattgtttctggtttatttgttcagcctaattgaagatagagcatgttttgttcaccatttaagttttctagggagcatgtggtgtttacagatacctgggggaatagcctagaaggcacagcccatgtctggagggcacgagatgacatgggtgagcctctgcgaatcctgactccaactgttccatggaggtgggaatgggggtcatcatatgaatagatgcggattgggagaggattggaaccagttcttgccttaacccttttatcttgtatgagggcatgtcattatgtaagtagcaaagatctctgtgtgtacag

SEQ ID NO: 44186 - DNA, 337 bp, Homo sapiens
  misc_feature (1)...(337): n = a,t,c or g
gaactgattagaaaacaaatagaactgacaaaatcaaaaagctggatcttttagagagatgctgctcagtaaggtggccacaacccacgtgannnnnnnnnnnnnnnnnnnnnnnnnnnnnnnnnnnnnnnnnnnnnnnnnnnnnnnnnnnnnnnnnnnnnnnnnnnnnnnnnnnnnnnnnnnnnnnnnnnnnnnnnnnnnnnnnnagctgctgaacgtttgttggacagtgctgttttagagggaggaatcaataaaacagaaaaactaagacaaaggagggggagagaacaaatattgtagataaaattaagaatgaaggcctagcgcggtggct

SEQ ID NO: 44187 - DNA, 336 bp, Homo sapiens
gggaagaggaggagtaatggtgtctccagagactttacatcggttcctgtcttctgtgcacagcagcacttgccgctgtgcaggcccacctctttggctctttgggtgggagagtttttccagattttagatttttctaggttatggccattttgtgtcttttgaggttgtgctgtgggggtttgggtttgagggaagggagcagggtggcggttgaggaacgcttcagccttagctgctacctttcggcagcagtgaaatacaagctgcagcctcggctgccagggctcccttttgacttattgtcgccactgccccttggtgctgtgtggtccc

SEQ ID NO: 44188 - DNA, 328 bp, Homo sapiens
  misc_feature (1)...(328): n = a,t,c or g
gggtgcataagaacttcgacctccggccgggcgtcattgtcagggatttggacttgaagaagcccatctaccagaagacagcatgctatggccatttcggaagaagcgagttcccatgggaggttcccaggaagcttgtattttagagccagggggagctgggcctggtctcaccctggaggcacctggtggccatgctcctcttccccagacgcctggctgctgatcgccttccccacccaccaaccctcagggcaaagccaggtccctcncnttgnctgtgccaggtgangnnaanncatntcaacaggcctcagggntccttgtg

SEQ ID NO: 44189 - DNA, 327 bp, Homo sapiens
gaaacctcattggagtgtgtttcaaagataatgggaatgaggggtagtgagaagtatagaattctagatatatttgaaggtataccaaacagaatttgcctgaaagaaaggatgagcacaatgtaagaagggagaaaaaaagcagtcaaaggcaactcaaaagttttggccaaagcaactggagggatggagttgccattagcttagatggggaaaactgaacaagtgtgggagggaattgtaggagctcagttttggaaattttacattaaagatgcttattagatatctaagtggagatgtcaaataggcactttgatatcaggt

SEQ ID NO: 44190 - DNA, 328 bp, Homo sapiens
  misc_feature (1)...(328): n = a,t,c or g
gaaggacttaaatggacatttctctaaagaagatatacacatggccaacaaacattgaaaagatgctctacatcatgaatcatcacatnnnnnnnnnnnnnnnnnnnnnnnnnnnnnnnnnnnnnnnnnnnnnnnnnttaaatgtcaattgacannnnnnnnnnnnnnnnnnnnnnnnnnnnnnnnnnnnnnnnnnnnnnnnnnnnnnnnnnnnnnnnnnnnnnnnnnnnnnnnnnnnnnnnnnnnnnnnnnnnnnnnnnnnnnnnnnnnnnnnnnnnnnnnnnnaaaagacannnnnnnnnnnnnnnnnnnnnnnnnnnnnnnnnng

SEQ ID NO: 44191 - DNA, 330 bp, Homo sapiens
  misc_feature (1)...(330): n = a,t,c or g
gcgcctggaccccttctcctccttcagcaagcgggagcggcagaggaagtacctgagcttgagtccctgggacaaggccaccctcagcatggggcgtctggttctctccaacaagatggcgcgcaccatcggcttcttctacacactgttcctgcactgcctggtcttcctggtgctctacaagctggcatggagcgagagcatggagagggactgtgccaccttctgcgccaagaagttcgctgaccacctgcacaagttccacgagaatgacaacggggctgcggctggtgacttgtgnaatgataccccggggcctccccgtgacaa

SEQ ID NO: 44192 - DNA, 331 bp, Homo sapiens
gggagagtgcgtggtctgcctctgtgtaggtggcatgatggccaaatgacacatgaaagtgcttggtacctcttctgaccacatcatgtcagtttctttcctttatttattttgttaatgcgatccattttcaaatgttgttagtgaatgtttgaatgcccagtactgttcttggcatgttggaatgaagaataaggaaatgaggacaagatttggcctccatgagtctggattccagttctatgagggccagtaaacagacagccaagggatgagatggagccaaatatctggcaaagtttaaagaaggggaattctcatgggaataccc

SEQ ID NO: 44193 - DNA, 211 bp, Homo sapiens
  misc_feature (1)...(211): n = a,t,c or g
gcaaagacaatcccctggaacaaggtttgggaaccacttcccaagaattagagtgcctttgggatccaagaaaatgannnnnnnnnnnnnnnnnnnnnnnnnnnnnnnnnnnnnnnnnnnnnnnnnnnnnnnnnnnnnnnnnnnnnnnnnnnnnnnnnnnnnnnnnnnnnnnnnnnnnnnnnnnnnnnnnnnnnnnnnnnnnnnnnnnnnn

SEQ ID NO: 44194 - DNA, 342 bp, Homo sapiens
  misc_feature (1)...(342): n = a,t,c or g
ggagctttgtggtaggcagaatagtggccttccaaagtgtctatatctgaatccccagaacctaannnnnnnnnnnnnnnnnnnnnnnnnnnnnnnnnnnnnnnnnnnnnnnnnnnnnnnnnnnnnnnnnnnnnnnnnnnnnnnnnnncattgggtggctcagtgtaatcactagggtcattataagagggaggcaggaggatcagagttagagaaggacatgtgacagtggaagcagaagttggggtgatgtagcccccccaccaaggaaagagggaagactgcagaagctggaaaaggcatggaatggagtttgccctagaatctccagaaggaattttt

SEQ ID NO: 44195 - DNA, 343 bp, Homo sapiens
ggataaatcaaaaactctttcccttgaggaggctgtgacttccattcagcagctcttccagctcagtgtttccatcgctttcaacttcctgggaacagagaacatgaagagtggcgaccacacggcagccttttcttacttccagaaagctgcagcccgcggctacagcaaagcgcagtacaatgcgggcttgtgtcatgagcatggcagaggcacccccagggacattagcaaggtattcccctgcccccaagcctgccttctgtgctgggctgctgagattgatgtctagaaatgagcagtgggcagggatgggggaaagtttggcttcttttctccactt

SEQ ID NO: 44196 - DNA, 331 bp, Homo sapiens
  misc_feature (1)...(331): n = a,t,c or g
ggattcattcatgctgttgaaggtattagtagtttgttcttattgctgaagagtcttnnnnnnnnnnnnnnnnnnnnnnnnnnnnnnnnnnnnnnnnnnnnnnnnnnnnnnnnnnnnnnnntagtcttgagcctggcactatctgataggccttggtgttctattgaacataaaccacgtcacagagcaccgatatcagacagggccactctgtgaccacaatgggtcaggacaagaacaaggccactcagtaatcacgtctgaactgggaccgaaacaggaacattgttgaagccacaaagatgaccaaacatcctcccatgccgctaac

SEQ ID NO: 44197 - DNA, 333 bp, Homo sapiens
  misc_feature (1)...(333): n = a,t,c or g
gattttacttgtctgacaaaatataatgtacttttaaaactctatgcagctgttaatatcatgtatttaaaaacagaacattcnnnnnnnnnnnnnnnnnnnnnnnnnnnnnnnnnnnnnnnnnnnnnnnnnnnnnnnnnnnnnnnnnnnnnnnnnnnnnnnnnnnnnnnnnnnnnnnnnnnnnnnnnnnnnnnnnnnnnnnnnnnnnnnnnnnnnnnnnnnnnnnnnnnnnnnnnnnnnnnnnnnnnnnnnnnnnnnnnaagaggttnaactangatgaattgattgaaccctgatagcgcgacgtngtatatgagcttacatnacnccatt

SEQ ID NO: 44198 - DNA, 331 bp, Homo sapiens
ggaagccctgaaagagagagggcagaagtgcggggtggtcattaagtccatgcaggccgtggaggactgtggccaagagaatcaccaggctcctgtgcccccgcagcctgatgacctctccattgtgtgtttcacaagcggcacgacagggaacccaaaaggtgcgatgctcacccatgggaacgtggtggctgatttctcaggctttctgaaagtgacagagagtcagtgggctcccacttgtgcggatgtgcacatttcctatttgcctttagcacacatgtttgagcgaatggtgcagtctgtcgtctattgccacggagggcgtgtt

SEQ ID NO: 44199 - DNA, 338 bp, Homo sapiens
ggtgcagcgctcattgttccttgacgcagagtcccaaaatgaatatccaagagcagggtttccccttggacctcggagcaagtttcaccgaagatgctccccgacccccagtgcctggtgaggagggagaactggtgtccacagacccgaggcccgccagctacagtttctgctccgggaaaggtgttggcattaaaggtgagacttcgacggccactccgaggcgctcggatctggacctggggtatgagcctgagggcagtgcctcccccaccccaccatacttgaagtgggctgagtcactgcattccctgctggatgaccaagatgggataagc

SEQ ID NO: 44200 - DNA, 331 bp, Homo sapiens
  misc_feature (1)...(331): n = a,t,c or g
gctggtgggataagacaaaagtaaacagctatgaaataagcagcaaaaatgtcatttgaataataaagtattacagaaacgcagaaaaaggacagatcattcatttaacaaaactgtatagtagcattcctatctttcatataaagagtgaggttcnnnnnnnnnnnnnnnnnnnnnnnnnnnnnnnnnnnnnnnnnnnnnnnnnnnnnnnnnnnnnnnnnnnnnnnnnnnnnnnnnnnnnnnnnnnnnnnnnnnnnnnnnnnnnnnnnnnnnnnnnnnnnnnnnnnnnnnnnnnnnnnnnnnnnnnnnnnnnnnnnnnnnnnnnnnnnnn

SEQ ID NO: 44201 - DNA, 331 bp, Homo sapiens
gcaggaggtccgctggcgcatgcggaagctcaagtacaagcacctggccttcctggcagagtcctgtgccaccctctcacaggagcagcactcgcaggagctgctggctgagctgctcacacacctggaaaggcgttggacagaaattgaagattcccacacattagtgaccgtcatgatgaaggtgggacacctctcggagccactaatgaaccgcctggaagacaagtgcctggagttggtggagcactttggccccaatgagctgcggaaggtgctggtgatgctggcagctcagagccggcggtccgtgcccttgctgcgggccata

SEQ ID NO: 44202 - DNA, 329 bp, Homo sapiens
  misc_feature (1)...(329): n = a,t,c or g
gatnnnnnnnnnnnnnnnnnnnnnnnnnnnnnnnnnnnnnnnnnatatgacccagcaataccacctctgggtatgtatctgaaggaaatgaaatcagtannnnnnnnnnnnnnnnnnnnnnnnnnnnnnnnnnnnnnnnnnnnnnnnnnnnnnnnnnnnnnnnnnnnnnnnnnnnnnnnnnnnnnnnnnnnnnnnnnnnnnnnnnnnnnnnnnnnnnnnnnnnnnnnnnnnnnnnnnnnnggaggaaactcnnnnnnnnnnnnnnnnnnnnnnnnnnnnnnnnnnnnnnnnnnnnnnnnnnnnnnnnnnnnnnnnnnnnnnnnnnnnnn

SEQ ID NO: 44203 - DNA, 329 bp, Homo sapiens
gggaagaaacgaagactgatcacccacgctaggcactcgcggtccctggcaggcgctgggatgggggcttatggggtggcatcgtctctgggccctcctttccccctttgcctgttttcggatctgtggttcctttgaaagccagaacaatggatcggcttccttacccagcacccctccggtaggtgggtggccacgtggatgcctcgctggggcggtcttggaggcctggtctctgcctcgacgggagatccccgatcactggcattcaccccctgcaaaaatcggggcgacaatagctcactgcctacttgctgcagggagatgaa

SEQ ID NO: 44204 - DNA, 339 bp, Homo sapiens
  misc_feature (1)...(339): n = a,t,c or g
gatctgagagtcctttctccagctccaagagccaggagtcaggcagggcagggcccgacagcctgagagacggcatgaatggccagcaccacagttggcagaaacgcacccccaaggcgatttagactgcggtggccgggccgcaccatggcccccaatgtctggctgtctttccctaccatggcacccagccacacctctggccaggaagtctgtggcaggcctgtccccacagcctgggggccgtggggaagccgggctctcagggggccctctgtggcctggtctgaggcatancccattctggttccagctcagagccngtatntnggntgtcac

SEQ ID NO: 44205 - DNA, 343 bp, Homo sapiens
  misc_feature (1)...(343): n = a,t,c or g
gaaaaaagggggaaataacaggcattcaaaaaacagtggaaaataacaagtgttgacaaggatatagagaaattggaacatttgcatgtcactggtgaaaatgtataatggtgcagtgctttggaggacagtatgacagttcctaaagagattaaacagagaattgccatatgacacaccnnnnnnnnnnnnnnnnnnnnnnnnnnnnnnnnnnnnnnnnnnnnnnnnnnnnnnnnnnnnnnntaagtgttcacnnnnnnnnnnnnnnnnnnnnnnnnnnnnnnnnnnnnnnnnnnnnnnnnnnnnnnnnnnnnnnnnnnnnnnnnnnnnnnnnnnnnnnnnn

SEQ ID NO: 44206 - DNA, 332 bp, Homo sapiens
  misc_feature (1)...(332): n = a,t,c or g
gactgccttattccaacataagtttcagagctgtgggattggtcattagaaattcagactgaatttgtgttcctctgcaatgaaatcctttgcccagtgttcatgtcactctgtagacattatggagcagcctagaggccagaatcccagtgctctccttatgcctgctcttcctgggcttcgtgacactcttcttctccttttgtacttttatttttttagttaaaaaannnnnnnnnnnnnnnnnnnnnnnnnnnnnnnnnnnnnnnnnnnnnnnnnnnnnnnnnnnnnnnnnnnnnnntgttcttctccttttgttcatggctaatctt

SEQ ID NO: 44207 - DNA, 332 bp, Homo sapiens
  misc_feature (1)...(332): n = a,t,c or g
gaaatgataataaatcacctctcctaatcttcctggggcaatgtcaccctttgatttaaaacaaagcaaccccctttcccctaccactacggaaaagagcaagctcatttttccgtgtcctcctttatttaactccatttattgcttttggtataatttttccctggggaaggaggggaaattatgaaagaactagtaactttatgtcctcttgatgtattaggaaatnnnnnnnnnnnnnnnnnnnnnnnnnnnnnnnnnnnnnnnnnnnnnnnnnnnnnnnnnnnnnnnnnnnnnnnnnnnnnnnnnnnnnnnnnnnnnnnnnnnnnnnn

SEQ ID NO: 44208 - DNA, 337 bp, Homo sapiens
gaggagcctaaatgagataatagaaatctttcataatttgaccatggaaactaccactgttaatattttcttctatatgcggtgtaaaaagaaagatcataccatacacacagtttagcaatttgctttcacttaaaaataccttatgtacattttctcatatccttaaatatgcaacttacttttaaacaactatatcctattccattacatcattgatttaactatttccttgttggttccatctttttaatgaacacaaggagcattgtccaaaccattcttgtcatacatatttggttatttcttttaggttaaacttttagtactagaattg

SEQ ID NO: 44209 - DNA, 320 bp, Homo sapiens
  misc_feature (1)...(320): n = a,t,c or g
nnnnnnnnnnnnnnnnnnnnnnnnnnnnnnnnnnnnnnnnnnnnnnnnnnnnnnnnnnnnnnnnnnnnnnnnnnnnnnnnnnnnnnnnnnnnnnnnnnnnnnnnnnnnnnnnnnnnnnnnnnnnnnnnnnnnnnnnnnnnnnnnnnnnnnnnnnnnnnnnnnnnnnnnnnnnnnnnnatcaggcattgggctgtatttgcctatgggctatagtntgctaccnnctttttantcacnanttanatnccannncntnttaaaattntcagggacntcntattgntntaagntnngatnncagacttntnactctgctcttt

SEQ ID NO: 44210 - DNA, 339 bp, Homo sapiens
  misc_feature (1)...(339): n = a,t,c or g
ggattctgtttggaacagtttcctatttggctgcattctaggaggcctcctgacttattcatagtattgtcgcctggtggcattggtgtggcgtagcttgtcctgctacttgctaaagttctctttctttgagaaaactgaggaaccagaatgcttagagttcataaaataatctctaaaccatgttaggttaaaacaaaatgaccatctcacaaaaacgagtttagttgaatgctcaattccttacaaaatcttcannnnnnnnnnnnnnnnnnnnnnnnnnnnnnnnnnnnnnnnnnnnnnnnnnnnnnnnnnnnnnnnnnnnnnnnnnnnnnnnnn

SEQ ID NO: 44211 - DNA, 333 bp, Homo sapiens
ggcagaattcaattaatgcctatagacaaagcggtattttatgttcagaggaggaaaagatcacatcttgtaagatgtataggtgaaagtttcttgaaagcagtgatttttaattctaaaggggaagtgcgtattagttctcaacaagaaacagatggcactcaaactgtgatagttcaaagatttaatgaagactaattataaaggtgtgggtggggcattgtagggagatgacaagggatggcgtaataacctgcctggcaacagccccagggaggagaagagggagcagtgacctgaatccttaaggagagagctgtgtgaagaggcctg

SEQ ID NO: 44212 - DNA, 333 bp, Homo sapiens
gggaacgtctgaggttatcaataagctcctagtccagacgccatgggtcatttcacagaggaggacaaggctactatcacaagcctgtggggcaaggtgaatgtggaagatgctggaggagaaaccctgggaaggctcctggttgtctacccatggacccagaggttctttgacagctttggcaacctgtcctctgcctctgccatcatgggcaaccccaaagtcaaggcacatggcaagaaggtgctgacttccttgggagatgccataaagcacctggatgatctcaagggcacctttgcccagctgagtgaactgcactgtgacaagctg

SEQ ID NO: 44213 - DNA, 337 bp, Homo sapiens
ggccatattctttaccagtggaacaagtggatatccgaaaatgactgcacacacccacagcagttttggtttaggattatctgtaaatggaaggttctggctagatttgacaccctcagatgtgatgtggaatacctcagatacgggctgggcaaagtctgcatggagtagtgttttttctccgtggatccagggagcatgtgtattcacacaccatttaccccgttttgagccgacttctatcttgcaaacactctccaagtaccccatcacagtcttctgttcagcaccaactgtataccgaatgcttgtacagaatgataaccagctataagtt

SEQ ID NO: 44214 - DNA, 340 bp, Homo sapiens
  misc_feature (1)...(340): n = a,t,c or g
ggacaaatcaggtggctcccttctgtcacgtggagcacacagcgttttccatcatccatagctttcttcctgatggtgtttgcattattgcgccttcccaatctgcatgctgcgttgggcttgcggtgcctgaacaaggtttgctcccatgagctcaggcaccctaggatcccctgttagactattaggctgtccagcatggtctcctttcccttcttggtggtggtcttttccctttccagaatagaacagtgattcttaaaataagttagagcnnnnnnnnnnnnnnnnnnnnnnnnnnnnnnnnnnnnnnnnnnnnnnnnnnnnnnnnnnnnnnnnn

SEQ ID NO: 44215 - DNA, 332 bp, Homo sapiens
  misc_feature (1)...(332): n = a,t,c or g
gnnnnnnnnnnnnnnnnnnnnnnnnnnnnnnnnnnnnnnnnnnnnnnnnnnnnnnnnnnnnnnnnnnnnnnnnnnnnnnnnnnnnnnnnnnnnnnnnnnnnnnnnnnnnnnnnnnnnnnnnnnnnnnnnnnnnnnnnnnnnnnnnnnnnnnnnnnnnnnnnnnnnnnnnnnnnnnnnnnnnnnnnnnnnnnnnnnnnnnnnnnnnnnnnnnnnnnnnnnnnnnnnnnnnnnnnnnnnnnnnnnnnnnnnnnnnnnntttatgtaaatggtattgtattgtagatctcattgtctttatttttttaatttggcatgtttttaagattcatcat

SEQ ID NO: 44216 - DNA, 340 bp, Homo sapiens
gtctcagttgtcattggattatggtcttcctgagtggtgtgaggtaggcacccggaattatagcgttgacgttgtcctctttcccaaaaattgaacatagctcaccaagcaggggcccctggaacgttgtagcacatgcgatcaatagatctaacatgccacccctgcctttcccattaactttcaggctaaagagctgagcttgggacaagactgggctggatcatttccctttctctttaatctaaaaagaacctgaagctggctacttccttggtgttcatggatgggtgagagccatcttgagcctctcctatctgctagacacaaaggacgtgaa

SEQ ID NO: 44217 - DNA, 334 bp, Homo sapiens
gggtgaagagttgagttgagaaatagaaacgcttgtctttttattgataccccagccttacctttcattgagtccatatgtcctaggtatcatcttgcatttgtaactgtctaacttcatatgaaaagaattggcctacctgcctcaaattacaatttatttatgcctctgagcacctggtagagtatagagttttctccaacttacaaggttgtgggatcactctgttgtttgaaagtcaaccatttagaaactaagtgcatgtttttgcatggaatttaggtctccagcccacacaaagccaccaataacaaactttaaaataatggtgata

SEQ ID NO: 44218 - DNA, 323 bp, Homo sapiens
gcagtaactggaagccccccacaccactttttcctgtgtcctcctccctctcccttccttggtcacttgtcatctgagtacccttctctgtccccaggaggtcatcacctgactcatcccctgaggcccgagagaacccttgggctcaccgtggcggtgtggcctcactaccctgcctcctgctcatgagctgccttgtccttcctcccccgttattcagttagctccatgagggccagtgtcagaactctcctggcacagatgtgtgccccatccagggcctagcacagggcgggtactgcatcagcactcctcggatattc

SEQ ID NO: 44219 - DNA, 327 bp, Homo sapiens
  misc_feature (1)...(327): n = a,t,c or g
gctcggcgtggaggcacgcatagannnnnnnnnnnnnnnnnnnnnnnnnnnnnnnnnnnnnnnnnnnnnnnnnnnnnnnnnnnnnnnnnnnnnnnnnnnnnnnnnnnnnnnnnnnnnnnnnnnnnnnnnnnnngagatcgtgttgccaaatacacgaacatataaaaaataatcataggtgtaaatgggtgggtgtgtatctatggattccctagctaaatcttctgagaaggtccacaaatggatactaaatgagacccttcactaatagaaccagggttcctttatgaaatacccgattctacagctggagacatgnaagaaccg

SEQ ID NO: 44220 - DNA, 323 bp, Homo sapiens
gaaactttatctctgctctggtgtgtctccagggatttggttggggatggttacattgcgcctttcatgggatacttttttttaccaaaaataaggccattgaggcagatacaatttgataaagttttattgtaagccaaatttgaggatcaacttgagaagacacaccaacaaatttggatgtgttccaaaattgattacaagttggatgcctttatgagaaagtttaggagaagctggaggactattcataccggaattgtcattttccttgaagggtacaatatagacgttacaatcattgcctatagatgacagctgac

SEQ ID NO: 44221 - DNA, 322 bp, Homo sapiens
ggccagcggctggctgaggtggcattggcgtatgccaaggcaggatgtcaggtggtagccccgtcggacatgatggatggacgcgtggaagccatcaaagaggccctgatggcacatggacttggcaacagggtatcggtgatgagctacagtgccaaatttgcttcctgtttctatggccctttccgggatgcagctaagtcaagcccagcttttggggaccgccgctgctaccagctgccccctggagcacgaggcctggctctccgagctgtggaccgggatgtacgggaaggagctgacatgctcatggtgaagccgg

SEQ ID NO: 44222 - DNA, 313 bp, Homo sapiens
  misc_feature (1)...(313): n = a,t,c or g
gcaccaatgaatgagcacgttcatgtttgttatgtttatgtccttgagaagattagataaacatggttttattctgtataatagactattcttgtttgattcttttaggtcattgaaataagttagatttcttataggttttaatagtttgccaaaatgnnnnnnnnnnnnnnnnnnnnnnnnnnnnnnnnnnnnnnnnnnnnnnnnnnnnnnnnnnnnnnnnnnnnnnnnnnnnnnnnnnnnnnnnnnnnnnnnnnnnnnnnnnnnnnnnnnnnnnnnnnnnnnnnnnnnnnnnnnnnnnnnnnnnnnnnna

SEQ ID NO: 44223 - DNA, 313 bp, Homo sapiens
  misc_feature (1)...(313): n = a,t,c or g
ggcttatcaattatgaggatttttggctttcggctctggaaaatatgagaaatatgggcaattactctctgaagaaannnnnnnnnnnnnnnnnnnnnnnnnnnnnnnnnnnnnnnnnnnnnnnnnnnnnnnnnnnnnnnnnnnnnnnnnnnnnnnnnnnnnnnnnnnnnnnnnnnnnnnnnnnnnnnnnnnnnnnnnnnnnnnnngtgtgttagnnnnnnnnnnnnnnnnnnnnnnnnnnnnnnnnnnnnnnnnnnnnnnnnnnnnnnnnnnnnnnnnnnnnnnnnnnnnnnnnnnnnnnnnnnnnnnnnnn

SEQ ID NO: 44224 - DNA, 321 bp, Homo sapiens
gcccacgctcatccagtcttccttgtgaccggcagtccactgtgcgcaacgctgcagccatacagagggacaactcgaagttagaactagcaccttggtcttgttggaataagcagatctgagtagagccagctgcagtcttatggttgtttagcagaagttattcttcttagcagagaatattatacggtcattttccagaactgtaaaaactctatcatttgttttaaaccagatgatgtgcttcatttctgtctttgacgtcttcagtttcttctcccctggctttacctcctttgttatcagtttgtgctttggttt

SEQ ID NO: 44225 - DNA, 331 bp, Homo sapiens
  misc_feature (1)...(331): n = a,t,c or g
gactggtttccaaatcgtcttattaaggatctaatccatagctacaaaaaacaaaaacaggatgattctaatattctgactagaaactgtgtagggtcatatgtattggctctcagctacagttgtggtaacttgaattactgcaactagaggaagggataggcatacacattaaattagctggaaatacaggttaaagttctcttgatgaggaaactaaagacatttttatttttttcaatgtgaaaaagccaaaactaaggagagaaccatgctactaaatcacagtcttttttttttttngnggngnantttngntttgncccccagg

SEQ ID NO: 44226 - DNA, 333 bp, Homo sapiens
gccaaaaatagaagaatcatccttgattctaatctttttctcacctcttcatatcttcctcaccttatatctaacccatcagcaaagtaccatcaattttatctccaaaatatatattcaatctgactactttttctagtgtcaccttagctcccctaacctgcagcagtagccttccttttactgcatccagtcctttctcaacgcactagtaatgagttttttcaaagcaaatcactatgctgcctaaaaccaacacttagtagcttttgcatttaaaatctaaatctctttccatggcccgtatggcccagcacctgcttttcattctaa

SEQ ID NO: 44227 - DNA, 331 bp, Homo sapiens
  misc_feature (1)...(331): n = a,t,c or g
gaaatgataattgcgtttaaaatcattaatatagtctttgacacatatgaccttctataatggttacctgcgactttttattattattaattctttctcctcccaaacacactgattcaagttttgacctgttgtggctactaacttctcccaccatccaccagctgtgcaggtttgcattttagatttgaaaatactcctgcatnnnnnnnnnnnnnnnnnnnnnnnnnnnnnnnnnnnnnnnnnnnnnnnnnnnnnnnnnnnnnnnnnnnnnnnnnnnnnnnnnnnnnnnnnnnnnnnnnnnnnnnnnnnnnnnnnnnnnnnnnnnnnn

SEQ ID NO: 44228 - DNA, 332 bp, Homo sapiens
  misc_feature (1)...(332): n = a,t,c or g
gacaaactattgatatacacaataacttggatggatctcaaaggcattatgctgagtgacgaaaaaacaatctctaaaggtcatnnnnnnnnnnnnnnnnnnnnnnnnnnnnnnnnnnnnnnnnnnnnnnnnnnnnnnnaaaacataatattgccaggcatgttgtggagaggtgtgtatgcactaaaggagtagcacaagggagatgtttgtggtgatgaaatatttgtgtatcttttttgtnnnnnnnnnnnnnnnnnnnnnnnnnnnnnnnnnnnnnnnnnnnnnnnnnnnnnnnnnnnnnnnnnnnnnnnnnnnnnnnnnnnnnnnnn

SEQ ID NO: 44229 - DNA, 321 bp, Homo sapiens
ggaggttatcaataagctcctagtccagacgccatgggtcatttcacagaggaggacaaggctactatcacaagcctgtggggcaaggtgaatgtggaagatgctggaggagaaaccctgggaaggctcctggttgtctacccatggacccagaggttctttgacagctttggcaacctgtcctctgcctctgccatcatgggcaaccccaaagtcaaggcacatggcaagaaggtgctgacttccttgggagatgccataaagcacctggatgatctcaagggcacctttgcccagctgagtgaactgcactgtgacaag

SEQ ID NO: 44230 - DNA, 323 bp, Homo sapiens
ggtccggttctttgtggtggattgccgtcctgcagaacaatataatgctgggcatttatcaactgctttccacttagattcagacctgatgcttcagaatccatctgagtttgcacagtcagtaaaatccttgctggaagcacagaagcagtccattgagtctggctccatagctggtggggagcacctctgttttatgggcagtggcagggaggaagaagacatgtatatgaacatggtcctggcacactttttacagaaaaacaaagaatatgtgagtattgccagtggaggatttatggcactgcagcagcacctggcag

SEQ ID NO: 44231 - DNA, 324 bp, Homo sapiens
gagataatcagtctgtcttggatgaatgaaaggtatcagatttttacctaagaagaccaagtggttaaatgactctcttttaaggttacacagaaaaacagtagtaaagggggaaagaaaatccagagtttaagcttttgagtttgcttcggataaagagaactgtgggggaatcttctctggagcatttggtcttttactttttagccactctccttgcagagtaatattgccagctttatttcctcttcttacttttctgtcttctattaactcagagtaatagaagctgagtcaagttagagagctgagtcaagttagacc

SEQ ID NO: 44232 - DNA, 391 bp, Homo sapiens
  misc_feature (1)...(391): n = a,t,c or g
gctcagtggggattaggaaagactttacagaaaaggtgaaacttcagggaggggattagtgggagttttcaagatacaagacctggtcaaggtttccaangaagagaagtganagaaccagtgcataactntccngtaagcgttttnggaaacttccacgttctcggccanancagaggtccccanactttttcttacngggccaaatancaaatattttaagttttgtgtaccaanaggcnagannnngtaatatntaagngcntaaataatnctttatatnaaantcatttttancntccaggccttnaaaaaangatttngccngcnntaagnttatagaccacttggctttaaaccttncntgantggnttgggcgttttnngactc

SEQ ID NO: 44233 - DNA, 326 bp, Homo sapiens
  misc_feature (1)...(326): n = a,t,c or g
ggccttgcatcaggggtagctttttagtaagtaatgttaagtgatatatgtttgggtgtgccgttttcttgaacaaagagtcttttcataattgacaaacattaattgctttctcatataatacttaaattcatcatttggacttggcttaaaggaaacnnnatatattgagnattaaaactggtcccttgaaaataanggtttactaccggnaanttaaatttncantanntnangatnnnnngcttggnaaantnnnaaanntntnnnnnccttnnaggccnnanntngccnnnnnnnnnnnnnnncctnnnnnnnnnnctttt

SEQ ID NO: 44234 - DNA, 335 bp, Homo sapiens
ggaaatgtctcatctggaatggaaggtagaggaaaacttgaaattgatcagattacttctattgtcctgctctgatgttatacactcattacaatagccaagctagtaacgccgataaattatctctcttgaccacatgcaaaggtacaagtatctcccagtcatctcattggcaaatggaattttccccatcattttccatctccttaatagtaaccatgaatttacagcgaccgaagacaatcgaactctatactgggcagtaaagtttagagacaggtaacttgaaattgacatacccaggaagcaaatgtggaagaacttatggaaatttc

SEQ ID NO: 44235 - DNA, 334 bp, Homo sapiens
gataagatgcaattctaggtgatagggatatagcagtgggttctgcagtaagatcaagctagtaaagcatagtttcgattgggtggtggcaatggagataaaaagaacaagaacaaagctttacagtattaaataatgttcattacttgcctataatgtacatagtggtaggatgtacattatttaatattgtaatattgattgataatttttgttcttttcaggctgaaatacaagtcagttgttttcaatcctggcctgaccatagatctataaaatcagattccccatatcggagagctgagttcctgcatgttttaagccctctacagat

SEQ ID NO: 44236 - DNA, 333 bp, Homo sapiens
gctgggacaaaatcttggtaatttttatatctgggtgatatgtatataaggcttcaatgtactattcatgtacttttgaatatgtttaaattttttcatgcttaaaaaattcatgtaaatccaggtgatgattctcaaaagaaaattttaaagaattaatgttgaaaattgaagcacttaactaaaaatatttggtaataaaatgtataaaagtcccaaatctacactataggaaaccagcttataaaaacacagttttgtcttttccttgggaagaattctaagaaacagaagttctagtgctaagagtctggatcccctggcagccagaga

SEQ ID NO: 44237 - DNA, 343 bp, Homo sapiens
gaaattcagaagagcataaattctaactccttagaagacaggaatagaagtcaaagtgacctcaataaatcaaaagcaagttgaagttcaatagggacaaatgtaaggtaggatacttatgcctaatagatggactcacaattttaaaatcatctgggcatgattgtgatggaaaagtgtctctctgtcaaggacatgaggaagccacatccgcagccttgtctaaggacctactatgtgccaggcattttgcataagtcagcttgcttacaaatacactgtaataatctcaacagtaactctcaaagctgtgtataatttgtgctctcattttatagatgtg

SEQ ID NO: 44238 - DNA, 334 bp, Homo sapiens
gggctgttgaaaataattctttacataactggattctagcagtcttgatgaggtaagtagaatcaataggaaatgatctgtttgtcactgcttagccacaatgccaaaaagcttggtatctgggaatggagactttaaaaagcgtcagcactgggaagaatttgataattcaagtctaagaggcttcttatgaaaagtgcagaaggaatatatgcatgggaatatataccattgaatttttgccgataacattgtttctcgccacagttaaaattgaaactttgatcactctagtagccacaggtcatttgatgatttttgccaaaccgtaaac

SEQ ID NO: 44239 - DNA, 343 bp, Homo sapiens
  misc_feature (1)...(343): n = a,t,c or g
gttggacattaataatttcaaaattggatgacttgatgaatatccgtaggaaactagaacttctaaaacactttaggcaacacaagccagcagaaagacaggtgagtggaagcccaggttttaaaaaggcctatttcaggaccttctcaaaatctatgtctgatctagggcaacctgctgacccaacactcctcagacttccaagactaaataaaataccctccctctaagtatcccaaaggttgacttgcaagcaacacttttacgggaagtgtgccttcactacatcaagtcagcactgcanagctccctaaggtctcaggtacccagctaagacatatga

SEQ ID NO: 44240 - DNA, 342 bp, Homo sapiens
ggctgtacccaccacccaaaggggctccttgtttccttaccacaaaggcgccttgtaggctcccagcagccctgttcacaaggccaggggcccaggaggacagaaaacctgagagctgggtagggtggtgacccccattaggtccagggtagtcagtgaccatcctgtttctgagcagcccaagcctgaccctgaggtcccaaggagggccacctaaccctttccctctgcctcccacctgcccccagaccataagggcaccaacccctgcagtgtcaacaacggtgactgctcccagctctgcctgcccacgtcagagacgacccgctcctgcatgtgcac

SEQ ID NO: 44241 - DNA, 86 bp, Homo sapiens
gcggcacgagaatttcagagaggtactctactgtgattctagcacttttttcttgagtgccttcttaactcctttttttttttttt

SEQ ID NO: 44242 - DNA, 357 bp, Homo sapiens
  misc_feature (1)...(357): n = a,t,c or g
gcgagatatctgttcttatcacagagtaaaggttactgagccaccaacccaggtcctctgactttgtacaaagggctctccagctgcttttcagagtgattgtctagaagggttaagtcttcgtagacatagatcattctgcaggaaatgtactcagaccttgtagaagacatacttgatgcctttaagaagtagttnnnnnnnnnnnnnnnnnnnnnnnnnnnnnnnnnnnnnnnnnnnnnnnnnnnnnnnnnnnnnnnnnnnnnnnnnnnnnnnnnnnnnnnnnnnnctgtcttggtgaacaggctaacacggtgtcagnnnnnnnnnnnnnnnnnnnnnnnnnnnnnnnnncaa

SEQ ID NO: 44243 - DNA, 362 bp, Homo sapiens
  misc_feature (1)...(362): n = a,t,c or g
gcgtgggataaagaataaatgaacaatgccatcagttccaagaaacaagccaacaatgcctttacttgtgatttgacaagcattctttttgcagcttcagtcattttggaatttttattaaaaaaaaaaatttaaatagtttctgggttgcactgagagaaaatatcttgtggtaattcttaagaaattaactaaatacactaattttagattggtagtctccaacaacaaaaaagtaacctttcctatttgaaagaaaaaaagaaagggaatcaactggagaaaatnttnggaagaaacatttctaagaatattacctaaatccgnnggggaaagtggttaatttatatgccaggcttaaa

SEQ ID NO: 44244 - DNA, 353 bp, Homo sapiens
  misc_feature (1)...(353): n = a,t,c or g
ggagcccttattatgtgcccgttactcaactaggttttttatgtctaatattgattctataagataggcatttaaatgtaagcctcagtttaaagacaaggaaatggttcaggaaggtgaaagtaacttgcttgggatccaaacccagggctctctgacttgggagcatctgccttttctagtatactttcctgtctcctggagtgtgggtgggactttgggtggggtacaagaaattaaagagcttttnnnnnnnnnnnnnnnnnnnnnnnnnnnnnnnnnnnnnnnnnnnnnnnnnnnnnnnnnnnnnnnnnnnnnnnnnnnnnnnnnnnnnnnnnnnnnnnnnnnnnnnn

SEQ ID NO: 44245 - DNA, 328 bp, Homo sapiens
ggacccgcctcatcctcataggggagaccatcaagattgtcatcgaggagtacgtgcagcagctgagtggctatttcctgcagctgaaatttgacccagagctgctgttcggtgtccagttccaataccgcaaccgcattgccatggagttcaaccatctctaccactggcaccccctcatgcctgactccttcaaggtgggctcccaggagtacagctacgagcagttcttgttcaacacctccatgttggtggactatggggttgaggccctggtggatgccttctctcgccagattgctggccggatcggtgggggcaggaacat

SEQ ID NO: 44246 - DNA, 324 bp, Homo sapiens
gatttcacctactacttaactccccttatttgggagatgttagatttctaagaccaaatctagtgtcaagcatgttggtggtagatcacagaaaattttatcttgaggctctctaatctgctattgtccattgacttgaaagatgtatgggttgaggctacagttcttccagaagtatttgttaatttcatactggctttcctggcttctgttttcatggttttttaattcttgacctacagttgaaccataaatacctggttgatgaagtaacttgttttgtggcatgactttcacaagctctgtcattccccacaagatgaa

SEQ ID NO: 44247 - DNA, 340 bp, Homo sapiens
  misc_feature (1)...(340): n = a,t,c or g
gcttcgagaaagctttgaatgccggcttcatccaggccactgattatgtggagatttggcaggcataccttgattacctgaggagaagggttgatttcaaacaagactgcagtaaagagctggaggagttgagggccgcctttactcgtgccttggagtatctgaagcaggaggtggaagagcgttcaatgagagtggtgatccaagctgcgtgattatgcagaactgggctaggattgaggctcgactgtgcaataacatgcagaaagctcggaaactctgggatagcatcatgaccagagganatgccaagtacgccaacatgtggctagagtattac

SEQ ID NO: 44248 - DNA, 343 bp, Homo sapiens
gctggggaaagggcctaattccccagtctccacctcgaatcaggaaagagaaggggcgggctgctgggcaaaagaggtgaagtgtccggacgcaccctcatcgacattggttcaggccccaccgtgtaccagctgctcagtgcctgcagccactttgaggacatcaccatgacagatttcctggaggtcaaccgccaggagctggggcgctggctgcaggaggagccgggggccttcaactggagcatgtacagccaacatgcctgcctcattgagggcaagggggaatgctggcaggataaggagcgccagctgcgagccagggtgaaacgggtcctgccca

SEQ ID NO: 44249 - DNA, 325 bp, Homo sapiens
gcacagactcagagagaacccaccatggtgctgtctcctgccgacaagaccaacgtcaaggccgcctggggtaaggtcggcgcgcacgctggcgagtatggtgcggaggccctggagaggatgttcctgtccttccccaccaccaagacctacttcccgcacttcgacctgagccacggctctgcccaggttaagggccacggcaagaaggtggccgacgcgctgaccaacgccgtggcgcacgtggacgacatgcccaacgcgctgtccgccctgagcgacctgcacgcgcacaagcttcgggtggacccggtcaacttcaagc

SEQ ID NO: 44250 - DNA, 340 bp, Homo sapiens
gcaataagctcctagtccagacgccatgggtcatttcacagaggaggacaaggctactatcacaagcctgtggggcaaggtgaatgtggaagatgctggaggagaaaccctgggaaggctcctggttgtctacccatggacccagaggttctttgacagctttggcaacctgtcctctgcctctgccatcatgggcaaccccaaagtcaaggcacatggcaagaaggtgctgacttccttgggagatgccataaagcacctggatgatctcaagggcacctttgcccagctgagtgaactgcactgtgacaagctgcatgtggatcctgagaacttcaag

SEQ ID NO: 44251 - DNA, 338 bp, Homo sapiens
  misc_feature (1)...(338): n = a,t,c or g
gatggaatctgcgtgcttttggtcttttctaaggtcataggtttttggtatcaatatgnnnnnnnnnnnnnnnnnnnnnnnnnnnnnnnnnnnnnnnnnnnnnnnnnnnnnnnnnnnnnnnnnnnnnnnnnnnnnnnnnnnnnnnnnnnnnnnnnnnnnnnnnnnnnnnnnnnnnnnnnnnnnnnnnnnnnnnnnnnnnnnnnnnnnnnnnnnnnnnnnnnnnnnnnnnnnnnnnnnnnnnnnnnnnnnnnnnnnnnnnnnnnnnnnnnnnnnnnnnnnnnnnnnnnnnnnnnnnnnnnnnnnnnnnnnnnnnnnnnnnnnnnnnnnnnnnnnnnnnn

SEQ ID NO: 44252 - DNA, 337 bp, Homo sapiens
gcccctggtcactccggatgagcccaaagcgcccatgctggatgaatcagtcatcatccagctggtggagatgggattccctatggacgcctgccgcaaagctgtctactacacgggcaacagcggggctgaggccgccatgaactgggtcatgtcacacatggatgatccagattttgcaaaccccctcatcctgcctggctctagtgggccgggctccacaagcgcagcagccgacccccctcctgaggactgtgtgaccaccattgtctccatgggcttctcccgggaccaggccttgaaagcgctgcgggccacgaacaatagtttagaacgg

SEQ ID NO: 44253 - DNA, 339 bp, Homo sapiens
gcatggacttaaatagcaaggatttgaagaaaaagagtcatttctgtaagtgattcacagtagatgtaagttagaatttcttaccctgtaattttaccttctgcatgaaaagctgtctatcaaaggctattttgttagatgtctggcttcctgttctcagatgaaccaagaagagaggaacagcctatttctggttttactgaagccttttaaaaatccttgatgatttaagaaatacaaaaatacggagaagtagagaggttcaattagagtttatagtaaaagatgaggaggaagataaagtcctcaggtaggtaagacttgctgcgagatttagct

SEQ ID NO: 44254 - DNA, 324 bp, Homo sapiens
  misc_feature (1)...(324): n = a,t,c or g
nnnnnnnnnnnnnnnnnnnnnnnnnnnnnnnnnnnnnnnnnnnnnnnnnnnnnnnatcacttgaattccagtctgggcaacagagcgagactccatcttaacggcaacaacaacaaaaatctgaacagaaatgctctatttacgttcttttccttatctgtagtgttttaaagtcattaaacttaaaaatgatgttcaggagaagatgagtgtatttgcatagtctgtcataactctggtattattttgtacaaggagtgtgttagggttttcagttgtaaccatgcagaaaatctacaaaataaaagcagttgttaattagtc

SEQ ID NO: 44255 - DNA, 350 bp, Homo sapiens
ggtggctttggggaaggagcaggcagggaagtcttgagtggagcttccctccatgtcttgcgttgttgctacaacacaaagcctttgctttttctcggagagggatgtgggattgtgtagtccttaatgttgagttctacgattgatgaaggagaagggacgtgatcaaagtttccccttatagtgtagatgagagttttaaaaggactgttttgtcaagtttctttggttactattcttagtttttgagcctttggtttcccaaatgccagctgtttttgctgaaaataatgaatttctatcataaaattagaattaactcaaaatatttaagaaaggatttataaatt

SEQ ID NO: 44256 - DNA, 321 bp, Homo sapiens
  misc_feature (1)...(321): n = a,t,c or g
gctgtctcaggggaagaaaaaaaaaaagccaattgtatgtatatctttatagattggagtatttctaacccaagtatgtccattattattatttatttgtattatnnnnnnnnnnnnnnnnnnnnnnnnnnnnnnnnnnnnnnnnnnnnnnnnnnnnnnnnnnnnnnnnnnnnnnnnnnnnnnnnnnnnnnnnnnnnnnnnnnnnnnnnnnnnnnnnnnnnnnnnnnnnnnnnnnnnnnnnnnnnnnnnnnnnnnnnnnnnnnnnttgaagtttttgtanacncannnnnnnnnnnnnnnnnnnnnnnnnnnnnnnnnnnc

SEQ ID NO: 44257 - DNA, 329 bp, Homo sapiens
ggcccttcaggatgaaagctgcggtgctgaccttggccgtgctcttcctgacggggagccaggctcggcatttctggcagcaagatgaacccccccagagcccctgggatcgagtgaaggacctggccactgtgtacgtggatgtgctcaaagacagcggcagagactatgtgtcccagtttgaaggctccgccttgggaaaacagctaaacctaaagctccttgacaactgggacagcgtgacctccaccttcagcaagctgcgcgaacagctcggccctgtgacccaggagttctgggataacctggaaaaggagacagagggcctg

SEQ ID NO: 44258 - DNA, 344 bp, Homo sapiens
  misc_feature (1)...(344): n = a,t,c or g
gaagagaaagggtacaaaaagcatcaggaatgagaaaaacaatatcacagcagagctttgaaatctaataagaactaatacaagcaactgtatgccaataaatttgagaacattaacaatatgggcaaactccttaaaaaatataacttgtcaatactgatttatgtagaaatagaaagcctgaatagttctttaaaggaatagtcctttatgtacttnnnnnnnnnnnnnnnnnnnnnnnnnnnnnnnnnnnnnnnnnnnnnnnnnnnnnnnnnnnnnnnnnnnnnnnnnnnnnnnnnnnnnnnnnnnnnnnnnnnnnnnnnnnnnnnnnnnnnnnnnnnnnn

SEQ ID NO: 44259 - DNA, 333 bp, Homo sapiens
  misc_feature (1)...(333): n = a,t,c or g
gnnnnnnnnnnnnnnnnnnnnnnnnnnnnnnnnnnnnnnnnnnnnnnnnnnnnnnnnnnnnnnnnnnnnnnnnnnnnnnnnnnnnnnnnnnnnnnnnnnnnnnnnnnnnnnnnnnnnnnnnnnnnnnnnnnnnaactttaaacatgttttagaattcacctaaagatcaaaatatcatggattgaacctcatcaattgatagcagtgagtgactgaagcttccaaatcaagaaaagccggcaccaagaacttccattctaatctagagctgaccagtttgagctgattctctctttgaagagtccttcttgattgcagtgcagtactggcatt

SEQ ID NO: 44260 - DNA, 343 bp, Homo sapiens
gtaacacggcagctgagggcttttgtgagccttcttaaggcatagatttagaactggccccacatcacttctacttcattctgttagttaatgtgagttgaagagtcagcccagattcagtatgggagggatatcacaaaacaagttccaggaggtgtggtccactgtgggcacctttctatcctggctaccatggggttcattttctcatgtaagaagtgcagagctcagcaggctaaggtgatgctcaccttaccctctctctgctgctccaggtcaccatccttagcctcatattcataaaatggttgctctacctccagcctgatatccttgtgatggg

SEQ ID NO: 44261 - DNA, 333 bp, Homo sapiens
  misc_feature (1)...(333): n = a,t,c or g
gggaggctgtttccatagtgtaagctagagagtgtggtggcattagtaatgaagagaagcagtcagacttgatagatgtttttggaggtaaaatccataggaattgttttgggtgtaaggggtgagaggaagtgtcaaggatgaatctcgggtttctgacatgactgtggatgatggtaccatttgcagaaataagaacactgcacaaagaatgagttttcctcaagggggaagggtcattaatttagttttagtcatgtttagtttgagannnnnnnnnnnnnnnnnnnnnnnnnnnnnnnnnnnnnnnnnnnnnnnnnnnnnnnnnnnnnc

SEQ ID NO: 44262 - DNA, 325 bp, Homo sapiens
ggtcatttaaggttgcaaccccttcaacagagttatttgttctccaactcaaaaatggattctaaagctcacatcagcctcttagccgtcccagaagctaacatctgttatctttatcattaaaagataatagcctcagctcgttggaacacttatctatgttatggaatgaagtattgcatgaagccaaatgacatctttaaaaatatatataacaaaaataacagtagcaatagcttagtttaggcactgatttattgcttacaacacccttttctgtaatagttcattgtagtgaaaacatctttgtgaagaaagcacagta

SEQ ID NO: 44263 - DNA, 324 bp, Homo sapiens
gcggcacgagggttgctgttgtattgcaatcatggtgcagaaataccagtccccagtgagggtgtacaaatacccctttgaattaattatggctgcctatgaaaggaggttccctacatgtcctttgattccgatgttcgtgggcagtgacactgtgaatgaattcaagagcgaagatggggctattcatgtcattgaaaggcgctgcaagctggatgtagatgcacccagactgctgaagaagattgcaggagttgattatgtttattttgtccagaaaaactcactgaattctcgggaacgtactttgcacattgaggctta

SEQ ID NO: 44264 - DNA, 333 bp, Homo sapiens
  misc_feature (1)...(333): n = a,t,c or g
gcccaggctgaaaatgggataatatgttccagcccctgtttttaatagtctcttcaagagaatgaagagttgcctgtgcccagtttgattatccattatgtcatatggatctgtaattaacaggaagtgcagaaaagctctctatcctggtacttaccaagcctttttttttttttggnatcnngttnngnnntccngnccaaagggcaaattntcnngcntaacccnccnangnacnnggccntanaaannccccccnccnnnccgggtttaannngttttaacctntggatncanntgggnntttaactcannnaantcccccangttttt

SEQ ID NO: 44265 - DNA, 346 bp, Homo sapiens
gaattgctagactggtatagtccctaaaagtcatctaatgatggcttttgcattaggctcttcaatatgtttgctttaataataaaatacaggattttaagaaacctatttcttaaatatgtataatggatttccatgttggaaggatccttcaatgtcatatagtagaataacctatgtagttctttattgcatgtttcaacatctttcccaagtggtcatctagcctgtgtttggaatggtccatctttgggtagatctgttatataaatctactttgtgtctgtaaagcagaaattagtaactctaagtttagtaaatagtgtataaccatgattatgctttg

SEQ ID NO: 44266 - DNA, 356 bp, Homo sapiens
  misc_feature (1)...(356): n = a,t,c or g
ggtggcctctaggagttctctgctgccaataagtggtccaaccatgttacaggattggacccgggatggcctttgtgctttagagctgaggcacttcctgcttctacctgagctccttttcaacatacaggcctgggcacgtaggcgtcagggtcatgtgggaggtggtggccgagggaagaggtgggcagtgggaagnggtacacggctagaccttgttgctctgcctcctcttgggaccccccagtgggatggagcccaagtccttgggcagcacatggtcctctgcttcacaggacacacacctgtacccatcctccccatccacttttgctcantttattttggggacaggg

SEQ ID NO: 44267 - DNA, 346 bp, Homo sapiens
ggcatatgtaaagatgactggaccatctgtgtctcttcagatcctgttgcaattaccaagtgttcccagcaagggttaatgtggtgtgtgaacctgactaacctcaggttctagttctccctccctgagtagagagtctaggagccaagttcagactggctcagtctggaggaattcacaagtgaggcaggtttaatggaagaacagatactctgaggttttggagggcctgtgatgtgcttgtcagcgggttcctgcttctgccacccccaccacggagcaccaaccatgtggtttgttctttgtgtactttgttagctaaactctcaagtgtcaagttgatggc

SEQ ID NO: 44268 - DNA, 352 bp, Homo sapiens
gctctttttttggaggtgcttaagcagaagcattaacttctctggaaaggggggagctggggaaactcaaacttttcccctgtcctgatggtcagctcccttctctgtagggaactctggggtcccccatccccatcctccagcttctggtactctcctagagacagaagcaggctggaggtaaggcctttgagcccacaaagccttatcaagtgtcttccatcatggattcattacagcttaatcaaaataacgccccagataccagcccctgtatggcactggcattgtccctgtgcctaacaccagcgtttgaggggctggccttcctgccctacagaggtctctgccg

SEQ ID NO: 44269 - DNA, 343 bp, Homo sapiens
  misc_feature (1)...(343): n = a,t,c or g
gcaatgaatgaaggttgactgaatcaaccacggagatgatcagagtctcctttacagatggggaaactgaggcactgagaaatgatctccctgggtgccatggcaaggggaggccgccacccgacatgggcatcggaaagtggggccgaggccactctttgacaaaagtgactcagcagctggcggctggcgtgggctgtggaatttctaatcatcccctcacatcctgagcgaacggtcgatgggagggagtaatcananggaaaanaagataancaagaaacttgggggacaagaaganagaggggtaaanacttggatttgtgncggacnccgcnngccc

SEQ ID NO: 44270 - DNA, 343 bp, Homo sapiens
gaacagggacccagacatggagctgcgggaagaagcctggtctccggggccgctggattctgaggaccagcagatggccagtcacgagaacccaggtgagcagccagaggccttcccagccgaccccgctgcctcccacctgaccctggcttcctttgcctctgggtgggaggaaaccccccttccctgttttcccctcttggggccctgggaccacccgaccctggcctcccctcccgccctgggccttgcactcctggctgtagagggagggctagtgttgtggctccaagtttcctttctgctggatgatcttggggacccctgggggccaccttctctg

SEQ ID NO: 44271 - DNA, 336 bp, Homo sapiens
gggcgcgcgcgcgcgttgacggaaactaacggacgcctaaccgatcggcgattctgtcgagtttacttcgcggggaaggcggaaaagaggtagtttgtgtggtttctggaagcctttactttggaatcccagtgtgagaaaggtgccccttcttgtgtttcaatgggatttttatttcgcgagtcttgtgggtttggttttgttttcagtttgcctaacaccgtgcttaggtttgaggcagattggagttcggtcgggggagtttgaatatccggaacagttagtggggaaagctgtggacgcttggtaagagagcgctctggattttccgctgtt

SEQ ID NO: 44272 - DNA, 348 bp, Homo sapiens
gggacaggaggattcatctgatctggagttgctgcaggagctcaacaggacctgtcgggccatgcagcagcgcatcgtggagctcatctcccgcgtgtccaatgaggaggtcaccgaggagctgctgcatgtgaacgatgacctcaacaacgtcttccttcgatacgagaggttcgaacgatacaggtctggccgatccgttcaaaatgccagtaatggagtactgaatgaagtaaccgaagacaacttaatagacctggggccagggtctccagccgtggtgagcccaatggtggggaacacagcgcccccatcttccctctcctcccagcttgcaggcttagactt

SEQ ID NO: 44273 - DNA, 339 bp, Homo sapiens
ggacaaattctggagatacaatgaggtgaagaagaaaatggatcctggcttccccaagctcatcgcagatgcctggaatgccatccccgataacctggatgccgtcgtggacctgcagggcggcggtcacagctacttcttcaagggtgcctattacctgaagctggagaaccaaagtctgaagagcgtgaagtttggaagcatcaaatccgactggctaggctgctgagctggccctggctcccacaggcccttcctctccactgccttcgatacaccgggcctggagaactagagaaggacccggaggggcctggcagccgtgccttcagctctaca

SEQ ID NO: 44274 - DNA, 363 bp, Homo sapiens
  misc_feature (1)...(363): n = a,t,c or g
gggattatagcaactgagaccatatatattcttaactagttttcttcccaagaaaggaattctccatttaaaatgctgtatataaaatgtttttaattagttcatttgaaaaacgctgtgtagtgccttttacagttgaaacaatattatttctattgagttggcttgtgggccatgtcttcatgtgactcagcttgtccctgaaatgttagccctcctccctcccatgcatagattgtgtgcagtcttatcaagaaaatgtgtggaacactctactctacttatattgccagattaaaactaaatgnnnnnnnnnnnnnnnnnnnnnnnnnnnnnnnnnnnnnnnnnnnnnnnnnnnnnnng

SEQ ID NO: 44275 - DNA, 361 bp, Homo sapiens
gcacactctccctacatgaggccggtgtacccaactaaaacctttcctaacttatacactttggccactgggctatatccagaatcacatggaattgttggcaattcaatgtatgatcctgtatttgatgccacttttcatctgcgagggcgagagaaatttaatcatagatggtggggaggtcaaccgctatggattacagccaccaagcaaggggtgaaagctggaacattcttttggtctgttgtcatccctcacgagcggagaatattaaccatattgcagtggctcaccctgccagatcatgagaggccttcggctatgccttctattctgagcaacctgatttctctggacacaa

SEQ ID NO: 44276 - DNA, 356 bp, Homo sapiens
  misc_feature (1)...(356): n = a,t,c or g
gacgtgattttaagtaattatgtctaaatacagtttgttcagttatttgaggctacattttataattaatcccatctaaatttattttgtcactgtttgagactatgttttatagctaactcacccattagaatacagttttttttttaaattagatattttataggaactaaaaatgaatttttaggaactaaaagtgattatttggtcgtatctacttttttttcaggctgaccttgttggtttcacattaaatgttgcaaaactttaacatttcaacttggagttattcttttgctaaaagagtataatactgnntttgananaatatganntgattccatgcantccacatc

SEQ ID NO: 44277 - DNA, 358 bp, Homo sapiens
  misc_feature (1)...(358): n = a,t,c or g
gcctacatgtttattctctctcatgttgggaaagctcttttgaaatgttgcacatgccttggttatcaatttacataaaagagaaaagaatattattaaaatgagtggatgtcagtttactgaggatctcacctaaggactctaaattttcagaatttttttcctctggaaaattcacatttctacaatgacaaaatccccctctaaactcttagttaaaaggtatatgccatcctgcagtatattatgagcgcaagagatggaaagtgacttaggtggaagggactnancccgatgattttaaagctgcnaaantgnaaaatcttgangcctgaaattatcatagaatacgntttag

SEQ ID NO: 44278 - DNA, 339 bp, Homo sapiens
gctggaagaatttgagaaatcagttattggttgtagaaagcagatccctagtcccctaattggtattcagaaagacctataggtaggagtgagagataaaaacagggccagacaagaactactacaatgaaataaccaagatctgaaagattacagagatggagaatggggcagaagggcagatagtccagacaatttatgagacaatttgctcatgaccagaacgtcagacaagagctattcaaattcctcttgcccaaggtcaggattggtcctggagcagtgcagtgcctgcagacaggggtgagctgtgagaagagatgtgtgtgaattagataa

SEQ ID NO: 44279 - DNA, 344 bp, Homo sapiens
gggtcgctaccttgcttaaaaaccccattgcctgtggtagcttggtgcagcagatctgatttctttcatgtgctcccttgggcagcctgccagttattcccttgtccaagtcacttctgccattatctttttttctagctgaggcagccagcttgttctcaacccaacttcagcgttcttcttgcttccatgtcttcttccagttccatgctgtatttcattcagaactacctgaaatcctcaaagaagtcttcctgagttctccattcaatgtttgcgacttctctgccttaccacgaaggagtctgtaccttatataccccgtatttacttgcagttctctt

SEQ ID NO: 44280 - DNA, 344 bp, Homo sapiens
ggtaagactcatattagttttctaaatcaaatttaacctgacttcaaagcctatgtgtcggggtagggcgatctttcctttgaggacaacaccagaatgaggagttgggaggctgcttttgggacgtatggaaaacagacaaagatctttattattcagtccatctgatggccaccgagatgctcgtggtctaaatgtttcttagagttgtcttagggtctccctaaggcatgcaattccattcctcctttgaagctcagattctgctgtctcacagctgctcccaaggtcatagctgtgggtggccaggaatagcactgcttacgagtgggccaacagcttcc

SEQ ID NO: 44281 - DNA, 343 bp, Homo sapiens
  misc_feature (1)...(343): n = a,t,c or g
gcggcacgagctggactgatagatcataaatatttttaatgatagctcgttatgcgatttttggcatgtaatttggaaggtggtaaaaaaaattagtagtacaggaacagtcnnnnnnnnnnnnnnnnnnnnnnnnnnnnnnnnnnnnnnnnnnnnnnnnnnnnnnnnnnnnnntacgattttggaatatttgcattatgttaatatatacttagcagttgagcatccctaatctgaaatttgaagtctgaaatgctcccatgagcatttccttgcagtgtcatgtcagaactcaaaaagttttcagattttggaacatttctgatattgggttttcagattc

SEQ ID NO: 44282 - DNA, 337 bp, Homo sapiens
gcaataagctcctagtccagacgccatgggtcatttcacagaggaggacaaggctactatcacaagcctgtggggcaaggtgaatgtggaagatgctggaggagaaaccctgggaaggctcctggttgtctacccatggacccagaggttctttgacagctttggcaacctgtcctctgcctctgccatcatgggcaaccccaaagtcaaggcacatggcaagaaggtgctgacttccttgggagatgccataaagcacctggatgatctcaagggcacctttgcccagctgagtgaactgcactgtgacaagctgcatgtggatcctgagaacttc

SEQ ID NO: 44283 - DNA, 347 bp, Homo sapiens
  misc_feature (1)...(347): n = a,t,c or g
gattatttccttcagggcttagaggcaggtaggtagcccaaggcattttgagcttttgaaattcatagttatttgacgtggacaagggtgggttgggaacagtgtcatatccaaccttacactgaagaaaggatgccatggattggacagaaagatgtcacttaaaattatgaaatgattaagtctgttaccagtgaggagaaatctcctcctgtatctaagaacagttcttgtacatggnatggtttttanctganggaanaancctttgcgatnnttgatcatgnnccanttngnnntnnccattnnnnngccanaangnntggnnnngcctgnnnnttttgcca

SEQ ID NO: 44284 - DNA, 346 bp, Homo sapiens
ggtggttgaaatacatcgtctacaaggagagagtgagtgcatcggatggcttctggaaatctgtggccactcgagtgcccaaggagccccctgagattcgaatcctcaacccatatttcatccaggaggccgccttcaccctcattggcctgcccttcaacaatggcctcatgggccgggggaacatccctacccttggcagtgtgcagtgaccatggcactacacggctgtgagaggtgcagtcgcaggatttggctatgacatgagcacacccaacgcacccctgcactactatgagaccgttcgcatggcagccatcaaagagtcctggacgcacaatatcca

SEQ ID NO: 44285 - DNA, 358 bp, Homo sapiens
  misc_feature (1)...(358): n = a,t,c or g
gcggcacgagatagaaattaaagaagactgaaatattggaaggagtaaaccatgttcatggattagaagactcaatattttaagatatcagttctctacaaactaatctacggatgacttaatgcacaatcccaatacaaatgcaaagtnnnnnnnnnnnnnnnnnnnnnnnnnnnnnnnnnnnnnnnnnnnnnnataagctgattctcatatgtggaaatacaaagcaccaggaataaccaagatactcttgaagaagagtaagatatgaggatatcatcaagattggatatcatccagatatcaagatttatttcacaaagatatgatatttaaaataatgncatattggcacaaa

SEQ ID NO: 44286 - DNA, 349 bp, Homo sapiens
  misc_feature (1)...(349): n = a,t,c or g
ggctgatgggagaactggagtaataaataattgataaaaagaagacaagaatggagaaaaagagacaaagaatagatggaatatatagaaaactaataataaaatggtctacttaaatccaaatcatcagtaactatattatatttacttaattttttcaattaaagacaaaagcctannnnnnnnnnnnnnnnnnnnnnnnnnnnnnnnnnnnnnnnnnnnnnnnnnnnnnnnnnnnnnnnnnnnnnnnnnnnnnnnnnnnnnnnnnnnnnnnnnnnnnnnnnnnnnnnnnnnnnnnnnnnnnnnnnnnnnnnnnnataggctgggtgcggtggctcacacctgtaat

SEQ ID NO: 44287 - DNA, 229 bp, Homo sapiens
  misc_feature (1)...(229): n = a,t,c or g
gaggaaagccttcagcaaagagaaggatcctgaaaaaatggtttccggttgcccccttcccagttgaataccctggcttgtatctaaaaaactgatgaggctgggttccttatttgtatatggcgtgaattcttggtggctccaccccatccttccagtgcgcatgcaggcccttagactgagctgcttcatattgatttattnncctnncgngcntgtgntanngaat

SEQ ID NO: 44288 - DNA, 349 bp, Homo sapiens
gccacagactcagagagaacccaccatggtgctgtctcctgccgacaagaccaacgtcaaggccgcctggggtaaggtcggcgcgcacgctggcgagtatggtgcggaggccctggagaggatgttcctgtccttccccaccaccaagacctacttcccgcacttcgacctgagccacggctctgcccaggttaagggccacggcaagaaggtggccgacgcgctgaccaacgccgtggcgcacgtggacgacatgcccaacgcgctgtccgccctgagcgacctgcacgcgcacaagcttcgggtggacccggtcaacttcaagctcctaagccactgcctgctggtg

SEQ ID NO: 44289 - DNA, 355 bp, Homo sapiens
ggctacatcattccctttaggggtattctgtgctgactgcactgttgggtgtcttagcctgtgaactcagtgaacacagctccagatttgggccagtctgcctctgccaagcagagacattgtttttgctccagtgaccatcacagtgccttcaggattagggccatccatctggaaaattttcattgccctgaatggtaaatgtgggggaggtgcagtcttgtggtgacatcagttttggcatgggttgcaggcatgaggtagtcctaaccgggaacttcattgttactgctgcaatcttgtttaccaccagaaaggtggtggacaggccatggctgtaggaagtcaagacgca

SEQ ID NO: 44290 - DNA, 361 bp, Homo sapiens
gggaacgtctgaggttatcaataagctcctagtccagacgccatgggtcatttcacagaggaggacaaggctactatcacaagcctgtggggcaaggtgaatgtggaagatgctggaggagaaaccctgggaaggctcctggttgtctacccatggacccagaggttctttgacagctttggcaacctgtcctctgcctctgccatcatgggcaaccccaaagtcaaggcacatggcaagaaggtgctgacttccttgggagatgccataaagcacctggatgatctcaagggcacctttgcccagctgagtgaactgcactgtgacaagctgcatgtggatcctgagaacttcaagctcc

SEQ ID NO: 44291 - DNA, 315 bp, Homo sapiens
  misc_feature (1)...(315): n = a,t,c or g
ggtggctattcattcaacaaatacttattaaatgtttgttttatgccaggggctatgctgtatactggggacgcagccggaatgaaagacacacaaatccctgtccttatgcaggcaataggcaagagggcanataattaacaaccaataagcnaatgnctaacatgccagatggtgatangaanctaaagtgtatgcatctggannncccgngttttnnnngccangncannanggncnnacttnnntgnnanangcntccnggnnggacganntnnanggcaanttnncccttnnnnttgngnggantgccca

SEQ ID NO: 44292 - DNA, 347 bp, Homo sapiens
ggagagattccaatgcttttctgtacctaagtggtgaaccccaagcagaaaatgacaggttgttgaacttgcgtgactcttatatcagtatgagcaaaccctcatgtagataggaaaataaaaccaagaagtcattgttatttcagcagcaccaaccttaccagacttgccacctttggaagaatgaatagaaataatgaatagaaggtgaacagctgaacattgagcattattcaggtcgtgatggcctcgcaagttaaatatcatgctgtgccttgaaaaaggaactgtaacagcaaacttcacatttgtgtatggatctttgttttgtagacattagtgtttat

SEQ ID NO: 44293 - DNA, 183 bp, Homo sapiens
  misc_feature (1)...(183): n = a,t,c or g
gctttttttaaaaaaaaattaaagtggtttagtaaatggcaaatgcaagttggcattaatgatgtaataattcttagaatgactatcttaaaaaatgtaaaagtannnnnnnnnnnnnnnnnnnnnnnnnnnnnnnnnnnnntttgngcggncanatcacctgaggtcangagtttganacca

SEQ ID NO: 44294 - DNA, 333 bp, Homo sapiens
gcaaagaattataatcctgaatctcacagtgtgtcacacctgtaataggagtaaattatgcaatcaattttaattaccaggagtttaaaatccaaatgtcaaggaactgttttgaccctgaaggctatttaatccactgtcccctacaaggcctcacaagtgctgggggaaaaaaaacagcaatgaggatgatcctgagttaatgtgtatgctccgcaagagagcttgcctataccttgattatttcataaaatcacatgttaatacattgctttcagaatgaaatactgacttgatctgataggagaaaatggtaatatttcatagttgttt

SEQ ID NO: 44295 - DNA, 390 bp, Homo sapiens
cccccggcagcaagtcgccaccatggtgaagatcgtgacagttaagacccaggcgtaccaggaccagaagccgggcacgagcgggctgcggaagcgggtgaaggtgttccagagcagcgccaactacgcggagaacttcatccagagtatcatctccaccgtggagccggcgcagcggcaggaggccacgctggtggtgggcggggacggccggttctacatgaaggaggccatccagctcatcgctcgcatcgctgccgccaacgggatcggtcgcttggttatcggacagaatggaatcctctccacccctgctgtatcctgcatcattagaaaaatcaaagccattggtgggatcattctgacagccagtcacaacccagggggccc

SEQ ID NO: 44296 - DNA, 389 bp, Homo sapiens
gtggtggtggcggcagtgaccctggagaggcccccacacgtgctgctcctggggaacttcgttctgcacggggcccactcagctctgcaccagagattgtgcacgaggacttgaagatggggtctgatggggagagtgaccaggcttcagccacgtcctcggatgaggtgcagtctccagtgagagtgcgtatgcgcaaccatcccccacgcaagatctccactgaggacatcaacaagcgcctatcactaccagctgacatccggctgcctgagggctacctggagaagctgaccctcaatagccccatctttgacaagcccctcagccgccgcctccgtcgtgtcagcctatctgagattggctttgggaaactggagacctacatt

SEQ ID NO: 44297 - DNA, 387 bp, Homo sapiens
  misc_feature (1)...(387): n = a,t,c or g
gaagagtctcacnnnnnnnnnnnnnnnnnnnnnnnnnnnnnnnnnnnnnnnnnnnnnnnnnnnnctcttcttttgtattagatattaacatcctgaggcaaattttcagaagcttaaactttagaaaataactcttttgtctttttttttttngcncncccncntttnnataaaaccaanttncnngnnaaatccnttttngggnnnttcnccanttaacngggcccnnccnttccnannccaaatttnncnggggtaaaancantaangggcncannctcagggataaagngnaggnntnggaaaaantanaaaatcctcaccaaaaaantgggggaattttnttnnccnggttntccnnccnngttnnaangtntccannggggg

SEQ ID NO: 44298 - DNA, 381 bp, Homo sapiens
cggacgcgtgggtgaaaggttaatttctgctcaagtggtaccacttaaaggcatgtattcttttagtatgtaaaatgaaatagtaccttgagtttaaatagaatgcatttaggcattgtagagatctgaaatagttttcttccactacattgttgaaatcaatgaagcaattagtttctcattcagaaatgtgcacactaatatttagttttgctttctcgtggataatattaagcacttactctgcagtttcctggaagttgtgtcaactgcagtgatactattcaggatggtgggaaatccccaaaaatatgtatgtgtgggcttgcttagattactatatttcatagttaatcttttgtctcttgcggtgctcatgat

SEQ ID NO: 44299 - DNA, 385 bp, Homo sapiens
gtatgatcgtgtgattgactttgatgagaacactgctctggatgatgcagaagaggagtcctttaggaagcttcacttaaaggacaagaagcgatttgaaaaagctaaccaggattcaggtcccggtttgagtcttgaagaatttattgcttttgagcatcctgaagaagttgattatatgacggaatttgtcattcaagaagctttagaagaacatgacaaaaatggtgatggatttgttagtttggaagaatttcttggtgattacaggtgggatccaactgcaaatgaagatccagaatggatacttgttgagaaagacagattcgtgaatgattatgacaaagataacgatggcaggcttgatccccaagagctgttacct

SEQ ID NO: 44300 - DNA, 382 bp, Homo sapiens
ctgtggcttctcctggcaggaaacatactggggagaaaccctttgagtgtcccaaatgtgggaagtgttactttcggaaggagaacctcctggagcatgaagcccggaattgcatgaaccgctcggaacaggtcttcacgtgctctgtgtgccaggagacattccgccgaaggatggagctgcgggtgcacatggtgtctcacacaggggagatgccctacaagtgttcctcctgctcccagcagttcatgcagaagaaggacttgcagagccacatgatcaaacttcatggaacccccaagccccatgcatgcccaactgtgccaatgcttttcttgtttcgacagaacttgcgctgcatgaaacttttaaagccccgggt

SEQ ID NO: 44301 - DNA, 381 bp, Homo sapiens
  misc_feature (1)...(381): n = a,t,c or g
gtggcgagggcagtgttcacctggcaagctctcggggcactttgtctgatagtgaaattgagaccaactctgccacaagcaccatctttggtaaagcccacagcttgaagccaagcataaaggagaagctggcaggcagccccattcgtacttctgaagatgtgagccagcgagtctatctctatgagggactcctaggcaaagagcgttctactttatgggaccaaatgcaattctgggaagatgccttcttagatgctgtgatgttggagagagaagggatgggtatggaccagggtccccaggaaatgatcgacaggtacctgtcccttggagaacatgaccggangcgcctggaagatgatgaagatcgcttgctgc

SEQ ID NO: 44302 - DNA, 373 bp, Homo sapiens
gacatgaacaaaattaaagaaaaaatccgaaggctctgtgaaactgtacacaacaagcatcttgatctagaaaatataacgactgggcatttagctatggagacattattatcccttacttctaaacgagcaggagactggtttaaagaagaactccggcttttgggtggtctggatcatattgtagataaagtaaaagaatgtgtggatcatttaagtagagatgaggatgaagagaaactggtagcctcactatggggagcagagagatgtttacgagttttagaaagtgtaactgtgcataatcccgaaaatcaaagctacttgatagcatataaagattcccaacttattgtttcatcagctaaagcat

SEQ ID NO: 44303 - DNA, 372 bp, Homo sapiens
gatcatcatgcccttcacttaactaggatggttgtgaggaatctaaattatcacaagaaattgcatgtcaccattgaaccttctgaagagcctttatttcctgctgatgaattgtatggaatagttggtgctaacctcatgaggagctttgatgtccgagaggtcattgctagaatcgtggatggaagcagattcactgagttcaaagccttttatggagacacattagttacaggatttgctcgaatatttgggtacccagtaggtatcgttggaaacaacggagttctcttttctgaatctgcgaaaagggtactcactttgtccagttatgctgccaaagaaatattcctctgctgttccttcaaaaca

SEQ ID NO: 44304 - DNA, 383 bp, Homo sapiens
gtgcgggcgtttctgcgggagcacccgagcctgcggctccagacggacgcccgcaaggtgaggtgcatcctgacaggtcacgagctgccctgccgcctgccggagctccaggtctacacccgcggcaaaaagtaccagcggctggtccgcgcctccccggccttcgactatgcagagttcgagccgcacatcgtgcccagcaccaagaacccgcaccagttgttctgcaaactcaccctgcggcacatcaacaagtgcccagaacacgtgctgaggcacacccagggccggcggtaccagcgagctctgtgtaaatatgaagaatgtcagaagcaaggggtggagtacgtgcctgcctgcctggtgcaccggaggaggaggag

SEQ ID NO: 44305 - DNA, 383 bp, Homo sapiens
ctacgagtagaacgctgtccgcagcttgcgcatttcgcagccgctgccgcctcgccgctgctccttcgtaaggccacttccgcacaccgacaccaacatgaacggacagctcaacggcttccacgaggcgttcatcgaggagggcacattccttttcacctcagagtcggtcggggaaggccacccagataagatttgtgaccaaatcagtgatgctgtccttgatgcccaccttcagcaggatcctgatgccaaagtagcttgtgaaactgttgctaaaactggaatgatccttcttgctggggaaattacatccagagctgctgttgactaccagaaagtggttcgtgaactgttaaacacattggatatgatgattcttc

SEQ ID NO: 44306 - DNA, 379 bp, Homo sapiens
  misc_feature (1)...(379): n = a,t,c or g
aagagagactggtctaaatctgataaggatgtccagagctctttaacccattccagcagagactcatacagatcaaaatctcactcacagtcttattctagaggaagctcaagatcaaggactgcgtcaaagtcctcatcacattctcgaagtagatcaaagtccagatctagttccaagtttgggcaccgaaagagagcatcaaaatcaccaagaaaaacagcttctcagttaagtgaaaataaaccagttaaaacagaacctttaagagcaaccatggcacaaaatgaaaatgtagtagtacaaccagttgtagcagaaaatattcctgtaataccactgagtgacagtccccccccttnaagatggaagcctggac

SEQ ID NO: 44307 - DNA, 378 bp, Homo sapiens
ctctcgagatcctaattatctgaatttgttcattatcgtaatggagaatagaaatctccacagtcctgaatatctggaaatggctttgccattattttgcaaagcgatgagcaagctaccccttgcagcccaaggaaaactgatcagactgtggtctaaatacaatgcagaccagattcggagaatgatggagacatttcagcaacttattacttataaagtcataagcaatgaatttaacagtcgaaatctagtgaatgatgatgatgccattgttgctgcttcgaagtgcttgaaaatggtttactatgcaaatgtagtgggaggggaagtggacacaaatcacaatgaagaagatgatgaagagcccatccctga

SEQ ID NO: 44308 - DNA, 379 bp, Homo sapiens
  misc_feature (1)...(379): n = a,t,c or g
cggacgcgtgggaataacagtacctacttgaaaggatcattgtgcggattaaaagaaataatatatgtaaagcactttaacacagcaccaggcccacggaaagtggctaatgttagctactatgaatggtgccagtgaagacactgaaaaataagtgatttcagtaaccttctggaaagctatcagtttcaaataatattttctctgtagtatgagatgaaattaaaagtggatagctttcaggaaagataaagagaacatgcttagaatgtaagctaaacagattttttctgttgctctttgaaaactatgagccctggccagcttaacctggtctgaggtgagactanacncataaacngtagataaatctctccct

SEQ ID NO: 44309 - DNA, 382 bp, Homo sapiens
aaaaggcatcaggaacctgattttctatgaactgccgacatatccacacttttacagtgaaatctgtaatatgctgagagccaccaacagaggagaagaggccacgtggacctgcactgttctctactccaaatatgatgcccagaggttagctgccgtggttggtgtggagcgggcggcacagatgctacagtccaacaagaatgtccacctcttcattactggagaaaaatgaaattttgttgggcaggaagtggtatttggcatgatacataatgtttgattctatgccatttggacccaattctgattacttacagaagaaggactgatacaaagaaagtgcatgaggcaatgtcagtattatctgacatctttcttt

SEQ ID NO: 44310 - DNA, 371 bp, Homo sapiens
  misc_feature (1)...(371): n = a,t,c or g
gtgttgtaccctttaccccttacattgtgtaatttgaaagtggcaaacaaacctgcagtaaaagtccttgattggcatcttcattcggatgatggagagcctttgtggtagtgtttgcttatgtgaacagcaggcctttcagataagagaagtggcttttccttggtgatgaaggggtagagattgagccatggggatggtttaggttaaagaatgcttttttttggccatcntgaggatctaacaacagagtagaaggaaggatgccctangtcancatgcagggnggnggnaaggcttncanntnncttannnaaacntctctnnnctttnntaannnncnnangnncactncttnncanntcnnccct

SEQ ID NO: 44311 - DNA, 382 bp, Homo sapiens
gcgagcaaggacgggcgcgggcggggatactcaaagccaacagctggagtcagccctcgtgtcccgggctcacagtggcacgactgaatcctcagagtcggctggcttttgagctctcacgattggggaggagggggcgtttctggttcgcagctccagaggattgcgttccttcccccatacctgtcccccacagtcacgctctgccctgacgtgcagcatttgacaagttaccccctcgccacatactacttccacccacgtccgagttaactttgttcttaaccttcttgagactaccctcggcctccaggtctttttttcccagttcatttttgcccataagattgagtttcgagtttcagatatcatgcagaaagtt

SEQ ID NO: 44312 - DNA, 381 bp, Homo sapiens
caagcagcccggaggagactgacggtccctgggaccctgaaggtcacccgggcggccccctcactgaccctccaaacgcccctgtcctcgccctgcctcctgccattcccggcctgagtctcagcatggcggatgggagcagcgatgcggctagggaacctcgccctgcaccagccccaatcagacgccgctcctccaactaccgcgcttatgccacggagccgcacgccaagaaaaaatctaagatctccgcctcgagaaaattgcagctgaagactctgctgctgcagattgcaaagcaagagctggagcgagaggcggaggagcggcgcggagagaaggggcgcgctctgagcacccgctgcagccgctggagttggg

SEQ ID NO: 44313 - DNA, 372 bp, Homo sapiens
cccacgcgtccgctcctgaccgggccttcagggtggacagagggaggatcggtcatggcagccacacctgggcctggccttgctccgggacctgccagaggagctggcctggctctgtgcctgcctgcctccaggagcaggacggtggctgggagggtagtgactggggacacaggtgcaggtgttagtgcaggaccggaagggtgaggtggcctggtcctcggggctcctggcctgggctggctgaggcaggactctgccaaaagtcccctgccaggcctcatggtggtgctcctggtggcagtggctctctggccgcgggccctgtctgtgtctccgtggtggctctcacagggctctccagacactcct

SEQ ID NO: 44314 - DNA, 382 bp, Homo sapiens
gaaatcctggttaggcccagccaaacatggctgatagtcataaggtgagtaagacctgccaggagggacagactccagagaggcccgtggggctggctcaggggttcccaacgaatgcccactggggatatagccagatctggactgggtcagtggatgggactgacgggaggatccagagaggggctgggaggagagtggagaagcccctggccaggccccggggacactctgggacttgtgtagtggggcagcagcggaggctggctccaggtccagcatcagcatattgagtgtttcgatggactgttcaatctcctgctgggaggctgctcgcgggaactcagggagactggggatgggggtctctgccaatggctga

SEQ ID NO: 44315 - DNA, 384 bp, Homo sapiens
ctctccatcctctgcctcacccagtccccgctgagactgagcagacgcctccaggatctgtcggcagctgctgttctgagggagagcagagaccatgtctgacatagaagaggtggtggaagagtacgaggaggaggagcaggaagaagcagctgttgaagagcaggaggaggcagcggaagaggatgctgaagcagaggctgagaccgaggagaccagggcagaagaagatgaagaagaagaggaagcaaaggaggctgaagatggcccaatggaggagtccaaaccaaagcccaggtcgttcatgcccaacttggtgcctcccaagatccccgatggagagagagtggactttgatgacatccaccggaagcgcatggagaa

SEQ ID NO: 44316 - DNA, 383 bp, Homo sapiens
gtttggagaagttccgaggcggcggtggcgccggtcaggacaaggatagcggaaccgggccctgggcttgtcgctcaccatgccgacagtagaggagctttaccgcaattatggcatcctggccgatgccacggagcaagtgggccagcataaagatgcctatcaagtgatattggatggtgtgaaaggtggtactaaggaaaagcgattagcagctcaatttattccgaaattctttaagcattttccagaattggctgattctgctatcaatgcacagttagacctctgtgaggatgaagatgtatctattcgacgtcaagcaattaaagaactgcctcaatttgccactggagaaaatcttcctcgagtggcagatatac

SEQ ID NO: 44317 - DNA, 383 bp, Homo sapiens
gcagccggcccgagccaggaacccaggtccggagcctcaacttcaggatgttgacaacattgctgccgatactgctgctgtctggctgggccttttgtagccaagacgcctcagatggcctccaaagacttcatatgctccagatctcctacttccgcgacccctatcacgtgtggtaccagggcaacgcgtcgctggggggacacctaacgcacgtgctggaaggcccagacaccaacaccacgatcattcagctgcagcccttgcaggagcccgagagctgggcgcgcacgcagagtggcctgcagtcctacctgctccagttccacggcctcgtgcgcctggtgcaccaggagcggaccttggcctttcctctgaccatc

SEQ ID NO: 44318 - DNA, 377 bp, Homo sapiens
  misc_feature (1)...(377): n = a,t,c or g
cggtgatccttctttctattacttccacataagtagccagagagagaaagcatggacaaatgcatgaactctataacagcagcccttgttaaaggaaccactaagttgtttcacacacagggaaagtgggcttgttcctttttctgctactacctctgcaaacttctgtgctgcttctgctttgttccctaacttactggatggaagttcccctttctcactgctaagctgagagagggaactgctagccctcgcctggcctgagagtacagatccattactgtgcatacatcatcctgatgtctgtgacctcctgcctctgcctctatcgtcagttcctgtgcctttcctgnggctgtcccactttatgatcacat

SEQ ID NO: 44319 - DNA, 375 bp, Homo sapiens
ctcaaccgcaagactcctgggatagttttcctcttttccaactgcttaataatttcctccgaaatgacacacttttgtgtaatggaaaatttcacaaacacttgcaagaaatctttgtacccttggttgtccgctatgtggatctcatggagtcttccatcgcccagtcaattcacagaggttttgagcaggagacatggcagcctgtcaagaatatcgccaacagtcttcccaatgtagctcttccaaaagttccaagtctgcctcttaatcttccacagattcctaacatttctactgcttcgtggatgccttctttatatgagtccaccaatggctcagcaacatcagaagaccttttttggaagcttgatg

SEQ ID NO: 44320 - DNA, 365 bp, Homo sapiens
ggcaagctcacctacacccagcagctggaggacctcaagaggcagctggaggaggaggttaaggcgaagaacgccctggcccacgcactgcagtcggcccggcatgactgcgacctgctgcgggagcagtacgaggaggagacggaggccaaggccgagctgcagcgcgtcctttccaaggccaactcggaggtggcccagtggaggaccaagtatgagacggacgccattcagcggactgaggagctcgaggaggccaagaagaagctggcccagcggctgcaggaagctgaggaggccgtggaggctgttaatgccaagtgctcctcgctggagaagaccaagcaccggctacagaatgagat

SEQ ID NO: 44321 - DNA, 372 bp, Homo sapiens
ggaacttctacctacgatggatttgggttagcatgggctatatcagaatacattgcaacaaagattggtgctttttgcatgtttgcaacccattttcatgaacttactgccttggccaatcagataccaactgttaataatctacatgtcacagcactcaccactgaagagaccttaactatgctttatcaggtgaagaaaggtgtctgtgatcaaagttttgggattcatgttgcagagcttgctaatttccctaagcatgtaatagagtgtgctaaacagaaagccctggaacttgaggagtttcagtatattggagaatcgcaaggatatgatatcatggaaccagcagcaaagaagtgctatctggaa

SEQ ID NO: 44322 - DNA, 363 bp, Homo sapiens
cccacgcgtccgcggacgcgtgggagaaaaaccagcaagaaggcggcgggggaagatggcggtcctggggtagagtttgcaagctttctgactaggctagtcgagtaactattcgggtcatggcgtcaaactcaactaagtctttcctggcagatgccggctatggcgaacaggaactggatgccaactctgcccttatggaattggacaaaggcctaagatctggcaaacttggtgaacagtgtgaagcagttgttcgctttcccagactttttcagaagtatccattccctattcttatcaattctgcattcctaaagttagctgatgttttcagagttggcatgagatgcatgtctgtga

SEQ ID NO: 44323 - DNA, 359 bp, Homo sapiens
  misc_feature (1)...(359): n = a,t,c or g
cccacgcgtccggcaacccaaaactcactccatgtaattttgagatcagacaaagggatggccagagcataataggagcatgtagaagcctgttgctaaatcagaaatgaacaggaatgcagttcaaaacctcatttactactctttagtctgttgccctagagacagacttcacatattgactttggcaactccagggtagcttgccatgtttgcagttatttaagtaaaagtatctgaatttgtaacttaaaaatacaagtttactgtagtcagtgcaacaaattacattcgtagtcaggagggaatttctagacattctaagtcatcttttggaaaatcatgaaatagaanaaata

SEQ ID NO: 44324 - DNA, 373 bp, Homo sapiens
  misc_feature (1)...(373): n = a,t,c or g
nnnnnnnnnnnnnnnnnnnnnnnnnnnnnnnnnnnnnnnnnnnnnnnnnnnnnnnnnnnnnnnnnnnnnnnnnnnnnnnnnnnnnnnnnnnnnnnnnnnnnnnnnnnnnnnnnnnnnnnnnnnnnnnnnnnnnnnnnnnnnnnnnnnnnntatatggtcagatttaacgtatgcatttaaaaggacaaaaattctgcattaagaacttgggagaggggttaaaaaaactcaaatttaactgtttaaagagctcctaggaaaagcattgcgatattttgataaaagatcaaaaacattctaatagacaattttttaaaatatggctttacttttgcctaatgttgcattgggttcattcattacaataaaactt

SEQ ID NO: 44325 - DNA, 369 bp, Homo sapiens
gaggaaccagaggggagagacagagcagcaagcagtggattgctccttgacgacgccagcatgagctccttctccaccaccaccgtgagcttcctccttttactggcattccagctcctaggtcagaccagagctaatcccatgtacaatgccgtgtccaacgcagacctgatggatttcaagaatttgctggaccatttggaagaaaagatgcctttagaagatgaggtcgtgcccccacaagtgctcagtgagccgaatgaagaagcgggggctgctctcagccccctccctgaggtgcctccctggaccggggaagtcagcccagcccagagagatggaggtgccctcgggcggggcccctgggac

SEQ ID NO: 44326 - DNA, 360 bp, Homo sapiens
  misc_feature (1)...(360): n = a,t,c or g
gtctgttcaccttaaagccgtctgaatgaacttgtcaaaatgcaaacctggtcatgttattcccttttatgtccttaattacctccctatggtctaatcaaataaattataaactccttgatgtgatatacaaaatcctttgtggcatggcccttatgcatttttagcctgttttttactgccaacatttattcactatactccaaacaaattcactaggatctatcatcgttctcaatnnnnnnnnnnnnnnnnnnnnnnnnnnnnnnctttgtagtgtttttaactaaagaatttgtagagttgcccaggccaggaagcctggtggctctaaagggtaatagaccttgtcagtaacag

SEQ ID NO: 44327 - DNA, 370 bp, Homo sapiens
gttcattcttcccagggtgccgagatccctgacaccccttgtttgtttgttttcgtccctatctaccgacctatcattctgttctcagtgacagaaataatgataggaatgtgaggcatgtttctcagacatagtgtaaggttgaactaaattgccttgtaagtgacctctttgggagctgtcatctctgtcattcagtgcaaccaagtgtgtgacatgggtggtatttttcactttcatctcctaattgtcagcatttaattattcctattgcagggcaccgcctaaaaatgatgctggctaacatacctgacgggtgccgtcacttcctgtgcctgcctcagagccagtgtcttcataaaggtgctgc

SEQ ID NO: 44328 - DNA, 366 bp, Homo sapiens
caagaagaaaaccttcaccccaaatatcatcagtcggaagatcaaggaagagcccaaggaagaagtaactgtcaagaaggagaagcgtgaaagggacagagaccgacaacgagaggggcatggacgagggcgaggccgtccagaagtgatccagtctcactccatctttgagcagggcccagccgaaatgatgaagaaaaaagggaactgggataagacagtggatgtgtcagacatgggaccttctcatatcatcaacatcaaaaaagagaagagagagacagacgaagaaactaaacagatcttgcgtatgctggagaaggacgatttcctcgatgaccccggcctgaggaacgacactcgaaa

SEQ ID NO: 44329 - DNA, 380 bp, Homo sapiens
  misc_feature (1)...(380): n = a,t,c or g
catgcagtaagcatttttccagacattatcctgtgcataagactcttaagtgtacacactgcttgtttacataaaaatgtgttcnnnnnnnnnnnnnnnnnnnnnnnnnnnnnnnnnnnnnnnnnnnnnnnnnnnnnnnnnnnnnnnnnnnnnnnnnnnnnnnnnnnnnnnnnnnnnnnnnnnnnnnnnnnnnnnnnnnnnnnnnnnnnnnnnnnnnnnnnnnnnnnnnnnnnnnnnnnnnnnnnnnnnnnnnnnnnnnnnnnnnnnnnnnnnnnnnnnnnnnnnnnnnnnnnnnnnnnnnnnnnnnnnnnnnnnnnnnnnnnnnnnnnnnnnnnnnnnnnnnnnnnnnnnnnnnnnnnnnnnnnnnnnnnnnnnnnnnn

SEQ ID NO: 44330 - DNA, 389 bp, Homo sapiens
  misc_feature (1)...(389): n = a,t,c or g
cctggacaannnnnnnnnnnnnnnnnnnnnnnnnnnnnnnnnnnnnnnnnnnnnnnnnnnnnnnnnnnnnnnnnnnnnnnnnnnnnnnnnnnnnnnnnnncactgatgctgttttgccactgatgctgttttgaaattgatattttgtctcatannnnnnnnnnnnnnnnnnnnnnnnnnnnnnnnnnnnnnnnnnnnnnnnnnnnnnnnnnnnnnnnnnnnnnnnnnnnnnnnnnnnnnnnnnnnnnnnnnnnnnnnnnnnnnnnnnnnnnnnnnnnnnnnnnnnnnnnnnnnnnnnnnnnnnnnnnnnnnnnnnnnnnnnnnnnnnnnnnnnnnnnnnnnnnnnnnnnnnnnnnnnnnnnnnnnnnnnnnnnnnnnnnnnnnnnnnn

SEQ ID NO: 44331 - DNA, 382 bp, Homo sapiens
  misc_feature (1)...(382): n = a,t,c or g
tgatgtggctgaagcaggtgtccaggcaggtaggctgcagccaggagctccctggcaccgcaggacctcgtggtactcttgccttagattttacacacactccacagccaagcactgccacggtcctccaggacctgggaagcaaaggcacaggcccacggtggccagccattgtggtgccgccccagcttctggatacagccttttgggtaaacactgggaactccagaagttgtggggagagtggggaatcagacagccgcctctaggggctgggttctgctggggcctccttgttggtgctgtaggcacccgccagggagcagggacccgacttgnagacgcattgcccggtactaggaaggagtgaggtgtgttccca

SEQ ID NO: 44332 - DNA, 390 bp, Homo sapiens
aaagaagaagcagaacgacttgaaaaggagcgtcgagctgctgaagaggcaaagtctgccatagcaaaacaagctgccgaccagatgaagaatcaggagcagctagcagcagaacttgctgaattcactgccaagattgcacttctagaggaagccaagaagaaaaaggaagaggaagctactgagtggcaacacaaagcttttgcagcccaggaagacttggaaaagaccaaagaagagttaaaaactgtgatgtctgccccccctccacctccaccaccaccagtcattcctccaacagaaaacgaacatgatgaacacgatgagaataatgctgaagctagtgctgaattatcaaatgaaggggtaatgaaccatagaagctaggaa

SEQ ID NO: 44333 - DNA, 392 bp, Homo sapiens
aaagctgggcggctgctcaggcatcacaggctgcaccccctctgaaagcatccccactgggctccggccacatcttcagtgcactgtgctgtgtgcgctgggtgctcacacgctgtccccagacccacaaagtgctaggccccagttgaagaaaggggtgaaatagccagcttcaccgaagggaagggaagggaagtattgggcgatgccagccccacagacgctcagcaaacattagtgcacattctcctagtcctcacccaatggcctcctctacccccatgcatggagctgccacatcagaagccccaagagaagctccctgcaggagaggccagctccctggatgcccaattgcatacctggccgaatctgccattgagtcaccttac

SEQ ID NO: 44334 - DNA, 382 bp, Homo sapiens
ggctccctaaaacaatgtcaaagccagtcctgctgttctctgttgccagggggcaggtctgggcctgggccaaccacgtttgttatcatggctgctgccttctggacagttgccagctctgccttgagaggttgtgggacctctggatccagctgacctgacaggtcatctactcagggaggagccctgtgctcccagctcagaggacagtttgggccagaactggaaggagacatctgtcccgtctttgagtgacaagcccgggacaacagccagtgggcatcacggctctccagcactccttagccggaggatacacagtgatgggtgcatcctgaccaatgcgacaaccaacacgtgctctcacaaacccctgactccc

SEQ ID NO: 44335 - DNA, 383 bp, Homo sapiens
cccacgcgtccgaaagaactatttgtagtaactatcagaatctacattctaaaacagaaattgtattttttctatgccacattaacatcttttaaagttgatgagaatcaagtatggaaaagtaaggccatactcttacataataaaattccttttaagtaattttttcaaagaatcacagaattctagtacatgtaggtaaatcataaatctgttctaagacacatgatcaacagatgagaactggtggttaatatgtgacagtgagattagtcatatcactaatatactaacaacagaatctaatcttcatttaaggcactgtagtgaattatctgagctagagttacctagcttaccatactatatctttggaatcatga

SEQ ID NO: 44336 - DNA, 374 bp, Homo sapiens
  misc_feature (1)...(374): n = a,t,c or g
gatggtttccataatcctccgtgcatttgaccagctgagttattgcagaaataataatcagctttcaaaacccttcagcttcctgcattttctttgtattttgatcttgggagcctgaagcttctaattctaagaattcatacatcaatagtcaaaaatcacaaggtagagtcccccaggactatgtctccaggttaggatccccaaagcttcctgcagattccacagccccggcctcctcagctcagagtgtgcctcacctctggcctgatccagcatctccattcaccctcctcctgccaatttccactcctnanagggcctcttctcccagacntccaccnttgggcatcagcggngccagcctctgcccc

SEQ ID NO: 44337 - DNA, 383 bp, Homo sapiens
  misc_feature (1)...(383): n = a,t,c or g
gagaaacacgaatgggtaacaacagaaaatggcattggaacagtgggaatcagcaattttgcacaggaagctgttgggagatgttgtttattgtagtctccctgaagttgggacaaaattgaacaaacaagatgagtttggtgctttggaaagtgtgaaagctgctagtgaactctattctcctttatcaggagaagtaactgaaattaatgaagctcttgcagaaaatccaggacttgttaacaaatcttgttatgaagatggttggctgatcaagatgacactgagtaacccttcagaactagatgaacttangagtgangaancntatganaaatacctaanctctattgaggagtgaaaatggaactcctaaatnaact

SEQ ID NO: 44338 - DNA, 400 bp, Homo sapiens
  misc_feature (1)...(400): n = a,t,c or g
attaagaataattaataggtnnnnnnnnnnnnnnnnnnnnnnnnnnnnnnnnnnnnnnnnnnnnnnnnnnnnnnnnnnnnnnnnnnnnnnnnnnnnnnnnnnnnnnnnnnnnnnnnnnnnnnnnnnnnnnnnnnnnnnnnnnnnnnaaacgaaaataaaacaaacagaaaacnnnnnnnnnnnnnnnnnnnnnnnnnnnnnnnnnnnnnnnnnnnnnnnnnnnnnnnnnnnnnnnnnnnnnnnnnnnnnnnnnnnnnnnnnnnnnnnnnnnnnnnnnnnnnnnnnnnnnnnnnnnnnnnnntgtgtatgtctgggtaagtgtatagattttacaactattttgaaggcgacctttttaactttaaacagaccactctggaggagacgcctgacccagagc

SEQ ID NO: 44339 - DNA, 381 bp, Homo sapiens
  misc_feature (1)...(381): n = a,t,c or g
gccttccataccctattcctggggagaaaaggagggaatcccttgtatggccccaccccaaattcagggaacttctagacttaatgatttcacagctttaagtttgcatttgnnnnnnnnnnnnnnnnnnnnnnnnnnnnnnnnnnnnnnnnnnnttcagcatctcccaccccagggtatcacagctctcatcttaaactcacttctgagtcattactgcccttctctggcatttccttctctgtctcccaaacaaaatctaacagttagacattgcattctatcacgnnacacttggctagcnacagctagtaantgagagaagngaattntactagttataggagntantggactgaggnttgcaggacgatcncgcca

SEQ ID NO: 44340 - DNA, 377 bp, Homo sapiens
  misc_feature (1)...(377): n = a,t,c or g
cggacgcgtgggctcatattttaagacaccttctctaggtccaagttctttcctttatgtatgttacacatatttgttgagtacctactgtgtgtcagcttgagccagactcagatcctgtcctcgtggaacacacatcctccacaggaagacttggcatanaaaaggagaacaaatactggagtatgatttagataattataaatgttataaggaaaaataactgggataaggaaaggtagctattttaattggataattaggcatacttctctcatgcataacaaatattctaattttgttcaatccataccaatattgtttggattataaaggtaatacctttttttcaactccattttttctaaaaaagttag

SEQ ID NO: 44341 - DNA, 402 bp, Homo sapiens
acccacgcgtccgggtagaggaaacaagacagttctgtctgcagaagcccattatggctgtaactggagatgacacagctgccactggtgacatgccaacttaccagatccgagctcctactgctgctttgccacagggagtggtgatggctgcatcgcccggaagtttgcacagtccccagcagctggcagaagaagcaacacgcaaacgagagctgaggctaatgaaaaacagggaagctgcccgggagtgtcgcaggaagaagaaagaatatgtcaaatgtcttgaaaatcgtgtggctgtgcttgaaaaccaaaacaagactctcattgaggaactcaaggccctcaaagatctttattgccataaagtagagtaactgtctttgacttggaccttgt

SEQ ID NO: 44342 - DNA, 379 bp, Homo sapiens
agaacctcagttctgttctccaaaaagaacccgaagacagctggaccgcccaagaggccgggccggccccccaaaaaccgggagagccagatgacccccagccacggaggcagtcctgtggggcccccccagctccccatcatgagttccctgcgtcagcgcaagcggggtaggagcccccggcccagttcgagctcagacagcgacagtgataagtccacagaagaccccccaatgggtgagccttaccatcacccagccccccaagagaacttaccagccaatggcttcagcggtggaaaccaaccagtgaagaagagtttcttggtataccgtaatgactgcagccttccccggagcagctcagactctgagtcca

SEQ ID NO: 44343 - DNA, 386 bp, Homo sapiens
gctttgtatacaggagataataccacatcatcggttatctccaaactccagtcttctctcaactgcccagttgtatgttgtcatcaatcactttttcaaggctgggtagagacaagtttctcctcgtaactttgacctctcccactctccaaatgtaatctggacctcattgctttcaaggtcagcttccccatagctcaggtatcctttgctctcctgtatcttcatttactattagtgaagagatctctgtcctggaggttattctaaactttctttgtaactattgttatagacaatggtttccaaaccagtggtttctatgtagcttttctagttccttgctatcttctcaccactggcttgaggtagtgatttggactttg

SEQ ID NO: 44344 - DNA, 375 bp, Homo sapiens
  misc_feature (1)...(375): n = a,t,c or g
attcattttaagtactgtattaaatctatttccagatagccaggatgatatacctgtctcttggtaggctagatttcatccctttttttgtctaggccagatcaaacctaattaaaattgttcttctgctttatcttttattatttaaacactcattgccctctgtggtctcactaatggactaatttcctgagattataaattggcatgctttcatttccagattgtagcctctctgtcatcatttttccaattttttttgatgtttgttttatgctgtatcacaaaatggatttcctcatttcttcttccctgaaatcatgtgtccccttagaattaatggataanctgtgcatccacggatatcctaacggc

SEQ ID NO: 44345 - DNA, 377 bp, Homo sapiens
atgataatgtgtgcatggctgaataggttatattggacaggaccattttgggggcacttaataaggggctggcagtttttacctagacaccaacttgtggcctgctccgattccctgttgttgaaataattcacggatgcagttcaagaagaaagtcctcttttacagtcattaacatatagattgggttctttggaagaggaaacttggaaatctattacgttcaaagaaatcttttattcttcacacctttaaagtcattttaccagtttataatgcaaaggcaggtgattgatacttttcctaacaactatattttagagaagtagacgctcatctttcccccatatatttagagtcatacttgatgtgactcc

SEQ ID NO: 44346 - DNA, 239 bp, Homo sapiens
  misc_feature (1)...(239): n = a,t,c or g
gtctattaattttatctttccagagaactaactttaggtttcatttatcctttgtatggattcgggaggctgagtttcattcagtcatgctctgattttagttatttgttttcttcctatagctttggagttagtttttttttttttttttngncctntnggnnnnaggaanaaaggtnaattcnaaatcatntttaanngnnnnnnnnnnnnnnnnnnnnnnnnnnnnnnnnnnnnnn

SEQ ID NO: 44347 - DNA, 390 bp, Homo sapiens
  misc_feature (1)...(390): n = a,t,c or g
attctggactgtcatactgatgacagtggaacctaccgtgctgagagcaccaactacaagggcgaagcttctgactatgcaacgttggacgtgacaggaggggattataccacctatgcttcccaacgcagagatgaagaggtccccagatctgttttccctgagctgacaagaacagaggcgtatgctgtttcatcatttaagaaaacatctgagatggaagcttcgtcttctgtcagggaagtgaaatcacagatgacggagacaagggaaagtctctcctcatatgaacactctgcatctgcagaaatgaaaagtgctgcattagaagaaaagtcactggaagaaaaatccacaaccagaaagatnaagacnactttggnggcaagg

SEQ ID NO: 44348 - DNA, 383 bp, Homo sapiens
  misc_feature (1)...(383): n = a,t,c or g
ggctgacaaaaaaagactttgagctgaatgctctcaacgcatggattgaggatgaacaggccctcggtagccagctgcagaagaagctcaaggagcttcaggcactcatcgaggagctggaggaggagctggaggcccagcagaattgcagcgcaatgtcggtgaagggcatgaggaagagcgagcggcgcatcaaggagcttacttaccagacggaggaggacaggaaaaacctgctgcggctgcaggacctggtagacatgctgcagctaaaggtcaaggcctacaagcgctaggccgtcgangcgnaggannaagccaacaccancctgtccaagttccgcaaggtgcagcacgagctgnntgangcagangactggccg

SEQ ID NO: 44349 - DNA, 342 bp, Homo sapiens
  misc_feature (1)...(342): n = a,t,c or g
ctatctctgggttcttctttttctatattggcttcatctttatttaggtcagcccctttttagggacaaattatttagcaattccagtgtatattagtnttctattaatgggnaatanataaccaagagcttagnggctttaaacatttatttattaccttacagctatgnangncagaaatgngggtggacncaactgngntntctgcttagggtttaatgaaattgaaatctaggcnctggctggggtagcttttatctggaggatctgganaaaagcccccgtcccagcttcttcaggcattgcctgaatttagntccttgnagttnccnactgtgtgg

SEQ ID NO: 44350 - DNA, 345 bp, Homo sapiens
  misc_feature (1)...(345): n = a,t,c or g
cggacgcgtggggtaaaggagaatattttaaaaacctataaaggagtccttgacaatactatctaaatctttttatacattgataattttataatataccctgtatatattaggtaaatgcctgtaggtctccaaagacctagaattgagaatcagagggtaaacatccaaacaaatcccctagatgtgggaaaataaggaagttatcttatttcgtcgtcatttatattgaggtgaatcatgatggagctggtatgagatttcctcaggaggtttcttgaagcttatcaggtttacagaccataacatactctttgctgattcatatancaatgaatgataaag

SEQ ID NO: 44351 - DNA, 344 bp, Homo sapiens
ggtcccttcccgacccagccagctgcagggcacggggacctggatagttaagggcttttccaaacatgcatccatttactgacacttcctgtccttgttcatggagagctgttcgctcctcccagatggcttcggaggcccgcagggcccaccttggaccctggtgacctcctgtcactcactgaggccatcagggccctgccccaggcctggacgggccctccttccctcctgtgccccagctgccaggtggccctggggaggggtggtgtggtgttgggaaggggtcctgcagggggaggaggacttggagggtctgggggcagctgtcctgaaccgactga

SEQ ID NO: 44352 - DNA, 145 bp, Homo sapiens
gtccgtgggttaaagttgaaatttgccctctgttcataccgttccctctgtctggaatgtcctacttccatctctctcttctataacccttcctcctttctgaagtctaattaactcttggtcattctctctttttttttttttt

SEQ ID NO: 44353 - DNA, 340 bp, Homo sapiens
gcccttcctctgtagaaccagctgcacggcagctgtccaccagagggcagacctgcactctccattcatgtccagggctgtgacagaccaggccttcccctagccccacaagttgatttggggggttttgacccttactcctgagctgatccaagttttatgctgatttttccaaggatctctccctccttttccctccatcactcagaggtagggaagggggcggcattaggatggtgttactgtattgggattttatgttgttctgtcgtcttcagcacaggtagtataaggttatattactgtagaaccacagtgcccatcttgccagcagtgcccg

SEQ ID NO: 44354 - DNA, 349 bp, Homo sapiens
  misc_feature (1)...(349): n = a,t,c or g
tagcaaactagttgattcatgaagtttaaggaaagctaatcctgtaaaataaaaggnnnnnnnnnnnnnnnnnnnnnnnnnnnnnnnnnnnnnnnngtcgcatttatttacccttctgaaaatcctggggtccttaagaaccatgctaattatcatcacaccttatataccaaaaggttaattcagttaagaaacatgaagccggttttgctgcactgagtattattttactgaatttgatggcagtttttacaactcttcatccccctggaatgcctgctgtggtagaggcnnnnnnnnnnnnnnnnnnnnnnnnnnnnnnnnnnnnnnnnnnnnnnnnnnnnnnnnn

SEQ ID NO: 44355 - DNA, 351 bp, Homo sapiens
gccttcagttcacagtgcctctgcaacagccattgccctcaggtcacattctttgggctggctgcccttgcaaagcagctggccaaggcttattaaatgtgaacccaacttttccccagggctttcctgtacctgcaagcctcttagtacttaatttaccgaaggcaaatcttccagactatggcttgagtaggatgaaagacaaacacatctgcccaatgatccagctgcccttccttagaccatcacatgcctcccctcaatcacaggttttaaaattactgccctatgttgtctataagaccaagaaaactgtagtacccttattccttttgtgtcatgtaaattgta

SEQ ID NO: 44356 - DNA, 342 bp, Homo sapiens
cccacgcgtccgaacttaatagacacatatacacaggcaaatgagtgcactaaagctgggaaaatctgaattagataggtgtatgaatgccaatatcatggttatgatatgccatagttttgcaaaatgattccagtaaactgggggaagtgtacaagaggtctctgtatgttatttcttacgattgcatatgaatttacaattatctcaaaagtttcaatgaaaaaaaaagtagacagcttaggtaaaagtatataggccttttcctagttaaaaagtagtaatgttaaagtatatattcgggaaagacagttgaatatatttttaaggaaaacatcatgt

SEQ ID NO: 44357 - DNA, 346 bp, Homo sapiens
caacaggatggaattcagggacggacccagcctggctaagggaaccatttcactgccggacttaggctggcaatgcccccttccccaaccccagacacaggggttggccacaatcccactgaatgcccttggttcacactccatttcccagtttctgttgacccccaccttccagtgttggacaggatggaggggggacacttgcttaggggctctcctgggccccacaccagtgcccaccccaaatctggtcgtctcctccccccatgcacagcacaagctaagggctgccctctgcccacacgctgcgttcactgccaatgctgtactcacctccatcaccctc

SEQ ID NO: 44358 - DNA, 340 bp, Homo sapiens
  misc_feature (1)...(340): n = a,t,c or g
gagaaatatttctcttagaaataaaactgggcttggatcctgaaaccctgggttctgattctagccttgtgctgcttttcaattagccgagttctggcaggatattgggaaaatactgctacttcttacattgcccttttatatagaaccaccacctgaactgaaaccattgctactgggaagggtggctcccacaggaagagtataagcactactgtgatgaggatggagtaagctaaagtatactttttttttttttgnnggnnntnccctngtngtgcccnngnnngaagncnanggncccaatttgggnnnanngaaccnncnnttnccngggttt

SEQ ID NO: 44359 - DNA, 343 bp, Homo sapiens
gactagttctagctcagcatgggctcctctctcctttcagggaggctggaccagctgctcagcaccctgcagagccccctggagagcctggagttggccttctgtgctctgctgcctgaggacctacgcttcctggcacggagcccacatgctgcccacctcaagaagttggacctgagtggtaacgacctgtctggcagccagctggcacccttccagggtctgttgcaggcatcagcagccacactgttgcatctggagctgactgagtgtcagctcgcagacacccagctgttggccacactacccatcctgactcagtgcgccagtctccggtaccttg

SEQ ID NO: 44360 - DNA, 351 bp, Homo sapiens
  misc_feature (1)...(351): n = a,t,c or g
gtgattctctcttcagtactggctttgtcactgccttagtctgtttaatattgttgtaaaagaataccagnnnnnnnnnnnnnnnnnnnnnnnnnnnnnnnnnnnnnnnnnnnnnnnnnnnnnnnnnnnnnnnnnnnnnnnnnnnnnnnnnnnnnnnnnnnnnnnnnnnnnnnnnnnnnnnnnnnnnnnnnnnnnnnnnnnnnnnnnnnnnnnnnnnnnnnnnnnnnnnnnnnnnnnnnnnnnnnnnnnnnnnnnnnnnnnnnnnnnnnnnnnnnnnnnnnnnnnnnnnnnnnnnnnnnnnnnnnnnnnnnnnnnnnnnnnnnnnnnnnnnnnnnnnnnnnnnnnnnnnnn

SEQ ID NO: 44361 - DNA, 387 bp, Homo sapiens
gtcagatcgttcattgcctttccagggttatttagtaaagtttgttgaaaacaaaaacgccttttcttggttcttttttcagttattttgaaggtccagcatcctgattaaatgtctgacacattaatgaatgaccagcagcagctttcagctcttaaaaagacacttatattttgattttacatgctggttacctgttccattgttgtcaaatgcccactctccatcagatgtgttcctccattttcttatccacaaagtactcctcacttttcaatttgtcatgttactaaatggtgttacattaaagccctgtgttaagtgtctgcttttgactgaatttcttcatagtaaccttcagtgtgtgtgtgtgactatgttcaatta

SEQ ID NO: 44362 - DNA, 393 bp, Homo sapiens
  misc_feature (1)...(393): n = a,t,c or g
gttgcgctttgtaatgaatttccaactgctcaacctttctgatggacaaaccgcccctcatatcttccaagagagacgactgagacatgaactggaggaggggagagacgactaggtgggtgaagtgcatagctggagactcagagcnnnnnnnnnnnnnnnnnnnnnnnnnnnnnnnnnnnnnnnnnnnnnnnnnnnnnnnnnnnnnnnnnnnnnnnnnnnnnnnnnnnnnnnnnnnnnnnnnnnnnnnnnnnnnnnnnnnnnnnnnnnnagagtatgatggaaggtctgatcttcatgttggaataactaacacaaatggggttgtgtataattacagtgcacatggtgtccagcgagacggagaagggtgggaagagagcataagcatcc

SEQ ID NO: 44363 - DNA, 393 bp, Homo sapiens
gtatgacattgccttccatcaagatggctctttggctggcactgggggactggatgcatttggtcgagtttgggacctacgcacaggacgttgtatcatgttcttagaaggccacctgaaagaaatctatggaataaatttctcccccaatggctatcacattgcaaccggcagtggtgacaacacctgcaaagtgtgggacctccgacagcggcgttgcgtctacaccatccctgctcatcagaacttagtgactggtgtcaagtttgagcctatccatgggaacttcttgcttactggtgcctatgataacacagccaagatctggacgcacccaggctggtccccgctgaagactctggctggccacgaaggcaaagtgatgggcctaga

SEQ ID NO: 44364 - DNA, 395 bp, Homo sapiens
  misc_feature (1)...(395): n = a,t,c or g
gtcttaatggttttaaaatgaggaggaagactaccagctatccaaaagattgtctttgatgtgtagttaagaaagagaaatgtaatataataacaaatgtgtattactataaaagcctacattacaaagtatttattaagctttgcaatattgtttttaaaatagtaaatatagtttggatattcaattttatcttgtgagaaattaaaaacagagaaaatgccaagagaagtgaagattagttaatgggaccctgagtttgaacgtcattagtgcccaaggaaatattacagattctcttagaatataatgaaataaannnnnnnnnnnnnnnnnnnnnnnnnnnnnnnnnnnnnnnnnnnnnnnnnnnnnnnnnnnnnnnnnnnnnnnnnnnn

SEQ ID NO: 44365 - DNA, 390 bp, Homo sapiens
cggacgcgtgggtgccacgtaggtcaaggaggcttcatggagatggtcggagttggagggtaggtaggaaggcttttgtgcatgtgggggagtggtggggatggaattccaagagtggggcagcagggcaaagacccagacacaggcgcacagctcccagcaagcgccctggatgcattaagccctccatcagtggtgtcaaagcaagaggaaccgtgtgtggcatattctggaggcagagagtaggactgagtgcatggatcagagggcgaatgctggaaagggaaggtgtagttagatgggtagagtgaaagcggattgccaagggccctgggagccaggacaagggtcccgtgtgctgagtgatagtgatgtgacatggtgaagtcc

SEQ ID NO: 44366 - DNA, 378 bp, Homo sapiens
gaactacccattttctggattttcccctatttttttgaatcccgaatttgtcagttttttccaagcttccagatgctggattaccaggtagattatgataatcatgcactttataaacacggaaagacaggtcgaaaacagtctcccgtgcgtattttcaccaacattccgcccaacaaaataatccttcctactgaagaagggtacagattttgctctccgtgtcaacggtatgtttctctagagaatcaacactgtgagcactgtaattcttgcacatccaaggatggcaggaaatggaaccattgctttctctgtaaaaagtgtgtaaagccttcctggatccactgtagcatctgcaatcactgtgctgttcca

SEQ ID NO: 44367 - DNA, 378 bp, Homo sapiens
  misc_feature (1)...(378): n = a,t,c or g
cccacgcgtccgcccacgcgtccgtttttctactatttattgaactttcaaacattctcaaactttggggaaaaggaaaggaaacacaggagaagttttcagcagttgccccgagctgttttgtgtgtaatgaagtggttctttgattaaggagctctatttcttatttaactgatatcccactgccccactccacaaaataggaaaatgaagaaatctttctctctgacttgtttacatcatttcacggaaacacatctttgtttgtaatgcagtattctttctctgtgtttgacagagatggggaggggcagaggaatttaagaggttttaaaagaaatgttatgtttcttatgacttgnttccactcctcgtaca

SEQ ID NO: 44368 - DNA, 380 bp, Homo sapiens
tgctaggatccagaaataccacactgtttcatatattggaacttgttattggctagccttatgccagcctgccactgtcaatatattctgttccccttggttacaagcttaatatactcttgtgtttttggcgaaatgagctttttatcctattgtaatattttcaattgataatagatgtcattaaatctactgcttgtatagagacaggtgtacccaaatttactcttgacctttttataaagccaggtaatggagtctgttcctttgcatctcaggaaggaattgactttgctttatgtatcagacctcatcaattgcaccctctccatcatgccttattttcctaagttctccttaaagaaactcaacccacaaaa

SEQ ID NO: 44369 - DNA, 388 bp, Homo sapiens
aagagactcattccctccaacagttcctacaagttctttctctttcctgaacttgctgttactaatttacccctcactgttcttcaaggcaaagcatctgcaaggttttcagtcctttccccctcccgtcctgtccccatcagtgttgaaatgtatgctacagttattatggttgtaatttgttatgccatgttgatcttcttgtgcttttcatatcagaacaatgcatttttaacattctgactttctttttctctcaattggtaactgactatatagaaaatttatatttatggatactatttcttttttaataagttcaagggaaaacattgataaaggaaaatttatcctttcaactttctttaggtgccagcattattttcat

SEQ ID NO: 44370 - DNA, 389 bp, Homo sapiens
  misc_feature (1)...(389): n = a,t,c or g
ctgaaacagagcaacgtgctccaaagtctgttactgattatgctcagcaaaacccagcagctcagattcctgccaggcagcgggagattgaaatgaaccgacagcaacgcttcttccgcatcccattcatccgccctgccgaccagtacaaagaccctcagagtaagaaaaaaggctggtggtatgcccattttgatggaccatggattgcccggcaaatggaactccatcctgacaagccacccatcctacttgtggctggtaaggacgacatggagatgtgtgagctgaatcttgaggagactggcctgactcggaagcgtggtgctgagatcttgccaagacagtttgaagaaatctgggaacgctgnggaggcatccagtacctt

SEQ ID NO: 44371 - DNA, 385 bp, Homo sapiens
atcaaagcctatactttccccactttgccttactgcgtctcgctaaataaaagtacacgttcatcaatttaacagtatttattgagcttctcttatatgtataactttgctatgaactgaggtggatactggattttgggacataattctggccttcaatttatagtttggagaaaagcatgttgaaaacattcaatttgtaatatgaggcagtatgtgattaatagctaaaatggtgatagcctgtggtaattactaaaagagtttaatgcaaagagaattttacaattggctggatatgtcagagaatatcctgtgaaggaggtgtgacttggtctgaaccccaggcagagtttgtggggggttgaaatcgtagagactcttt

SEQ ID NO: 44372 - DNA, 380 bp, Homo sapiens
  misc_feature (1)...(380): n = a,t,c or g
attagttgtaaaaagtaaaggcacaagagtcgggtacagtgactgacatctataatcccagctactccagaggctgaagtgagaggaatagcttgagcctaggagttggagnnnnnnnnnnnnnnnnnnnnnnnnnnnnnnnnnnnnnnnnnnnaaccacgtctcttannnnnnnnnnnnnnnnnnnnnnnnnnnnnnnnnnnnnnnnnnnnnnnnnnnnnnnnnnnnnnnnnnnnnnnnnnnnnnnnnnnnnnnnnnnnnnnnnnnnnnnnnnnnnnnnnnnnnnnnnnnnnnnnnnnnnnnnnnnnnnnnnnnnnnnnnnnnnnnnnnnnnnnnnnnnnnnnnnnnnnnnnnnnnnnnnnnnnnnnnnnnnnnnnnag

SEQ ID NO: 44373 - DNA, 382 bp, Homo sapiens
  misc_feature (1)...(382): n = a,t,c or g
cggacgcgtgggggcctttgaagaagagtttttgagatagatgctagacccataataatctatttgggacaaatggaagaacaaattttgtgaattttacttgttcataaaaaaacttgaaaatatagtagttagtccaaggtaataccaggagtaggaaaaaaactagctgcagaaatccaaattgcaaatatacattgaggcttaaggataaatcacagtactttgtcctagtttgatttgtgaacaaaagaagggttcacactgggagtagaattatgtttttgtacttaggtgntaagggantaaagttttttgtttgatatatagacaggatttgtcaccaaattgttcagaatgtaacagtcattggggtanagtt

SEQ ID NO: 44374 - DNA, 380 bp, Homo sapiens
  misc_feature (1)...(380): n = a,t,c or g
ggagaaagttgagacagagtatgctcgctatgagaatggacactactcttaccgcatccaccggtccccgctctgtgagtacatgatcaacttcatccacaagctcaagcacctccctgagaagtacatgatgaacagcgtgctggagaacttcaccatcctgcaggtggtcaccaacagagacacacaggagaccttgctgtgcattgcctatgtctttgaggtgtcagccagtgagcacggggctcagcaccacatctacaggctggtgaaagaatgagagactcggggagcagggaaggggagggagacgtgtgtgcaggaaacggggacnntggggaggggacctgcaggggcagccccctgaagtgccaagagag

SEQ ID NO: 44375 - DNA, 386 bp, Homo sapiens
cccacgcgtccgacaggcgccttgactgaggacagcatagacgacaccttcctcccagtgcctgaatacataaaccagtccgttcccaaaaggcccgctggctctgtgcagaatcctgtctatcacaatcagcctctgaaccccgcgcccagcagagacccacactaccaggacccccacagcactgcagtgggcaaccccgagtatctcaacactgtccagcccacctgtgtcaacagcacattcgacagccctgcccactgggcccagaaaggcagccaccaaattagcctggacaaccctgactaccagcaggacttctttcccaaggaagccaagccaaatggcatctttaagggctccacagctgaaaatgcagaatacct

SEQ ID NO: 44376 - DNA, 397 bp, Homo sapiens
gaaggcggctgcagaagatgtcaatgttactttcgaagatcaacaaaagataaacaaatttgcacggaatacaagtagaatcacagagctgaaggaagaaatagaagtaaaaaagaaacaactccaaaacctagaagatgcttgtgatgacatcatgcttgcagatgatgattgcttaatgataccttatcaaattggtgatgtcttcattagccattctcaagaagaaacgcaagaaatgttagaagaagcaaagaaaaatttgcaagaagaaattgacgccttagaatccagagtggaatcaattcagcgagtgttagcagatttgaaagttcagttgtatgcaaaattcgggagcaacataaaccttgaagctgatgaaagttaaacattttat

SEQ ID NO: 44377 - DNA, 394 bp, Homo sapiens
tgaataagcatttagctttttaaatcattttaaaaattaagtctaattttgaagcttttttccttgctacccagttcagtttctcttccaaatgtgacacgcttatatgctttcaattctgatatagtcaaagtgctaaagactagttctgctattgacgaaggaattagcattccttagtgaaggccaaaaactacagtgatatgttcacaccttgatcactctgtcgtctatacagacagctattgacatatttgttgcattgacgaagctaacatcatctgactgtatcgtgggtctggttatccatttgtgccctagaatcctgggtcacctcagttgaaagtgaccaaggccaaatatttcgtcccatgcttcccagggacaacataat

SEQ ID NO: 44378 - DNA, 384 bp, Homo sapiens
atttttttttcatagagatttgtctaattgcatctcaaaattattctgccctccttaatttgggaaggtttgtgttttctctggaatggtacatgtcttccatgtatcttttgaactggcaattgtctatttatcttttatttttttaagtcagtatggtctaacactggcatgttcaaagccacattatttctagtccaaaattacaagtaatcaagggtcattatgggttaggcattaatgtttctatctgattttgtgcaaaagcttcaaattaaaacagctgcattagaaaaagaggcgcttctcccctcccctacacctaaaggtgtatttaaactatcttgtgtgattaacttatttagagatgctgtaacttaaaat

SEQ ID NO: 44379 - DNA, 382 bp, Homo sapiens
acccgccccactccctcctaacctagagattgttacagaagctgaaattgcgttctaagaggtgaagtgattttttttctgaaactcacacaactaggaagtggctgagtcaggacttgaacccaggtctccctggatcagaacaggagctcttaactacagtggctgaatagcttctccaaaggctccctgtgttctcaccgtgatcaagttgaggggcttccggctcccttctacagcctcagaaaccagactcgttcttctgggaaccctgcccactcccaggaccaagattggcctgaggctgcactaaaattcacttagggtcgagcatcctgtttgctgataaatattaaggagaattcatgactcttgacagctt

SEQ ID NO: 44380 - DNA, 390 bp, Homo sapiens
gcgtgaaccgcaggtatggaggcagcggcatgccgttgctccgctgtgggaggtgtgtggggtcaggccagccactttcctccgtgttcagatgactctcgttcgccctgaccggcttctcacagtgtctcaggccactgcgccaccgcgctggtgctgagcagaagcgggcagaagtggggtctgctttcaggacttcatttcccccactcgttccggccccgcatgctccacgtctgccctttggtctgagttaaaactgcgatgctgaaaagtgcgagctctttccatgaggaggagccacacagggtggcctccgagggtgagtcgctctgctaagcaagggcagccgctgcacgtcagcccgcaggccaagggtccagcttatcc

SEQ ID NO: 44381 - DNA, 390 bp, Homo sapiens
  misc_feature (1)...(390): n = a,t,c or g
cccacgcgtccgggttacccccagtgccatccagagcgagacagaacagttgcaggcggcagcgatggctgcggaagcagaacagcagctggagacgatagcctgtagctagaggcggtgggacagggacactttgcctggaaagtggagactgagatgacgtggatcataatgagtgaatgccagttacaatatttttgtggaaacgtatggaacattgtactcactggacttaaggcagtgcttggttagctatttttaagacttttcaaggaaatggtgttcctcagttctgaccaaaccgtttcactgtcttgtctggtgtctagtattaatgttgccagtaagcacctctctcccttttttttttttaataatttaaattngaaa

SEQ ID NO: 44382 - DNA, 372 bp, Homo sapiens
cccacgcgtccgcccacgcgtccgcccacgcgtccggtgaaaatgcagttgatatctttgatgtgaactccatggaatggattcagactcttcctctcaaaaaggttcgacccttaaacaatgaaggatcattaaatcttttagggatggagaccattagattaatatatttcaaaaataagatggcagaaggggacgaactggtagtacctgaaacatcagataatagtcggaaacaaatggttagaaacattaacaataagcggcgttattccttcagagtcccagaagaggaaaggatgcagcagaggagggaaatgctacgagatccagaaatgagaaataaattaatttctaatccaactaatttta

SEQ ID NO: 44383 - DNA, 371 bp, Homo sapiens
ctcagacaacagcaggatggaattaccttttagagcaatatgaactgtcaatgtcaagtgctgaacaaaacaaaattctgtatgctttgtcaacgagcaagcatcaggaaaagttactgaagttaattgaactaggaatggaaggaaaggttatcaagacacagaacttggcagctctccttcatgcgattgccagacgtccaaaggggcagcaactagcatgggattttgtaagagaaaattggacccatcttctgaaaaaatttgacttgggctcatatgacataaggatgatcatctctggcacaacagctcacttttcttccaaggataagttgcaagaggtgaaactattttttgaatctcttgag

SEQ ID NO: 44384 - DNA, 367 bp, Homo sapiens
  misc_feature (1)...(367): n = a,t,c or g
ggagaaaaacagagagatgctggacatcttaataaagcatctggtcaaagtatcactacacagccaacaaaatctcatgactgtctcaaatcttggtgtcatatttggcccaactctaatgagagcacaggaagaaactgtggctgctatgatgaatattaaatttcagaatattgtggtagaaattctgagaggccctatgaaaagatttttcatactgctccagacccaagcattcctcttcctcagcctcagtctcgatctggatcannatgnacaanntnnncatagngctctatcngannatntttcctactgctncngaccccnncattcctnnncctnacctnagnncnancnggatccc

SEQ ID NO: 44385 - DNA, 365 bp, Homo sapiens
cccacgcgtccgcccacgcgtccgcccacgcgtccgggctttttatggtgtaaccagtcagtacgagagttctgaaaatatgacagtcacctgttccaccaaagtttgctcctttgggaagcaagtagtagaaaaagtagagacggagtatgcaaggtttgagaatggccgatttgtataccgaataaaccgctccccaatgtgtgaatatatgatcaacttcatccacaagctcaaacacttaccagagaaatatatgatgaacagtgttttggaaaacttcacaattttattggtggtaacaaacagggatacacaagaaactctactctgcatggcctgtgtgtttgaagtttcaaatagtg

SEQ ID NO: 44386 - DNA, 380 bp, Homo sapiens
cccacgcgtccgctttaacaataatttttgttgttaatttaagaaatagacttacttaagactattttaagaaatagagatgtcatagcctgaagatttactgaagcttctgaacatgccaccatgccaaagctatgtttctcaaacccagctctgtggatcatgttcctaaaagatgctcatggggagaaaatgtttacagacaaataattttgggagctgcctttgcaaacctgcctgttggcatattgaaggctctaagaattccttcactaaataacccagttttaatatatccttatccaaagagaaactcatttttttaaagtgaaatatttgttaacagcccattgaacatacttttaaaaacactatggtag

SEQ ID NO: 44387 - DNA, 380 bp, Homo sapiens
ggcaccaccagtggtggggacagcgatgccaagagcctgcgtatcgtggaaagggagagtggccactatgtggagatgcacgcccgctatatagggaccacagtgtttgtgcggcaggtgggtcgctacctgacccttgccatccgtatgcctgaagacctggccatgtcctacgaggagagccaggacctgcagctgtgcgtgaacggctgccccctgagtgaacgcatcgatgacgggcagggccaggtgtctgccatcctgggacacagcctgcctcgcacctccttggtgcaggcctggcctggctacacactggagactgccaacactcaatgccatgagaagatgccagtgaaggacatctatttccagtcctg

SEQ ID NO: 44388 - DNA, 379 bp, Homo sapiens
ggaagttaacttcacggagtcccttcttcgtatggcagctgatgatgtagaagagtatatgattgaacgaccagagccagaattccaagacctaaacgaaaaggcacgagcacttaaacaaattctcagtaagatcccagatgagatcaatgacagagtgaggtttctgcagacaatcaaggatatagctagtgcaataaaagaacttcttgatacagtgaataatgtcttcaagaaatatcaataccagaaccgcagggcacttgaacaccaaaagaaagaatttgtaaagtactccaaaagttcagtgatactctgaaaacgtattttaaagatggcaaggcaataaatgtgttcgaagtgccaaccgactaattca

SEQ ID NO: 44389 - DNA, 368 bp, Homo sapiens
  misc_feature (1)...(368): n = a,t,c or g
gctaagactcctaaagaacaattccgagtgcagatggtattaaatgaaaaggtgttacctttggcttactcacaagaaactgtttcattttatgaagatctgaagaaccactacaaggacatccttcagagttgtcaaaccagtgaagaatgtgaattagcaagggctaacagtacatctgatgaactatgagtaactgacgaacatttttaattctttaggaagctgcgatgagtgattacntgcttgcnntnagtatgcnattncttgattacncggaggcttntntannactcganccatatgtggcatttggctgaaanccgttgggnnnaccnnggaattntgctgctaatgacactgncttc

SEQ ID NO: 44390 - DNA, 373 bp, Homo sapiens
gagctttgccaggccaagccggaacgtcccatgatgtgaagcctttctctcagcaaacctatgctgtccagcctccgctgcctctgccagggtttgagtctcctgcagggcccgccccatcgccctctgcgcccccggcacccccatggcagggccgcagcgtggccagctccaagctctggatgttggagttctctgccttcctggagcagcagcaggacccggacacgtacaacaagcacctgttcgtgcacattggccagtccagcccaagctacagcgacccctacctcgaagccgtggacatccgccaaatctatgacaaattcccggagaaaaagggtggactcaaggatctcttcgaacggggacc

SEQ ID NO: 44391 - DNA, 373 bp, Homo sapiens; identical to SEQ ID NO: 44390

SEQ ID NO: 44392 - DNA, 418 bp, Homo sapiens
gagctttgccaggccaagccggaacgtcccatgatgtgaagcctttctctcagcaaacctatgctgtccagcctccgctgcctctgccagggtttgagtctcctgcagggcccgccccatcgccctctgcgcccccggcacccccatggcagggccgcagcgtggccagctccaagctctggatgttggagttctctgccttcctggagcagcagcaggacccggacacgtacaacaagcacctgttcgtgcacattggccagtccagcccaagctacagcgacccctacctcgaagccgtggacatccgccaaatctatgacaaattcccggagaaaaagggtggactcaaggatctcttcgaacggggacccttcaatgccttttttcttgtgaaagttctgggcagacctcaaca

SEQ ID NO: 44393 - DNA, 416 bp, Homo sapiens
  misc_feature (1)...(416): n = a,t,c or g
tgtaccccccatagagtaccgaacatcatgcttttcagtaatactccagtgaatgaggctaagagtaccatttttgctcttataaaagaatttttttggacatgaatacaaagatgtcaggctaccaaatcatttgctagtagatcctaacaatatcacctataggaaactgaacgtagcctttaaacattaagtgatgataatggatttggccgggcgcggtnnnnnnnnnnnnnnnnnnnnnnnnnnnnnnnnnnnnnnnnnnnnnnnnnnnnnnnnnnnnnnnnnnnnnnnnnnnnnnnnnnnnnnnnnnnnnnnnnnnnnnnnnnnnnnnnnnnnnnnntgcgtgttgtggtgnnnnnnnnnnnnnnnnnnnnnnnnnnnnnnnnnnnnnnnnnnnnnnnnnnnnnnnnnnn

SEQ ID NO: 44394 - DNA, 393 bp, Homo sapiens
ggtaaactatcttggtgaatttttttttcctagccctctcacatttatgaagcaagccccacttattccccattcttcctagttttctcctcccaggaactgggccaactcacctgagtcaccctacctgtgcctgaccctacttcttttgctcttagctgtctgctcagacagaacccctacatgaaacagaaacaaaaacactaaaaataaaaatggccatttgctttttcaccagatttgctaatttatcctgaaatttcagattcccagagcaaaataattttaaacaaaggttgagatgtaaaaggtgttaaattgatgttgctggactgtcatagaaattacacccaaagagggatttatctttacttttaaacagtgagcctgaat

SEQ ID NO: 44395 - DNA, 391 bp, Homo sapiens
  misc_feature (1)...(391): n = a,t,c or g
gcagtctctctctgtcacccagnnnnnnnnnnnnnnnnnnnnnnnnnnnnnnnnnnnnnnnnnnnnnnnnnnnnnnnnnnnnnnnnnnnagcnnnnnnnnnnnnnnnnnnnnnnnnnnnnnnnnnnnnnnnnnnnnnnnnnnnnnnnnnnnnnnnnnnnnnnnnnnnnnnnnnnnactctatnnnnnnnnnnnnnnnnnnnnnnnnnnnnnnnnnnnnnnnnnnnnnnnnnnnnnnnnnnnagctcattttcatttaactgccgaactatgtttcatagaaaggagggactggattatttaaatatatctttattggtagatatttaggtttgtttttctttctgttgtttttctattggtgaaacagatgcaatggacatccttgaatat

SEQ ID NO: 44396 - DNA, 390 bp, Homo sapiens
gcgcctcctacttccagtgcgtgcagcgggagatcaagccgcacatgcggaagatgctggcttactggatgctggaggtatgtgaggagcagcgctgtgaggaggaagtcttccccctggccatgaactacctggatcgctacctgtcttgcgtccccacccgaaaggcgcagttgcagctcctgggtgcggtctgcatgctgctggcctccaagctgcgcgagaccacgcccctgaccatcgaaaaactgtgcatctacaccgaccacgctgtctctccccgccagttgcgggactgggaggtgctggtcctagggaagctcaagtgggacctggctgctgtgattgcacatgatttcctggcttcattctgcaccggctctctctgcc

SEQ ID NO: 44397 - DNA, 389 bp, Homo sapiens
cggacgcgtgggcaccgccgccaccctgcccctaagttattacctctccagttcctaccgtactccctgcaccgtctcactgtgtgtctcgtgtcagtaatttatatggtgttaaaatgtgtatatttttgtatgtcactattttcactagggctgaggggcctgcgcccagagctggcctcccccaacacctgctgcgcttggtaggtgtggtggcgttatggcagcccggctgctgcttggatgcgagcttggccttgggccggtgctgggggcacagctgtctgccaggcactctcatcaccccagaggccttgtcatcctcccttgccccaggccaggtagcaagagagcagcgcccaggcctgctggcatcaggtctgggcaag

SEQ ID NO: 44398 - DNA, 387 bp, Homo sapiens
  misc_feature (1)...(387): n = a,t,c or g
gttttttcccaatggaggatttttttttaattcttgtactaaaaaaaaaaaatccataccaaatatttttacaaattaagattgatgtaggttttaaaaaaggcatttgtatgttgttagcttacttatggggctaggtaatttcattgcttaaaaagatgcccctaggctcccttttgggggctggatttctttttcttcgcccgtggtggccatggttcttaacagggccaccggaaccatggtttctntctttntttttttttttnnaaaanngaccccgcnnntggaccccnngnggaagnccngggncattatcttgnnatacnggaannntngnccnnggggttccnnccatttttgtgnggnaaccnnctgganaagggg

SEQ ID NO: 44399 - DNA, 409 bp, Homo sapiens
cccacgcgtccgcattcatataccatgctgtcgagtcctgtgcagagaccgctgaccattcagggcaaaggacagggacctgaggagccgagcgaatagcatctcctcccacctcccaccagagacgtcctgtttgagctgtcaggtgtaatatatgaattgacttaagttaatataaatgtgtacataatccacatttgtagtcaaggacgcaatctcttccacacatgtgcagttgtcagttggtacatctaaactccctccatcctgactcacgtggacttagatatgttttgtttctattttcttctatttcagtttttcattctttgatgtttatttcttttgccatcagatctcttgtgaaatcccatggaaggttgtgctcagcctgtcgggtctctttctt

SEQ ID NO: 44400 - DNA, 338 bp, Homo sapiens
cccacgcgtccgctgggttcatcaaatccaattcctccttttggtggtcaaaaaattgaaaccacagagatgcactgacgtagagaaacctgaggccatctgtcccaattttctgagatgctgctagactttgtagcacttttttctgctgcaggagctcaaagcccttttgaaaatacattaatatcacagaggatatgcttctagcaacaggaagggcctttaacaaagaaaaggcacactgtcccccttcaaagtattttactgggaggttatatacttagtcccagctgctagtgcttagggatatatcgtttctttaactttttttttttttt

SEQ ID NO: 44401 - DNA, 389 bp, Homo sapiens
gaaaaatgtagccagtccaagcaggattcagcagataattgaaggaaagctcttcccaatgaaagctttaggttattttgctgttgtaacaggaaaagggaacagctctgaaagcattgaagctataagagaatatgaagaagagttttttcagaattcaaagctcctaaagacaagcatgctaaaggcacaccaagtgactacaagaaatttaagccttgcagtatcagactgcttttggaaaatggtacgagagtctgttgaacaacaggctgatagtttcaaagcaacacgttttaaccttgaaactgaatggaagaataactatcctcgcctgcgggaacttgaccggaatgaactatttgaaaaagctaaaaatgaaatccttg

SEQ ID NO: 44402 - DNA, 390 bp, Homo sapiens
gaggataccaaatcagaagaaaaggagactgatgagaacaaagaactcactgatacatgtaaagaaagagaaagtgatactgggaagaagaaagtagaacatgaaatttccgaaggaaatgttgccacagccgcagcagctgctcttgcctcagcggctaccaaagccaagcacctggctgcagtggaagaaagaaagatcaagtccctggtagctctcttggttgagacacaaatgaagaaactagagatcaaacttcgacattttgaagagctggaaactatcatggacagagagaaagaagctctagaacaacagaggcagcagttgcttactgaacgccaaaacttccacatggaacagctgaagtatgctgaattacgagcacga

SEQ ID NO: 44403 - DNA, 451 bp, Homo sapiens
ggcattttcgatgtaagatcaaaattccttggtgttgagatggaaaaggtgcaactcaatattcaggatttacttcagatgcaatatgaaggagtagctgtaatgaaaatgtttgataaggttaaagtgaatgtaaaccttctcatatacctgctgaacaagaagttctatggaaagtgaagtgcctacagaaatttcttggattctgtatcatctggattaggaaatgaatttgtttaatatttttgtttttaaacatgattgaaatcactgcttataaatgtgtgattttttttaaacgaccaaaactgttctgaagaatgtacccaggtgcctttttgctaatttgatactataatagaatgagacataaaatgaattaatggaaacatatccacactgtactgtgatataggtactctgatttaaaactttggacatcctgtgatct

SEQ ID NO: 44404 - DNA, 449 bp, Homo sapiens
gaaaagcttggagcagctgctggattcaattacaaaaaagaggatttctctgaagcaacgctgaaattcaccaaaggtgctggagttaatcttattctagactgcataggcggatcctactgggagaagaacgtcaactgcctggctcttgatggtcgatgggttctctatggtctgatgggaggaggtgacatcaatgggcccctgttttcaaagctactttttaagcgaggaagtctgatcaccagtttgctgaggtctagggacaataagtacaagcaaatgctggtgaatgctttcacggagcaaattctgcctcacttctccacggagggcccccaacgtctgctgccggttctggacagaatctacccagtgaccgaaatccaggaggcccataagtacatggaggccaacaagaacataggcaagatcgtcctggaactgcc

SEQ ID NO: 44405 - DNA, 442 bp, Homo sapiens
ggattatcttctggtgttgtgtccatcataagatgtaaaaagagaaatcatagttttatattttagtttctcctacaatgggtatgttaaataactatatctatacttagatatagtgcattgtctgtgtcccttaaagtgttacaaagagtttctctcaaaaggtccttaaggagagtgagagatgagagaggtgccttctctgtattagactcacacacatcagtccagttgaagaattggtttaaacttttaaatgagaacagaaattataattagtacctgaccaattgtgcctagatattaaagtatgttctctttagtactttccgttcaattaaatatcagtatattagggatttttttctacaggtgtatattttgttgaagagtcactttcctcaaccatttttttgtactgggcctttaaaaaaataaatcc

SEQ ID NO: 44406 - DNA, 431 bp, Homo sapiens
  misc_feature (1)...(431): n = a,t,c or g
cggacgcgtgggcggacgcgtggggcctagctgcagccggagcctgggagacgatgcatcactgtaagcgataccgctccccctgaaccagacccgtacctgagctaccgatggaagaggaggaggtcctacagtcgggaacatgaagggagactgcgatacccgtcccgaagggagcctcccccacgaagatctcggtccagaagccatgaccgcctgccctaccagaggaggtaccgggagcgccgtgacagcgaatacataccggtgtgaagagcggagcccatcctttggagaggactactatggaccttcacgttctcgtcatcgncggcgatcgcggganagggggccatnccggatnngnaagcatgcccaccacttgccacaaacgccgcaccaggtttgtancagcgcctcctcnagaaagc

SEQ ID NO: 44407 - DNA, 416 bp, Homo sapiens
  misc_feature (1)...(416): n = a,t,c or g
cggacgcgtgggcggacgcgtgggcggacgcgtgggnnnnnnnnnnnnnnnnnnnnnnnnnnnnnnnnnnnnnnnnnnnnnnnnnnnnnnnnnnnnnnnnnnnnnnnnnnnnnnnnnnnnnnnnnnnnnnnnnnnnnnnnnnnnnnnnnnnnnnnnnnnnnnnnnnnnnnnnnnnnnnnnnnnnnnnnnnnnnnnnnnnnnnnnnnnnnnnnnnnnnnnnnnnnnnnnnnnnnnnnnnnnnnnnnnnnnnnnnnnnnnnnnnnnnnnnnnnnnnnnnnnnnnnnnnnnnnnnnnnnnnnnnnnnnnnnnnnnnnnnnnnnnnnnnnnnnnnnnnnnnnnnnnnnnnnntaccgagcctgggaanctggtnngccaaaataaaatnttagttcanctttaaattngcccagaccctt

SEQ ID NO: 44408 - DNA, 419 bp, Homo sapiens
  misc_feature (1)...(419): n = a,t,c or g
gaaaaaacacagcccctctaaccctctgtccactgaatattggatcacaaggatccactgactattgatggctttctctggacactgccactctccccattggaacccgtttttaagccacaaaccctgcctcttttccccatgaactctgaaccacctttgtctctgcagaggcatccggatcccagcaagcgagctttagcagggaagtcacttcaccatcaacattcctgccccagatggctttgtgattccctccagtgaagcagcctccttatatttggcccaaactcatcttgatcaaccaaaaacatgtttctgccttctttatgggacttaagttttttttttctcctctccatctctaggatgtcgctttggngagatctctattatatcttgnatggtttgcaaaaggg

SEQ ID NO: 44409 - DNA, 442 bp, Homo sapiens
cgtcgattagcagtttgtaacatggactgggatagattaaaggcaaaagatttgctggctctgttcaattcatttaaacccaaaggaggtgtaatattttccgtcaagatatatccttcagaatttggaaaggagaggatgaaggaagagcaagttcaaggaccagtagagctattaagtattcctgaagatgccccagaaaaagactggacgtctagagaaaaattgagagattatcaattcaaacgactgaagtactattatgcagtagtagactgtgattctccggaaacagctagtaaaatttatgaggattgtgatggcctggaatttgaaagtagttgttctttcatagatctaaggtttataccagatgatattacttttgatgatgagcctaaggatgtagcctcagaagtgaatttaacagcatataaaccaa

SEQ ID NO: 44410 - DNA, 443 bp, Homo sapiens
  misc_feature (1)...(443): n = a,t,c or g
tatatctccagcatctggaacagagcctgggacaagctaggtctccataactatttattggatagttgagtgactggttgtggatgtacagtataagcatctaattcaatcagggagtgcttcctggaggagctgatacctgtgttcagtcttaaagggcaggagtttggataggggaatgttagttaatagaatgaaaatttcaaaattaaagggcaggagtaattaattgggtggttgagatgcatgcctggcatagcaagcagagtatggaaaaacccnnaaagtggagatatctggaangtgattggnatggcttggagtacaggacactggcangagagtagctgganatgaggcangagaggaaggcatggaccaggatcangtttgaagggcttgagcatcaggtgaaggccgttanactgatttgaagcaggaat

SEQ ID NO: 44411 - DNA, 436 bp, Homo sapiens
gtggccagagccccctctgggacccctctcgccccttctctgcctcctcagcttgagctgcctgcccgaagttcggctgttccggggccagtgtgtcacctgccaacttccacatcaccctcctccctcgctccctcctctccttccccaaggacctccccccatttctggcagccaagccattaatctggagacagaaatgggtttgctatcgattctctggccactttttctttcattacaatttgtaccgtgattcttctcacccttctctgcgtccgtgcatttaaagagttgtctctttaaatgttgaagcttccggaagcctgatgctattctgtgtctcctttcaaaggaagaagggggggcccagctatgggtgaggactcaagttattagtttggaaatagagcaactatgtgtacagcccacctta

SEQ ID NO: 44412 - DNA, 439 bp, Homo sapiens
ttttgacatattttagtcagcgaagacatctgcccctttggtgtttctacttgcttatgattgagattttacaagcccttcaaactccgttttaaaggaatttattgtaaaacattaactttaataaattagtgttttcacagatcagatcattatacttggaacttctaaatcatgcaatttctgaataaggacataaggctagattcatttttcttaatagagaaaaaggaaatttctgatttatcacttttctagttgataagtaggattcaaaacgtttgatatgtaagtatttatataagactaatgtaatttaaagttctgtattattgtgattaatcatacagaaattcaggaactgatcagaagtgagattcttttccacatctggttaatgtagtgagttgacaccctgtgggtggtaaagcattataaa

SEQ ID NO: 44413 - DNA, 437 bp, Homo sapiens
  misc_feature (1)...(437): n = a,t,c or g
caattgtgttaccagcaataaacataaatgagaatgtgatcaatgggcaggactacgaagtgatgatgcagattgactgtcaggtgatggacaccaggatcctccatatcaaaagttcgtcggttcctccttacctccgagatcagcagaggaatcaaaccaacaccttctttggctcccctcccgcagccacagaggcaacccacgttgtcagcaccatccctgagtcattacaatagcaccctgcagctatgctggaaaactgagcgtgggaccctgcagactgaagagcaggtgagcaaaatgctgctttctgcttggtggcaggcagagaactgtctcgtactagaattcaaggagaaaagaaagaagaaatagaagaaactgctccatttttcatcatctacccatctatttggaaagcnctggaattcaaa

SEQ ID NO: 44414 - DNA, 434 bp, Homo sapiens
  misc_feature (1)...(434): n = a,t,c or g
cccacgcgtccgtggtaacatccttaaaatgtatacatatataatattttctgacaagcatctggcattgtcatttgtgtcagattgtcatcattagatattttatttggaattgtttgtatgaaaaccaatcttnnnnnnnnnnnnnnnnnnnnnnnnnnnnnnnnnnnnnnnnnnnnnnnnnnnnnnnnnnnnnnnnnnnnnnnnnnnnnnnnnnnnnnnnnnnnnnnnnnnnnnnnnnnnnnnnnnnnnnnnnnnnnnnnnnnnnnnnnnnnnnnnnnnnnnnnnnnnnnngtacccaannnnnnnnnnnnnnnnnnnnnnnnnnnnnnnnnnnnnnnnnnnnnnnnnnnnnnnnnnnnnnnnnnnnnnnnnnnnnnnnnnnnnnnnnnnnnnnnnnnnnnnnnnnnnnnnnnnnnnnnnnnnnnnnnnnn

SEQ ID NO: 44415 - DNA, 438 bp, Homo sapiens
gggattgagggattgctgagctggagctccaggtgtcctatctttctcagtggggtggcacggagcggggccgcctccctcttctctccaggcaggtggggctgtggttatgcgatagggtctcccttccctccagcccatgccagaggagcttgtaactctttatcctcatggtgcccactacgagtcatactcttccccatgctgctcatcctcctgggccccatccactcagccaaagcagaatgcagggtttcctgctgaaaccctttctcaccttccaagtcccacttttgaacaagctgatgattctgaaactggccaatttcctaacaagccggatgcttgagaaacctacatttggacaatgagaggctgctcctgcggcctgcgggccacctcctcttcttggctcctgctttcttttcagactatatc

SEQ ID NO: 44416 - DNA, 446 bp, Homo sapiens
agtcctttaacaacaccagcatgaaggcaaaggtgttttgtcagactgcaacatctattagaaaggcaaggcaactgggaattgctggagaaggataaatcaggaggaattgctggtagaaaaggctgcagacagtcacagggaagtgctgtatattaaatgcatgtgaatagctggcaaaaagatgtcaaggatgtcactgggagccctttggcttcacactcgcctgttagcgccttgctttcgctgaattaccagagcctaccactcggaggaaggtcttggagttagactgatgagaaggcaatggggtgtcaaaaacaagtgtcaaagttctcttagattctgaagtcggtgatgagcacacaattaaagtggtttgtggaagaaagttgtaaaatctttttacttttttgcccctctggaggcttttaaccctaaattgg

SEQ ID NO: 44417 - DNA, 430 bp, Homo sapiens
  misc_feature (1)...(430): n = a,t,c or g
atttaaagaatgagaaacatagtaattagtagaaatgccagaaacagttcctggttcctcttgtgtttgacactaagaaaatagcaagagtgtgaaatctcagatacttatgaaatctcacagatgtaaggactcaagtgtagaagaaaatatccccttcttacaaaaagaaatgtcaatttatggagtttgtgggaaatagggcaagaattcttatgcttatgagagccaagtagtcagtggaagagagtagagctcaaaactggattatcaccttagcaacttagaatagtttgaaatanaaaaaaagtatttaatttggatctggatctgttaagatatgcacagtctattttttgtatagtattggaaaatannaatgctataatttgggtatgggttcttttgtatacattacctgccattgagg

SEQ ID NO: 44418 - DNA, 439 bp, Homo sapiens
gccacgcgtccggctccaggcaccaggctctttccccttcagtgtctcagaggaggggacggcagcaccatggacccacgcttgtccactgtccgccagacctgctgctgcttcaatgaccgcatcgcatccaccgccctggccatctaccatgtgatcatgagcgtcttgttgttcatcgagcactcagtagaggtggcccatggcaaggcgtcctgcaagctctcccagatgggctacctcaggatcgctgacctgatctccagcttcctgctcatcaccatgctcttcatcatcagcctgagcctactgatcggcgtagtcaagaaccgggagaagtacctgctgcccttcctgtccctgcaaatcatggactatctcctgtgcctgctcaccctgctgggctcctacattgagctgccgctacctcaagttggct

SEQ ID NO: 44419 - DNA, 438 bp, Homo sapiens
  misc_feature (1)...(438): n = a,t,c or g
tgaagttgttccagagagaccagtgactagtatggtatctgaaactcccgccatgtcagctgaaccaactgtgttagcatcagagcctcctgttatgtcagagacagcagaaacatttgattccatgagagcctcaggacatgttgcctcagaagtatctacatccttgttgcttccagcagtaactactccagtgctgtcagagagcattctggagccgccagccatggctgccccagagacttcagctatggctgtcctggagtcttaggctgtgaccgtcctggagtcttcgactgtgactgacctggagtctttgactgtaactgtcctatagccttcngntgtgactgtcccggagcctcctgangtggctgatccanactatgttaccattcctgtgccagttggattctgcgctggagccttctgtgcctg

SEQ ID NO: 44420 - DNA, 430 bp, Homo sapiens
  misc_feature (1)...(430): n = a,t,c or g
agaacaactacccatatttaaagctcagaacccagatgcaaaaactacagaactaattagaagaattgcccagcgttggagggaacttcctgattcaaagaaaaaaatatatcaagatgcttatagggcggagtggcaggtatataaagaagagataagcagatttaaagaacagctaactccaagtcagattatgtctttggaaaaagaaatcatggacaaacatttaaaaaggaaagctatgacaaaaaaaaaagagttaacactgcttggaaaaccaaaaagacctcgttcagcttataacgttaatgtagctgaaagattccaagaagctaagggngattcaccgcaggaaaagctgaanactgtaaaggaaaactggaaaaatctgtctgactctgaaaagganttatatattcagcatgctaaa

SEQ ID NO: 44421 - DNA, 426 bp, Homo sapiens
  misc_feature (1)...(426): n = a,t,c or g
gctcgtttaactgacaaacatcaatctattgaagaggcaaagtctgtggcaatgtgtgagatggaaaaaaagctgaaagaagaaagagaagctcgagagaaggctgaaaatcgggttgttcagattgagaaacagtgttccatgctagacgttgatctgaagcaatctcagcagaaactagaacatttgactggaaataaagaaaggatggaggatgaagttaagaatctaaccctgcaactggagcaggaatcaaataagcggctgttgttacaaaatgaattgaagactcaagcatttgaggcagacaatttaaaaggtttagaaaagcagatgaaacaggaaataaatactttattggaaagcnaagagattattagaatttgaggttagctnagcttccgaaacagtattgaggaatgaagg

SEQ ID NO: 44422 - DNA, 452 bp, Homo sapiens
  misc_feature (1)...(452): n = a,t,c or g
ggataatgggaagaggtttggtttcctgtgtccagtagtgggatcatccagaggagctggaaccatggtgggggctgcctagtgggaattaggaccaccaatggattgtggaaaatggagccatgacaagaacaaagccactgactgagatggagtgagctgagacagataagagaataccttggtctcacctatcctgccctcacatcttccaccagcaccttactgcccaggcctatctggaagccacctcaccaaggaccttggaagagcaagggacagtgaggcaggagaagaacaagaaatggatgtaagcctggcccataatgtgaacataagtaatcactaatgctcaacaatttatccattcaatcatttattcattgggttgtcagatagtctatgtatgtgtaaaacaatctgntttggctttatgtgcaaaatctgtatag

SEQ ID NO: 44423 - DNA, 445 bp, Homo sapiens
  misc_feature (1)...(445): n = a,t,c or g
gcgagaatgggcaggaacaaaatgcagctcctaccctcctcgggctttagttgtaccttaataacaggaattttcatctgcctggctcctttcctcaaagaacaaagaagactttgcttcattaaagtgtctgagaaggaagttgatattcactgatggactccaaagaatcattaactcctggtagagaagaaaaccccagcagtgtgcttgctcaggaaaagggagatgtgatggacttctataaaaccctaagaggaggagctactgtgaaggtttctgcgtcttcaccctcactggctgtcgcttctcaatcagactccaagcagcgaagacttttggttgattttccaaaaggctcagtaagcaatgcgcagcagccagatctgtccaaagcagtttcactctcaatgggactgtatatgggagagacagaancaaaagt

SEQ ID NO: 44424 - DNA, 453 bp, Homo sapiens
gagcccctgcacacccccatcgtggtgacctccacacctgctgtcactccgggcacctcgaacctcgtcttcacctatcctagcgtcctggagcaggagtcacccgcatctccctccgaatcctgctccaaggctcaccgcagaagcagtagcagcggggaccaatcatcagactccttgaactcccccactctgctggctctgtaacccagtgcacctccctccccagctccggagggggtcctcctcgctcctccttcccagggaccagcaccttcaagcgctccagggccgtgagggcaagagggggacctgccaccagggagcttcctggctctgggggacccaggtgggacttagcagtgagtattggaagacttgggttgatctcttagaagccatgggacctcctccctcattcatcttgcaagcaaatcccatttcttgaaaagc

SEQ ID NO: 44425 - DNA, 443 bp, Homo sapiens
gtttctaaagatggagtactagtcagcattcgtttcaacattttcctttcataaccagttagaagttcaaccttatttaattggctgctttgtttcaacttgtcttgattgcttcagttcagttacggatttctattatgtcatggaatgcaggtattgaatattatttgggaaacagtccatcaacatcaacacaacaaagctgcagtcattttgaactcagttaaggggatgaaagctcgctcttataattatttcttaacagctgaatatttgtttcttttcatttttgtttttctagtctctgggcaggattaccttgaaatgtgaatgcaagaattagcatttaatacactattttctaatgtatattttaaaaacaaggcacaggaaatgttaggaagccaagatgtctgcttactttctgctttaatttttcatca

SEQ ID NO: 44426 - DNA, 490 bp, Homo sapiens
  misc_feature (1)...(490): n = a,t,c or g
ccttgtccggtccggaattcccgggtcgaccccgcgtcccggtcaacagatatttttcaaaacatttttatatcgctttgattcatttatatgggtatataattgatgatagttgaaataagattggcaaaatattatatttgaagctcaaaatggaattcattttactgtttcctcagcttttgagtgtgtttgaaatattccaaaagaaaaatccagacttgaatggtgtattcctgagagagagttgcaatggccatctccacaaaacacctgatgactgaggaatagatgagacgagggcagatttttagtcataaaaaatgagttcagattgagttgaagtttttgcctactgtagatcattagatggactaatttttcatttatgccatatgtcaaactataattttgctgagacatagtatgggtagaaggacgtagtagaacttaagctagataattaatgaagccccntntngaaaagctt

SEQ ID NO: 44427 - DNA, 447 bp, Homo sapiens
  misc_feature (1)...(447): n = a,t,c or g
ctatgtgctttcattcctggaacccaaagacctgctacaagcagctcagacatgtcgctactggagaattttggctgaagacaaccttctctggagagagaaatgcaaagaagaggggattgatgaaccattgcacatcaagagaagaaaagtaataaaaccaggtttcatacacagtccatggaaaagtgcatacatcagacagcacagaattgatactaactggaggcgaggagaactcaaatctcctaaggtgctgaaaggacatgatgatcatgtgatcacatgcttacagttttgtggtaaccgaatagttagtggttctgatgacaacactttaaaagtttggtcagcagtcacaggcaaatgtcngagaacattatgggacatacaggtggagatggcatcacaaatgagagacacatcatnttagtggatctacngaat

SEQ ID NO: 44428 - DNA, 442 bp, Homo sapiens
  misc_feature (1)...(442): n = a,t,c or g
nnnnnnnnnnnnnnnnnnnnnnnnnnnnnnnnnnnnnnnnnnnnnnnnnnnnnnnnnnnnnnnnnnnnnnnnnnnnnnnnnnnnnnnnnnnnaattgtatttttttaatgacatcattgatttgaagatctagatggcataaattaccacgtctgccatcgcatattagaaaggggacagtcatatttgtaacgtggagagaacacggagcaccagtcaccacgtgcacttaggatgcacagcttaccgcgcaccgctgatggggacctccggaaagagcggtgccttgtggctggcctggaagttctctcccaaggtgaaattcctttaaaacctcaggctctgacctatgtctttgaagcagctgctttgtagagtccctctctttactgtcctcgntaggactgntttgtggttccatgaaaatgtttagcatccttgc

SEQ ID NO: 44429 - DNA, 453 bp, Homo sapiens
  misc_feature (1)...(453): n = a,t,c or g
cctgtcaagggggcagcaggtccagagctgctggtgctcccgttccccagaccctacccctatccccagtggagccggagtgcgggcgcgccccaccaccgccctcaccatggtgctgttggcagcagcggtctgcacaaaagcaggaaaggctattgtttctcgacagtttgtggaaatgacccgaactcggattgagggcttattagcagcttttccaaagctcatgaacactggaaaacaacatacgtttgttgaaacagagagtgtaagatatgtctaccagcctatggagaaactgtatatggtactgatcactaccaaaaacagcaacattttagaagatttggagaccctaaggctcttctcaagagtgatccctgaatattgccgagccttagaagagaatgaaatatctgacactggtttganttgatttttgcttttgatgaa

SEQ ID NO: 44430 - DNA, 448 bp, Homo sapiens
gggcagtgggcatggtgtgcatccactggaagggccctctggtgctgcagcaggcctacctcatcatgatcagtgcgctcatggccctagtgttcatcaagtacctcccagagtggtccgcgtgggtcatcctgggcgccatctctgtgtatgatctcgtggctgtgctgtgtcccaaagggcctctgagaatgctggtagaaactgcccaggagagaaatgagcccatattccctgccctgatatactcatctgccatggtgtggacggttggcatggcgaagctggacccctcctctcagggtgccctccagctcccctacgacccggagatggaagaagactcctatgacagttttggggagccttcataccccgaagtctttgagcctcccttgactggctacccaggggaggagctggaggaagaggaggaaaggggcgtgaa

SEQ ID NO: 44431 - DNA, 438 bp, Homo sapiens
gcgagtgtcgagagcagatccgtctccaccagccccagtatcctcactgcatttctgaaggaaagccgtgctcctgagcattttgaacaagagcagctgcgtgtcatttgccacagcagtgggagccacacactggagctctctgacagcacgctagccccccaggagtccagccagtgccctggcatcatgccacaggtgcacattcaggcagctgcagctgagtctacagctttccaacgggaaaataaacttgcgagcctaccaggtggggtccttaaaacctcatcaatcaatttggtctccagtaatgcccagcatacgtgtaaagaagatgggaggttagcaggaatgactccagtgagggaagagtcaactgctaaaaagctcgcaggtactaattctagctccctgaaagctaccgcattgaccagattt

SEQ ID NO: 44432 - DNA, 449 bp, Homo sapiens
cccacgcgtccgctgaaacagcttcctagtttgtaaatagacttacttggtatatttttattttgggaaaaacgtttgcagaaatgtaagtaaagccaatctgcaaaactgtatagctttgacaattccatattgtaaatactgtgtaaatcttgttgaaatagaggttaaatcaacctaatgttcttacactgtgttttttgacttcttatgatccctaattctgagacttactcatctggaatagtttctcacttgttttggaggaaaatgatgcttattcttataaattaccttcagtaactattcaataagacatttaaatacacaatcactaagtactacaaaataataaccacctcaactgatagcaaaatatctaattagaaatcaacagtttgatgagtttttttcctagagtgaatactacccctttcttataattgctg

SEQ ID NO: 44433 - DNA, 437 bp, Homo sapiens
  misc_feature (1)...(437): n = a,t,c or g
atcgaagaacttttctcccccgtttgtttgttggagtggtgccaggtactggttttggagaacttgtctacaaccagggattgattttaaagatgtctttttttattttacttttttttaagcaccaaattttgttgttttttttttctcccctccccacanatcccatntcaaatcattctgttanccaccattccancaggtcgagganagcttaaacnccttcttcctnngccttgttnctctttnatttttaattttttcgcatcagnattaangtttttgcatactttgcatctttattcaaaagggtaaactttntttgtcaatctatggacatgcccatatatgaaggaaatgggtgggncaaaaagggatntcaaatgaagngataggggtcacaanggggaaattgaagnggngcatancattgccaa

SEQ ID NO: 44434 - DNA, 439 bp, Homo sapiens
  misc_feature (1)...(439): n = a,t,c or g
gagcaggatggcagcagacgcagggcacccggaggaaagtctgttactactacgacggggatgttggaaattactattatggacaaggccacccaatgaagcctcaccgaatccgcatgactcataatttgctgctcaactatggtctctaccgaaaaatggaaatctatcgccctcacaaagccaatgctgaggagatgaccaagtaccacagcgatgactacattaaattcttgcgctccatccgtccagataacatgtcggagtacagcaagcagatgcagagattcaacgttggtgaggactgtccagtattcgatggcctgtttgagttctgtcagttgtctactggtggttctgtggcaagtgctgtgaaacttaataagcagcanacggcatcgctgtgaatngggctgggggcctgcaccatgcaaagaag

SEQ ID NO: 44435 - DNA, 442 bp, Homo sapiens
cggacgcgtgggcggacgcgtggggtgtttggacaatctctgtgttaaccgacagcgagaccaagtcaaacgttactactctgttgtatatccaggctggcccatatatccacgtaacagatacacttctctctttctcattgttaattcagtaattctaatactgtctgttataattaccattttggtacagcacaagtaccctaatttagttcttttggactaatacaattcaggaaagaaaaaacccaaaaaccaacctcattcacatatggctttttttttaaccaataacaattaggtgtacttctattttaaaacatttcagaaaaaaatatatgttatagcaatactcttactcaaaagaagaaatttcctaactctatcagataaactcatctttagtataaataagcattatttgcaggttgccacaggtgga

SEQ ID NO: 44436 - DNA, 464 bp, Homo sapiens
gtaagtgccagggtctcagggtcaggtcgcggctggtcactgtgcaggcgcttgggtgacgcgacgatctcagcggatctggtcaccttcgtctccccgccatggagacctcagcactcaagcagcaggagcagcccgcggcgaccaagatcaggaacctgccctgggttgaaaaataccggccacagaccctgaatgatctcatttctcatcaggacattctgagtaccattcagaagtttatcaatgaagaccgactgccacacttgcttctctacggtcccccagggacaggcaagacatctaccatcctagcctgtgcgaaacagctatataaagacaaagaatttggctccatggtcttggagctgaatgcttcagatgaccgaggaatagacatcattcgaggaccgatcctgagctttgctagcacaaggacaatatttaagaaaggctttaaagct

SEQ ID NO: 44437 - DNA, 453 bp, Homo sapiens
  misc_feature (1)...(453): n = a,t,c or g
cagcctccgggggcccctccagtcagagacctgggctctgtgcccccagaactgacagccagccgccaaagcttccacatggccatgggcaatcccagcgagttctttgtggatgttatgtagcccactgtggggccaggctgggccgggcgctcctggtgtgtgactgggtgtcctggccgtcatgtgcttgctcttacagtgcctgggctcagcctaccagctgctgccatacaggagattgtggccactgtgactctcaccagcagtgcctggttcctcccccttccctcaggggtagacaagggacctttgattatttttagctttggttttttataacctttttggggggtaaaataanagttcttactttttgggactttttttaataggcatttcctcttttatatgaannattccatncatttgggcccttttaancccaaaatg

SEQ ID NO: 44438 - DNA, 450 bp, Homo sapiens
  misc_feature (1)...(450): n = a,t,c or g
caactgcagtatgtgatctcaccaaataaaaactcaaacttaaccctggctcctataaattaggatttaaagaagtaaaatgtcctgataatcttctggtattaggcatgaacattttaatctagtttttattcctcccagttagtttaatctgcatgtggcctgattagagtacacttcccccacagattatggtctctttattgcagagatgctaggctgatcattaggtccgattttctgagagcaaccgtttgcaggtgaagtaataagagcaccacaccggccgggcaaagcgcctttgccgaggatttgccttccagcacattaaaactctagaagctctcccagttgatctgcagcatctggacctaaangggatttcatctttaattctaaatgtatgaccctaaatgnaaggattgnaggtgntggggaatgggttttgaa

SEQ ID NO: 44439 - DNA, 462 bp, Homo sapiens
  misc_feature (1)...(462): n = a,t,c or g
cccacgcgtccgcttnnnnnnnnnnnnnnnnnnnnnnnnnnnnnnnnnnnnnnnnnnnnnnnnnnnnnnnnnnnnnnnnnnnnnnnnnnnnnnnnnnnnnnnnnnnnnnnnnnnnnnnnnnnnnnnnnnnnnnnnnnnnnnnnnnnnnnnnnnnnnnnnnnnnnnnnnnnnnnnnnnnnnnnnnnntcccatgccccattgtgttgcactaacccaagcggaggtcctgattggtctttttttttttttnttttttgnaaanaaagnnnnnctttgncctngtttngccnngnnngaagngaagggggnnanttnggnttccccnaaccntcngcntnnanggtnaaggnanttttttantttaanttnccnagggggtgggannancggnaggggcccntngccccnnaattttggntnttangggaaaaccccntttttttnnaannaccaaaaattggg

SEQ ID NO: 44440 - DNA, 455 bp, Homo sapiens
  misc_feature (1)...(455): n = a,t,c or g
cacagctgtcacaaactgattagttataaaaatatacattatttcattaattttactggaaaaaatggcttagtattgaaaggagagagaagtattggtctttggtggtttactttttaaaaattttggaaagtgtgaatcaataactatttttaattatactatttgcccattctttttctctgcagtgcatttcacagaataaatcctctaacttgttttgctgctctgagccannnnnnnnnnnnnnnnnnnnnnnnnnnnnnnnnnnnnnnnnnnnnnnnnnnnnnnnnnnnnnnnnnnnnnnnnnnnnnnnnnnnnnnnnnnnnnnnnnnnnnnnnnnnnnnnnnnnnnnnnnnnnnnnnnnnnnnnnnnnnnnnnnnnnnnnnnnnnnnnnnnnnnnnnnnnnnnnnnnnnnnnnnnnnnnnnnnnnnnnnnnnnnnnnnnnnnnnnnc

SEQ ID NO: 44441 - DNA, 449 bp, Homo sapiens
  misc_feature (1)...(449): n = a,t,c or g
agaggatgctctcaaacttgtccagttgaaacaaacgggcaagattaccgagtccagaccaactccagcccccacagccactcccacagcaccttcgcccctacaggccacagctggaccatcttatccccggcctgtgatcccaccagtatcaactcctggacaacccaatgcagtgggcacattcactgaaatccccgccagcaatattcgaagagtcattgccaagagattaactgaatctaaaagtactgtacctcatgcatatgctactgctgactgtgaccttggagctgttttaaaagttaggcaagatctggtcaaagatgacattaaagtatcagtaaatgattttatcatcaaggcagcagctggtacccttaaaccaatgccagangtaatgnaaactgnatggaaagggcccaaagcaatggatttattggcatttc

SEQ ID NO: 44442 - DNA, 429 bp, Homo sapiens
  misc_feature (1)...(429): n = a,t,c or g
cgtccgggagcagaggccgcttggtgtccgagtagggtaagaccgcaccgacccagtccgttaggaaagaagggaaacgaggcaattgtcgggcggatccccggacggagggctaaggttgtgtggaaggcgctgctccccggatggcgaccgcagatactccggccccggcctccagtggcctctcgccgaaggaagaaggggagcttgaagatggggaaatcagtgacgacgataataacagccagatacggagtcggagcagcagcagcagcagcggcggcgggctgttaccctatccgcggcgaaggcctcctcactcggcccggggcggtggatctggcggaggcggtggctcttctcgtcatcgtcctcttctagcagcagctgaggaatttctcacgctcgcggnacgcctntgancgggcg

SEQ ID NO: 44443 - DNA, 422 bp, Homo sapiens
aagttggataagataatgaatatgaaagaaaccaccaaacgagtgcgccttgggccggactgcttaccctccatttgtttctatacatttctcaatgcttaccagggtctcactgcagtggatgtcactgatgattctagtctgattgctggaggttttgcagattcaactgtcagagtgtggtcggtaacacccaaaaagcttcgtagtgtcaaacaagcatcagatcttagtcttatagacaaagaatcagatgatgtcttagaaagaatcatggatgagaaaacagcaagtgagttgaagattttgtatggtcacagtgggcctgtctacggagccagcttcagtccggataggaactatctgctttcctcttcagaggacggaactgttagattgtggagccttcaaacatttacttg

SEQ ID NO: 44444 - DNA, 423 bp, Homo sapiens
  misc_feature (1)...(423): n = a,t,c or g
tgcgatggtgacctagtggacagccagatccggagtaagcaaaactggagtcttctgcctgcgcaggccatttatgccagtgttcttcctggagagttgatgagggggtacatgacccagtttcccaccttcccaagctggctggggaagcactcgtctacaggcaaacatgatcgtattgttcaggacctggccttgcatatgagtctcagaacttactccagcaaaaggactgtaaacatggattatctgtcgcttctaagggatgcacttgtacagcccttgacctcacaaggagtagacggagtaccaggagttgttgcacttatggacacatattatttgatgaaagaagactttgagaatatcatggaaatcagcagctggggtgcaaacctantcccttttcaanctggatcccaa

SEQ ID NO: 44445 - DNA, 438 bp, Homo sapiens
  misc_feature (1)...(438): n = a,t,c or g
gtgattacagaaaactggaagaaatgcaccaaagattcctggtttcagagcgttcaaaagatgatcttcagctaagacttacgagagcagaaaatagaataaaacaacttgaaactgactcctcagaagaaatatcacgttaccaagaaatgattcagaaacttcaaaatgtattggagtctgagagagagaactgtgggcttgtcagtgaacaaaggctaaaacttcagcaagaaaataaacagttacggaaagagactgagagtttaaggaagattgccctggaggctcaaaaaaaagccaaagtaaagatcagtacaatggaacatgaattttcaataaaggaaccgtggatttgaagttcaattgagagagatggaagacngtnntagaanttccattgnngaactgaggcntctctacgactcnncagaaggg

SEQ ID NO: 44446 - DNA, 453 bp, Homo sapiens
  misc_feature (1)...(453): n = a,t,c or g
gtcaggagttatggcaaggtctggaggagctgcggctacgccggctacaggggacccagggggccaaggaggcccccctccagcggcttacaccccaggtggccgccagtgggggtcagagctagacagcacctcagaaggggaaaagctaaacccagagctgtcantccctctatcccttctcctgtccaggggcccagagagaaacacacctacccctggccttgccagagtggcttctgaggactccctgcccagcccagctttcactggggggagacgaggagaggcaatggtggtcttggcaacagaatgctcagcccctcgtggcaggacttgacaagggcaagcttgaccaggaagctgcatcagggatcttcccctgcccgcaaagctaggctccagctgcangcgggctccaccctctgntctggcttggcaaggcactcacgc

SEQ ID NO: 44447 - DNA, 433 bp, Homo sapiens
  misc_feature (1)...(433): n = a,t,c or g
caaggctggaccaggaaccctgggagccaggagggcaggaggaggaagaggatggggaaggagggcccacccctgcctacctaagccaggccacagagctcatcacccaggccctgcgggatgagaaggcaggcgcttacgctgctgcactccagggctatcgagacggcgtgcacgtcttgcttcagggagtccccagtgacccgttgcctgcccgccaggaaggtgtgaagaagaaggcagctgagtacctgaagcgggcagaggagatcctgcgcctgcacctgtctcaactcccaccctaacagggagtgggccattccctgggactctcactcctgcactgcagcccctttcctctcccagggcctggcctactctggcttgnaattacaggagccatttctgtagtaactggccaagaatgagaaaa

SEQ ID NO: 44448 - DNA, 451 bp, Homo sapiens
  misc_feature (1)...(451): n = a,t,c or g
ggtatttctcagattcctcatctatgataattggaagggtggtatgctattacgtagacattagtgcttcttactgcttaagataatggtattaaggctacaaagtttatctagatttatcagataattaacgaagaatttggccagctctttcgtctttgtttactcagtagtgtcataactatgaagtactgtatagtaatacgaaagaactatagaggtattgttatgaatcttttttatatgttctacctaaaatgttgctcacagtattctttttccccctcttcatgagccagttcctttttcctgggactttatctctactttttcctttcctttcccagccattaaaatagggtgagatggttattagacgagggagagatgctttatctttgntgnaaatgatcatcagagtttaactttataaactaanaaaattggaccg

SEQ ID NO: 44449 - DNA, 508 bp, Homo sapiens
  misc_feature (1)...(508): n = a,t,c or g
tttgaaccccctttncnganccaanntagcgcgtctacccacgcgtccgagagagaattcctgtcttaaactaagtgccttactgttgtttaagcatttttttaaggtgaacaaatgaacacaatgtatctacctttgaactgtttcatgctgctgtgttttcaaaagctgtggccatgttcctaaattagtaagatatatccagcttctcaaaaaatgtatatgattgctgttagccatgtctattgtttttcctctggattcttttcttataacttggaatacacaaaagngtacaacannagatgtncaccactgatcnactatgctgngactaagnaccttcaccacttnnnntntngcntnttnngtnctcnattccncnccccncnntttnntnnntncnntcnttcnntngngnnnntatncntcnnnncncnctccgtcaccgnctcaccctnnnccanncttcnctcncnncncntcantacnnngtcancnnntcctt

SEQ ID NO: 44450 - DNA, 446 bp, Homo sapiens
  misc_feature (1)...(446): n = a,t,c or g
ggcaattcaaccccaagatgaggccaaccttcctggagattgtcaacctgctcaaggacgacctgcaccccagctttccagaggtgtcgttcttccacagcgaggagaacaaggctcccgagagtgaggagctggagatggagtttgaggacatggagaatgtgcccctggaccgttcctcgcactgtcagagggaggaggcggggggccgggatggagggtcctcgctgggtttcaagcggagctacgaggaacacatcccttacacacacatgaacggaggcaagaaaaacgggcggattctgaccttgcctcggtccaatccttcctaacagtgcctaccgtggcgggggcgggcaggggttcccattttcgctttcctctggtttgaaagcctctggaaaactcaggattctcacgactctaccatgtccnntgganttcag

SEQ ID NO: 44451 - DNA, 414 bp, Homo sapiens
  misc_feature (1)...(414): n = a,t,c or g
taaatatctaagttgtaaacctgcttgttcaaatactgtgtgtattccttttctctaatgcagctcatcacttggagcagtttctgctattgtgctctttcatttaaaatgtatgtttttttttttttaaancggccanggatttngnatnangngnaacccccccaaatnnatgggggcntaaaaatggtaaaggnaagnntngccccnnnannaaanggncngnaaanntcggggccacccnttngaaaccnggcnccntttnancgnannttnnaccntnnnaaaggggnanggcccntttttcctccctnncnaaatngccggaaccctccnggacccttnacngagggcnttggaanggcttgnngnnttttaaaaaaggggggnnncanncaaccatttttntgaaaa

SEQ ID NO: 44452 - DNA, 474 bp, Homo sapiens
tcccacgcgtccgccgttcagataccactggagaagacactgctgacccaccgattattcattttggacctggagaaagttcttcagaagatgctgtcatgatgaatacacctgtggttaaatctgccttggaaatgggctttaatagagacctggtgaaacaaacagttcaaagtaaaatcctgacaactggagagaactataaaacagttaatgatattgtgtcagcacttcttaatgctgaagatgaaaaaagagaagaggagaaggaaaaacaagctgaagaaatggcatcagatgatttgtcattaattcggaagaacagaatggctctctttcaacaattgacatgtgtgcttcctatcctggataatcttttaaaggccaatgtaattaataaacaggaacatgatattattaaacaaaaaacacagatacctttacaagcgagagaactgattgataccattttgg

SEQ ID NO: 44453 - DNA, 478 bp, Homo sapiens
  misc_feature (1)...(478): n = a,t,c or g
ggtcnacccacgcgtccgaaacctgacttgaaatagtaacaccaaacatgattatacaggaatattttaataagtgtatcaccatgcagatgtagaagagagcgaaagtgattgtgtttttctttagattgaatatttgaatcttatgtgtaacaaaaagaagtgggttttagttctttctgtgccctgatattttgtatattaatgaattatccaagattcgatgggatttatcagtgtgtagatagctctataatgcttgaattgtacacttctaagtgtgcagtgcaagagcttgtttatatttcatactttttatactttgaggaaaaaaagtcaaagaaaaattgtatttgagggaaaaaaccatgaccaagtaaaggataaattcaaaaaatagcctcatgagacttggcatacacactcatgggattccagttattatggagtgcttccatccctctccaccccttccccc

SEQ ID NO: 44454 - DNA, 439 bp, Homo sapiens
gtccgtggaacacgcagacatctgggtcaagagctacagcttgtactccagggagcggtacatttgtaactctggtttcaagcgtaaagccggcacgtccagcctgacggagtgcgtgttgaacaaggccacgaatgtcgcccactggacaacccccagtctcaaatgcattagagaccctgccctggttcaccaaaggccagcgccaccctccacagtaacgacggcaggggtgaccccacagccagagagcctctccccttctggaaaagagcccgcagcttcatctcccagctcaaacaacacagcggcacaacagcagctattgtcccgggctcccagctgatgccttcaaaatcaccttccacaggaaccacagagataagcagtcatgagtcctcccacggcaccccctctcagacaacagccaagaactggg

SEQ ID NO: 44455 - DNA, 429 bp, Homo sapiens
ggtgtacatcctcacatccaacacctcccagtatgacacatattgcttcaatgcttcagctccacctgaagaagattgtacatcagtcacagacctgcccaatgcctttgatggaccaattaccataactattgttaaccgtgatggcacccgctatgtccagaaaggagaatacagaacgaatcctgaagacatctaccccagcaaccctactgatgatgacgtgagcagcggctcctccagtgaaaggagcagcacttcaggaggttacatcttttacaccttttctactgtacaccccatcccagacgaagacagtccctggatcaccgacagcacagacagaatccctgctaccagagaccaagacacattccaccccagtggggggtcccataccactcatggatctgaatcagatggacactc

SEQ ID NO: 44456 - DNA, 399 bp, Homo sapiens
  misc_feature (1)...(399): n = a,t,c or g
nnnnnnnnnnnnnnnnnnnnnnnnnnnnnnnnnnnnnnnnnnnnnnnnnnnnnnnnnnnnnnnnnnnnnnnnnnnnnnnntgcaaactgtgtttcagaaaaaaaggcaagtttggttagcacaaagaaacatcattagtgacacctgtgttggccttctgagttatgagacttcatattaacattataacaaactacgtatacattttgtgcaagagaaaaattactaaaccaggccttcttgagtaatgctttaattttccagaagggggacatagattggatttaacttaaattgaggcaaatggatgtattttatttgggaaattggttttggncctcctttgttttncctccatanattnattantgcanacctganggctgcatacccangata

SEQ ID NO: 44457 - DNA, 429 bp, Homo sapiens
caaatgttcagtaagagtagtgcaagtcacctgtgaaactttttttaggtccactgatgtttaagctgcttccatgaataacagtaatagctaaaattgggctttacctttcattgtaaaaccaccacagtcctatgaattattcctattttaccaataaagaaaatgaggtcattggagatgaagtaacttgccaaggtcacagctcataggtgttggcaccaggatcccaacccaatcaatgtggttccaaagatcacactctcatgtagtatctgtatggcctcccagtgcagtcagtgttgactacatgcagagagctgagccaggtggtggagtgagacaaagcagcaaaaagaacccaggtctgctcatttctgcctgcagcatcatttcacaaagcccctgaccctgtgacgacatgcaact

SEQ ID NO: 44458 - DNA, 447 bp, Homo sapiens
  misc_feature (1)...(447): n = a,t,c or g
gcggtcccagaacggaggcgaacctgacttccatgcggttgaaccctacacgaagaaagaactttctgctgttactttccctgacatcattcgcaattacaaagtcatggctgctgagaatattcctgagaatcccctgaagtatctgtatccaaatattgacaaagaccatgcctttggaaagtattactccaggccaaaggaagcaccagagccaatggaacttgatggccctaaaggaactggatatatcaagactgagttgatttctgtgtctgaagttcacccttctagacttcagaccacagacaacctgntccccatgtctcctgaggagtttgaccaggagactcngatanagggctntgttnattnaactgctngangagcncggnnanngcatgaacanttnanaagggtgtggcatnacnnanngtttgnagctct

SEQ ID NO: 44459 - DNA, 408 bp, Homo sapiens
  misc_feature (1)...(408): n = a,t,c or g
attaaagtgtacatgccaaagctacatgaaacagttgatgccactagtgaaactcacatctaccaggtgaggttaaaagactcacttgtcagctctcttcagttttgtaaggcaaaagatgctgaattagcttggatagatggtgtcttagatatgagagtttccaaagtggacacaggggttattttagaagaaggagaactaaaggatgatggagaagactcagagatgcaagtggaagctccctcagattctagcgntatagcacancaaaaggccatgaaaagtctgttcggagangatgaannagaaacangtgaagaaagtgagatcattcctactttggaacccttgccacctcatgaggntcctggacatnanncnnnnnttatgaangaaccnnngctg

SEQ ID NO: 44460 - DNA, 436 bp, Homo sapiens
  misc_feature (1)...(436): n = a,t,c or g
cgtctttacaagcaagagaactgattgatacgattttagtaaaaggaaatattgcagccactgtattcagaaactctctgcaagaagctgaagctgtgttatatgagcatttatttgtgcaacaggacataaaatatattcccacagaagatgtttcagatctaccagtggaagaacaattgcggagactacaagaagaaagaacatgtaaagtgtgtatggacaaagaagtgtccatagtgtttattcctgtggtcatctagtagtatgcaaagattgtgctccttctttaagaaagtgtcctatttgtaggagtacaatcaagggtacagttcgtacatttctttcatgaagaagaaccanaacatcatctaaactttanaattaatttattaaatgtattataactttaacttttatcctaatttggttcctt

SEQ ID NO: 44461 - DNA, 357 bp, Homo sapiens
  misc_feature (1)...(357): n = a,t,c or g
agcacccttgaagaaatcttcatatctgcctctcctgtgtagcaggtcacagtgcctgggtttggttctagccctcatttgtgaactgtgtgactcaccatgccttttttctttctgtaagacaggaataatggtaagaatttaaatgggggtaatatggagcgcgtttagttcagagcctggtgcatacaagcactcaataagtactggcgattattagacctttagattaatttattagaagttggatttnaggngaaaggnnttgantntnnaaaatnnttntgnnaanantnncncnnnncnnttnantantncctttnntatgtnnnnngatnnngtannngatnnntttcg

SEQ ID NO: 44462 - DNA, 435 bp, Homo sapiens
  misc_feature (1)...(435): n = a,t,c or g
ggtctgcctaagagctcttgaaggttatttaaaggaaattgttactagtggagggtaaggaannnnnnnnnnnnnnnnnnnnnnnnnnnnnnnnnnnnnnnnnnnnnnnnnnnnnnnnnnnnnnnnnnnnnnnnnnnnnnnnnnnnnnnnnnnnnnnnnnnnnnnnnnnnnnnnnnnnnnnnnnnnnnnnnnnnnnnnnnnnnnnnnnnnnnnnnnnnnnnnnnnnnnnnnnnnnnnnnnnnatcgttngtttttttttttngaaaaancanggnctntttttntngccnaaacgggnntnnancnntngnttnaatnaancntcccnccngggtntcccaaagggctagnattntagncggggaaanctanggaaanggngnggaaaanggccnttcaggnggnggggttncntgaccnggnaanaaaangggc

SEQ ID NO: 44463 - DNA, 408 bp, Homo sapiens
aagctgatcttcagacaagttctcagcgtttaaatctttcagcctccaatgctgcagtggctgaacttaaaccggattgttgtattgatgatgtcatacatcatgaagtcaaagaaattggaacacacatcttggtatgtgctgtgagttatacaactcaggctggagaaaaaatgtatttcagaaaattcttcaaatttcaggttctcaaaccattggatgtgaaaaccaaattttacaatgcagagagtgacctcagttctgtgactgatgaagtatttctggaagcccagattcagaatatgacaacctcacctatgtttatggagaaggtttcactggagccatctattatgtacaatgtaacagaattaaattcagtcagccaagctggagaatgtgtgtcta

SEQ ID NO: 44464 - DNA, 440 bp, Homo sapiens
  misc_feature (1)...(440): n = a,t,c or g
cccacgcgtccgcggacgcgtgggttccgcaaacagaatcgcgtttggctgtgctggatgtgtgaacctattgggtactgtacaacttcaagcctcgaaatcagataggcaccaccaacctcatttcctgtttcaccttgattttctgtgataccaaaatctcagcttcacaaagtcattgaaagtgttggttcatgaagttttaccatcaattcaagtaatcataaatggcaaattctgcaaaagcagaagaatatgaaaagatgtctcttgaacaggcaaaagcgtcagtgaattctgaaacagagtcttcattcaatattaatgaaaacacaacagcttctgggactggctttctgaaaagacttctgctgtaggcaagtagacatagcaagaaagagaaaagagtttgaagatgatcntgtaaggaaagtctagtt

SEQ ID NO: 44465 - DNA, 448 bp, Homo sapiens
  misc_feature (1)...(448): n = a,t,c or g
gcgacaaattgcagattagaggacatacaaatgagggagccagttgctacttttgcctttattattaatgttttgtggctctgcgggtcattcatgatgttagacaatagggtgattatttctgttctgctgaaagacaatctgattgtgttttgtgtagaatgaggcactgatccgctctgcctgcctcccatgagaaatgccgcagacctttgtctgctcaaacctcctcccgtcagctctggtattgtgatggaagtaattgaccaggcctcatgggtcagcatatatctgtactgctgtttattcttctttctactttttaaggactaaaatcactttcttgtaaaatattacaaagacattttaaaagaaaagactgtccattgnatttttccacccccttaaaatatattcataatgatctttttaactgggtgggacttgg

SEQ ID NO: 44466 - DNA, 427 bp, Homo sapiens
catactctgtacatttttcttttctcctgtaatatagtcttgtcaccttagagcttgtttatggaagattcaagaaaactataaaatacttaaagatatataaatttaaaaaaacatagctgcaggtctttggtcccagggctgtgccttaactttaaccaatattttcttctgttttgctgcatttgaaaggtaacagtggagctagggctgggcattttacatccaggcttttaattgattagaattctgccaataggtggattttacaaaaccacagacaacctctgaaagattctgagacccttttgagacagaagctcttaagtacttcttgccagggagcagcactgcatgtgtgatggttgtttgccatctgttgatcaggaactacttcagctacttgcatttgattatttcctttttt

SEQ ID NO: 44467 - DNA, 445 bp, Homo sapiens
cccacgcgtccgcccacgcgtccggctttgctcaatgtggtggaaacattttgcagaactgttgtagaaagctggcttatagttggcttgacaaagcataattctctcataacaaactttcaaatcattacagtagcttagctactttagttgatgtgaccgaggaatcccttctagaatcataggtggcaagggagggtttgctagctctccatttgcactggccattgtgaaaaaccagcttctgtattcaaatctttccttcatttttttaaattttttttttggcagcgcttgtgctggaacttactcattgtaactgaatcctcagggcttttcttgttttagatcatggactgtgcaccgtgacacttaaataattttctatgtatttaaagaaaaatgcaccaggatggtgtctgtgcacgtgactattagaggagcg

SEQ ID NO: 44468 - DNA, 443 bp, Homo sapiens
cccacgcgtccgaatgcacatgtaatccaagtgagtggagagtgtttttaatgtttttgaatgaaggaaatgaggttttgtttcacctgttttgcagcagtaagagaaactagtgctgcaagaatgtattttttaatgaagttccttattttgtcttgcatgttttagttttgcttatttttaaatttggaggtcctccataatgtcagataatattgacctgccatacgttagcactcttagttccgctactgtctttaacaggagcaaagagctgtgataaaccatgcttttttgagcttgtctgactcctaattaataacatgtttttggcaagacaacagattgaggttagaggatcagtaggacatttttattccatctgcctatggggaaatttacaaatcccgtgctctaaaatgttctcaaacatttatatagat

SEQ ID NO: 44469 - DNA, 444 bp, Homo sapiens
ggatgacaatgatagaaatctgtgaaaagttggaagactgttcacgcaagttaataaaagagaatggattaaatgcaggcctggcatttcctactggatgttctctcaataattgtgctgcccattatactcccaatgccggtgacacaacagtattacagtatgatgacatctgtaaaatagactttggaacacatataagtggtaggattattgactgtgcttttactgtcacttttaatcccaaatatgatacgttattaaaagctgtaaaagatgctactaacactggaataaagtgtgctggaattgatgttcgtctgtgtgatgttggtgaggccatccaagaagttatggagtcctatgaagttgaaatagatgggaagacatatcaagtgaaaccaatccgtaatctaaatggacattcaattgggcaatatagaa

SEQ ID NO: 44470 - DNA, 440 bp, Homo sapiens
gcaaggagtgaggatgtgattttagcaacaagtcagccatcagccacaccagcggaaatgcttagggagaagccttgtttgtaaggtaatgtggacagagctgtacgtggacatcattacttgtcacgtgtcagaggacacactcgggagaaaccttcatggagtgagagtaaggtgttggctggaagtggccccttaagagatacttggagtcaaatctatccactgtacgcccaccccactcttgttctaagagctttggggacagtcttttgaccccttacattcctttagatgtgaagatgacagagatctaacttctgagagcagaggtgtcaagtgacggtccccttggaggaatggtctttgcatctgactacttccttctgcaactgtgttcttccattagcttccatgacactctcctgctttattttttt

SEQ ID NO: 44471 - DNA, 445 bp, Homo sapiens
  misc_feature (1)...(445): n = a,t,c or g
aatgaaattgaaaaacaattgaatgccatcagagataatatcaaaattggagaagatcgtgctgctagacttgacaggaaaatggaagaacagcaggtcagacttaatgaggcagaacaaaagtacaaggatattcaagacaaactagaaaagattagtgaagagacaaatgcacgagcaccagaatgtatggcattgaaagcagatgttgttgctaagaaaagggcctataatgaagctgaggttttatataaccgatccttaaacgaatataaagcattaaagaaagatgatgagcagctttgtaaacgaattgaagagctgaaaaaaagtactgaccaatctttggaacctgaacggttggaaagacaaaaaaaaatatcttggttaanagagagagtaaaggcctttcaaaatcaagaaaattcagtcaatcangagatcg

SEQ ID NO: 44472 - DNA, 455 bp, Homo sapiens
cctttgtcaacctcacagacaacaagtttaataacacattgcagagtgattcttgaagaacattccacttgtgaaaatgaagttagtaaaagcagacaggatttacttaaatccattgtttcaagaatgaaaaaggcagtagaagatgatgtttttattcctctgtatccaaagagtgctgtagaaaacaaaacatcacctcattcaaagttccaagaaagacagttctggtcaggcctaaagctcttccgcaatattctttttttggaatggactccttacagatgacaccttgcaagaactaggactagggaagctgctaaatcgttaccttattatagcacttctcaatgccacacctgggccagatgtggttaaaaagtgcaaccaggtagcagcatgtctaccagaaaaatggtttgaaaattctgccatgaggacatctattcccagct

SEQ ID NO: 44473 - DNA, 448 bp, Homo sapiens
ggaagccgtgaggccggagcttaggtcgggaagggatggatcgctgagccgatagcgtccgctaggctgtctgcctcggtacctgttactgctgctacttcctcgtttgacaccttcctggaatctctcttgatttttgaggaaatacctagtaacaaacatgactgagttctggcttatatctgctcctggggagaaaacctgtcagcaaacatgggagaaattgcatgcggcaacttcaaagaacaataatcttgctgtcacttccaagttcaatattcctgacttaaaggttggcacgttggatgtcttggttggcttgtcagatgaactggctaaactggatgcatttgtagaaggagtggttaagaaagtagctcaatacatggctgatgtattggaagatagcaaagacaaagttcaagagaatctgttgctaatggagtgg

SEQ ID NO: 44474 - DNA, 434 bp, Homo sapiens
gcctctctctgtgttaccataataagctaatcctggccccaatggttcgggtagggactcttccaatgaggctgctggccctggattatggagcggacattgtttactgtgaggagctgatcgacctcaagatgattcagtgcaagagagttgttaatgaggtgctcagcacagtggactttgtcgcccctgatgatcgagttgtcttccgcacctgtgaaagagagcagaacagggtggtcttccagatggggacttcggacgcagagcgagcccttgctgtggccaggcttgtagaaaatgatgtggctggtattgatgtcaacatgggctgtccaaaacaatattccaccaagggaggaatgggagctgccctgctgtcagaccctgacaagattgagaagatcctcagcactcttgttaaagggacacgc

SEQ ID NO: 44475 - DNA, 417 bp, Homo sapiens
  misc_feature (1)...(417): n = a,t,c or g
cggacgcgtgggcataatattaagcatataacctacacannnnnnnnnnnnnnnnnnnnnnnnnnnnnnnnnnnnnnnnnnnnnnnnnnnnnnnnnnnnnnnnnnnnnnnnnnnnnnnnnnnnnnnatttgtaaatttgtatcatttttttttctgaatatttttaacccttggttagttgaatctgcggatgtgaaacctgcagatatggagggctgactgtacctactttctagggttgttgggaggattaatacagaaaatgtgtagacaaacatagcatggaacatagtgaaccctcagtaattgctactacctgttagtgtccttttacttttatcaggacaagagtagcatccttttgaataatgtgctttagaaaagaggcctcaatgttaaaatactttcacacttttt

SEQ ID NO: 44476 - DNA, 435 bp, Homo sapiens
gatgattctgacatttgggatgatacagcactgataaaagcatatgataaagctgtggcttcatttaagcatgctctaaagaatggtgacatttgtgaaacttcgggtaaaccaaaaaccacacctaaaagaaaacctgctaagaagaataaaagccaaaagaagaatactgcagcttccttacaacagtggaaagttggggacaaatgttctgccatttggtcagaagacggttgcatttacccagctaccattgcttcaattgattttaagagagaaacctgtgttgtggtttacactggatatggaaatagagaggagcaaaatctgtccgatctactttccccaatctgtgaagtagctaataatatagaacagaatgctcaagagaatgaaaatgaaagccaagtttcaacagatgaaagtgagaactcc

SEQ ID NO: 44477 - DNA, 431 bp, Homo sapiens
  misc_feature (1)...(431): n = a,t,c or g
cgttgacacgatagatcttattccatacttctttattattgataattttattttcattttttgctttcattattatacatattttggtggagaagaggttgggtttttttgaaagagacaaaaatttattataacactaaacactccttttttgacatattaaagcctttattccatctctcaagatatattataaaatttatttttttaatttaagatttctgaattattttatcttaaattgtgattttaaacgagctattatggtacggaactttttttaatgaggaatttcntgatgatttangaattttctctcttggaaaaggcttcccctgngatgaaantgangngccagctaaaattgggggccatttanaaactgaacatattttanaattatntngnctatatnctaaattgagctttgg

SEQ ID NO: 44478 - DNA, 430 bp, Homo sapiens
aggggccaaaggggagtggagcctgcctgcatcccctggacagcctggagcagaaggagactcaggagcaaacgtcgggccagctagtcatgctgaggaaggcacaggagttctttcagacctgtgatgctgaaggcaagggcttcatcgccaggaaggatatgcagaggctgcataaggagctaccgctcagcctggaggaactggaggatgtgtttgatgccctggatgctgatggcaatggctatctgaccccacaggagttcactactggatttagtcacttcttcttcagccagaataacccaagtcaggaagatgcaggtgaacaggtggcccagcgccatgaagagaaggtgtatctgtccagaggggatgaggatctgggcgacatgggcgaagatgaggaagcccagttccggatgctgat

SEQ ID NO: 44479 - DNA, 438 bp, Homo sapiens
  misc_feature (1)...(438): n = a,t,c or g
cccacgtaggcgttgaccctgcactatcagatcctgtgttggcccggcgccttcgggaaaaccggagtttggccatgagtcggctggatgaggtcatctccaaatatgcaatgttgcaagacaaaagtgaggagggcgagagaaaaaagagaagagctcggctccaaggcacctcttcccactctgcagacacccccgaagcctccttggattctggtgaggtgtggatggggtacagccttcagagagacattgtccttcccctgcactggccaccagggagtccaggttgactgatgggggagcatgataaggaaagcaagaaccaaaccctctggggcaagggattccttanagaaacttctttgtctccnagggccctagtggaatggcatcccaggggngcccttctgctccanagctganacanatgacgaa

SEQ ID NO: 44480 - DNA, 430 bp, Homo sapiens
ctagaaggcaatcagatttttaacaaccggtttggaggcttatttttagcatctggtgttaatgtgacaatgaaagatagcaaaataatgaacaatcaagatgccatagaaaaggctgttagtagaggccaatgtttatataaaatatcaagttataccagctatcccatgcatgatttctacagatgtcatacttgtaacaccacagatcgaaatgccatatgtgtgaactgcattaagaagtgccatcagggacatgatgtagagtttattagacatgataggtttttctgtgactgtggagctggaacactgtctaatccttgtacattagctggagagcctacacatgatacagatacactatatgactctgctccacctatagaatctaatacattgcagcacaactgaattccttccctaaaga

SEQ ID NO: 44481 - DNA, 439 bp, Homo sapiens
  misc_feature (1)...(439): n = a,t,c or g
ctctgaaatgcttttcggggtctttctcccattgttttgatgaacagaatctggcttcctcgcattcatactaatctctttggcaaatggtagcttggccacacccttagtactctcttccaaatacactttcactctttnnnnnnnnnnnnnnnnnnnnnnnnnnnnnnnnnnnnnnnnnnnnnnnnnnnnnnnnnnnnnnnnnnnnnnnnnnnnnnnnnnnnnnnnnnnnnnnnnnnnnnnnnnnnnnnnnnnnnnncacagcagcctcaatgcttagctgcttaagtatttcttccacaaatatcctagttcatccctcttaagttctgcattccattaagtcctaggacacagacgcaatntcncccagctctttgcaancttatnttctanaantatggncnttacttcanattncanaacctngcctctcatt

SEQ ID NO: 44482 - DNA, 411 bp, Homo sapiens
  misc_feature (1)...(411): n = a,t,c or g
ctggagtcacagcgccaggtcccccgatcagaagcctctgccttcggcgcctcccaccacgtggcctactttgaggcctcggccaaactgcgtctcaacgtggacgaggcttttgagcagctggtgcgggctgtccggaaataccaggaacaagagctcccaccgagccctcccagtgcccccaggaagaagggcgggggctgcccctgcgtcctcctgtagcccaggcaagagagaagcaaccaccacaagctctcgggactagctgccttcgcaccttgctgtgtgacctgaggccctcactgagcctcaatttcctcatctgggtctcccaggacacatcacatacccacccttacttcctggctcttctgggctactgccactgtgngccttctgccaacgcctcct

SEQ ID NO: 44483 - DNA, 380 bp, Homo sapiens
  misc_feature (1)...(380): n = a,t,c or g
aataactgtttggcagtgtgtactttgtttttgtgagtcatgtctcatgaaatttattggaatgtttaatcatatttgctaagaaatgtttctgctgtagttggatttgcccatatttatgtaggtggttttaattttttaaatggtgattagngttaaaaatcantttaaatcntgactnatatggtnaaaagataaagcntcncagcagtntttctcattcctgcctcctcnatatctaatactgggangatacttcnnagantattgagnttgtctgangttttagttnnnattttccacnttnntntcaacaaagnccnntnnntttgntctccatgngtnntatcgnnangcncnanactctgaaatncgtgctc

SEQ ID NO: 44484 - DNA, 417 bp, Homo sapiens
gcagaagaagcgacaattgggattgtggatggcattttcacaaggatgggtgctgcagacaatatatataaaggacggagtacatttatggaagaactgactgacacagcagaaataatcagaaaagcaacatcacagtccttggttatcttggatgaactaggaagagggacgagcactcatgatggaattgccattgcctatgctacacttgagtatttcatcagagatgtgaaatccttaaccctgtttgtcacccattatccgccagtttgtgaactagaaaaaaattactcacaccaggtggggaattaccacatgggattcttggtcagtgaggatgaaagcaaactggatccaggcacagcagaacaagtccctgattttgtcaccttcctttaccaaataactagagga

SEQ ID NO: 44485 - DNA, 414 bp, Homo sapiens
gctgtctaccagttgacccgaatgtgcaccatccgcatgagcttcgtcaaaggctggggagcggagtacaggagacagactgtgaccagtaccccctgctggattgagctgcacctgaatgggcctttgcagtggcttgacaaggtcctcacccagatgggctccccaagcatccgctgttccagtgtgtcttagagacatcaagtatggtaggggagggcaggcttggggaaaatggccatgcaggaggtggagaaaattggaactctactcaacccattgttgtcaaggaagaagaaatctttctccctcaactgaaggggtgcacccacctgttttctgaaacacacgagcaaacccagaggtggatgttatgaacagctgtgtctgcaaacacatttaccttttggcccc

SEQ ID NO: 44486 - DNA, 392 bp, Homo sapiens
  misc_feature (1)...(392): n = a,t,c or g
cggacgcgtggggttgctgggagggtgacattgtactgaagaacaagctactgaatcagtgtccctttgatgccatagtaataaaggtaccnngactnaatgatgttaagnttggnnctctnaaantgaatnanntactannaccatgacgatngnaantcntnagganagctngnaccatgnttaagtccacncnctgacaatgatgatgntgnnattgactttgatattgnanannaactanttgtantttaatnnanggnanaanacntactgaacctttctttncagattgnantcattacannggnggaacttatnantacttccanntaanttnaaaannntatgttctanatgaatttatcnnttttgnccngnnnttntcccta

SEQ ID NO: 44487 - DNA, 416 bp, Homo sapiens
  misc_feature (1)...(416): n = a,t,c or g
gtctttcagagtatggcaatgtggtgggccgttggagattatgccttgctctgttgtngnacntgntnttcncagcatgaagccctcatanctttncanaaggcactcnngggatngctananaccanggtcgncttgcataaatctggatggatgaatacaaggaantattttatagganaantacagatgcagcaananntggnacacanaangcatttggaganctttnaannggatntganatagaacaccgtcttcagngtaaaaattttacatggntctgacctacatttatccataggtgtatgtgccataccttaatcctgttatatctggatacattatangcgttggtcagcctntatgtctggatgctggaaagaacnatcanngaggcngaccnttaattatgt

SEQ ID NO: 44488 - DNA, 396 bp, Homo sapiens
  misc_feature (1)...(396): n = a,t,c or g
cgccgtggagaccggcgcgtgaggaacctaccggtaccggccgcgcgctggtagtcgccggtgtggctgcacctcaccaatcccgtgcgccgcggctgggccgtcggagagtgcgtgtgcttctctcctgcacgcggtgcttgggctcggccaggctggggtccgccgccagggtttgaggatgggggagctnctaccngattanganccctgtanncttggnntatttntnnntaangatnnnnnnccttnanaanttgntatcncacaantttnnnntnaatttnntcannttcntnnttttaattcntttntntgctgtnnacctgtnatncnanttnnctatnantttacncntnttannnattnnttnntggtnnagnnncctnttttttt

SEQ ID NO: 44489 - DNA, 440 bp, Homo sapiens
  misc_feature (1)...(440): n = a,t,c or g
cttttaacagttactatgttggaataggttacaaattttggagtggatttcaaaagtgagagctaacttcagttgatttcaaggtagacgcttggctttttttgtttagacagggttttactcctgccctggttggagtggaagttaacggctaactgcagtcctgacttctgggcttaagtgatcttccctgaatagcagggaccacaggtttttgccaccacgcctggctaannttngnatntngccntgatgccaaggctggtcaactccatgggctcangtgatctgcctgtactgtatctttcccagncatctgatagtttatcttttaaatctcagatgtgccaggacctcngnanagactnaaggaagaacccntgtgctcttantgngacncganangttcanacntactaacctctcccanttgcaggtct

SEQ ID NO: 44490 - DNA, 435 bp, Homo sapiens
  misc_feature (1)...(435): n = a,t,c or g
cagaaatttggagacttcttacaacattctccctcaattcttcaatcaaaagcaaagaagataattgaaacaatgagctcttcaaagctctcaaatgtagaagcaagtaaagaaaatgtgtctcaaccaaaacgagccaaacggaaattatacacaagtgaaatttcatctcctattgatatatcaggccaagtgattttaatggaccagaaaatgaaggagagtgatcaccagattatcaaacgacgacttcgaacaaaaacagccaaataaatcacttatggaaatgtttaatataaattttatagtcatagtcattggaacttgcatcctgtattgtaaatataaatgtatatattatgcattaaatcactctgcatatagaaatgatgntttatacatagtataattttaattcaataaatgagtcaaaat

SEQ ID NO: 44491 - DNA, 415 bp, Homo sapiens
  misc_feature (1)...(415): n = a,t,c or g
ggatctggccacgtgccacnnnnnnnnnnnnnnnnnnnnnnnnnnnnnnnnnnnnnnnnnnnnnnnnnnnnnnnnnnnnnnnnnnnnnnnnnnnnnnnnnnnnnnnnnnnnnnnnnnnnnnnnnnnnnnnnnnnnnnnnnnnnnnnnnnnnnnnnnnnnnnnnnnnnnnnnnnnnnnnnnnnnnnnnnnnnnnnnnnnnnnnnnnnnnnnnnnnnnnnnnnnnnnnnnnnnnnnnnnnnnnnnnnnnnnnnnnnnnnnnnnnnnnnnnnnnnnnnnnnnnnnnnnnnntgtaatcccaattgtatgagccaccgcgcctggcctaaaaacatctttggtaaggaagaactacccttttgagagtaagaatagctttgtttaaatatgtcgtaagaagggttaggctgttgcagga

SEQ ID NO: 44492 - DNA, 417 bp, Homo sapiens
gtggggtttatcaggaatgcactcagctctcagggaatagggatgtcctcctctgccaaaagttggagcagaagaatccactcactggtgatttctcctgcccctctggctactccccggtgcacctgttatcccagatccacgaggagggttacaaccacctggagtgtcatcgaaagtgcactctcctcgtcttctgcaagaccgtgtgtgaagatgtgttccaggtggcaaaagctgaatttagggctttttggtgtgtggccagcagccaagtacctgaaaactcaggactgctttttgggggcctcttcagcagcaagagcataaaccccatgacaaatgcacagtcatgcccagccggctactttccactgagactctttgaaaacctcaaggtatgtgtttctcaggact

SEQ ID NO: 44493 - DNA, 445 bp, Homo sapiens
  misc_feature (1)...(445): n = a,t,c or g
gcaagttgtccatcttaacttagcagaagattgcatgaataagttcaagcttaatatagaaaagctctgcaaaactgaacaggacctggcacttggaactgatgcagaaggacagaaggtgaaagattccatgcgagtactccttccagttctactcaacaaaaatcatgataattgtgataaaataagagcaattctactttatatcttcagtattaatggaactacggaagaaaatttggacaggttgatccagaatgtaaagatagaaaatgagagtgacatgattcgtaactggagttacccagagttcccattgtnccccaatctcaacaaggcaaaccgntaagaaagggatcggnctgnaaannancttttcagcncnctcggnggacaccttttatcanngatattnngnggangctatngancatncattnnattc

SEQ ID NO: 44494 - DNA, 451 bp, Homo sapiens
  misc_feature (1)...(451): n = a,t,c or g
ggagatgatttacgtcaagatcaacttattcttcaaatcatttcactcatggacaagctgttacggaaagaaaatctggacttgaaattgacaccttataaggtgttagccaccagtacaaaacatggcttcatgcagtttatccagtcagttcctgtggctgaagttcttgatacagagggaagcattcagaacttttttagaaaatatgcaccaagtgagaatgggccaaatgggattagtgctgaggtcatggacacttacgttaaaagctgtgctggatattgcgtgatcacctatatacttggagttggagacaggcacctggataaccttttgctaacaaaaacaggcaaactcttccacatagactttggatatattttgggtcgggatccaaagcctcttcctccaccaatgaagctgaataaagaaatggtanaaggaatgg

SEQ ID NO: 44495 - DNA, 439 bp, Homo sapiens
  misc_feature (1)...(439): n = a,t,c or g
ctgaatttgtaggtcactttggatagtatcgaaatgttaacattattaagtcttctaatccatgaacatgggatattgttccatttgttttctttcatctctttcagcaatgttttgtggttttcattatacaagtctttgcctcagtgattaatttctaagtattttattctttttgatgctattttaaatggaattttaaatttcttttccaattgttcattgttagtgtataaacacacaactgatttttgtgttgattttgtatcatgctactttgttgaacttgttgattacctctgtcaattttattgatactttgtcctttccaatgtgaatgcctttttttctttttttgcctaattgctccagctagaatttctagtactacattgaatagaagtggcaaaaacctgcattctgactcgntcctgacttg

SEQ ID NO: 44496 - DNA, 448 bp, Homo sapiens
cccacgcgtccgattcgctgtatgaaggaagatggtaagggatactggagtgactggagtgaagaagcaagtgggatcacctatgaagatagaccatctaaagcaccaagtttctggtataaaatagatccatcccatactcaaggctacagaactgtacaactcgtgtggaagacattgcctccttttgaagccaatggaaaaatcttggattatgaagtgactctcacaagatggaaatcacatttacaaaattacacagttaatgccacaaaactgacagtaaatctcacaaatgatcgctatctagcaaccctaacagtaagaaatcttgttggcaaatcagatgcagctgttttaactatccctgctgtgactttcaagctactcaccctgtaatggatcttaaagcattccccaaagataacatgctttgggtggaatggac

SEQ ID NO: 44497 - DNA, 444 bp, Homo sapiens
  misc_feature (1)...(444): n = a,t,c or g
gccagttttaactccaattgatgagggacatcttccaatgattaaccaggatgagtttagaaacttttcctatgtgtctccagaattgcaaccatagccttatggggagtgagagagagggcacgagaacccaaagggaatagagattctccaggaatttcctctatgggaccttcccagcatcagccttagaacaagaaccttaccttcaaggagcaagtgaagaactctgtgaaggatggaactttcagatatcaactatttagagtccagagggagccatggcactagaaatagttgataatgaaatgagattttatgaagtataccgctccacctatgagcngtctgtctctgtgggcttgggatgttaacaggagccaaaaggagggaaagtgtgaanaataaagtagatctgagaaattctgagccaatcaggcttct

SEQ ID NO: 44498 - DNA, 417 bp, Homo sapiens
  misc_feature (1)...(417): n = a,t,c or g
atttgaagtgatagtatcatatatatattattcttcatggtaagacaaatatggatgagaaatcccagaaagattaagtgaacatgtcaacacaggttttccccagcactgaaagagaaattgcccatctaaacaaccagatgtatgaaaaaaatacataagtcttatttgtcnctannttgncttngngaccnntngctttganctnatattncngantgnggnagcncctgcnantctgnctggnacatccgtgtnanctnnttcttgannangttngacgntnntgtnntncntgtttcttntcncaccnnccccannntctgtatnntaccagnnttgtntcncnggtnttancacntgntggatcnncgcgtgtganncaagnntntttcnangntngngctctgntctagg

SEQ ID NO: 44499 - DNA, 424 bp, Homo sapiens
gaggaaattcttcctaaaactaggattcctgttcctttgtcttctcactcgcactctggcactgctccctctgaagtgcagtgggatctcgtgtgctttgtcttgattctgtgctgcgctgccgctgggcgatgcagaccacctgtcttctactgaaggacagtccgctgtctccagtgggggcagcagctgtcccccagcctcgatggagacactggggcagtctgccttgtctgtggagctgctctctctccctcatcccaccccaaatacttaaaatgacactacacccagacggcgcccagctggctgcagcacttgtagcatgcacatgactctggtagtaaccaacaaaaacttgttttatggattcctcgtttactgaggaaagggaacatgctggttctggaaaagccacaatatt

SEQ ID NO: 44500 - DNA, 392 bp, Homo sapiens
  misc_feature (1)...(392): n = a,t,c or g
atgcctcnnnnnnnnnnnnnnnnnnnnnnnnnnnnnnnnnnnnnnnnnnnnnnnnnnnnnnnnnnnnnnnnnnnnnnnnnnnnnnnnnnnnnnnnnnnnnnnnnnnnnnnnnnnnnnnnnnnnnnnnnnnnnnnnnnnnnnnnnnnntcatatatgcattaatttacttgcatggtgaagtccaacatgtcaaaaatgaaatgatgagctgtattgtccctatgtctacccagtctactactttgtgttttaaggttcataagactttttgagtgctatgtgtcagtagtctatttacagagttcatccaaagaatttattgaattaaaggatggttctaatggaaatctattgtgttttgttattacatgcacacctaaaaaaaaaaaaaa

SEQ ID NO: 44501 - DNA, 419 bp, Homo sapiens
gtgcctcctggccggggcccctcaccccaaggggtctgtatatacatttcataaggcctgccctcccatgttgcatgcctatgtactctacgccaaagtgcagcccttcctcctgaagcctctgccctgcctccctttctgggagggcggggtgggggtgactgaatttgggcctcttgtacagttaactctcccaggtggattttgtggaggtgagaaaaggggcattgagactataaagcagtagacaatccccacataccatctgtagagttggaactgcattcttttaaagttttatatgcatatattttagggctgtagacttactttcctattttcttttccattgcttattcttgagcacaaaatgataatcaattattacatttatacatcacctttttgacttttccaag

SEQ ID NO: 44502 - DNA, 446 bp, Homo sapiens
  misc_feature (1)...(446): n = a,t,c or g
gcagccctttgctgagcgcttactaatgcagtttaaccaccggctcacacagcaggaggcagctgagaaggcccagcagatgtacgctgccaccaagggcctccgctggtatcggctgtcggatgagggcgagtggctggtgagggagttgaacctcccagtggacaggactgagggtggctggatttccctgcaggatctgcgcaaggtccagagagaaactgcaaggaagtcacagtggaagaagtgggagtggttgctgaacgggcatggaaggggggcacagagtcagaaatgttcaataagcttgagagcattgctacgtctgacataccacgtaccccggtgctgggctgctgcatcaccgagccctggagccctcgntgtccaggaagatttatgaccanccgngnnaattggnngncnnnntntgtgnnnctncttac

SEQ ID NO: 44503 - DNA, 471 bp, Homo sapiens
  misc_feature (1)...(471): n = a,t,c or g
atttgcaaattagccttataggttttagctgagctgaacttgacaaaaatgtattagtacttactacatgttttaatattctatcttaattaaaattgnaacatttagttatactttcaacagttcatatataatatattcatttaattttgttttcatgggatgtttggtgtggtgagacaaagcacattcttaaagatatatataatatttcatctaatgtttatagcttttccttcaaaattatatatgtaaaagtttccttaactcattttctatttttatattcttttagaaatggaactctttttcaattaaaaaaaagttttagttggaaaagagatttaggaggtcatgaagatggcttcccatttggggacatttataaaaaggccatttcaggaagatataacaattataaatatgtgtgctcctgataacagaacaccaaaatacataatgcaaaaactg

SEQ ID NO: 44504 - DNA, 453 bp, Homo sapiens
tctggaagagggaatgtttcatttattactgtttgattttcttgtatctggttctactcccaggatgaaattatccaactacatatatatttagaggaagaaagtgaaggggaaatttaaaatgtttacggcgcttaattgcctggaaatgaaatgaaatcaaatttatcagtttttttccccctaattacccaaaagatcttttgcaaactatgttacatgaatgcttctgcctctttaagacaaagaagaatgtcacccaaaattgtcatttttttcttaatgttcatcataaaagtcctaaaagagtaactgtaattggatgtttattggttttatctaaagtaaggtgtatgtgtttgagacaagctggttttgttgataaagagatgttaaataattgtgaagccagatatgcaatgtgtatctaaaaagcaaggaatttgcagccgt

SEQ ID NO: 44505 - DNA, 454 bp, Homo sapiens
tgctattgcagcttcacctgctaccttagctggagcaacagcagtttctgaatggactgaatataaaacagcagatgggaagacatattattataataatagaacattagaatcaacctgggaaaaaccccaagaactaaaggaaaaagaaaagttagaagagaagattaaagagccaattaaagaaccctctgaagagcctctgccaatggagacggaggaggaggatcctaaagaagagcctataaaggagataaaggaggagcccaaagaagaggagatgactgaagaagaaaaggctgcccagaaggcaaagccagttgctactgctcctattcctggtactccatggtgtgtcgtttggactggtgatgagcgggtcttcttttataatcccaccactcgtctttctatgtgggaccgacctgatgatctgaattggcagggcagatgt

SEQ ID NO: 44506 - DNA, 466 bp, Homo sapiens
  misc_feature (1)...(466): n = a,t,c or g
gggagccggaaagatggtggttaccagatctgcacgggctaaggccagcatccaagccgcgtcggctgaaagttccgggcaaaagagttttgctgctaatgggattcaagcgcatccagaaagtagtactggatctgatgcccgaactactgctgaatcacagaccactgggaagcaaagtttaatccctagaactcctaaagctagaaagaggaagagcagaactacaggctcactaccaaaggggactgaaccatctacggatggagagacctctgaggcagagtcaaattattctgtgtctgagcaccatgataccattttaagggtaactaggagaaggcagatcttaattgcatgctccccagtgtccagtgttaggaaaaagccgaaagtaactccaacaaaggagtcttacactgaagaaatagtgtctgaagcagaatctcatgtttcangtatttct

SEQ ID NO: 44507 - DNA, 452 bp, Homo sapiens
gggacagcaaatcttgaagcagccggtgtcagagagactggactttgtgtgcagttttctgcagaaaaatcgaaaacatccctcttccccagaatgcctggtatctgcacagaaggtgctagagggatcagagctggaactggcgaagatgaccatgctgctcttataccactctaccatgagctccaaaagtcccagggactgggaacagtttgaatataaaattcaggctgagttggctgtcattcttaaatttgtgctggaccatgaggacgggctaaaccttaatgaggacctagagaacttcctacagaaagctcctgtgccttctacctgttctagcacattccctgaagagctctccccacctagccaccaggccaagagggagattcgcttcctagagctacagaaggttgcctcctcttccagtgggaacaactttctctcag

SEQ ID NO: 44508 - DNA, 432 bp, Homo sapiens
cgcacagtttgacagtcctgagatcctgtgaaggctggacgtgcggctgctggaggtctctccaggtgacactggatgggatgtcttcagcctcgattatcatgttgacggaccaattgcaactgtgtttactcgagaatgtatgagccactacctaagagtatttaacttcctctggagggcgaagcggatggaatacatcctcactgacatacggaagggacacatgtgcaatgcaaagctcctgagaaacatgccagagttctccggggtgctgcaccagtgtcacattttggcctctgagatggtccatttcattcatcagatgcagtattacatcacatttgaggtgcttgaatgttcttgggatgagctttggaacaaagtccagcaggcccaggatttggatcacatcattgctgcacacgaggg

SEQ ID NO: 44509 - DNA, 433 bp, Homo sapiens
tgcttatgatgctatagtacctcaaatcgtttgtgggctgaggatagtactgagaaagaaaaggacagtgttcctacggcagtgaccattcctgttgctccaactgttgtaaatgctgcagcttctaccacaaccctgactacaactactgctggcactgtctcctccacaacagaggtcagggagagacgcagatcatacctcactcctgttagggatgaagagtctgaatcccaaagaaaagcaagatctagacaagcaagacaatctagaagatcaacacagggagtgacattaactgatcttcaagaagctgagaaaacaataggaagaagtcgttctacccgaaccagagaacaagaaaatgaagaaaaagaaaaagaggaaaaagagaaacaagataaagagaaacaagaagaaaagaaggagtcag

SEQ ID NO: 44510 - DNA, 436 bp, Homo sapiens
gaatgcctgaccctgggaaggctccctggtagaatacaccacacttttcaggttgttgcaacacaggtcctgagttgacctctggttcagccaaggaccaaagaaggtgtgtaagtgaagtggttctcagtccccagacatgtgcccctttgctgctggctaccactcttccccagagcagcaggccccgagccccttcaggcccagcactgccccagactcgctggcactcagttccctcatctgtaaaggtgaagggtgatgcaggatatgcctgacaggaacagtctgtggatggacatgatcagtgctaaggaaagcagcagagagagacgctccggcgccccagccccactatcagtgtccagcgtgctggttccccagagcacagctcagcatcacactgacactcaccctgcctgccctggccagaggg

SEQ ID NO: 44511 - DNA, 413 bp, Homo sapiens
  misc_feature (1)...(413): n = a,t,c or g
ggcgagtccccggctcctccagctccttcctcctcttcctcctcctcctccacctccggcttttgggggatcactgtcctctctcggcagcagaatgagccggcaggtggtccgctccagcaagttccgccacgtgtttggacagccggccaaggccgaccagtgctatgaagatgtgcgcgtctcacagaccacctgggacagtggcttctgtgctgtcaaccctaagtttgtggccctgatctgtgaggccagcgggggaggggccttcctggtgctgcccctgggcaagactggacgtgnggacaanaatgcgcccacggnctgtggtcacacagcccctgtgctagacatngnctggngcccgcncaatgacaacgntnttgcantggctncgaggantgnnngntcag

SEQ ID NO: 44512 - DNA, 432 bp, Homo sapiens
agatactcatggatactatccagttacctgccaagtatccagaattatttgcaaacttgcccatacgacaaagaacaggaatactgttgtatggtccgcctggaacaggaaaaaccttactagctggggtaattgcacgagagagtagaatgaattttataagtgtcaaggggccagagttactcagcaaatacattggagcaagtgaacaagctgttcgggatatttttattagagcacaggctgcaaagccctgcattcttttctttgatgaatttgaatccattgctcctcggcggggtcatgataatacaggagttacagaccgagtagttaaccagttgctgactcagttggatggagtagaaggcttacagggtgtttatgtattggctgctactagtcgccctgacttgattgaccctgccctgc

SEQ ID NO: 44513 - DNA, 427 bp, Homo sapiens
  misc_feature (1)...(427): n = a,t,c or g
gcgatgtggacagcgtgggtggcggcagcgagtctcggtccctggactcacccacttccagcccaggcgctggcacgaggcagctggtgaaggcttcgcccacaggcactgagtcctcagatgactttgaggagcgagaccctgacctggtagacggactgaagaatgggcntgggcantcccttnggnaantgnannttgtcatacgttttannctcatcatntnntcttgactnctntncnatatcccatnccactnnnnnntnttnttttatnnanatngnttnnttatttnanntnntgcantatacntnnatatnattncctnntttttnnntttcngttatatttntntnttgaattgtnttttntntntnnnnntnnntntcttngtgnnnnnttantntgncntnnnaattcnaataat

SEQ ID NO: 44514 - DNA, 314 bp, Homo sapiens
  misc_feature (1)...(314): n = a,t,c or g
gccaatacagattttttaaagataaaataccatctctactggacctgtttagtggctcaggctgccctcacaggacatccctgagaccaccctgtcactgttgatgttggaaccagggcccaggcctgctcctcattgtctcctgccctcctagtccccaggagaggaaaagaaatactgttttagagaaataacattttcaacaaaacatccctggagtcagattttgagttggggngggctaatcagggantcggggctntctgcgtgangncanntntatgnntaagtgnntattntngancanccnctag

SEQ ID NO: 44515 - DNA, 346 bp, Homo sapiens
  misc_feature (1)...(346): n = a,t,c or g
gcgtgaggatcctggagacgtcccctcctgaagtgcttcttaaactttgttatgcagatgaatcacccaggatcttgtgactcagcagctcccannnnnnnnnnnnnnnnnnnnnnnnnnnnnnnnnnnnnnnnnnnnnnnnnnnnnnnnnnnnncacgtaccacatgtggggccagtcaggatccaggagacatcatcatttaactagcagtttcaaaaactcacattaaagcaaataagctttatttaaaaaccgttaatataaatatataatgtatatttttaaatgctggcattgtaaattgtgtgaccattttgaaaagcaattttgtgaaatgtatcaag

SEQ ID NO: 44516 - DNA, 240 bp, Homo sapiens
  misc_feature (1)...(240): n = a,t,c or g
nnnnnnnnnnnnnnnnnnnnnnnnnnnnnnnnnnnnnnnnnnnnnnnnnnnnnnnnnnnnnnnnnnnnnnnnnnnnnnnnnnnnnnnnnnnnnnnnnnnnnnngtggccttttatgagaggggacccgtcaaatctgtgccttatggaggggtccggcancggcacaattgnnttgnnccctnanccnncaactnccnntggaacacctntnccangcnnnacattttnacannaccatt

SEQ ID NO: 44517 - DNA, 347 bp, Homo sapiens
  misc_feature (1)...(347): n = a,t,c or g
gggggaccagggaccgtggagggcgagaacggagagtcaggccgttcgaggcatggaccgaaggcggctccgggagtgtgggcccccctgggacgtgtgcgtgtttccgggggctcctgcaaatgctcgtgcgtgtgcatttgcacgtggactcggtcaggcgtgtgcagacagcgcctgcaggtctgggtgggtgctgatctgagtgtctgcgcctgggccatgtttttgagcctggcacaggggtgcttagtgaacacatgaccgctacgttgtgtgcccngatccaacgganaatgaaactagagtaggacatgctcccaacccttttangtaaagttttgata

SEQ ID NO: 44518 - DNA, 352 bp, Homo sapiens
  misc_feature (1)...(352): n = a,t,c or g
gcacatgaggaaagatttttcaaagcatgtnnnnnnnnnnnnnnnnnnnnnnnnnnnnnnnnnnnnnnnnnnnnnnnnnnnnnnnnnnnnnnnnnnnnnnnnnnnnnnnnnnnnnnnnnnnnnnnnnnnnnnnnnnnnnnnnnnnnnnnnnnnnnnntcaaaaatcagttgcacaagttgtatgaaaccaggtattctgcagctctgtctcttgtttattaagatatgcacagtttctgaatcaacaaatatatctgtgattcttttatactactacataaaagaacaggagtaattcttgccttataaattaaatgtcaaacatttcctatatgtaatcatttgttcctaa

SEQ ID NO: 44519 - DNA, 341 bp, Homo sapiens
  misc_feature (1)...(341): n = a,t,c or g
nnnnnnnnnnnnnnnnnnnnnnnnnnnnnnnnnnnnnnnnnnnnnnnnnnnnnnnnnnnnnnnnnnnnnnnnnnnnnnnnnnnnnnnnnnnnnnnnnnnnnnnnnnnnnnnnnnnnnnnnnnnnnnnnnnnnnnnnnnnnnnnnnnnnnnnnnnnnnnnnnnnnnnnnnnnnnnnnnnnnnnnnnnnnnnnnnnnnnnnnnnnnnnnnnnnnnnnnnnnnnnnnnncatatttcaaccctaaaactagactcttctgcccacaagtgcagtcttctaagggttaccctctggtatatgttcttttgctaaatgaaggcttggagttggagggaagaagggg

SEQ ID NO: 44520 - DNA, 335 bp, Homo sapiens
ggtgggaacgctgtggccattcggatttggcgcgagcgcggctggagtttgctgctgccgctgtgcagtttgttcaggggcttgtggtggtgagtccgagaggctgcgtgtgagagacgtgagaaggatcctgcactgaggaggtggaaagaagaggattgctcgaggaggcctggggtctgtgaggcagcggagctgggtgaaggctgcgggttccggcgaggcctgagctgtgctgtcgtcatgcctcaaacccgatcccaggcacaggctacaatcagttttccaaaaaggaagctgtctcggcattgaacaaagctaaaaactccagtgat

SEQ ID NO: 44521 - DNA, 335 bp, Homo sapiens
ggggaccaaccacttcctaccccagagctccagatgcctaccatggtgccttcttatgaccttggaatggcccctgattcctccatgagcatgcagcttggcccagatatggtgccccaggtgtacccaccacactctcactccatccccccgtatcaaggcctctccccagaagaatcagtcaacgtgttgtcagccttccaggagcctcacctgcagatgccccccagcctgggccagatgagcctgccctttgaccagcctcacccccagggcctgctgccgtgccagcctcaggagcatgctgtgtccagccctgaccccctgctctgctc

SEQ ID NO: 44522 - DNA, 326 bp, Homo sapiens
  misc_feature (1)...(326): n = a,t,c or g
gaaaacattagcaggctgtggtggcnnnnnnnnnnnnnnnnnnnnnnnnnnnnnnnnnnnnnnnnnnnnnnnnnnnnnnnnnnnnnnnnnnncgtgattgagtactacactccaagcctgggcaacagagtgagaaccatctcttnnnnnnnnnnnnnnnnnnnnnnnnnnnnnnnnnnnnnnnnnnnnnnnnnnnnnnnnnnnnnnnnnnnnnnnnnnnnnnnnnnnnnnnnnnnnnnnnnnnnnnnnnnnnnnnnnnnnnnnnnnnnnnnnnnnnnnnnnnnnnnnnnnnnnnnnnnnnnnnnnnnnnnnnnnnnnnnnnnnnn

SEQ ID NO: 44523 - DNA, 313 bp, Homo sapiens
  misc_feature (1)...(313): n = a,t,c or g
ggataagggggaccacccacagctggtcgtgagaacagggagacagtgtgtgggggtgggacctcatctgtgtgcctggtatcctgagttttacatgtagatgcattcgcctatttgattcaaaaaataaactttcccaaaatgtgtctgaaccacaagagcatacagtggaagtgctacctctaatctaaccatagcaccttcatggtggaagacacccaccatgtcatacaatgtgaacttttgtatctntgcagtntttcanggacnnatngtgncantgtattgnnccntttttctgctgtnttatctt

SEQ ID NO: 44524 - DNA, 308 bp, Homo sapiens
  misc_feature (1)...(308): n = a,t,c or g
gattttttagctattacccaagtaaagcagttgtcgcataaaacaaaaagaactcagatgtgccaagggaaattctcttccctaaggatacaagattcactatctctgctcactttgaaatcgctgctttgatggncnngcttcatcnnnnagngannnngaangggttgnatncctntnctctntngtccgnntgtggccntcnntctgntgncngcatntnncnttgngctccanctggngcttnttctgtatanntccttattcncctggcactgnngncagaggngtgtgttcngttncttcct

SEQ ID NO: 44525 - DNA, 343 bp, Homo sapiens
  misc_feature (1)...(343): n = a,t,c or g
gattatttttaacacttcggtatggatgcccatagtaagaatataccttaccatctccttttcagcgtgatttagtattagggatgcatagtagggccatttcaatgctgaatagggctattttctgtgtcttaattgggggcttcactcttgaggctgggcatggtggctcatgcctatatcctatcatttggagaggccaaggcaagaggatcacnnnnnnnnnnnnnnnnnnnnnnnnnnnnnnnnnnnnnnnnnnntctgtatatactaaaactatcnaacttacctnnccttntnngtacnngcnnntanangtgcctattannnagncngctntata

SEQ ID NO: 44526 - DNA, 344 bp, Homo sapiens
  misc_feature (1)...(344): n = a,t,c or g
gnnnnnnnnnnnnnnnnnnnnnnnnnnnnnnnnnnnnnnnnnnnnnnnnnnnnnnnnnnnnnnnnnnnnnnnnnnnnnnnnnnnnnnnnnnnnnnnnnnnnnnnnnnnnnnnnnnnnnnnnnnnnnnnnnnnnnnnnnnnnnnnnnnnnnnnnnnnnnnnnnnnnnnnnnnnnnnnnnnnnnnnnnnnnnnnnnnnnnnnnnnnnnnnnnnnnnctggaacctccagcanaaagagaatgtttagatattaaagntttggggccnngaatggtgncnncnacctgnantcccaannccttggtctcctanaactgctnnnactncagnngcctgccacanaggg

SEQ ID NO: 44527 - DNA, 344 bp, Homo sapiens
gcaaccatcaacattgcctgtttgtctgcttttgaatctcttaaggatggatgtttgtaagatgttgcttaatacagtctggaatactctgtccatttgttgaattgtaaatgactttcaaatgtgcaagttctgttaaatacaaagagaacctctatgggtaacttttgtgttgaagaagtcatttgtcaaccatggtaaaacttgcaaacccactttatacagagtggattcttgaagctatacagaaaataaaaaagcaaaagcaaaggccctctgaagagagaatctgccatgcggtcagtacttcccatgggttggataagaagacagtctctgaacag

SEQ ID NO: 44528 - DNA, 333 bp, Homo sapiens
gcatggactggctgggacggagcctgacctcttacttcctgtggccagacgaggacagccggctgctgcccctgctggtctgcctgcggttcctgttcgtgcccctcttcatgctgtgccacgtgccccagaggtcccggctgcccatcctcttcccacaggatgcctacttcatcaccttcatgctgctctttgccgtttctaatggctacctggtgtccctcaccatgtgcctggcgcccaggcaggtgctgccacacgagagggaggtggccggcgccctcatgaccttcttcctggcctgggactttcctgtggagcctcctctccttc

SEQ ID NO: 44529 - DNA, 333 bp, Homo sapiens
  misc_feature (1)...(333): n = a,t,c or g
gcggcacgagcgcctctgggatctcacaacgcaagtagctgctcacttagctctggggccttgggaagaatctgggcagaagtgaggtggatgcaattggctggtttcccaggggagatccagtccatttgggaactggaaagcagagcacacctacagaagatgtttggcctccctcactttaaataagttactcagcattgctgaggagtgtggctgaacatttttgccaggtgcaacagttctgagtgggcancagttngaacatgtnttaccttgaaagctnangtaattngcangcggaaactagagggacctgnnnntgacnnaagc

SEQ ID NO: 44530 - DNA, 334 bp, Homo sapiens
  misc_feature (1)...(334): n = a,t,c or g
ggtgtccattgattctctcagtaaccctaatgaggtgggttctaatgtcattgccatattccaaatgaggaggttgaatcccagagaggttaaataccttgcccaaggactcccagctaatgagngncanaggnangatttgacncctganancctgnacngtttatgnacantntatactctaaaatgacnggacnnnttacttgtatcatctgcntatgtagacatacnatattttncacccnaaagtaccnttnattnncgtctaaacattntnaactttanagatccttttatntgctcnnntgtcncnaattgcnctnntcntnaacct

SEQ ID NO: 44531 - DNA, 342 bp, Homo sapiens
ggaaggatgaaggcagctatgacctgggcaagaaacccatctacaagaaagcccccaccaatgagttctacgcgtgaagcttgcttgtgggcactggcttggactttagcggggagggaagccaggggattttgaagggtggacattagggtagggtgaggtcaacctaatactgacttgtcagtatctccagctctgattacctttgaagtgttcagaagagacattgtcttctactgttctgccaggttcttcttgagctttgggcctcagttgccctggcagaaaaatggattcaacttggcctttctgaaggcaagactgggattggatcacttctta

SEQ ID NO: 44532 - DNA, 347 bp, Homo sapiens
gggaggctggggaaagtttaaaatcaagttgcttaccaattttgttcctggtgagggtcctcttcctggcttgcagatggctgtgttcttgctatgtcctcacatggtagagagaaagagagagagatctcttgtgtttcctcttataagggcacaagtgccatcatgtgagctctacactcatgacctaattacctcccaaaggccctgtctctaaatatgattggaggttagagctttaacgtgaatttttgggggattcagtccatagcaccatctaactggactagatatctctggatttgagccccaactgtatttcttatctccccaattgcctggaaaaa

SEQ ID NO: 44533 - DNA, 343 bp, Homo sapiens
  misc_feature (1)...(343): n = a,t,c or g
gaccaattcagtttacctgcatgacaactctgttgaatatccaatatgtcaacttaaaagtgcaaaactgtgctcctgatgttcatgcctcaaaccagtctcttgtgtactgttgcctttttcagttaatgaaacaatttttgtgtctcttgggccaaagattttggctagccatccttgacttttactcttctcacctttggcctattagaaaatcatgnnnnnnnnnnnnnnnnnnnnnnnnnnnnnnnnnnnnnnnnnnnnnnnnnnnnnnnnnnnnnnnnnnnnnnnnnnnnnnnnnnnnnnnnnnnnnnnnnnnnnnnnnnnnnnnnnnnnnnnnnnn

SEQ ID NO: 44534 - DNA, 338 bp, Homo sapiens
  misc_feature (1)...(338): n = a,t,c or g
ggacattccaaggtggtaaccaaaggggaagcattccaagtttcagaactcgggcataacatgacctgaggtcctggccgcagtgcacagggtcaactagagcagggatcagcaaacttgttctataaatgacaacatcannnnnnnnnnnnnnnnnnnnnnnnnnnnnnnnnnnnnnnnnnnnnacnnnnnnnnnnnnnnnnnnnnnnnnnnnnnnnnnnnnnnnnnnnnnnnnnnnnnnnnnnnnnnnnnnnnnnnnnnnnnnnnnnnnnnnnnnnnnnnnnnnnnnnnnnnnnnnnnnnnnagcacttgggaggctaaggcgggtggatcacctg

SEQ ID NO: 44535 - DNA, 318 bp, Homo sapiens
gggccctgaaggaggccaccaaggaggtgcacacccaggcagagaatgctgagttcatgaggaactttcagaagggccaggtgacccgagacggcttcaagctggtgatggcctccctgtaccacatctatgtggccctggaggaggagattgagcgcaacaaggagagcccagtcttcgcccctgtctacttcccagaagagctgcaccgcaaggctgccctggagcaggacctggccttctggtacgggccccgctggcaggaggtcatcccctacacaccagccatgcagcgctatgtgaagcggctccacgagg

SEQ ID NO: 44536 - DNA, 317 bp, Homo sapiens
  misc_feature (1)...(317): n = a,t,c or g
gtttataattatccttttctggggaccaacttataaagtaaaaaatacctggtggcattatctttgcttcagatgtattatgtttatggaattggaaatgtttgatttcttagtgtgtgtgtatcagtggattatgtagtttaaaatgtttgcatctgtattgcatgcataaacatgtccgtttccaagtgtggcctttaaatactcagggtttnnnnnnnnnnnnnnnnnnnnnnnnnnnnnnnnnnnnnnnnnnnnnnnnnnnnnnnnnnnnnnnnnnnnnnnnnnnnnnnnnnnnnnnnnnnnnnnnnnnnnnn

SEQ ID NO: 44537 - DNA, 137 bp, Homo sapiens
ggaaactaagtgaggaaactattccggagtagtgaaactttgagtacagctgcttcggttttggactacaaattggaattcttctattgagcaagagtcagggacgaaagtgggggctggtttaaaaaaaaaaaaaa

SEQ ID NO: 44538 - DNA, 342 bp, Homo sapiens
ggagctagcaccatgagcttcaataccctgaaagataaattcgagagaaaaaaaggcttctgctttacatcttctacatggtaaattcgttgatttttgcgtttggaacttgtacccgttacctactgctacctccttccccacgcatctgagcccttttgcaaagtttctccaatatggaacaaagagctttagttcctttatcctgagccatctttaggcttttatagatggctatttcacagtcatgaaactctgccttcaaaatcactcagaaatttgaggtgactgccaatattgaaaaataggagatttctgatattaatctagatttttcagctt

SEQ ID NO: 44539 - DNA, 336 bp, Homo sapiens
  misc_feature (1)...(336): n = a,t,c or g
gnnnnnnnnnnnnnnnnnnnnnnnnnnnnnnnnnnnnnnnnnnnnnnnnnnnnnnnnnnnnnnnnnnnnnnnnnnnnnnnnnnnnnnnnnnnnnnnnnnnnnnnnnnnnnnnnnnnnnnnnnnnnnnnnnnnnnnnnnnnnnnnnnnnnnnnnnnnnnnnnnnnnnnnctgaggatttttaattattaaatttagagtcctaatgattattgantntcnntatctactactacttannatactgtatggnnannactaacctnctnngacttctgcttactcntttacaccatncnncanctatttatnaacctaaccatgggcatnccnttatga

SEQ ID NO: 44540 - DNA, 341 bp, Homo sapiens
  misc_feature (1)...(341): n = a,t,c or g
ggtgaaaaagtgttatatatgacaagtgttttttgattgtaattgcgttaaatcttttgagagtgtaaatgccgggctaggcaattgcagttaatacatacaggggttagtgaagggcttattaagttgtaggggaagcaagctgggaagaatcagatcagatattttcctgacaaaaaaaaatgaccctgtagacagcatcaaaatgtggtgttcttgttaagtaattgatcgtggtctttgctttaatcttagttcnnnnnnnnnnnnnnnnnnnnnnnnnnnnnnnnnnnnnnnnnnnnnnnnnnnnnnnnnnnnnnnnnnnnnnnnnnnnnnnnnnn

SEQ ID NO: 44541 - DNA, 335 bp, Homo sapiens
ggggagtttacataaaagacacagtggcataataaacataggtccatcgacaacaaaagccttcataagcgtggaggattgaacaccaaggcgtgacacgatgaaggtaatttggccagtggctaagctggcaaggtccagtgatgtggcttttaggggctctggcttgatgtaaaattaacttagaatcattttcttgaagacgagactgaagacaaattcccaaaggaggctttgtagtggacattcagaggggaaagctcgttggccttggtgagattatacccggtgaaaggatgtgggtgccctcctgcccctgggttcccactttccat

SEQ ID NO: 44542 - DNA, 354 bp, Homo sapiens
  misc_feature (1)...(354): n = a,t,c or g
gggacttcctagagaaggtagtccctgaaggaaaagtaggaatctggcagtgaaagaggaaaagaacattccaggcagacagcactgcaagagggtgagctcttggtgtatttggagaccatccagttattcatctgactgcctacctgaggcaagcaccacacttaccactgtatgtgtactatgatcccaacaggcttgtgacatagatttcatattatccctgttgtatagatttttaaaactgnnnnnnnnnnnnnnnnnnnnnnnnnnnnnnnnnnnnnnnnnnnnnnnnnnnnnnnnnnnnnnnnnnnnnnnnnnnnnnnnnnnnnnnnnnnnnnnnnnnnnnnnnnn

SEQ ID NO: 44543 - DNA, 213 bp, Homo sapiens
gcttcattttagtttttctcaaagtgtgggtactgcaacagaattacctggggttcttgataaaaatgcatatttttggccctatagtccagatgtactgaatgaatctctctgggagaacccccgcaaagtctcactcaagcaggtgcttgagaagcactgctttatatcatcagtcctgattgtttggatttctttctttttttttttttt

SEQ ID NO: 44544 - DNA, 353 bp, Homo sapiens
ggtgttttccagtgctattaaacatgttataaactcatgttagtgccctcactggtagtctaggatatggatacactatgtatttatttaacctttccctggctgttggatgattatctcatgttgtgctactagaaaggagtgtagaagagtattaaaaagtactgcagatcgtgcataagtccttgtttgcatttctgattatgtccctaagataaattccttttttaaaaaggctcaaacattatgtcctaaaaatcagtttctaaaaggaaaagcacagccatcttaaggttattgatacatactgccaaactgttcttccggaggtgtgaaggctcatcacccactct

SEQ ID NO: 44545 - DNA, 358 bp, Homo sapiens
gaaagtttccaaagctttttgtttacagaataaaacttcaaataaaaccaattcattatttgtccagaaggaagcttggctgagctggccttttaacataggaatgtatttcgttggaaacattctgaaaaatctcagagaactgaacccttacaaactttgttttccctcataaccaaagcttcaggttagaagtttagaaaaatagaatggttgggtacatgatctaaatgtttaatgctaaaggtatatcgtaagggtagtgtttgtttttgaacgataatttagaagttctcatagaaagcgtataacataggtcttcagaaactataagagaattttcatatagtattaaaat

SEQ ID NO: 44546 - DNA, 354 bp, Homo sapiens
  misc_feature (1)...(354): n = a,t,c or g
ggggacagactttgcctctacctagtgaaccccacttaaagaataaggagcatttgaatctcttggaaaaggccatgaagaataaagcagtcaaaaagaagtcctccatgttggtgccaaggacttgcgaggggaaataaaaatgttatnnnnnnnnnnnnnnnnnnnnnnnnnnnnnnnnnnnnnnnnnnnnnnnnnnnnnnnnnnnnnnnnnnnnnnnnnnnnnnnnnnnnnnnnnnnnnnnnnnnnnnnnnnnnnnnnnnnnnnnnnnnnnnnnnnnnnnnnnnnnnnnnnnnnnnnnnnnnnnnnnnnnnnnnnnnnnnnnnnnnnnnnnnnnnnnnnnnnnnnnnnnnn

SEQ ID NO: 44547 - DNA, 351 bp, Homo sapiens
ggattctcaaggagattgaggtgaagaaggagtacctgagcagcctccagccccgcctcaacagcatcatgcaggcttcccttccggtgcaggagtacctgtttatgccattcgaccaggctcacaagcagtatgagacagccagacacctgccgcctcccctctatgtcctctttgttcaggccactgcgtatgggcaggcctgtgataagacgttatctgtggcaatcgaaggcagtgtggatgaagccaaggctctgttcaaacctccagaggactcccaagatgacgagagtgactcagatgccgaggaggagcagactacgaagcgccggagacccacactggggg

SEQ ID NO: 44548 - DNA, 340 bp, Homo sapiens
  misc_feature (1)...(340): n = a,t,c or g
cagagtacagttttaagggtaattgcttttttatacagtatagataacctagagggatttcagggttaaacagttcataaagcaataaaacactgaaaaataaagcaagaaaaaggggtttgaagtaatattttaccaaaaaaaaaaaannaaaangnnancngnntnccagngttaaaggcccannctttgggnanttnancantnttgnnntgannncangtnntancnnaaaccntgnnntttnaaagggaaangtaaaatttnctttaaacntgnntntngcntnnntgnantncaaaangttccngttnnacntncaaangcantttttttccgg

SEQ ID NO: 44549 - DNA, 336 bp, Homo sapiens
gtttcaaatctatttttaatgttgcttggtgaacattaacattttcacacttccagaaatgacattaataaaaatataaacaaattgatataaaaatctgtgtagactaagctagaatttacaaactcttaataaaaggtgtatttaagctttctcaattatgggacaacaaataatagacttcattgcttcatactaaaatggtatttttgactaatcacaaggaaacttaaactaccatatagttataattataggtattcagtccaaagaggaagaaagttttagtgttactataagaagctgtatctctgaaaatgttagctccataagtga

SEQ ID NO: 44550 - DNA, 325 bp, Homo sapiens
  misc_feature (1)...(325): n = a,t,c or g
attaaaagagtggtcaggatgcaacatgttatgttgttccttcagttgcttccatttccactctctgaatttatttccatcttgacttcttttaagatacatttcaattactgtgtgtttcctatttttgtctttcattttggaaattcctaatggtcagcagataaccaaacaaaacacaaaacatatttatcttttaaaaacannnnnnnnnnnnnnnnnnnnnnnnnnnnnnnnnnnnnnnnnnnnnnnnnnnnnnnnnnnnnnnnnnnnnnnnnnnnnnnnnnnnnnnnnnnnnnnnnnnnnnnnnnnnnnnnnnnnngtg

SEQ ID NO: 44551 - DNA, 330 bp, Homo sapiens
gccgctccttggtgggggctgttcatggcggttccggggtctccaacatttttcccggctgtggtcctaaatctgtccaaagcagaggcagtggagcttgaggttcttgctggtgtgaaatgactgagtacaaactggtggtggttggagcaggtggtgttgggaaaagcgcactgacaatccagctaatccagaaccactttgtagatgaatatgatcccaccatagaggattcttacagaaaacaagtggttatagatggtgaaacctgtttgttggacatactggatacagctggacaagaagagtacagtgccatgagagaccaat

SEQ ID NO: 44552 - DNA, 325 bp, Homo sapiens
ttttttttttggttcagtatatgaaaattcatttatttagtgaaaccctgacattaaagcgtcccaacacaaagcagattcgaacataacaactggtgattggctcatctcacaggctcacatcatcagtgtgttaacatacaataggactgtacccttttacaggattgagtgttttggatcccactcacacactaaaaccctgccataaagttgtatcaattagggctgttcaaatgtgaaactgtattggaaaatgggaaactttatctccttatatatgtatattttttgagatggcgttttgctcctttgcccaggctgg

SEQ ID NO: 44553 - DNA, 91 bp, Homo sapiens
cctgaaagctgacacggcaaggaggcaaggctttatcacccagctgccagccacaaatgagtttgtaaaagcaaagctttttttttttttt

SEQ ID NO: 44554 - DNA, 320 bp, Homo sapiens
tgactacattcaactcaggggtgtccagggtggcacactgtgtttttcaaaacttgattatgcagtcgcctggttcatccgcgaatccatgacaatatacatttttttgtctgcattatgggacccaactataagctggagaactggtcgctacagattacgctgtgggggtacagcagaggaaatcctagatgtataactacagctttgtgactgtatataaaggaaaaaagagaagtattataaattatgtttatataaatgcttttaaaaatctaccttctgtagttttatcacatgtatgttttggtatctgttct

SEQ ID NO: 44555 - DNA, 324 bp, Homo sapiens
taaaaagttcaaaatcaactttaagtaaagcagctgggaggagaggggggaagacaagggggagaagggaacgctggtggttccctccaacccaggagcccctggaggtccaaggggagcggcaaggcagggcaggcggccccaggaacctgcccagtgcacaggcccagctactcaggagctgaagggggagaggacagcagtgtgaggaagaagcccccatctccccagctggccccctgaggggcagagccagggctcttttgacccagcctgtgacagacacagggctgacctggggtcagcaaggaggctggcaagagg

SEQ ID NO: 44556 - DNA, 352 bp, Homo sapiens
  misc_feature (1)...(352): n = a,t,c or g
gnnnnnnnnnnnnnnnnnnnnnnnnnnnnnnnnnnnnnnnnnnnnnnnnnnnnnnnnnnnnnnnnnnnnnnnnnnnnnnnnnnnnnnnnnnnnnnnnnnnnnnnnnnnnnnnnnnnnnnnnnnnnnnnncccataatagaccaataatgacttctgaaatttaggcagtaataaatagactaccaaacaaaaaagcccaggacagacannnnnnnnnnnnnnnnnnnnnnnnnnnnnnnnnnnnnnnnnnnnnnnnnnnnnnnnnnnnnnnnnncaaaaatttgaaaaggaggggctcctccctaactcatcatgaggccagcatcattctggcctcaagatatcaaaacct

SEQ ID NO: 44557 - DNA, 358 bp, Homo sapiens
ctaatgtagattatctgatttacactataatggttggacttttagtttgcaaaacactgaaagagggaagtctttggcacttttatggtagctaaaatatgcagttctatgcagagtagtcatggagtgctgaaggaacttagtagataaaatttctgagaaacggtagggagtaaataccaaaaagaaagtagagttcattgcgattgtcagaaagtaaaaaagtgggtttagaaaattaggaagttagttttgctgttgactcagcaaattttcagatttttcagatatatggtttgtgaagatttaaaaggcaataaggaaaatctcttattagaataagtcatgtatacccttg

SEQ ID NO: 44558 - DNA, 346 bp, Homo sapiens
tttacatttcctttttatttattccttgaaactgctcgtattgcaagtttttcacggatgaaatatggaactgagcagattctttttttctacaaaattatggtataaacttgctcaattttctatcttattgctaataaaccttacaggcgcacagtttgtaaaataaaccccttaaggactgaatgcgtagagcatgctgcaaggtacaagaaataagctaaaaatgagcatataaacctacatctggaccaacacagtactgaatgctggcaaacatttatcacaacacaggggaaaattaacaaaaggagatacagttcagtcctgaaagggttaaacagag

SEQ ID NO: 44559 - DNA, 356 bp, Homo sapiens
  misc_feature (1)...(356): n = a,t,c or g
cagccatcaatgctaatgtgctactttcctttagaccttattttcttttctgccaagcaatacaataattttctggccattatgccaagataatgcgataatgtccatttcaaatagtattttctaatggtattttgcacctttaaaatatttgttcaaactctattttaagagaacacaaatgaagtacgaaagggggaagccgcattgtttttgttacaatcacactgccttctgcagcagaaatcaaataacacattctaattagccattgaaaccaccggtgagtaaggacaacatttatcgactcatgttanagggggccaggttaagtngattaacattaaggataaaaa

SEQ ID NO: 44560 - DNA, 263 bp, Homo sapiens
  misc_feature (1)...(263): n = a,t,c or g
nnnnnnnnnnnnnnnnnnnnnnnnnnnnnnnnnnnnnnnnnnnnnnnnnnnnnnnnnnnnnnnnnnnnnnnnnnnnnnnnnnnnnnnnnnnnnnnnnnnnnnnnnnnnnnnnnnnnnnnnnnnnnnnnnnnnnnnnnnnnnnnnnnnnnnnnnnnnnnnnctgaaangaaaaaancanantaaaanatcanngaancaaaaaatngtttttttaaaagttaancaaanttgacaaacntttanccanacaaaaaaaaaaaaaa

SEQ ID NO: 44561 - DNA, 338 bp, Homo sapiens
ctgggagatgatcagaaaaattggagacacatcagtcagttataaatatacctcaagatatgtgctgaaggcaggccagactgttacaatttgggctgcaaacgctggtgtcacagccagccccccaactgacctcatctggaagaaccagaactcgtggggcactggcgaagatgtgaaggttatattgaaaaattctcagggagaggaggttgctcaaagaagtacagtctttaaaacaaccatacctgaagaagaggaggaggaggaagaagcagctggagtggttgttgaggaagaacttttccaccatcagggaaccccaagagcatccaata

SEQ ID NO: 44562 - DNA, 337 bp, Homo sapiens
ggttcctgtattttttaattccttcccccatttatctttgatagtttcttgttttctggaatagtaagacgtcccaggctcatgtatacttcctgcgtcatgcctggaatcagccatgtttctaaggaaccgtgatccttttaatagataatactatttggaagcaacaatttggatgctgacatgttcattcctactggttgtcattgtttctgggtcttttcagtaggtagtgctaggtaaatcatgaattaatggtgatatttcaaatttataaatacaggctaattttgggttatgttatacttgtatcatttttatcttatgctgaatatct

SEQ ID NO: 44563 - DNA, 342 bp, Homo sapiens
taagaatgcaggtgttgaaggatctttgatagttgagaaaattatgcaaagttcctcagaagttggttatgatgctatggctggagattttgtgaatatggtggaaaaaggaatcattgacccaacaaaggttgtgagaactgctttattggatgctgctggtgtggcctctctgttaactacagcagaagttgtagtcacagaaattcctaaagaagagaaggaccctggaatgggtgcaatgggtggaatgggaggtggtatgggaggtggcatgttctaactcctagactagtgctttacctttattaatgaactgtgacaggaagcccaaggcagtgt

SEQ ID NO: 44564 - DNA, 340 bp, Homo sapiens
  misc_feature (1)...(340): n = a,t,c or g
attttcaatagccacataaaatcattcacatcagagttaacatcaagctttaaaccaaggcctgaaaagaaaagtgccacagtttctaaaccattcagctgggcaacaagaattttaatttttaaaaaaattaaacgttnnnnnnnnnnnnnnnnnnnnnnnnnnnnnnnnnnnnnnnnnnnnnnnnnnnnnnnnnnnnnnnnnnnnnnnnnnnnnnnnnnnnnnnnnnnnnnnnnnnnnnnnnnnnnnnnncatctctacaaaaatatataaaaatcagctgggcatgctgacacacatctgtgataccaggtacatgggacgctgagacaggaggatt

SEQ ID NO: 44565 - DNA, 343 bp, Homo sapiens
cggtagttccaggcgacggcggacggtggtacggtcctggagggcccagtgcgcggggctagccgtggctggagagcttcgaagagccttgaaatgtgaggaggaggaagatagctgttgcagaagtagtggccaaggtatcgttctggacgcgcctgcggcaggagggtcgccgcgtccacttccgccagccccacctccccccggccttcctggagtccctgaaagaggaagaagcaaaagatggccaaggaaagatgcctgaaaaagtcctttcaagatagtcttgaagacataaagaagcgaatgaaagagaaaaggaataaaaacttggcagagattg

SEQ ID NO: 44566 - DNA, 337 bp, Homo sapiens
gagactggaccacagcactgactttttttctgaggcttttgaacataatgggcgtccctattctcttttggtgtacattccaagcagagtggccctcatccttcagaatgtggatctgccgaattgaagaggcctgatttcagctccaccagatgcagatttgtgttttgttttcttgttatcactgtcacacagcttataacatgtatgcttttcagaatacagttgtctagccaagccatcaagtgtctgaaattcaatattggtttatgcaaatacagcaaacttttatttaagtagatgggagaatatgttttaaaatattaggaatcctaga

SEQ ID NO: 44567 - DNA, 338 bp, Homo sapiens
ggcgaacccggcagtaccagaggtggaaaatcagcctcctgcaggcagcaatccaggcccagagtctgagggcagtggtgtgcccccacgtcctgaggaagcagatgagacctgggactcaaaggaagacaaaattcacaatgctgagaacatccagcccggggaacagaagtatgaatataagtcagatcagtggaagcctctaaacctagaggagaaaaaacgttacgaccgtgagttcctgcttggttttcagttcatctttgccagtatgcagaagccagagggattgccacatatcagtgacgtggtgctggacaaggccaataaaacaccac

SEQ ID NO: 44568 - DNA, 341 bp, Homo sapiens
attaaccttttatttttaacttagttttacaatatacagaaaagaagttatcattaaaaaaataccatagctgtcaaggttaaatgaggttcttattaaacaaagcaggaacactatatcctataattacatctttacttttatatacaagaactgtgtgcaaagtgcttttcaaactataaagtacgactttggaacaggatagaaatggttatccctaggagttagttatcccagactgcttgtaatgattcacaactgcttacactcttaatttgcattttatttatttatatactaagagaaaagacactttttactgataccaaattgatatctca

SEQ ID NO: 44569 - DNA, 374 bp, Homo sapiens
  misc_feature (1)...(374): n = a,t,c or g
caacatcccaactgtggtcttcagccacccccctattgggacagtgggactcacggaagatgaagccattcataaatatggaatagaaaatgtgaagacctattcaacgagctttaccccgatgtatcacgcagttaccaaaaggaaaacaaaatgtgtgatgaaaatggtctgtgctaacaaggaagaaaaggtggttgggatccatatgcagggacttgggtgtgatnnnnnnnnnnnnnnnnnnnnnnnnnnnnnnnnnnnnnnnnnnnnnnnnnnnnnnnnnnnnnnnnnnnnnnnnnnnnnnnntacctcttcagaagagctggtcacacttcgttgagaaccaggagacacgtgtggcggcagtggga

SEQ ID NO: 44570 - DNA, 373 bp, Homo sapiens
atttcactgacactgcgaactctcaggactaccgttaccaagaggttaggtgaagtggtttaaaccaaacggaactcttcatcttaaactacacgttgaaaatcaacccaataattctgtattaactgaattctgaacttttcaggaggtactgtgaggaagagcaggcaccagcagcagaatggggaatggagaggtgggcaggggttccagcttccctttgattttttgctgcagactcatcctttttaaatgagacttgttttcccctctctttgagtcaagtcaaatatgtagattgcctttggcaattcttcttctcaagcactgacactcattaccgtctgtgattgcatttcttccaaggccagtc

SEQ ID NO: 44571 - DNA, 370 bp, Homo sapiens
  misc_feature (1)...(370): n = a,t,c or g
atctaaagtagaaaaattcatagaaacacaaagtagaatggtatttactagggtgtggagggaaggggaaaaatggggagttgtttaatgactatagagattccattttgcgtgatgcagaagttctggggacctggtccacaacattgtgaatatatttaatgatactaaaatatatgcttaaaaatgaccaagttggtaaattttgttgtgtgttttaatataannnnnnnnnnnnnnnnnnnnnnnnnnnnnnnnnnnnnnnnnnnnnnnnnnnnnnnnnnnnnnnnnnnnnnnnnnnntnacctttngggctcaagcgatccttttacttaagcctccaagncctgggactacaggcntgcacccc

SEQ ID NO: 44572 - DNA, 322 bp, Homo sapiens
gttttcttgactgatgtgttatttatctctgtgccatggactgactatgttataggtgagacagttgtagtaacatctttctaagtagacacaaccttaaacaagatgaatatgtctttataatgtgctagagcagcttgtgtgtaggacttaagtatgtatcactaaaacctgaaacttaaatttttctgaaacagaagcagtgaagattctccctggtaacaacttaagtaaatcaagccaacaaatacgagtccaaataaacatttaatgagaaaatactgcctactttttaattttattggtaatatccttttgtatt

SEQ ID NO: 44573 - DNA, 186 bp, Homo sapiens
tttttttttgtccatcaactgacaaatggataatcgtgtggtatattcatacagtgggctatcagcttatcataaacatcgaggactgacatgctacaatgtggatgagcctgacaaacatcagccaagtcaaagaaaccagacacaggatgtcatgtatggtaggatttcatttttttttttttt

SEQ ID NO: 44574 - DNA, 323 bp, Homo sapiens
ctccaacactggagatcaaatttcaacatgggattgggaggctggaacaaacatccgaactctatcaacatatttaaagtgtaaaaataaactggcagtcaagaatcttatatacgaccaaaaataagatatccctagataaacaaaaaatgagagagttcattgctagcagacctaccacacaagaaatactaaaggatgttctttaggctgaaagcaagtgaccccaaatagtaaatggattccagaaggaaaaagaagggaaaggtaccaaataggaaattagttaattacaaggcattcgctcaatgactcacctagag

SEQ ID NO: 44575 - DNA, 329 bp, Homo sapiens
cactagcaacctcaaacagacaccatggtgcacctgactcctgaggagaagtctgccgttactgccctgtggggcaaggtgaacgtggatgaagttggtggtgaggccctgggcaggctgctggtggtctacccttggacccagaggttctttgagtcctttggggatctgtccactcctgatgctgttatgggcaaccctaaggtgaaggctcatggcaagaaagtgctcggtgcctttagtgatggcctggctcacctggacaacctcaagggcacctttgccacactgagtgagctgcactgtgacaagctgcacgtggatcctga

SEQ ID NO: 44576 - DNA, 326 bp, Homo sapiens
  misc_feature (1)...(326): n = a,t,c or g
gtctaaatctattctgtaaagatgaatgttcttattttctaaatctattctataaagatgaactattttttaatctataaacctcctttaagggacgcaaagcattcatatcacacagtacacatataattatagctatccttcaattatgtttttgtatgaatatagtgattttttaaaatgtaaaagtatcaggcttaaaccagatatatgttgggaaaaaaatggatgatccatatttattgaatgctttgatagtctcattttattaatagtcaataaatgantaaaaatgataccttgatccaggagccattatatactgg

SEQ ID NO: 44577 - DNA, 323 bp, Homo sapiens
cttgtataacattttatttagcattcttacacactacacaaaataaatacttggataactcacgtctaacaaactaaactatatatgtattttttccataggaaagcacaaggagaagacagaaatatcaagagtctcaagaacctttgaatgaagtaaacagtttcccacaaaaaatcagctatacacaattcccaaactcattttatgagcctcatcaagattttaccagtccagatatattcaagaagtcaagatctccatcttggtataaatacacttccacagtcagcacggggatcacagacttagaaggtcaactg

SEQ ID NO: 44578 - DNA, 324 bp, Homo sapiens
gcattccacaacaaactacatcaccagaaaatgccggtcctcagaatacgaaaagtgaacatgtgaagaagactttgtttttgagtattcctgaaagcaggagcagcatagaagatgctcagtgtcctggattaccagatttaattgaagaaaatcatgttgtaaataagacagacttgaaggtggattgtttatccagtgagagaatgagtttgcctcttcttgctggtggagtagcagatgatattaatactaacaaaaaagaaggaatttcagatgttgtggaaggaatggaactgaattcttcaattccatcacaggatg

SEQ ID NO: 44579 - DNA, 318 bp, Homo sapiens
ctcttctcccaaaattgtctaattttgatgagttcttcctcacctccctatttaatgggatgtctctcccctcttagtctctggcctcctttcctgctttattgttcttccatagcatttatcacaatctgacatgctatatattttaatcctttttttgaggtctatgttctctccattagaacagaagttgcataaaaataggagtttttatttgttttgccttctgctatgtccccaacacctaaaccagcactgtttgaccaaatctatcatttaaaaacttccagtagccacatcaaaaaggaaaaaagaaac

SEQ ID NO: 44580 - DNA, 320 bp, Homo sapiens
agcaacctcaaacagacaccatggtgcacctgactcctgaggagaagtctgccgttactgccctgtggggcaaggtgaacgtggatgaagttggtggtgaggccctgggcaggctgctggtggtctacccttggacccagaggttctttgagtcctttggggatctgtccactcctgatgctgttatgggcaaccctaaggtgaaggctcatggcaagaaagtgctcggtgcctttagtgatggcctggctcacctggacaacctcaagggcacctttgccacactgagtgagctgcactgtgacaagctgcacgtggat

SEQ ID NO: 44581 - DNA, 432 bp, Homo sapiens
  misc_feature (1)...(432): n = a,t,c or g
atttgaagcnttgaagccnnnnnnnnnnnnnnnnnnnnnnnnnnnnnnnnnnnnnnnnnnnnnnnnnnnnnnnnnnnntctcgaggatccgaattcgcggccgcgtcctgaagggtnnnnnnnnnnnnnnnnnnnnnnnnnnnnnnnnnnnnnnnnnnnnnnnnnnnnnnnnnnnnnnnnnnnnnnnnggccagtggtagtatgagcctttagtccgaggggctgtggttagaggatcactgagcccnnnnnnnnnnnnnnnnnnnnnnnnnnnnnnnnnnnnnnnnnnnnnnnnnnnnnnnnnnnnnnnnnnnnnnnnnnnnnnnnnnngatgtgggaagagtggagaggcagtgcagtggggagcccttgccagccacggcctgaaggacaaggagaggggggtgttctagaaacttgtcttanaacctg

SEQ ID NO: 44582 - DNA, 328 bp, Homo sapiens
ctctacaaaaaaaaatgacacttgtctttcaatctgtcaagcttagctaaaaaattcacgtatctcttttctatatcacatattgacatgatataggatgcaagatataaatatcaatttaatagacattattaaataattttacacttagtagaatcttggataaatggttaaaattatagattgacattaagtgtgggcacaggaatattctgtgtataccaatgggtttaacagaagatgtgtttgcactgatttctggtcatcaacttgctttccgtgaatctttaaatacccaattccaaatcttccagctcctggagaaggg

SEQ ID NO: 44583 - DNA, 378 bp, Homo sapiens
catccctgcaggaataaagagtgggtggcctgcccagcccagcaccacagcctttccccagccaggagagaccacctaaggatcaaggcagctcctgttttcttggttctgtgacactcgagtctgagccagcccctcaggaattgcctcaaaagagaaaaacaaaaaaaagtcctccttcccaaggcctgctactccaaggtttggctccatcccttgcctttgggtcctgcctatttccccactcctggtctcttatctttggggccaccagtggggagtcacccgggccccaatccctctaaggcgctaagttgaaggaggccttcccagagtgactattggtgccaaagtcccagttcctgttggacttggggt

SEQ ID NO: 44584 - DNA, 349 bp, Homo sapiens
ggcccctcctcttaaacagtaacttttgaagtactgatacatgattaaaatgttagatatttttcactggagctaagacttaaaattagggcattttgaaaggtgtatttgtttctgtttcttggttgatatattttggttatctactcttttaaaaaactaaacgtataaaaggtatcttcaaattactgagtgtttcatccatcccagtaggtgaagtattctccagtgaataaatctatatatatatatagattttaaatagcttgagcggtgtagcttgaaatgttttcagggaaagactatttgaatcataaggaatagctttgattttcttttttatgtctca

SEQ ID NO: 44585 - DNA, 343 bp, Homo sapiens
cagagatgggctgaactgagcctagctaccttctctacccatctcccccatcccccactgccacaccctgcccattcacacacttcatggaccaagaatgagctggtttgtcaaacaacatgtgagcatggtcacaagcacaaagctcacgatgacagctcttctaacgaaatggataagctgtgtttataaaaacaaaaacaaaatcagctgctactcataagttggaccagaggaagccccttactatgatctcaggagcttgcatagaagcaggaaggggaatggaataggttaagtttaggcctatcaacctaagcaacagaaataatctgacactacc

SEQ ID NO: 44586 - DNA, 387 bp, Homo sapiens
  misc_feature (1)...(387): n = a,t,c or g
gtctgacaagaagtatgatgaagccattaagtgttacagaaatgcactaaaatgggataaagacaatcttcaaatcttaagggacctttccttactacagattcaaatgcgagatcttgagggttacagggaaacgaggtatcagttacttcagcttcgacctgcgcagagagcatcatggattggttatgctattgcttaccatttattagaagattatgaaatggcagcaaagattttagaagaatttaggaaaacacaacagacatcccctgacaaggtggattatgaatatagtgaactactcttatatcagaatcaagttcttcgggaagcaggtctctatanagaanctntggaacatctttgacctatgaanagcagatc

SEQ ID NO: 44587 - DNA, 372 bp, Homo sapiens
  misc_feature (1)...(372): n = a,t,c or g
cttcacctcttttctcagctccctgcagcatgggtgctgggccctccttgctgctcgccgccctcctgctgcttctctccggcgacggcgccgtgcgctgcgacacacctgccaactgcacctatcttgacctgctgggcacctgggtcttccaggtgggctccagcggttcccagcgcgatgtcaactgctcggttatgggaccacaannagtagaggtgnaccttcanaagctggatacagcatatgatgaccttggnaatnctgccattnnacnatcattnacaaccaaggcntngagattgngnaaatgaaacaanagnannncnttnntaaanaanannanaaaaagnnnntaanaaanaccnactg

SEQ ID NO: 44588 - DNA, 398 bp, Homo sapiens
caagatgctggaattacttcagactcaatgatgaagaacttcttctttgtgccttcttgcattcagctgagccaagaagacagcttttccgctgaagcttaaacaggcattaacgcttctttagatctgaagttgcaggttaagcttgtctggtcaacattccagtgtggaaaaataatttaaacaatcttattctcttaattcttttggcaacaaaaactattagtaatagctatttgggaccagacaaaatcagctttcatctataattcattggggataatgggagatttagataatgtatccagatttaaacctaccagtttgtcctaccccttaagcgtttaaaataaaatatgcaacaaaatggatgacttagtggagatggaagcccatta

SEQ ID NO: 44589 - DNA, 384 bp, Homo sapiens
ctttagtaataaaagggctaggttcgggtaaccatcagacttcattctcggaatttcaacaagtttgctattcccccagctgtcggtggaatcgtcctatgccattctccaggctattgtatggaatgtgccatttatggaggggtgtggtttagtccaatctgttgaggccttaaaaaggagagctgttgcaaataaatatttttaatgtaaggaattggcttctttgcatagtgtgttttctaaataaatagataaaggcttagtttttaaatgttttaacagtcgttgcttccccttcattccaagttgtgtgggaaacggaagtacctttaattagagttctaaagagaggtttgggaccctggcaagggttttgttccg

SEQ ID NO: 44590 - DNA, 386 bp, Homo sapiens
ctcattttctttataatattattgtgtaaaatgagtaaaagtctataagaaaaactttgaaaagtattaagtaatacacatgtgtatgtgtgcgtgtgtatacatatatatatataatatatatacacatatgcaatggagtaatgaaaatactatataataaatataaaatggattaaaactatataaaatagatgcatgaaatggctacatagatatggatgtttgcatataggcacatttagctggattaagttagatttaaatggtccaatagagaactgtgcatacaattacataggcaaccacaaatcaaccctttctctgggctatctaaaataatcaggtactagaccaaaaaatgacatgctgtctgccttaccttt

SEQ ID NO: 44591 - DNA, 384 bp, Homo sapiens
cggacgcgtgggggaatttttaaaaatcaaaacaaaaaataccacagcttagtgtaaatgacaatttggcggttttatgtctttagaaatgttttgcctttctaagccttgtgctaaaggcgtataacggtggtgcctatctacttaagggggcattctagtcttaacttaaaagttgtctaaactgtccctccctggctttttttggtttggggtagacctaagggtgtttgttagtctcaaaactgtgaagtgacatgtcagaacagtccagactggtaagaaaattaatggcttcacttgaatttaaaccagctctagataggaaaaaaatcagtctcctcatttgctttttaaatggagtagtacatcccatattttaga

SEQ ID NO: 44592 - DNA, 393 bp, Homo sapiens
ccacactcaccttcacatgcttctttcaacaccccaagaatgatcccaccccagggatattgctgtagctgttctctctgcctgcactgctctttcccccagtacccacatggcttcctttctcctcactcactcgtcttgcttaaatgtcacttcctcaacaaggccctctgtaacctaactttcaaattacagcccctggcatgcttgattcccctccttctactttttttctactaacacttatcaccccctaatatttactatgtaatttctttctcatgttgtctcctccaattagaatgtaagttttacaaagggggagatttggtttattcccttatacccaggtgactagagtagtacaagcatatagtagacactctgtgtttt

SEQ ID NO: 44593 - DNA, 392 bp, Homo sapiens
gatttgtgaggttttactgtaagtatgtaaacaattcagagctagaacggtccagagtgagaggcacagaccccagagtgagtggttgtgggagatgagggtgggatgatagattgctgaggaaagggagtttctgtaatttgttctctttccctgtggatgtttaacttgctggtttattcatggttatacaggtgaacgtttacctatctagaagatgagagttataaaagacctctgtgattgccatgttcctccccctcccccgccaaactgaggaatttgaggggttgggaggtttggccatttttccaaggttgcacagctagcaagatgtggagctggggtgggaactcggggggatagattgtagatcttgtttccagatgtat

SEQ ID NO: 44594 - DNA, 394 bp, Homo sapiens
ggttatgtcttaacacgcttgtctcttaccaactagatcagtgcagatgggcgtcttggtggcagcgggtgagtgtgcatatccaaagcccacacgaatggctgacagtggctggagcactcctgggtaccactccagagttctgagctgtgtttgggaatgtgtctcaccccacaccagaaagggatcacattaggacggggatgtgttgctgcctactccactacatccttttaaggctcggtgatgctgtcacattccttcagaaatcttcacttcgtgtcttagagcaatgggcaggccttatcttagttgcaagatcaatatgatggcctagaagcatttggagagggcatactcattccgttgctctgtgagaatcatttttcatttc

SEQ ID NO: 44595 - DNA, 382 bp, Homo sapiens
ccacacaatgagatcccaagtgtctcagaaacaatgataaataattttgattgatatgtagaggttactaacagaatgagttaagacgaatagtctctctaagtaaatctttacaatgtgctaataagaaagtattctaaacctattaacctctttgattgcttgctttttccatctgaacctactcaatgctaacctccttaaaaaattagatcctcaaatgagccaggagtatctacaacacctaaatttaactcttgttattgcacacatgaactattataaaagcaaccactaaggctaaaaataataaaaactaactggaaataggccagataaactagatgtctccttagtcactcatttaaaatttaatccagtc

SEQ ID NO: 44596 - DNA, 147 bp, Homo sapiens
tattaaagggtctttacgtagacttgtggatcttttattttacctactgctttcttccatgcccataatcttaattcctaatgataccaacataattactcattttgttttatttcacagtatgtctaccgtctttttttttttttt

SEQ ID NO: 44597 - DNA, 227 bp, Homo sapiens
  misc_feature (1)...(227): n = a,t,c or g
catatcagtccttattcctgcctctgcctgcccatcatccttaagttgacctttacaatgtctgatgggggctcaggcgaaggctcaggcagaaccagaatcattcttgtggaggatctgagacccctcatgttgtctgcactgctgccgaacaggctggaagatgcatgtctgtgtgtcggcatgatttagtgagcaaatctgatgggaacgcagccgnnncttta

SEQ ID NO: 44598 - DNA, 402 bp, Homo sapiens
agaagacagtacctcctaaatggctctactttgaacctgctgggcaaggaagagattttcaaggaaaccatctaccgtgtgcaagctcctgccggccaaccccagaccccagcacggagccaggcgcctgtgcccgccaaccctcagcatcctcctcagaaaggctggtggcatcaggaagcccctggccagcctccacctgagcccagtgagctcagctttaaggatggagtcaggcagggggtcctcaacccctccaggacccattgctgccctagggatgccagacactgggcctggcagttcctccctagggaagcttcaggcgctccctgttgggcccagagcccactgtggggaccctgtcagcctggctgcagcaggggacggctctccagacat

SEQ ID NO: 44599 - DNA, 371 bp, Homo sapiens
  misc_feature (1)...(371): n = a,t,c or g
nnnnnnnnnnnnnnnnnnnnnnnnnnnnnnnnnnnnnnnnnnnnnnnnnnnnnnnnnnnnnnnnnnnnnnnnnnnnnnnnnnnnnnnnnnnnnnnnnnnnnnnnnnnnnnnnnnnnnnnnnnnnnnnnnnnnnnnnnnnnnnnnnnnnnnnnnnnnnnnnnnnnnnnnnnnnnnnaagaaaagaaaaaaaaaagtccatacatgagtgtagggaatactttgtgaatttttagactttttattaaccaccagagaatatttactacacctgggtgttttttaaagaatactgttcttattctgaaataagtagaccgttttgcatatgatcagccagtgtcccttacacaatttatttcatgtaattttcg

SEQ ID NO: 44600 - DNA, 370 bp, Homo sapiens
cccacgcgtccgcaatgtgagacccatttcatttcccttctcaacgccattgacgcactcttcagttgtgtcagctcagcccagcccccgcgaatcttcgtggcacacagcaagtttgtcatcctcagtgcacacaaactggtgttcattggagacacgctgacacggcaggtgactgcccaggacattcgcaacaaagtcatgaactccagcaaccagctctgcgagcagctcaagaccatagtcatggcaaccaagatggccgccctccattaccccagcaccacggccctgcaggaaatggtgcaccaagtgacagacctttctagaaatgcccagctgttcaagcgctctttgctggagatggcaa

SEQ ID NO: 44601 - DNA, 377 bp, Homo sapiens
caacaaattgccctttagtctccccgtatgagttagaataataaatatttagtaggtgagttttcacctcgaattttgttttcttgatttttacgtttgaagacattgcaccagatgccattacatttattggccccccgaccttgtagaaaaacccctaccctcacaataccttatttaagtaactttaaattatgccgttacttttcatatttgcactaagatatttccaggctgcatttgtatatttagattttttggttaagctttgacactggaatgagttgaaaaaatgtgccattttgcattttcatctactcatttaaagtattttattcttattcaaagaaatatctgagctctttgcactacctgtg

SEQ ID NO: 44602 - DNA, 385 bp, Homo sapiens
  misc_feature (1)...(385): n = a,t,c or g
aaacagcttctctgtttgtattactaaggtttatttggtgcttctccaccatcctgaaacgatgcgattgtttataagcacatgttttggggaacgcgtaggctgtccacctctgcctctcccttgtcggccttaggccgactgttttcttgggattttgaataagtttcgcctaaggatttactcattttctccaccatacgctatcgcacaatggcatactcatacaggccctacattttgacatgcagaccaaattgggtctggtgaaatgctccgagtttcttgttggtacattggttttgctccgcgggctctggttaagttcttagtctgatcgggcctgcacttgactggagctggtcctatctccggcctancatct

SEQ ID NO: 44603 - DNA, 385 bp, Homo sapiens
  misc_feature (1)...(385): n = a,t,c or g
aagaagccttttccttttaccgataggaaaggtcaaaggacttacctggtgaattatttacctaaaaatgtatacaaatcactccaaaatttagtggctaaaaacaacagtactaatttaattatatcttcacagttactaatttaattatatcctcacnnnnnnnnnnnnnnnnnnnnnnnnnnnnnnnnnnnnnnnnnnnnnnnnnnnnnnagtgaagttgtggtcagttgtcagctgggtcatctgaatgcttgattgggattggaggctccacttctatggtggtcactcacatgactgagaagttggtgctagctgttggcaggaagcctgttcttcatgggggccctctctgagggactgcttgagtactttcatgatg

SEQ ID NO: 44604 - DNA, 386 bp, Homo sapiens
  misc_feature (1)...(386): n = a,t,c or g
gactagttctagatcgcgagcggccccctcatctttttttttttttaaannggngtttttttngccnggtngnagngcagggnnncaatntgggttaatngaancntcngcntccaaggnaancnnattttctngcntaattttcnnnnntancnggnnttacggcncccncctacanngccnatttantttnngatttttnacntaaanagggattggnccnnttggnggctggcttttatttttgcctacttagntggcagaagaangtggatgtgatcacntnagnannangntgatgaacagtntgctngggagtcntttgntggaggtncttnnactgggcnngnttaacatggngagcccattggnaggggaccaaattc

SEQ ID NO: 44605 - DNA, 232 bp, Homo sapiens
  misc_feature (1)...(232): n = a,t,c or g
attgaccccactttgtgccgggctgacagaatggtggggcaagtacttggtgcagtcggagctttacctgagatattcacagaattggaaatttcctatttcctgcttagacggcttctaggtgtacgcactgaaggagacaagaaagcagcaaaggttcaaaagctgtctaagaatgaagtgctcatggtgaacataggatccctgtcaacaggagggagagttantgctg

SEQ ID NO: 44606 - DNA, 317 bp, Homo sapiens
gactgcctcaacaaagaaggctttgacaaaatagatatcagtgcagttgtggcatataccatcgctgtaaaggaggatggggagctcaacctaatgaagaaagcagccagcatcacttctgaagtcttcaacaaattcttcaaggaaagagtcatggaaatagttgatgcagatgagaaagttcgacacagcaaactggctgagtctgtggaaaaggccattgaagagaaaaaataccttgctggggcagacccttctactgtggaaatgtgttaccctcctatcattcagagtggtggcaactataatctcaagtt

SEQ ID NO: 44607 - DNA, 309 bp, Homo sapiens
cataaaggaagcagtcaggtcaaagaatatggccagaagagggcattctgcacagattgctaaacctattcgtcccgggcaacatccagcagcttctccaactcacccaagtgcaattcgtggaggaggtgcatttgttcagaacagccagccagtggcagtgcgaggtggaggaggcaaacaagtgtaatcgtttatacatacccacaggtgttaaaaagtaatcgaagtacgaagaggacatggtatcaagcagtcattcaatgactataacctctactcccttgggattgtagaattataactttt

SEQ ID NO: 44608 - DNA, 315 bp, Homo sapiens
aaacaacgtaagcacccaccttagaacctagaatcagaaattgtcacacaaagctctgctgcctggatttattaaattgaaatcactgtgattataaatttgcatagctattgttataacatttctgtatgaattataattgacatatgaaaatgctattcacctcagtaatttgcatagacaaaagatgaacatttccttaggattactgtcctaagcaaataattaaatcattgttagtaaaatgccaccagttcatttctgcctccttatgttttcaggctaattctggtggcattttagattgacaatatt

SEQ ID NO: 44609 - DNA, 312 bp, Homo sapiens
ttttcaaataataggttaaaatactccatgttgatggctgccaaccaaactctgatttattgccaccacaaaccctaaatagcgttcatttactagtaatgtctaatggcatacatgatggtttgccagatttgtagcctttgtgaggcttataagtaggactgacttgggaagatcataaaacttaatgaacttctctactgcaggaggtgtccgcaggggaagagaaaggcctgcttggctggttgggctggttgaagtattttttatgtttaaggagaagaaaatgactagtaaaaatgccttactttt

SEQ ID NO: 44610 - DNA, 344 bp, Homo sapiens
gctatttacatgcattttaagctagttaagatgatggaaattaatgtatattgaccaaatactatgctagctgctttagaagatataatttatttcttatgattaaattattagtccaattttatataggagaaaatagactcaaagattagttttgcctaaggtcacacagctaataatttatctgaaccagtatgactcgtttcaaatcaccatgtaaaaagtgtttgggttcttcttaagtgcttatcataggttatcattccacaggagtactatgaagtgggattcttttcaattgtgtgagaataatttcatttttattctataataatgattttgaa

SEQ ID NO: 44611 - DNA, 341 bp, Homo sapiens
  misc_feature (1)...(341): n = a,t,c or g
gaagaattggcaggagagtgggctaaagaggtaaaatgaggctacactgtgaagaaccaaggaaaatactggggtctgtttgttttagnnnnnnnnnnnnnnnnnnnnnnnnnnnnnnnnnnnnnnnnnnnnnnnnnnnnnnnnnnnnnnnnnnnnnnnnnnnnnnnnnnnnnnnnnnnnnnnnnnnnnnnnnnnnnnnnnnnnnnnnnnnnnnnnnnnnnnnnnnnnnnnnnnnnnnnnnnnnnnnnnnnnnnnnnnnnnnnnnnnnnnnnnnnnnnnnnnnnnnnnnnnnnnnnnnnnnnnnnnnnnnnnnnnnnnnnnnnnnnnnnnnnnnnnnnnnn

SEQ ID NO: 44612 - DNA, 327 bp, Homo sapiens
taaacatgtgaggcctggagatagttgctaagttgctaggaacatgtggtgggactttcatattctgaaaaatgttctatattctcatttttctaaaagaaagaaaaaaggaaacccgatttatttctcctgaatctttttaagtttgtgtcgttccttaagcagaactaagctcagtatgtgaccttacccgctaggtggttaatttatccatgctggcagaggcactcaggtacttggtaagcaaatttctaaaactccaagttgctgcagcttggcattcttcttattctagaggtctctctggaaaagatggagaaaatgaac

SEQ ID NO: 44613 - DNA, 333 bp, Homo sapiens
  misc_feature (1)...(333): n = a,t,c or g
atgagtatctgggatgtgaagagcttggagtcagccttgaaggacctcaagatcaaatgacctgtgaggaatatgttgccttcatcctagctgctggggaagcggggagaggggtcagggaggctaatggttgctttgctgaatgtttctggggtaccaatacgagttcccataggggctgctccctcaaaaagggaggggacagatggggagcttttcttacctattcaaggaatacgtgcctttttcttaaatgctttcatttattgaaaaaaaaaaanngccccnaangcnntntgctggcntnaacngtttnaaaangtcaacccgccg

SEQ ID NO: 44614 - DNA, 328 bp, Homo sapiens
  misc_feature (1)...(328): n = a,t,c or g
gttttttttctctgggtgcaaagatgttcattcttttaaaaaatgtttaaaaaaaaaaaactgnnttttttcncntcaagtnanttttngggctcnanaaanttttntattntgnaaggttgancgnaaagcttnaagtnttaaaatanttngnncctntananagaaaanngactttttnaaaaatntacnggggcagttgccaaatngatgtttnanatattggggtttctgtttnttgaaanaatttttttngtnattttnacntgtaacanantataaaaattnaaaagngggnannaancgattcnggngggatgnttttaac

SEQ ID NO: 44615 - DNA, 331 bp, Homo sapiens
gccaaataggtattagttacaatgtcttgaacttcccacttagtccaaataaggcaactgctcaaacattaagaaatcaaataatttctttgcgctgcttctgcatttaccctatattagctttcccctcaaacaccgcaggctgagctccctaactgcttaaggtctgattgtaaatcactctcctcaataaaatctttaaattttaaacactagagaacaaagtggcaacagaaaaaaaaaggagaaaaataatttcacaaagttttctctctaaagattgagttttcttgtagatattttataaggaaagagataggccaaaagatga

SEQ ID NO: 44616 - DNA, 334 bp, Homo sapiens
ttgttgtacagtctggaggattttcactacgttttgacaactctgaaatgtgttaactcttagtgccatcaagaaccccatttgggagtatttttgatttttctactttttgttgaaaaaaggaatttgtactctgtgcattggatggacttgtttggtacttgggattttcctctcttaaccgtcaacatcagtgttgtaaatttgctaaactgattcacttttagcagcagactttgaactgcagtcctgccaacgttggacactgaggacgcccgacagagcttgtgcacctaagctgcagaccaagcctttgcccagaatttaaggattc

SEQ ID NO: 44617 - DNA, 302 bp, Homo sapiens
  misc_feature (1)...(302): n = a,t,c or g
nnnnnnnnnnnnnnnnnnnnnnnnnnnnnnnnnnnnnnnnnnnnnnnnnnnnnnnnnnnnnnnnnnnnnnnnnnnnnnnnnnnnnnnnnnnnnnnnnnnnnnnnnnnnnnnnnnnnnnnnnnnnnnattttatttttggcctttttattattattctagcattttagggcttccactcttttatttttagatggttaactcattgatgatacctatttgccatatagctgatcccaactgatgaaaaccattccaaaacatcaataattaattcacttaaagacgatggtccctctgtccct

SEQ ID NO: 44618 - DNA, 302 bp, Homo sapiens
agagaacccaccatggtgctgtctcctgccgacaagaccaacgtcaaggccgcctggggtaaggtcggcgcgcacgctggcgagtatggtgcggaggccctggagaggatgttcctgtccttccccaccaccaagacctacttcccgcacttcgacctgagccacggctctgcccaggttaagggccacggcaagaaggtggccgacgcgctgaccaacgccgtggcgcacgtggacgacatgcccaacgcgctgtccgccctgagcgacctgcacgcgcacaagcttcgggtggacccggt

SEQ ID NO: 44619 - DNA, 311 bp, Homo sapiens
agagaacccaccatggtgctgtctcctgccgacaagaccaacgtcaaggccgcctggggtaaggtcggcgcgcacgctggcgagtatggtgcggaggccctggagaggatgttcctgtccttccccaccaccaagacctacttcccgcacttcgacctgagccacggctctgcccaggttaagggccacggcaagaaggtggccgacgcgctgaccaacgccgtggcgcacgtggacgacatgcccaacgcgctgtccgccctgagcgacctgcacgcgcacaagcttcgggtggacccggtcaacttcat

SEQ ID NO: 44620 - DNA, 302 bp, Homo sapiens
  misc_feature (1)...(302): n = a,t,c or g
ctcgaggcctagtcgagcagggatggctcggctgggcggataatggtgggccggctgggcgcagcagggggtcttctgggcactcctgggggaatccctggggggatccgaactggccgagatgggatctgaggcggggctgggaagaggtcactgttggcaaacacgctctggggtccaggccgggatgggattgtgggcgccanataangaggnttttgncccnacnnnaanaanaatcnntggggggcccnatactnnnccaanntnttttnntnntntactaggnaanatctnntatt

SEQ ID NO: 44621 - DNA, 310 bp, Homo sapiens
cgatggcatacttgtcaattaccattattataaatcaggatatatatatatatgttttatttttatgtgatttgctttctggtatctatttttataaattcaagcatttgtgaaagtcgttaagtggccacaaatacccttaggtaaatttttattcttgcaaaggaaggggttgctaatctttggttacaactgactccacattttcctcagtttattattcaaagtattacaaagtaaatttacaagagaaaaaaataagtggtaggtaatattttatgtattgtggctctgacaagtaccatttaca

SEQ ID NO: 44622 - DNA, 302 bp, Homo sapiens
gtgttcactagcaacctcaaacagacaccatggtgcacctgactcctgaggagaagtctgccgttactgccctgtggggcaaggtgaacgtggatgaagttggtggtgaggccctgggcaggctgctggtggtctacccttggacccagaggttctttgagtcctttggggatctgtccactcctgatgctgttatgggcaaccctaaggtgaaggctcatggcaagaaagtgctcggtgcctttagtgatggcctggctcacctggacaacctcaagggcacctttgccacactgagtgag

SEQ ID NO: 44623 - DNA, 302 bp, Homo sapiens
  misc_feature (1)...(302): n = a,t,c or g
ggaagatagaagaaggttttgaagtgtgtgtgggtgaggggacaagataannnnnnnnnnnnnnnnnnnnnnnnnnnnnnnnnnnnnnnnnnnnnnnnnnnnnnnnnnnnnnnnnnncaatttttttagggtttcgnnnnnnnnnnnnnnnnnnnnnnnnnnnnnnnnnnnnnnnnnnnnnnnnnnnnnnnnnnnctcacatctttcttcctctgcagcacacgacacgccctagttggaaacaaagtcggagtttggggattgggggaagggcggngtctaacctnaggtnntgcgccgac

SEQ ID NO: 44624 - DNA, 342 bp, Homo sapiens
ttcgccattaacagaaaactggagaaagcaaaaatgtttcgtgtttacaaagataaacggcctctttacccagagatcaaaacctcaaacgacaagggggaagataaaaccgccctcccccacatcccctgagctgacccttgtcatcttagacaaagccttcagtccactggccagggaccctgtatatggccaattcaagaagagggccaagaaatcagacccatccattcccgtgatataaagttgaacagaagctacaccaagggtcaagtgtctgtattttacaggacacagtaaccaggcggctacttataaaaaaaaacaagattcatttcaggc

SEQ ID NO: 44625 - DNA, 354 bp, Homo sapiens
cttttggaaaagcgcaggcagctgtctcgtgatattggtagattgaaagaaacatatgaagctctattagccagatttcccaatcttcgatttgcatacaaggatccagagaagaactggaatagaaattgtgtgaaaggacttgtggcttctctgattagtgtgaaagacacttctgcaaccacagctttagaattagtggctggagaacgactctacaatgttgtagtagacacagaagttactggtaaaaagctactagaaaggggggaactgaacgtcgatacactataattccctcaataaaatttcagccagatgtattgcaccagaaactctgagagtgctcataat

SEQ ID NO: 44626 - DNA, 331 bp, Homo sapiens
  misc_feature (1)...(331): n = a,t,c or g
agatatgagtgacagtgtgccgtttgaataagttcagggctggagcaggagaaagtattaatttacaggaatctcctgctcattgagaagatcttaccatgaattttcattctgggatgtgtcagaaaatgtggtttctaatcagaatttcctgaaatactgtcaatttggagctggttcccccttcggaaggaggaatgccttccttcttgtgtaggatnnctttgaaagggnncctnnngnggtcattgnntattttangancgagagctcatcntcantgatcatgctggntnttcgncctntcctgagtatatgcccnatnggcccc

SEQ ID NO: 44627 - DNA, 330 bp, Homo sapiens
  misc_feature (1)...(330): n = a,t,c or g
tattaactaaattacagctgctttgaataaaaacttaactaacaatcacgtatgggtctcataggtgacaaccagttacttttcttgtttcttctccccaacagtgaatcatcaaggccatggtgcttaaacacaagtgtattcctttcacgtcttactactctccaaatcggagtccatcacttcacttcagttattcctaggaggttgtatatgtcttctgattggangctgntataaatancanataanantatanatttaatanatgnattaaactanggnatttggttntgttaatttatnatnnaatgtnagggntnatttttt

SEQ ID NO: 44628 - DNA, 331 bp, Homo sapiens
gctgcacgcgccgtggctccggatctcttcgtctttgcagcgtagcccgagtcggtcagcgccggaggacctcagcagccatgtcgaagccccatagtgaagccgggactgccttcattcagacccagcagctgcacgcagccatggctgacacattcctggagcacatgtgccgcctggacattgattcaccacccatcacagcccggaacactggcatcatctgtaccattggcccagcttcccgatcagtggagacgttgaaggagatgattaagtctggaatgaatgtggctcgtctgaacttctctcatggaactcatgagtacca

SEQ ID NO: 44629 - DNA, 347 bp, Homo sapiens
gtcggaaactgccctccttacctggcgacccccccgggcatcagtcaccggttacctgctggtctatgaatcagtggatggcacagtcaaggaagtcattgtgggtccagataccacctcctacagcctggcagacctgagcccatccacccactacacagccaagatccaggcactcaatgggcccctgaggagcaatatgatccagaccatcttcaccacaattggactcctgtaccccttccccaaggactgctcccaagcaatgctgaatggagacacgacctctggcctctacaccatttatctgaatggtgataaggctcaggcgctggaagtcttctgtg

SEQ ID NO: 44630 - DNA, 338 bp, Homo sapiens
  misc_feature (1)...(338): n = a,t,c or g
taggatttgctgtgtgatttgtggtgaattaggcatttcttgagaatgtaggtttctagaagtattagaagatggcttgactctgcagtgttgtacatatttccctaaaatttggacatttctccagtaaaacgtgtctgatgggttaggaccatttgtctccaaggaatggcagcggttttctttttaattgtttgtttgtgtttttcaagataatgctgagacatcccaggagtacagttcaagaggtgattttaaacagcagataattacttgagaatggctagagtcattggaatctgattanctcctttcactatcanatacctattttgatt

SEQ ID NO: 44631 - DNA, 324 bp, Homo sapiens
  misc_feature (1)...(324): n = a,t,c or g
aacccaaaaaaagagatctctcgaggatccgaattcgcggccgcgaattccnnnnnnnnnnnnnnnnnnnnnnnnnnnnnnnnnnnnnnnnnnnnnnnnnnnnnnnnnnnnnnnnnnnnnnnnnnnnnnnnnnnnnnnnnnnnnnnnnnnnnnnnnnnnnnnnnnnnnnnnnnnnnnnnnnnnnnnnnnnnnnnnnnnnnnnnnnnnnnnnnnnnnnnnnnnnnnnnnnnnnnnnnnnnnnnnnnnnnnnnnnnnnnnnnnnnnnnnnnnnnnnnnnnnnnnnnnnnnnnnnnnnnnnnnnnnnnnnnnnnnnnnnnnnnnnnt

SEQ ID NO: 44632 - DNA, 353 bp, Homo sapiens
cagaaataaatggcagaaatattaggcttattgaagataagccacgcacaagccataggcgatcttactctggaagcagatccaggtctcgatctagaagacggtcacgaagtaggagtcgcaggagcagccgcagtagatctcgaagtatctcaaaaagtcgctcccgttccaggtcgcggagcaaaggtcgatcacgttctcgatcaaaaggcaggaaatctagatcaaagagcaaatctaagcccaagtctgatcggggctcccattcacattctcgaagcagatctaaggatgagtatgagaaatctcgaagcaggtctcggtcccgatcccccaaagaaaatggaaag

SEQ ID NO: 44633 - DNA, 359 bp, Homo sapiens
  misc_feature (1)...(359): n = a,t,c or g
ggccttgggagagcaaatcatcccgggatggatcaccaagcagagcgttagggagcagatggacataaggggacgacaagacaatcccaggggtggtcagagaggagtcccaggacaggaggcaaggaggttgtgccaggggtacagcactctctgttgattggcttcagtgtgccaggctctgtgtggggcctccaggatcaactgttacccctcattctgatgcagctcagacaggctgaccagcaagccagcgaggatgaggactgaggctcaatttggagacacggtcctatgtgacctcagggtgcangcggggtgaggtntggagaatgaagtaggcctntctnatcctcctt

SEQ ID NO: 44634 - DNA, 371 bp, Homo sapiens
gtcaggtgctacaaatggtgctgaatcaaagactctaatttatcaaatggcacctgctgtttctaaaacagaggatgtttgggtgagaattgaggactgtcccattaacaatcctagatctggaagatctcccacaggtaatactcccccggtgattgacagtgtttcagaaaaggcaaatccaaacattaaagattcaaaagataatcaggcaaaacaaaatgtgggtaatggcagtgttcccatgcgtaccgtgggtttggaaaatcgcctgaactcctttattcaggtggatgcccctgaccaaaaaggaactgagataaaaccaggacaaaataatcctgtccctgtatcagagactaatgaaagtt

SEQ ID NO: 44635 - DNA, 319 bp, Homo sapiens
gcggcacgagcaaggatgatggtgtttcctggagcacaccccggaatctctccctggatattggcactgaagtgtttgcccctggaccgggctctggtattcagaaacagcgggagccacggaagggccgcctcatcgtgtgtggccatgggacgctggagcgggacggagtcttctgtctcctcagcgatgatcatggtgcctcctggcgctacggaagtggggtcagcggcatcccctacggtcagcccaagcaggaaaatgatttcaatcctgatgaatgccagccctatgagctcccagatggctcagtcgtcat

SEQ ID NO: 44636 - DNA, 357 bp, Homo sapiens
  misc_feature (1)...(357): n = a,t,c or g
gccgtgcgtactgggaggggagaaggggaccgcatgcagagggtggcaggcagggagggccagggtgggtggcagatggaagacttgggggggtctntgncttctgnaantgcttanatccnttttacatnntncacttanctnttntatctancnntattnnttggtaanctnttnccngttnagtnntncttttattcttttctttgtcttatntnaanattntnnttnnttttngnttttttcnttantntatnttntnnngnnnnttnnttttntgntctttantttctntttattnttnncntgttncatttctaagtatcnntcttntttttnttttnttntttctttctt

SEQ ID NO: 44637 - DNA, 362 bp, Homo sapiens
ggtcatctcaggtggggagttggggtccccgaaggccttggctccttgaacttttggccgccatgtgcttcccgaaggtcctctctgatgacatgaagaagctgaaggcccgaatgcaccaggccatagaaagattttatgataaaatgcaaaatgcagaatcaggacgtggacaggtgatgtcgagcctggcagagctggaggacgacttcaaagagggctacctggagacagtggcggcttattatgaggagcagcacccagagctcactcctctacttgaaaaagaaagagatggattacggtgccgaggcaacagatcccctgtcccggatgttgaggatcccgcaaccgaggagcct

SEQ ID NO: 44638 - DNA, 374 bp, Homo sapiens
  misc_feature (1)...(374): n = a,t,c or g
nnnnnnnnnnnnnnnnnnnnnnnnnnnnnnnnnnnnnnnnnnnnnnnnnnnnnnnnnnnnnnnnnnnnnnnnnnnnnnnnnnnnnnnnnnnnnnnnnnnnnnnnngatccnnnnnnnnnnnnnnnnnnnnnnnnnnnnnnnnnnnnnnngtacataatacctactttagagattgtcatggaaatataaagtatgtggtccttactaatgctagataatgctttgctttctttaatttgcatcttaccctcttccgtgagtattgatactgtcttaaacatagtagggtttgattagatatttgctggttgccccttcacttgcaagggatacatacaaatgttggtttgtattggataatgaatatgatgttt

SEQ ID NO: 44639 - DNA, 360 bp, Homo sapiens
  misc_feature (1)...(360): n = a,t,c or g
ggatttttactgtatgttcattagggactttttttggctgttgtttccttagtatcagagtaatgctggtctcagaggtcaagtttgaaagaattcgtgcctcttcatgtttttggaataatttgagaattaatgttagttgttctttataagttgaatgtagcagcaatgccatctggtcctagatttttcactgttgggagactttttattatggattcaacctcattacttattattagtctgttcaggttttgtattcctttttttttttcannattgaaaaatngctatttatttaaaaaanctcctgaatnaantnggcaannggcaataacnggactttacnttantccaaag

SEQ ID NO: 44640 - DNA, 371 bp, Homo sapiens
  misc_feature (1)...(371): n = a,t,c or g
ggatttttactgtatgttcattagggactttttttggctgttgtttccttagtatcagagtaatgctggtctcagaggtcaagtttgaaagaattcgtgcctcttcatgtttttggaataatttgagaattaatgttagttgttctttataagttgaatgtagcagcaatgccatctggtcctagatttttcactgttgggagactttttattatggattcaacctcattacttattattagtctgttcaggttttgtattcctttttttttttcaagattgaaaaatggctatttatttaaaaaaccttctgaattaaataggcaaanggcaataacnggatatacattaattcaaagtattttcactga

SEQ ID NO: 44641 - DNA, 372 bp, Homo sapiens
gatcagcgtgaatgtgcagggcgaggacgccctgggcttctgtggccacacggtcatcctgactgccaacctggaggcccaggccctgtggaaggagccgggcagcaatgtcaccatgagtgtggatgctgagtgtgtgcccatggtcagggaccttctcaggtacttctactcccgaaggattgacatcaccctgtcgtcagtcaagtgcttccacaagctggcctctgcctatggggccaggcagctgcagggctactgcgcaagcctctttgccatcctcctcccccaggacccctcgttccagatgcccctggacctgtatgcctatgcagtggccacaggggacgccctgctggagaagctctgcta

SEQ ID NO: 44642 - DNA, 363 bp, Homo sapiens
gccatcatgtggagacatttgcaattttcctcctaaaattgcccatgggcattataaacaatctagttcatacagctttttcaaagaagagattatatatgaatgtgataaaggctacattctggtcggacaggcgaaactctcctgcagttattcacactggtcagctccagcccctcaatgtaaagctctgtgtcggaaaccagaattagtgaatggaaggttgtctgtggataaggatcagtatgttgagcctgaaaatgtcaccatccaatgtgattctggctatggtgtggttggtccccaaagtatcacttgctctgggaacagaacctggtacccagaggtgcccaagtgtgagtg

SEQ ID NO: 44643 - DNA, 373 bp, Homo sapiens
  misc_feature (1)...(373): n = a,t,c or g
ggattgcccgggagggcagccatgaggcccgtgtgtttcgaagcattcccccagagggcctggcccagagcgagcttatgcgactgcccagtggcaaagtgggcttcagcaaggccatgtccaacaagtggattcgggtggacaagagtgcggctgacgggccccgggtgttccgagtggtggacagcatggaggatgaggtgcagcggcggctccagctggtccgggggggacaggctgagaagctgggggagaaggagaggagctagctgaggaagaggaactgttgctgaagtgactctgaanacctactgggtgagcaaaggcagncctttataccancatctcaancanganacnnaactgacccaag

SEQ ID NO: 44644 - DNA, 314 bp, Homo sapiens
gctgtgcagaagactatctatccgtggtcctgaaccagttatgtgtgttgcatgagaaaacgccagtaagtgacagagtcaccaaatgctgcacagaatccttggtgaacaggcgaccatgcttttcagctctggaagtcgatgaaacatacgttcccaaagagtttaatgctgaaacattcaccttccatgcagatatatgcacactttctgagaaggagagacaaatcaagaaacaaactgcacttgttgagctcgtgaaacacaagcccaaggcaacaaaagagcaactgaaagctgttatggatgatttc

SEQ ID NO: 44645 - DNA, 321 bp, Homo sapiens
gctgtgcagaagactatctatccgtggtcctgaaccagttatgtgtgttgcatgagaaaacgccagtaagtgacagagtcaccaaatgctgcacagaatccttggtgaacaggcgaccatgcttttcagctctggaagtcgatgaaacatacgttcccaaagagtttaatgctgaaacattcaccttccatgcagatatatgcacactttctgagaaggagagacaaatcaagaaacaaactgcacttgttgagctcgtgaaacacaagcccaaggcaacaaaagagcaactgaaagctgttatggatgatttcgcagctt

SEQ ID NO: 44646 - DNA, 391 bp, Homo sapiens
  misc_feature (1)...(391): n = a,t,c or g
ggttgttcagaagctgttgctactgtgtctctctgtctgcagggggcacttgttcctgaggtcctcgcctgggtcctgacttctgtagtttctgtgaagacgtggctgtcctgtgggctcctgtgtgtgctggctgcgccctgagctccgagacagctgcccataacctgctaaggtcagggcccagggccccccacagcatggctgagggaccccttcccagtagggctgtcccaagccccactccatggggccaggtttcctggccacttttgttgatagcagatggatcaatattagtaaccccatccaagattgaactgtgaaagagaggttccaggggtatctccctcagtgccagttacttantgatgtgttacccaggatgcag

SEQ ID NO: 44647 - DNA, 336 bp, Homo sapiens
gtgtttataagtttcccagtcagaagtattttgttatagcagactaagacattacctaacagactaagacattatctataaaatgtggccaataatataatcatgtttgattattatgattagatgacttaatgttggcatcctctaattggtggcaggataactatggggtaaatgtagctttcagtcaaaatatcctcattgctgggtgcaagaaaaggggactttttttttctctctgtactcagagtccaggagagagaactggaaggtcaagctgtcaagcagagattattttgtaagacattctttcacagacatttttaagccctttga

SEQ ID NO: 44648 - DNA, 370 bp, Homo sapiens
gaaatcaccaaaatgtccagttagaacaagaatttagcattctgcaaaagaagttaacagctgagataacgaggaaatattctgaaatggatcccaaatatttcatcttaattttgttttgtggacacctgaacaatacatttttttcaaagacagagacaattacaacagagaagcagtcacagcctaccttattcacatcatcaatgtcacaggtattggctaattctcaaaacacaacagggaatcctttgggtcaaccaacacaattcagcgacactttttctggacaatcaatatcacctgccaaagtcactgctggacaaccaacaccagctgtctatacctcttctgaaaaaccagaagcaca

SEQ ID NO: 44649 - DNA, 333 bp, Homo sapiens
gaaatcaccaaaatgtccagttagaacaagaatttagcattctgcaaaagaagttaacagctgagataacgaggaaatattctgaaatggatcccaaatatttcatcttaattttgttttgtggacacctgaacaatacatttttttcaaagacagagacaattacaacagagaagcagtcacagcctaccttattcacatcatcaatgtcacaggtattggctaattctcaaaacacaacagggaatcctttgggtcaaccaacacaattcagcgacactttttctggacaatcaatatcacctgccaaagtcactgctggacaaccaacac

SEQ ID NO: 44650 - DNA, 323 bp, Homo sapiens
gcaataagctcctagtccagacgccatgggtcatttcacagaggaggacaaggctactatcacaagcctgtggggcaaggtgaatgtggaagatgctggaggagaaaccctgggaaggctcctggttgtctacccatggacccagaggttctttgacagctttggcaacctgtcctctgcctctgccatcatgggcaaccccaaagtcaaggcacatggcaagaaggtgctgacttccttgggagatgccataaagcacctggatgatctcaagggcacctttgcccagctgagtgaactgcactgtgacaagctgcatgtgg

SEQ ID NO: 44651 - DNA, 329 bp, Homo sapiens
ggaagaccacagtggccctgagagactgcatcgagctcttcaccaccatggagacccttggggagcatgacccctggtactgtcccaactgtaagaagcatcaacaggccacaaaaaaagtttgacctatggtccttgcccaagatcctggtggtccacctcaaacgtttctcctacaacagatactggagggataagctcgacacagtcgtagaattcccaatcagagggctgaacatgtccgagtttgtctgtaacctgtcagcaaggccttatgtgtacgacctcattgccgtgtccaatcattatggagccatgggggttggcca

SEQ ID NO: 44652 - DNA, 325 bp, Homo sapiens
  misc_feature (1)...(325): n = a,t,c or g
gcggcacgagcggcacgagcaataagctcctagtccagacgccatgggtcatttcacagaggaggacaaggctactatcacaagcctgtggggcaaggtgaatgtggaagatgctggaggagaaaccctgggaaggctcctggttgtctacccatggacccagaggttctttgacagctttggcaacctgtcctctgcctctgccatcatgggcaaccccaaagtcaaggcacatggcaagaaggtgctgacttccttgggagatgccataaagcacctggatgatctcaagggcacctttgcccagntgagtgaactgcactgt

SEQ ID NO: 44653 - DNA, 328 bp, Homo sapiens
  misc_feature (1)...(328): n = a,t,c or g
gtgaaatcttgatgagaagtggccacaatcgtgctgtggattggtggagtttggcagcattaatgtatgacatgctgactggagcacccccattcactggggagaatagaaagaaaacaattgacaaaatcctcaaatgtaaactcaatttgcctccctacctcacacaagaagccagagatctgcttaaaaagctgctgaaaagaaatgctgcttctcgtctgggagctggtcctggggacgctggagaagttcaagctcatccattctttagacacattaactgggaagaacttctggctcnaaaggtggagcccccctttaaacc

SEQ ID NO: 44654 - DNA, 323 bp, Homo sapiens
gcaataagctcctagtccagacgccatgggtcatttcacagaggaggacaaggctactatcacaagcctgtggggcaaggtgaatgtggaagatgctggaggagaaaccctgggaaggctcctggttgtctacccatggacccagaggttctttgacagctttggcaacctgtcctctgcctctgccatcatgggcaaccccaaagtcaaggcacatggcaagaaggtgctgacttccttgggagatgccacaaagcacctggatgatctcaagggcacctttgcccagctgagtgaactgcactgtgacaagctgcatgtgg

SEQ ID NO: 44655 - DNA, 330 bp, Homo sapiens
gatcaataagctcctagtccagacgccatgggtcatttcacagaggaggacaaggctactatcacaagcctgtggggcaaggtgaatgtggaagatgctggaggagaaaccctgggaaggctcctggttgtctacccatggacccagaggttctttgacagctttggcaacctgtcctctgcctctgccatcatgggcaaccccaaagtcaaggcacatggcaagaaggtgctgacttccttgggagatgccataaagcacctggatgatctcaagggcacctttgcccagctgagtgaactgcactgtgacaagctgcatgtggatcct

SEQ ID NO: 44656 - DNA, 347 bp, Homo sapiens
  misc_feature (1)...(347): n = a,t,c or g
gggtcagccctccggatcgggaagggattaccgttcttcacgggatttagccctggcgtcttgcctagggcgtgcacctgcccccgggtgttctcccagactcttaagacctcgcaggctccctcgaggggccctgcgtggaagggaaggcggaatctccctctgattctgcctggattcagcacccagaatgaggtggtctctgaacgcccctcctcctttacaggcgaggaaacagccctgtgggaagtcgaggttccaaggtcacagtgaggggccctggccacccgattcagcgcaggaaatagtgagaaagncgnttttanccgactctgacccgnattcgg

SEQ ID NO: 44657 - DNA, 339 bp, Homo sapiens
  misc_feature (1)...(339): n = a,t,c or g
gggcggaggtgcaggtcctggtgcttgatggtcgaggccatctcctgggccgcctggcggccatcgtggctaaacaggtactgctgggccggaaggtggtggtcgtacgctgtgaaggcatcaacatttctggcaatttctacagaaacaagttgaagtacctggctttcctccgcaagcggatgaacaccaacccttcccgaggcccctaccacttccgggcccccagccgcatcttctggcggaccgtgcgaggtatgctgccccacaaaaccaagcgaggccaggctgctctggaccgtctcanggngtttgacggcatcccaccgtcctacgaca

SEQ ID NO: 44658 - DNA, 220 bp, Homo sapiens
  misc_feature (1)...(220): n = a,t,c or g
gnnnnnnnnnnnnnnnnnnnnnnnnnnnnnnnnnnnnnnnnnnnnnnnnnnnnnnnnnnnnnnnnnnnnnnnnnnnnnnnnnnnnnnnnnnnnnnnnnnnnnnnnnnnnnnnnnnnnnnnnnnnnnnnnnnnaagacggggtgacctgtattgctgntgcttnagctncacccatggntaanaggggtnaaggtacagntcanaccattgntnnnnaggg

SEQ ID NO: 44659 - DNA, 364 bp, Homo sapiens
  misc_feature (1)...(364): n = a,t,c or g
ggaaaaaaatgacggatatctcagtagtgaaaagactataggaaatgaagaagtaattcacagaaaaagggtcaactccatttatcagagaaatgcaaatgaaatcaggattgcattcttcacctgccaaattggcagatgcnncaatagctggnncttactganccctttntgtgnnanctacnacntctaatanntcctccactcacacatnngnttnngctnctgctnattgnnncnntncnctncnctttntctcnnnnntttcattnnttcttcntgctctcnncntccntngctcctnttcttcccnnctttancttnntncntncncnnanttnnncnnttncnnttttnatttcat

SEQ ID NO: 44660 - DNA, 333 bp, Homo sapiens
  misc_feature (1)...(333): n = a,t,c or g
ggaaaaaaatgacggatatctcagtagtgaaaagactataggaaatgaagaagtaattcacagaaaaagggtcaactccatttatcagagaaatgcaaatgaaatcaggattgcattcttcacctgtcaaattggcagatgcaacaatagctggtacttactgagccctttctgtgttagctactagtctaagagttaccaccactcatacatatgtaaaggctaatggagttgtaaatgtaacttttgaggactttattgtatgtatgcnnnnnnnnnnnnnnnnnnnnnnnnnnnnnnnnnnnnnnnnnnnnnnnnnnnnnnnnnnnggaa

SEQ ID NO: 44661 - DNA, 327 bp, Homo sapiens
  misc_feature (1)...(327): n = a,t,c or g
ggttttgacaagctggcttacactggcaatggtagtttctgtggttggctgggaaatcgagtgccgcatctcacagctatgcaaaaagctagtcaacagtaccctggttgtgtgtacccttgcaaccgtcncgncacttggatcnnncctncnntattnccttcnnnnnnnnnnnnnnnnnnnnnnnnnnnnnnnnnnnnnnnnnnnnnnnnnnnnnnnnnnnnnnnnnnnnnnnnnnnnnnnnnnnnnnnnnnnnnnnnnnnnnnnnnnnnnnnnnnnnnnnnnnnnnnnnnnnnnnnnnnnnnnnnnnnnnnnnnnnnnnnnnnn

SEQ ID NO: 44662 - DNA, 356 bp, Homo sapiens
  misc_feature (1)...(356): n = a,t,c or g
gcttccacgtggaccaggtgaccaccgtgaaggtgcctatgatgaagcgtttaggcatgtttaacatccagcactgtaagaagctgtccagctgggtgctgctgatgaaatacctggtcaatgccaccgtcatcttcttcctgcctgatgaggggaaactacagcacntggancatgaactcacccangatntnntcnccaagntcctgganaatgatgacanaaggtnngccagcntatatttncccttctngtcattnttnnnnctaanattctgagnancntngtggnccatttgntnttctntcntgttttcgnntatngngcttgnnnttctccgctnnctctattntctt

SEQ ID NO: 44663 - DNA, 317 bp, Homo sapiens
gtgaaggaataaggaagagaggtttgagctaaactttaaagaataagaatttcactaggtggaaagtggcattctagacagagaattatattggtactaatacatactcatgatagtacatgatattgttgagcagtgtagaacaaactaacatggatgttgtgttcatggagagccgaagtatgaaacatgaagtgtttctaagatgttgacttgttcagagttgtagacgacaaaattaagcttcttcggtacttacaattaaagtaaatccctataaactctatgcatatggaagtttttgtgttataaataag

SEQ ID NO: 44664 - DNA, 316 bp, Homo sapiens
gcacagactcagagagaacccaccatggtgctgtctcctgccgacaagaccaacgtcaaggccgcctggggtaaggtcggcgcgcacgctggcgagtatggtgcggaggccctggagaggatgttcctgtccttccccaccaccaagacctacttcccgcacttcgacctgagccacggctctgcccaggttaagggccacggcaagaaggtggccgacgcgctgaccaacgccgtggcgcacgtggacgacatgcccaacgcgctgtccgccctgagcgacctgcacgcgcacaagcttcgggtggacccggtca

SEQ ID NO: 44665 - DNA, 313 bp, Homo sapiens
gtgatgacagggcggaccttgccaagtatatctgtgaaaatcaagattcgatctccagtaaactgaaggaatgctgtgaaaaacctctgttggaaaaatcccactgcattgccgaagtggaaaatgatgagatgcctgctgacttgccttcattagctgctgattttgttgaaagtaaggatgtttgcaaaaactatgctgaggcaaaggatgtcttcctgggcatgtttttgtatgaatatgcaagaaggcatcctgattactctgtcgtgctgctgctgagacttgccaagacatatgaaaccactctaga

SEQ ID NO: 44666 - DNA, 326 bp, Homo sapiens
ggagaacccaccatggtgctgtctcctgccgacaagaccaacgtcaaggccgcctggggtaaggtcggcgcgcacgctggcgagtatggtgcggaggccctggagaggatgttcctgtccttccccaccaccaagacctacttcccgcacttcgacctgagccacggctctgcccaggttaagggccacggcaagaaggtggccgacgcgctgaccaacgccgtggcgcacgtggacgacatgcccaacgcgctgtccgccctgagcgacctgcacgcgcacaagcttcgggtggacccggtcaacttcaagctcctaagccactg

SEQ ID NO: 44667 - DNA, 368 bp, Homo sapiens
  misc_feature (1)...(368): n = a,t,c or g
gnnnnnnnnnnnnnnnnnnnnnnnnnnnnnnnnnnnnnnnnnnnnnnnnnnnnnnnnnnnnnnnnnnnnnnnnnnnnnnnnnnnnnnnnnnnnnnnnnnnnnnnnnnnnnnnnnnnnnnnnnnnnnnnnnnnnnnnnnnnnnnnnnnnnnnnnntaacattttagtgttgagttctgtcccttggaatctctgagaaactacttggactagagtgaagtgtaacttaacacagcctggggttgatgattctccttagtattgtagtcattggtcagccttaaatgttcatacttgtgcagagtcattaatggataaatacagcatggtggctagtggcatagatttanagtcnnaaagacttgagttc

SEQ ID NO: 44668 - DNA, 374 bp, Homo sapiens
gttgttacctaaataatgagtaggatcttgttttgttttatcaccagcacacagattgctataaactgttactttgtgaattacatttttatagaagatattttcagtgtctttacctgagggtatgtctttagctatgttttagggccatacatttactctatcaaatgatcttttctccatcccccaggctgtgcttatttctagtgccttgtgctcactcctgctctctacagagccagcctggcctgggcattgtaaacagcttttcctttttctcttactgttttctctacagtcctttatatttcataccatctctgccttataagtggtttagtgctcagttggctctagtaaccagaggacacaga

SEQ ID NO: 44669 - DNA, 318 bp, Homo sapiens
gcggcacgagcagggtgttaaccgcatatgaaacaacccatatggaagacatacttaggggtcaaacctgtggtgtgtggaagtgaccactgggatgtcatcattcaccatttatccaggatggccgctcaccaggcaatttgctaggctcgggggcgggtagtatccatacactatgcactactgctctgaagcttctggaatcagaaatgaacccattttcatcgacgattgctgttagttgacaagtgacatcttgaaaatgccacattccctcatgtcacaggaagttctgggatcaccaaggattgttggaga

SEQ ID NO: 44670 - DNA, 281 bp, Homo sapiens
  misc_feature (1)...(281): n = a,t,c or g
gcttttattggcaaggctctcaacaatctaaaccaagatgaattcatcaggaaatgaaaggtagcaactaataagacaagggtaactgctaaaacacgatatactattcctgaaaaaccttgcactctacagaaaacactaaaaaaagaagcggttcatgaaaatatagggtttgagagttcaagacaaaccactccagcataacaactttgtaaccaacacactaaccactcggaccacccacatcagcagctcaatgnctggaggnngncntangaggt

SEQ ID NO: 44671 - DNA, 188 bp, Homo sapiens
  misc_feature (1)...(188): n = a,t,c or g
gtctagttgactcaaataatagaaaaggaattgataatcatatagacttggtctgtttatatacattcatatgagatgcgtgtgtgtatgtgtgcatatatacatgtatatgcacatatacttataaacctttttttttaagatatggaaagagagcccctaagaagctaantgacttacatagtatc

SEQ ID NO: 44672 - DNA, 205 bp, Homo sapiens
  misc_feature (1)...(205): n = a,t,c or g
gtctagttgactcaaataatagaaaaggaattgataatcatatagacttggtctgtttatatacattcatatgagatgcgtgtgtgtatgtgtgcatatatacatgtatatgcacatatacttataaacctttttttttaagatatggaaagagagcccctaagaagctaaatgacttacatagtaagcggtaaggngcgtggtt

SEQ ID NO: 44673 - DNA, 338 bp, Homo sapiens
gagccggagctgcgggcgctttttctgcccgcggtgtctcagattcattcttaaggaactgagaacttaatcttccaaaatgtcaaaaagaccatcttatgccccacctcccaccccagctcctgcaacacaaatgcccagcacaccagggtttgtgggatacaatccatacagtcatctcgcctacaacaactacaggctgggagggaacccgggcaccaacagccgggtcacggcatcctctggtatcacgattccaaaacccccaaagccaccagataagccgctgatgccctacatgaggtacagcagaaaggtctgggaccaagtaaaggctt

SEQ ID NO: 44674 - DNA, 368 bp, Homo sapiens
cccgcctggcactgaccttgtgtttttacgggaaggcgcaagcagtcctgtgcaggtgccgggccctgttgcagcttccacagaagccctgttgcaggaggcccagtgctctggcctgagttgggttgtggccttaccccaggtgaagcaagagaaggcggatacccaggacgagtggacaccaggcacagctgtcctgacttctcccgtattggtgcctggctgccctagcaaggcagtagacccaggcctgccttctgtgaagcaagagccacctgacccagaggaggacaaggaggagaacaaggatgattctgcctccaaattggccccagaggaagaggcaggaggggctggcacacccgtga

SEQ ID NO: 44675 - DNA, 363 bp, Homo sapiens
ccgagcttcttaaacacaggccttgggcctacggctctgggggtacttgggggggcaggcggcaggtctgatgagtaacccctccccccaggttccagaggaagaagcctccacatctgtctgccggcccaagagttccatggcctccacttcccgccgccaacgccgagaacgtcgctttcgtcgttacttgtctgcaggacggctggtccgggcccaggccctcctccagcgacacccaggcctcgatgtagatgctgggcagcccccaccactgcaccgggcctgtgcccgccacgatgcccctgccctgtgcctgctgcttcggctcggggctgaccctgcccaccaggaccgccatgg

SEQ ID NO: 44676 - DNA, 362 bp, Homo sapiens
ctgcaaaccaaccagcaaaaccaaggacaacttagaaaatcctgacttccgagaaatccgctcctttgtggagacgaaggctgacagcatcatcagacagaagcccgtcgacctcctgaagtacaatcaaaagggcctgacccgcgtctacccaaagggacaaagagttgactcttcaaactacgaccccttccgcctctggctgtgcggttctcagatggtggcactcaatttccagacggcagataagtacatgcagatgaatcacgcattgttttctctcaacgggcgcacgggctacgttctgcagcctgagagcatgaggacagagaaatatgacccgatgccacccgagtcccaga

SEQ ID NO: 44677 - DNA, 360 bp, Homo sapiens
ctgaatcatgtcagggagatttaagtacattggccaatgtggttacatcattagcgaatcttggaaaaactaaagatctttctcaaaatagtaatgaaatgtctatgattgaaagcttaagcaatgatgatacctctttgtgtgaatttcaagaaatgcagaccaacggtgatgtttcaagggcatttgacactcttgcaaaagcattgaatcctggagagagcagcctgccagagctcagtagcgggcatggaaggaagtgtacacctaatcactggagattcaagcataaattacaccgaaaaagaggggccacttctcagcgattcacatgtagctttcaggctcaccatgccttct

SEQ ID NO: 44678 - DNA, 360 bp, Homo sapiens
ccaccatggtgctgtctcctgccgacaagaccaacgtcaaggccgcctggggtaaggtcggcgcgcacgctggcgagtatggtgcggaggccctggagaggatgttcctgtccttccccaccaccaagacctacttcccgcacttcgacctgagccacggctctgcccaggttaagggccacggcaagaaggtggccgacgcgctgaccaacgccgtggcgcacgtggacgacatgcccaacgcgctgtccgccctgagcgacctgcacgcgcacaagcttcgggtggacccggtcaacttcaagctcctaagccactgcctgctggtgaccctggccgccacctccccgccgagttcac

SEQ ID NO: 44679 - DNA, 360 bp, Homo sapiens
cttgaaacaattgccatctttgtagttatgccttgggttctaaaatgttataggaaactgctgaattgaatcctagcttttagaatattaataggagactcaaagttaatattcttaacaacttaaaattaaaaaaagtcataatctatcaaaagtttatttattggatggcattaaaacatttttgaggcagttgtctaatatgaacaataatctaaacaatatattccttaaattaagaggaaagacaagtgtcgtatttcgatcctgtttattcaaatgtgtgattttgctgaaatgaaagggataaaatgaatacttagagaataatacttcatttttgcagtactttttaatttt

SEQ ID NO: 44680 - DNA, 361 bp, Homo sapiens
ctacccctaaaagccaaaatgggaaaggaaaagactcatatcaacattgtcgtcattggacacgtagattcgggcaagtccaccactactggccatctgatctataaatgcggtggcatcgacaaaagaaccattgaaaaatttgagaaggaggctgctgagatgggaaagggctccttcaagtatgcctgggtcttggataaactgaaagctgagcgtgaacgtggtatcaccattgatatctccttgtggaaatttgagaccagcaagtactatgtgactatcattgatgccccaggacacagagactttatcaaaaacatgattacagggacatctcaggctgactgtgctgttctga

SEQ ID NO: 44681 - DNA, 371 bp, Homo sapiens
  misc_feature (1)...(371): n = a,t,c or g
gttacaatggttggaatagggatgcttattccctgagaatctggggtctaggatttttacctcaagtatccacagatctaacacctcagactttcagtgaaaaagttctacaagggaaaaatcattgggtgattgatttctatgctccttggtgtggaccttgccagaattttgctccagaatttgagctcttggctaggatgattaaaggaaaagtgaaagctggaaaagtagactgtcaggcttatgctcagacatgccagaaagctgggatcagggcctatccaactgttaagttttatttctacnaaagagcanagagaaattttcaagaagagcagattaatccagagatgccaaagcaatcgctg

SEQ ID NO: 44682 - DNA, 408 bp, Homo sapiens
  misc_feature (1)...(408): n = a,t,c or g
cagattattcacatttgtgttacaggaaatcacagtctgaatagaaaatggtcagaatggctaaaatggtcacctattgtttctttagaataagggtggtgaacacagaacgggaaaattcttcaaggtctttcttgaattcgaaacatgaagtcataaccaagtatctgggacctatttgtagtgatctgcaggaatttatgaaagtgccaaagaattaacagtttattcggcttctaagtgttattaatgtgaactttttgatagttggaacattttgatcccatactctctttggtgcctttcacctaatactgttctaaaataggctaattttaataaatattcagcanaggaacattcttagtgtttaacttcaaattaaatggtgtaaacttattttaacat

SEQ ID NO: 44683 - DNA, 410 bp, Homo sapiens
  misc_feature (1)...(410): n = a,t,c or g
ggcggccgtcgatctcaagccgactctcaccatcatcaagacggaaaaagtcgatctggagcttttcccctccccggatatggaatgtgcagatgtcccactattaactccaagcagcaaagaaatgatgtctcaagcattaaaagctactttcagtggtttcactaaagaacagcaacgactggggatcccaaaagacccccggcagtggacagaaacccatgttcgggactgggtgatgtgggctgtgaatgaattcagcctgaaaggagtagacttccagaagttctgtatgaatggagcagccctctgcgccctgggtanagactgctttctcgagctggcccanactttgttggggacatcttatgggaacatctagagatcctgcanaaaagaggatgtgaacc

SEQ ID NO: 44684 - DNA, 385 bp, Homo sapiens
  misc_feature (1)...(385): n = a,t,c or g
cccacgcgtccgcattggcagctacctcaggaatgaccgcttgtggatctgcatggagttctgcggagggggctccctgcaggagatttaccatgccactgggcccctggaggagcggcagattgcctacgtctgccgagaggcactgaaggggctccaccacctgcattctcaggggaagatccacagagacatcaagggagccaaccttctcctcactctccagggagatgtcaaactggctgactttggggtgtcaggcgagctgacagcgtctgtggccaagaggaggtctttcattgggactccctactggatggctnccgaggtggctgctgtggagcgcaaaggtggctacaatganctatgtgacgtctgggccctg

SEQ ID NO: 44685 - DNA, 377 bp, Homo sapiens
ctttcaaggaatcagccgccagatcccacccttggacccccatgaaaatggaaacaatggaacaatcaaagttgagaagccaaccatgcaagccagccgccggtgctgttgacccaagggccgtggtccacggtacttgaagaagccagagcccacatcctgtgcactgctgaaggaccctacgctcggtggcctggcacctcactttgagaagagtgagcacactggctttgcatcctggaagacctgcagggggcggggcaggaaatgtacctgaaaaggattttagaaaaccctgggaaaacccaccacaccaccacaaaatggcctttagtgtatgaaatgcacatggaggggatgtagttgcatttttgcta

SEQ ID NO: 44686 - DNA, 392 bp, Homo sapiens
ctcttataggcagcataagttgagtgtttttaaaaatccatttaactactttgcctttttattggagaacttaatccacttacgttcagggttatcattcataggctgctgatactttggctgtgaggcaaaaaaggagaatttatgatatcaccaatgtcttagagggaattgacttgattgaaaaaaagtcaaaaaacagtatccagtggaaaggtgtaggtgctggctgtaatactaaagaagtcatagatagattaagaaatcttaaagctgaaattgaagatctagaactgaaggaaagagaacttgatcagcagaagttgtggctacagcaaagcatcaaaaatgtgatggacgattccattaataatagattttcctatgtaact

SEQ ID NO: 44687 - DNA, 382 bp, Homo sapiens
  misc_feature (1)...(382): n = a,t,c or g
gaaacgcaggtgactttgtagctctgtggtcagcctacttgtctgctctgagggagagtgcgtggggagccatgctcaccgtggcaaacacaggaaccccatgactcgcccctcacctggcgtggagctgcctggtttgggctggagcagagctggtttcctggaatgttcctttggcccacatatggntctgtnccacnaagncttgatggttgannnctattgtncntnnngtcatccttgccaatagttaatgccncaatggataataatggtccggacnttaactggactgatcaacgcgggcagnatacattgcaacagtaatcattcttttnagcccagganaactttcaaanataccnntgagattagatttttt

SEQ ID NO: 44688 - DNA, 391 bp, Homo sapiens
  misc_feature (1)...(391): n = a,t,c or g
nnnnnnnnnnnnnnnnnnnnnnnnnnnnnnnnnnnnnnnnnnnnnnnnnnnnnnnnnnnnnnnnnnnnnnnnnnnnnnnnnnnnnnnnnnnnnnnnnnnnnnnnnnnnnnnnnnnnnnnnnnnnnnnnnnnnnnnnnnnnnnnnnnnnnnnnnnnnnnnnnnnnnnnnnnnnnnnnnnnnnnnnnnnnnnnnnnnnnnnnnnnnnnnnnnnnnnnnnnnnnnnnnnnnnnnnnnnnnnnnnnnnnnnnnncaattactttttatattgacaaagagaagatgttgcaatgtcctcaaacgtaaaacaccccctacagttccaattctgggcctgtcttctatctatctttgcccttctggtccgttccctgttctgagccccagggaactt

SEQ ID NO: 44689 - DNA, 384 bp, Homo sapiens
  misc_feature (1)...(384): n = a,t,c or g
cccacgcgtccgcggacgcgtgggtataaatccagactggattgctctccatacatcacgtggatatgagagtcaggcacataagctcttcatgcgtacaacagttttaattgctgatctgctgatttacatacctgcagtggttttgcactgttgttgcttaaaagaaatctcaactaagaaaaagattgctaatgcattatgcatcttgctgtatccaggccttattcttatagactatggacattctcaatataattctgtgagtcttggctttgctttgtggggtgttcttggaatatcttgtgactgcgacctcctagggtcactggcattttgcttagctataaattatanacagatggaactttaccacgccttgcc

SEQ ID NO: 44690 - DNA, 362 bp, Homo sapiens
gcttaaggcttttaagtctgtgttggctgatattaagaaggctcatcttgcattggaagaagacttaaattccgagtttcgagcgatggatgctgtaaacaaagagaaaaataccaaagagcataaagtcatagatgctaagtttgaaacaaaagcacgaaaaggagaaaaaccttgtgctttggaaaagaaggatatttcaaagtcagaagctaaactttcaagaaaacaggtagatagtgagcacatgcatcagaatgttccaacagaggaacaaagaacaaataaaagtaccggtggtgaacataagaaatctgatagaaaagaagaacctcaatatgaacctgccaacacttctgaaa

SEQ ID NO: 44691 - DNA, 360 bp, Homo sapiens
gcagaggacaagcgtgcttttgtgtactgttggaagactggctcctcctgtacagcacctctgagcccttgtgcaccgccctgccacgggcaccatccagtcctggccgtgtgaccacccacagctgactgggcagcaggcacaggccctacccgagcaggccggagttggctcgcatgactccagctgaggctgcctgtgtacatttctccagataccctatggctaattttgttataactgcacagtggctgctgccattttgtattaaatatattgtgaaacaaacctatctggggagaagcaatctacttgccgctgcttcctgtctggatccagcttgtgtccttggagagtggc

SEQ ID NO: 44692 - DNA, 352 bp, Homo sapiens
cgctaggaagggcgggcagaaagggcacgctcttgtgggtgactacaggttaggagaccgttgaacctggaggggccctaggatggaccccgtggaaagattcagagactgcgccctctccctggcgccgccttcccctacacgcggcgggtatattctgttgcagttggcccaggacctgtttccaagactctgccccctcgcacttccgtccctcctggttttgtaaagtgatgctcataggaacccccaccccgcgtgacactactcccagctcctggctgacttctagtcttctggttgaagctgcgcctttagatgacacgaccctacccacccctgtttccagcgg

SEQ ID NO: 44693 - DNA, 357 bp, Homo sapiens
gaggtgccctgacacaggacatcactgcccacttcttcaggggcctcctgaacgcctgtctgcggagcagagacccctccctgatggtcgacttcatactggccaagtgccagacgaaatgccccttaattttgacctctgctctggtgtggtggccgagcctggagcctgtgctgctctgccggtggaggagacactgccagagcccgctgccccgggaactgcagaagctacaagaaggccggcagtttgccagcgatttcctctcccctgaggctgcctccccagcacccaacccggactggctctcagctgctgcactgcactttgcgattcaacaagtcagggaagaaaaca

SEQ ID NO: 44694 - DNA, 356 bp, Homo sapiens
aactgactgaggagtgggacggttcgtttgaatggaggaggtgttgagtgagcaacacgcagaagctcgcctacagtttcgtttccattcacgacgcgttcactgatcgccacgagtatactgcatatacgcaaagacacagacaatcttcagaaatgatcttttgccaccggagcttggaaattaataagaatagctggccattgcctgaaaggaacttctttcgcatcaacatttcgggttttggctgtttggtaccagccattggcgataatggccggccattatcagttcttcctgcggttcgggttttggcagtaacatatatattttaaacacacttatttttgttttta

SEQ ID NO: 44695 - DNA, 359 bp, Homo sapiens
caatagtcaaatgaagagagccattgaacaggagtcacaaatgtcactaaaagatggcagaaaaaagataaaacccaccagcgcatggaatttggcccagaagcacaagttaaaaacctcattatctaatcaaccaaaacttgatgaactccttcagtcccaaattgaaaaaagaaggagtcaaaatattaaaatggtacagatccccttttctatgaaaaacttaaaaataaattttaagaaacaaaacaaagttgacttagaagagaaggatgaaccttgcttgatccacaatctcaggtttcctgatgcatggctaatgacatccaaaacagaggtaatgttattaaatccatata

SEQ ID NO: 44696 - DNA, 351 bp, Homo sapiens
cggacgcgtgggtgaaccgtttctgcactaatcttctccacgggcacggagtggagggaacgtcttgggaaaggggagagcttgacctccatctaggtttcttttatctggagaaaaagaacacttttgaactatgtaatgcttcgccctgaaaggcaagctaacgctaacttcccaggtgacagtagcaggaacaaggaagggtaatgtttccatgacagacacttgcttcccttgggacaagtcccagaagaactacctgaagcaccaaagctccccaccccagcctggtggcagaggaagcaggtggcaccaactcaccaaagggacttgggagccaccttctcactc

SEQ ID NO: 44697 - DNA, 357 bp, Homo sapiens
ggaaatagtgcaaatatcctgcacagatagcttacaaggttgctggcatagttattcaccagcagaatcttggattttgtttgcatagctcacacatcactggaatgtggaaaagtgtgctattttttggcaagagcaaaggagacattaaactgaagtgaattaccatgttggacatgctgaatccatgcagaacactggggcgaaggctgctacctgacatcattggtttttgtatactggttttgtttttgttgaagcagttctgttatagccagaagctttttcaatacgtgctagacagaggaaaaatggtatgaaaataaatgaaagctcggtcagcaatttcaggatggg

SEQ ID NO: 44698 - DNA, 383 bp, Homo sapiens
gaggatacaaatcttttcctcacaaagctgttgtttgatttctcctggtcccatagtggactgttaacggggtccagtgtagcgtgcacatcctgggtgctgaatctcacttcagtgttgacccccttggggttagcattcagtccttgtatatttagagaatgtcaatgttttcccagacatggtatcaataatggtagttgtcagcagtatcttagccctttctacattttttctcccacttctggaaggattcttgggtataacctaacccaaagaaaagtggcatgtgctgaaactgagtgtcacagagctgtgaggttgggtctttgggattagcttcattttccagggtttgccctttgcccttcaaccaaaggaca

SEQ ID NO: 44699 - DNA, 388 bp, Homo sapiens
cggacgcgtgggtcgtgaagctcgtgatgtatttgcccaagtaagagaagcaacagcagatattagtgatgtgtggctgaacttagcacacatctatgtggagcaaaagcagtacatcagcgccgttcagatgtatgaaaactgcctccgaaagttctataagcaccaaaacactgaagttgtactctatttggcccgggccctcttcaagtgtggcaagttacaggaatgcaaacagactttgctgaaggctagacatgtggcacccagtgatacagttcttatgtttaatgtggccttggtcctgcaaagattagctacctctgtcctgaaagatgaaaaaagtaatctgaaggaagtacttaatgctgtgaaagaactggagctt

SEQ ID NO: 44700 - DNA, 381 bp, Homo sapiens
cccacgcgtccgagtaaatgcagtggcatgctaagtacccaaataggagtgtatgcagaggatgaaagattaagattatgctctggcatctaacatatgattctgtagtatgaatgtaatcagtgtatgttagtacaaatgtctatccacaggctaaccccactctatgaatcaatagaagaagctatgaccttttgctgaaatatcagttactgaacaggcaggccactttgcctctaaattacctctgataattctagagattttaccatatttctaaactttgtttataactctgagaagatcatatttatgtaaagtatatgtatttgagtgcagaatttaaataaggctctacctcaaagtcctttgcacagttta

SEQ ID NO: 44701 - DNA, 388 bp, Homo sapiens
tggacgcgtgggcttcacagtaaatatgtcaaaggtagagacaggtcttcatgtgtgagaaagtatagcgagagcagatcatctttagattattcttcagacagtgagcagtcaagtgttcaggccacacagtcagcccaggaaaaagagaagcagggccaaatggaaagaacacataataaacaagaaaaaaacagaggtgaagaaaaatccaagtctgaacgggaatgccctcattcaaaaaaaagaactttgaaagagaatctttctgatcaccttagaaatggcagtaagcccaaaaggaagaattatgctggtagtaaatgggactctgagtcaaattcagaacgagatgtcactaaaaacagtaaaaatgactcccatccat

SEQ ID NO: 44702 - DNA, 380 bp, Homo sapiens
cccacgcgtccgaccaggcttgggggactcaggcattcagtcaacaccaggctcgggccatgcccctcgtactagttcctcctcagatgattcaaagagatcacctttgggcaagactccactgggacgcccagctgtcccccgttttggcaagccagatgggctaaggggccggggagtagggtcccctgaaccaggcccaacagccccatacctgggccgatcgatgtcttacagcagccaaaaagcccaacctggtgtctctgagacagaagaagtggccttgcagccattactgacacccaaagatgaagtacagctgaagaccacctacagcaaatccaacgggcagcccaagagcttaggctcagcctcccctg

SEQ ID NO: 44703 - DNA, 387 bp, Homo sapiens
ccagaagcggtgcgaggccttcggttggcatgccatcatcgtggatggacacagcgtggaggagctgtgcaaggcctttggccaggccaagcaccagccaacagccatcattgccaagaccttcaagggccgagggatcacgggggtagaagataaggagtcttggcatgggaagcccctccccaaaaacatggctgagcagatcatccaggagatctacagccagatccagagcaaaaagaagatcctggcaacccctccacaggaggacgcaccctcagtggacattgccaacatccgcatgcccagcctgcccagctacaaagttggggacaagatagccacccgcaaggcctacgggcaggcactggccaagctgggccatgc

SEQ ID NO: 44704 - DNA, 381 bp, Homo sapiens
caaggtctaggtctccatcatctagatctcattcacgaaataaatacagtgatcattcacagtgtagtagatcatcttcatatacttctattagcagtgatgatggaaggcgagctaagaggagacttagatccagtgggaaaaaaaatagcgtttcacataaaaagcatagcagcagctctgaaaagacacttcacagtaaatatgtcaaaggtagagacaggtcttcatgtgtgagaaagtatagcgagagcagatcatctttagattattcttcagacagtgagcagtcaagtgttcaggccacacagtcagcccaggaaaaagagaagcagggccaaatggaaagaacacataataaacaagaaaaaaacagaggtg

SEQ ID NO: 44705 - DNA, 379 bp, Homo sapiens
gggctcacctgcgccccagaccctgcaggggcccccctgcttggctctgctgggagagtgctcagccgcccagtcctgcctgcaagcccagggcgagtattggaggaggggcagccacgggcagagcaccatgcccatccccgagtctctggtgtgtctgccccctctggcatcctctgggcgtcccatgatcccttctgtgtctgcgtgtccgaatccccgtgtgaccctgtcccagcattttcccgccgaccctgcgtgtccccgtggcgctgtccgctctccctctcctgctgcccacccacctgccagtgttatttatgctcccttcgtgggtgatggccacgccctcaccatgtccctggcagagggcttccct

SEQ ID NO: 44706 - DNA, 374 bp, Homo sapiens
gggctcacctgcgccccagaccctgcaggggcccccctgcttggctctgctgggagagtgctcagccgcccagtcctgcctgcaagcccagggcgagtattggaggaggggcagccacgggcagagcaccatgcccatccccgagtctctggtgtgtctgccccctctggcatcctctgggcgtcccatgatcccttctgtgtctgcgtgtccgaatccccgtgtgaccctgtcccagcattttcccgccgaccctgcgtgtccccgtggcgctgtccgctctccctctcctgctgccacccacctgccagtgttatttatgctcccttcgtgggtgatggccacgccctcaccatgtccctggcagagggctt

SEQ ID NO: 44707 - DNA, 362 bp, Homo sapiens
  misc_feature (1)...(362): n = a,t,c or g
gatttcataagcaatgtaattgtttttgaataggaggagcactgtatgacgaaaaaggcaatttaaggagatatgtttgccatgctgctctggatgctgtggcagtggagaagtaactcggtggggaggtcagctaggaagggtgtgtttaattgatctgtgtagtggctaattcgtaggacccgcttgggctcagctgctgacctggaaataagaaagtgggagggaattatgacagggcttggtggttgaccagacaaagacaaaggaatggtgtaaacactgaagagtggtctgatggttctgtttgctgaagaaaaaaaaagtggttaaaggactattgaaatcanagaaggggattt

SEQ ID NO: 44708 - DNA, 376 bp, Homo sapiens
  misc_feature (1)...(376): n = a,t,c or g
gaacagagttcatggcttttcctgaggtggctggaaaccttaatctcctgaagttaagtcaaaacttaaatgtcaattcacccagctctcttgcctgcaggctgatccagggacttagagcttgttacccagttacaacttcttctagagaagaacttttaagaaggaagcaaaaagaaattcagtttcccccaaggatctcttctttgaggttccatcaagagatgnnnnnnnnnnnnnnnnnnnnnnnnnnnnnnnnnnnnnnnnnnnnnnnnnnnnnnnnnnnnnnnnnnnnnnnnnnnnnnnnnnnnnnnnnnnnnnnnnnnnnnnnnnnnnnnnnnnnnnnnnnnnnnnnnntgcaaaaattagctgggca

SEQ ID NO: 44709 - DNA, 367 bp, Homo sapiens
cccacgcgtccgcccacgcgtccgagaaaggatattaatatttttgttttttaatccagtcacttcaaacctcatgcttcaattgacaaaatagatttgttgactgctaacataatctagtatgtgaaaagaaattagaattatttttataccacacattatcagttaagattttctatataattaattaggaacaagcaattttaacaaaaatgagtagaagagaacggtatttgttatagcacagttattccctatacgcttatctgctggactcttaagaattggtacatttgcattgtggggtagaccagcaccatgatgcacaaatttggctgaactctacaggggagcagcagtgtatcca

SEQ ID NO: 44710 - DNA, 376 bp, Homo sapiens
  misc_feature (1)...(376): n = a,t,c or g
cccacgcgtccgnnnnnnnnnnnnnnnnnnnnnnnnnnnnnnnnnnnnnnnnnnnnnnnnnnnnnnnnnnnnnnnnnnnnnnnnnnnnnnnnnnnnnnnnnnnnnnnnnnnnnnnnnnnnnnnnnnnnnnnnnnnnnnnntcagttaaaatctttaacaataaagcaattttgagtcgtattttgcgacattctcaatatagttttccaacttgcattaaaatacattttaaacatttttgaagactaaatttatttttttaactgacatttatgtttcatttgacaaccttttgctgtatattttatgtggacttttaggtattgtagtgattcctttaatgaagaaataaaataattgncatttaaaaatgcat

SEQ ID NO: 44711 - DNA, 376 bp, Homo sapiens
  misc_feature (1)...(376): n = a,t,c or g
cggacgcgtgggctctacaaggccaaaaattttttttcttatctacctgttatattgtgctaatttttctatgtatgtgatgtgaaatgaagactatatatatggaatggaggtgacagacagaaagaaattctttgtttgagggagacttcccctttctggattgtatttgtagagtgttacgagtgtatcatgtgattatgctttaccggtataagagattctgttgtgattatttgaatagttttatattaataaaagaagacaaaattttttaaatgttagaaaaagcagatctgtcattgcaaagtancnaaaattttaagcttttaaaaatgtagatttttcatatttttaaaatttgaatctatttgac

SEQ ID NO: 44712 - DNA, 371 bp, Homo sapiens
cccacgcgtccggagaagttgttggcgcgaatggatcctgagcctcgataacagattcctcaaccggcccacccgccagccagccagcgccttcatcctggggctgcgatggacattcggaaattctttggagtaataccaagtggaaagaaacttgtaagtgaaacagtaaagaagaatgagaaaacaaagtctgatgaagaaactttaaaagcaaagaaaggaataaaggaaatcaaggtaaatagctcccgtaaagaggatgacttcaaacaaaagcaaccaagcaagaaaaagaggatcatctatgattcagattcagagtcagaggagacgttgcaggtaaaaaatgccaaaaagccaccagaaaa

SEQ ID NO: 44713 - DNA, 393 bp, Homo sapiens
gcctggcacagtggcttacacttgtgatcccaacattttgggatcacagaaatcagtgtagctagtctttcagatttatcgtggccagaggctgtgctcactagagtcaagggaagctgctttacagtccacacagagctggaggtaccaaaattctgggacagtggagagaactgagcaaagcaacaggccctggtcataagcttggcagaggcctgctcagctactcacactcatggctagaaccagcaagtgactgcagtggtctcgcccagtttaggaagcatttagggcagattgattctagctccataccatggcagcagcttgtggagactactaatcatccagtgcctggcaaagtgtatttcattcatataatgatcctatgag

SEQ ID NO: 44714 - DNA, 393 bp, Homo sapiens
cacagactcagagagaacccaccatggtgctgtctcctgccgacaagaccaacgtcaaggccgcctggggtaaggtcggcgcgcacgctggcgagtatggtgcggaggccctggagaggatgttcctgtccttccccaccaccaagacctacttcccgcacttcgacctgagccacggctctgcccaggttaagggccacggcaagaaggtggccgacgcgctgaccaacgccgtggcgcacgtggacgacatgcccaacgcgctgtccgccctgagcgacctgcacgcgcacaagcttcgggtggacccggtcaacttcaagctcctaagccactgcctgctggtgaccctggccgccacctccccgccgagttcacccctgcggtgcacgc

SEQ ID NO: 44715 - DNA, 367 bp, Homo sapiens
  misc_feature (1)...(367): n = a,t,c or g
catgaattaccaaggatccataaagctaccagctcctcgcgaagtgaacctgaagggcggaaaggcactatttcacaatattttactaccttacactgtcctgtgtgtgatgacctaactcagcatggcatctgtagtaaatgtcggagccaacctcagcatgttgcagtcatcctcaaccaagaaatccgggagttggaacgtcaacaggagcaacttgtaaagatatgcaagaactgtacaggttgctttgatcgacacatcccatgtgtttctctgaactgcccagtacttttcaaactctcccgagtaaatagagaattgtccaaggcaccatatctccgcagttattanaccagntttaaat

SEQ ID NO: 44716 - DNA, 373 bp, Homo sapiens
catgaattaccaaggatccataaagctaccagctcctcgcgaagtgaacctgaagggcggaaaggcactatttcacaatattttactaccttacactgtcctgtgtgtgatgacctaactcagcatggcatctgtagtaaatgtcggagccaacctcagcatgttgcagtcatcctcaaccaagaaatccgggagttggaacgtcaacaggagcaacttgtaaagatatgcaagaactgtacaggttgctttgatcgacacatcccatgtgtttctctgaactgcccagtacttttcaaactctcccgagtaaatagagaattgtccaaggcaccatatcttccggcagttattagaccagttttaaatgtca

SEQ ID NO: 44717 - DNA, 352 bp, Homo sapiens
  misc_feature (1)...(352): n = a,t,c or g
ctttccagtaggaagcttccagagatatttctttaggaagtaatggtttttgtagtggctttataggagaatacaaatttttaagtggagctaagagagaaatcttaaacatcaagagaaaccaaggaaaacagtaggtgtggtatcaatataggaaacaaataagtatttgtagcttttatgtccattttcagttgtcatttaaagaggtatagttcagaatagctcttgttaaggctgncactgcttgnggatacattgnacaaatgcttataaatcatttccaaactannanaagnttgctnnatgnnnnnnnnnnnatannnngnntnngncntngnntnnnnnggct

SEQ ID NO: 44718 - DNA, 366 bp, Homo sapiens
ctttccagtaggaagcttccagagatatttctttaggaagtaatggtttttgtagtggctttataggagaatacaaatttttaagtggagctaagagagaaatcttaaacatcaagagaaaccaaggaaaacagtaggtgtggtatcaatataggaaacaaataagtatttgtagcttttatgtccattttcagttgtcatttaaagaggtatagttcagaatagctcttgttaaggctgtcactgcttgtggatacattgtaacaaatgcttataaatcatttccaaactaatagaagtttgcttcatgttagttagtattataaaagcctctgacccttggcttttgaggctgtgtagagggct

SEQ ID NO: 44719 - DNA, 371 bp, Homo sapiens
ggaaaaggtactatgtgatatggtactgaaattttgatcccaatagaattcatttctcttacgttgaatccccaatcataattaagccgtatacacagattaaattaacagaagcatttcacataaatgttggtttcagtcatcaactacccatgaattcctgcccaaggatacttaatcaggattaaattttctatgaataattgaaaaacaaaacactcactggatttgttataatccgtgttggcactggattctaagtagttgccatcttgaatcctttgtaataaagccatacttttgtgtgtgtgtgtgatgccccagtattgagtatgctagctaaaaaatatcaagtgcctgattaaagaatg

SEQ ID NO: 44720 - DNA, 351 bp, Homo sapiens
  misc_feature (1)...(351): n = a,t,c or g
ggaaaaggtactatgtgatatggtactgaaattttgatcccaatagaattcatttctcttacgttgaatccccaatcataattaagccgtatacacagattaaattaacagaagcatttcacataaatgttggtttcagtcatcaactacccatgaattcctgcccaaggatacttaatcaggattaaattttctatgaataattgaaaaacaaaacactcactggatttgttataatccgtgttggcactggattctaagtagttgccatcttgaatcctttgtaataaagccatacttttgtgtgtgngtgtgatgccccagnattgagtatgctagctaaaaaatatc

SEQ ID NO: 44721 - DNA, 365 bp, Homo sapiens
  misc_feature (1)...(365): n = a,t,c or g
ggaaaaggtactatgtgatatggtactgaaattttgatcccaatagaattcatttctcttacgttgaatccccaatcataattaagccgtatacacagattaaattaacagaagcatttcacataaatgttggtttcagtcatcaactacccatgaattcctgcccaaggatacttaatcaggattaaattttctatgaataattgaaaaacaaaacactcactggatttgttataatccgtgttggcactggattctaagtagttgccatcttgaatcctttgtaataaagccatacttttgtgtgtgtgtgtgatgccccagtattgagtatgctagctaaaaaatatcnngtgcctgattaa

SEQ ID NO: 44722 - DNA, 348 bp, Homo sapiens
  misc_feature (1)...(348): n = a,t,c or g
ggaatatttactgggcctctccgctccctctgctcttggaggtgccatgaggtcagttagctacgtgcagcgcgtggcgctggagttcagcgggagcctcttcccgcacgcaatctgcctcggagacgttgataacgatacgttaaatgaactggtggtgggagacaccagcgggaaggtgtctgtgtataaaaatgatgacagtcnggccatggctcacctgttcctgccagggaatgctgactngcgnngcggtnnnagacctntgtantanagnacagancntttcnccnnnngnnanncngnctgtctntantactngnanganttttncaantannncncttt

SEQ ID NO: 44723 - DNA, 386 bp, Homo sapiens
gccgagcgagttagtgtcagccgagggccgaaacccggaaggcggtgctgtgccagcgttgcggctcccgggtgctgcaggcagggaccgctctcttctctcgccgacagcttttccttccctccatgagaaagaagccagctctgtctgacggcagcaatcctgacggcgatctcctccaggaacactggctggttgaggacatgttcatttttgagaatgtgggcttcaccaaggacgtgggcaacatcaagtttctggtctgcgcagactgtgaaattggaccaattggctggcattgcctaatgacaagaacagtatctatgtggccttggaacgagtttcccatgagtaactgaggggaggggtactcagctccatctcca

SEQ ID NO: 44724 - DNA, 328 bp, Homo sapiens
  misc_feature (1)...(328): n = a,t,c or g
tccatctcaaacaaacaaacaaacagcatgaagaaacaatgggaactcatactattactatttaaatcttatttataccccagtgtttcttcatgnnnnnnnnnnnnnnnnnnnnnnnnnnnnnnnnnnnnnnnnnnnnnnnnnnnnnnnnnnnnnnnnnnnnnnnnnnnnnnnnnnnnnnnnnnnnnnnnnnnnnnnnnnnnnnnnnnnnnnnnnnnnnnnnnnnnnnnnnnnnnnnnnnnnnnnnnnnnnnnnnnnnnnnnnnnnnnnnnnnnnnnnnnnnnnnnnnnnnnnnnnnnnnnnnnnnnnnnnnnnnnnnnnnnnnnnn

SEQ ID NO: 44725 - DNA, 319 bp, Homo sapiens
  misc_feature (1)...(319): n = a,t,c or g
gtaaaatatcgctcttctgtttaaaactctctttaccctcagttcctactatctaacttggcttacaagacattttatgatctaaccacccacttcctgcttccctctttagtctcatgtcatccatatatggatctctagctcttctaggnttcctaccctattatcacaagaacaactaaaaagaaccaagaacagagctttggggaatgacacacacttacggggcagaaagaagaaaatactatgataaagatttttttttaaagagggatgggataattaaagataanggaanaaaaccagggtaatagagcat

SEQ ID NO: 44726 - DNA, 321 bp, Homo sapiens
  misc_feature (1)...(321): n = a,t,c or g
attccaaagttctgtatttttcaaaataaagatcacacattgtttagagacaatctacacaagagttacaaaaaatagttgcccaggcataagcatacacaggtttgttaattatacacatatggttacaagtgtgcttgcaaaaaagttcattggaaatatacacaaggctctggaaatgtacaccgtgtagtgttacaattctatattcaaacaaggaaaatgtcgacgcttcttntatnccnctnncnnntnnnacncntctntccnacaanctnnncctctancnannantnctganntntccnncnccnntntttc

SEQ ID NO: 44727 - DNA, 417 bp, Homo sapiens
  misc_feature (1)...(417): n = a,t,c or g
nnnnnnnnnnnnnnnnnnnnnnnnnnnnnnnnnnnnnnnnnnnnnnnnnnnnnnnnnnnntctcgaggatccgaattccnnnnnnnnnnnnnnnnnnnnnnnnnnnnnnnnnnnnnnnnnnnnnnnnnnnnnnnnnnnnnnnnnnnnnnnnnnnnnnnnnnnnnnnnnnnnnnnnnnnnnnnnnnnnnnnnnnnnnnnnnnnnnnnnnnnnnnnnnnnnnnnnnnnnnnnnnnnnnnnnnnnnnnnnnnnnnnnnnnnnnnnnnnnnnnnnnnnnnnnnnnnnnnnnnnnnnnnnnnnnnnnnnnnnnnnnnnnnnnnnnnnnnnnnnnnnnnnnnnnnnnnnnnnantgggagntaaagntgctcacagagaaattcgaactctccaggntcttcagnggcaggccttttcctacc

SEQ ID NO: 44728 - DNA, 178 bp, Homo sapiens
  misc_feature (1)...(178): n = a,t,c or g
cagcaatgtatgaattagggcataatctcttttttttttttttttttaaaaanagtntaatttngnngccaaggcngnagggaagggncccnacccnggntaanngaaannttngcntccnggntananannattttccggggcaanaaaacaaaactcngtncaaaaaaaaaaaaaa

SEQ ID NO: 44729 - DNA, 305 bp, Homo sapiens
  misc_feature (1)...(305): n = a,t,c or g
nnnnnnnnnnnnnnnnnnnnnnnnnnnctacatgagccactgcggctgccttaactccctgcttttaaccactctgctgtattgcttcccaattacaaaggactgaccttcaaaagtagagacctacagagctgtctaaatataaaaattaaaataattttggctgggcacggtggcttatgcctgangactaatancnnatttgnggnnntgannntgnnnntatcttanaagacttatgnnttgggttncntgttttntgattttnaaangccnanatttganntacagnnaatgtnttaaag

SEQ ID NO: 44730 - DNA, 319 bp, Homo sapiens
atacagacacctgcacacacacaacacatgtaccacatgcacatatacacaaacacacacacatcaatttcagttttccaaggaaagttattaaacttctgctgcctgatctcaccggtctattccaaaacctagtacaagatgttatctgatatagcacaaaagtcacttactttaatctaaaatcaaaactgtcatgaagttctgtggaagacatcatgatccctaaacattttgaactatttgacaaattagcagacataaaaatcctacccaaaacgaatctggaagactgtaaattaaaatttactttgaaatg

SEQ ID NO: 44731 - DNA, 296 bp, Homo sapiens
  misc_feature (1)...(296): n = a,t,c or g
gttcaggttgttgaggccatccagcccttgccgttcttttgacttcctcagcagagcataccttccaagaaactggacttctcctcgatggtgatgaggaatggacttggactttcctgtgtgnacnctntgnncggcttacanaanagcctgnattctgnnctctgttccanaggtcgtcatcttctccaccccnacncanaaagcattatgaaagncatngattntccgnanttgtatccactgtctgcnngttcactgncgcctnanaacttgggatcccggaataatgatac

SEQ ID NO: 44732 - DNA, 309 bp, Homo sapiens
  misc_feature (1)...(309): n = a,t,c or g
caagactgtgcccactttctgtgccaatggcaagcctcaggttgttttacctgtgcttctgaccggccacctataaatcaaagttcccgtgacctccctccttggctttgattaatttggtcacaaaactcaaggaaacatgtttactggtttattataaaagtattttattttgtgtatttatgtattnnnnnnnnnnnnnnnnnnnnnnnnnnnnnnnnnnnnnnnnnnnnnnnnnnnnnncttatcgtgaggtttgggtttctaatgattccgttgcccaaacagtgaacacagtatccaacaggt

SEQ ID NO: 44733 - DNA, 182 bp, Homo sapiens
gtcaagggtaccaagctcttgatggcatctttggttaagcacttaggcgtaagaacatgccttagatagatcatgcaggggctaatcagagttacctgtattaagaatttgcattatcttctattttattagttggagataaagaataattggtaactgattcatcaatttttttttttttt

SEQ ID NO: 44734 - DNA, 204 bp, Homo sapiens
gcagtgacctcagagaagaaatctcctattgtagtttctatgatatacgttagggtagcttggctgctgagaatttgctgattctcctgggcccttaatgagctctcaagtgccagggtacactgactggaccactacacactccttgcacactataggctttgtaggcaaatggataatctgattatacaaaaaaaaaaaaaa

SEQ ID NO: 44735 - DNA, 321 bp, Homo sapiens
  misc_feature (1)...(321): n = a,t,c or g
tggannnnnnnnnnnnnnnnnnnnnnnnnnnnnnnnnnnnnnnnnnnnnnnnnnnnnnnnnnnnnnnnnnnnnnnnnnnnnnnnnnnnnnnnnnnnnnnnnnnnnnnnnnnnnnnnnnnnnnnnnnnnnnnnnnnnnnnnnnnnnnnnnaagaaaatagtagtttagagctagctgagaagagctcttaacagaacagaactgataaggcgtgagtgttcccagagcacttattctctggccagctcatgtgtgtgacaatggcctggcactgacggttgtcacggcaagcccggctgtggctttgacacccatctaactt

SEQ ID NO: 44736 - DNA, 317 bp, Homo sapiens
gttaaaataccaggaataaaaaggttttcagtggacttgatttaagtggaatctggatgatgtgacaagtacctttgtctttggagtaatgagtttataattggcttttgtccaaaaactcttaagtggattaatatctgaacaatcttagacataattatatgaaactggatcagaaaggctttctgactcctttctcttcacttttttctcccagcttaactagaggcaattaacagtcttttcaaatctaattatttttattttccagtgtacttatcatcctttcatctttatgctaggagtatagtctcagt

SEQ ID NO: 44737 - DNA, 308 bp, Homo sapiens
  misc_feature (1)...(308): n = a,t,c or g
ttnnnnnnnnnnnnnnnnnnnnnnnnnnnattttgtcacatttgtaagttcatgtatccatcatcacagttaagaaacagcaccgttccatcacctcaaggagccctcgtgttaactgttttataacaacatctaccctatcccctcccatctcctgccacattcattcctaactcctagaagccactaatctgttctccatttctaaaatgtttgcttttcaaactattataaagttggaatcatagagtatgtaacttttaggactggcctttttcacttaggataatttcactgagattcatcga

SEQ ID NO: 44738 - DNA, 320 bp, Homo sapiens
  misc_feature (1)...(320): n = a,t,c or g
nnnnnnnnnnnnnnnnnnnnnnnnnnnnnnnnnnnnnnnnnnnnnnnnnnnnnnnnnnnnnnnnnnnnnnnnnnnnnnnnnnnnnnnnnnnnnnnnnnnnnnnnnnnnnnnnnnnnnnnnnnnnnnnnnnnnnnnnnnnnnnnnnnnnnnnnnnnnnnnnnnnnnnnnnnnnnnnnnnnnnnnnnnnnnnnnntgaggagctcaattcaatgctgaaatgaggatccactttggagggagctacagcagaactgagtccagataagagaacccgtctcgaatgcagaggaagttgaccanggcttgaaangcaggtcatt

SEQ ID NO: 44739 - DNA, 331 bp, Homo sapiens
tataagcttaacatactattttcccctaaagttatttcactgctcttgcctatacactgttcctttctgccaattagcccactcctggtgccttctcacatgctagcgtgttcctattagcatttcacatccccaaagcatttaacagtatgtataaatgtggacacttcaatattgcccatatcctccctcagaccactcagaaatatttaaaataagaccagtccctgaatggatgggggagaagggaccgctgttttgtttcttgctaaattagtttctcattagggacaaaatgttgccctgtcttctccccatgcccagagccagg

SEQ ID NO: 44740 - DNA, 330 bp, Homo sapiens
  misc_feature (1)...(330): n = a,t,c or g
gaaaacatttccttaagttccagtaacaaactatttaaagatagataactccttgtgcctactatcataatagtaatctagctgctagctaagcccttttctatttgagaatataagttatttgtaagtgtgcttggaacaaaaaccaataaaaagatcaatttttaacatttgtgacaattatattgtcattttctttctacaaaagtaatttatattccatccattaaaagaggagtttgtcagatctgcacgattctgcattcttgtgctttcagcagtctaacacacttttaacanttntctgcannagcttttctttatacttca

SEQ ID NO: 44741 - DNA, 331 bp, Homo sapiens
  misc_feature (1)...(331): n = a,t,c or g
nnnnnnnnnnnnnnnnnnnnnnnnnnnnnnnnnnnnnnnnnnnnnnnnnnnnnnnnnnnnnnnnnnnnnnnnnnnnnnnnnnnnnnnnnnnnnnnnnnnnnnnnnnnnnnnnnnnnnnnnnnnnnnnnnnnnnnnnnnnnnnnnnnnnnnnnnnnnnnnnnntttcaaaaatccttaatttatgtatttttttttgtgctgagatgaaattcatataacagactattttaaagtatacagttcagtggcacttattacattcatgatgttgtacaactctagttccaaaacattatcacctcaaaagaaaaccttctgttcattagcagtc

SEQ ID NO: 44742 - DNA, 235 bp, Homo sapiens
tgtaggctttgacatatgtaagttttaattggatcagatttagtctatttgatccccactgcacctcaatttaaaacatatttaaaatagagataatatctacctaacagagttgtaatgatgaatgaggtgacgtatttagagcagctagtgctaagtattgaatagttaactatttgaaaataataactacctcttcccttttaccctgccaagattgctttttttttttttt

SEQ ID NO: 44743 - DNA, 337 bp, Homo sapiens
tgggcatccatgatacttcccctgcaaatgctgttgtcctgggtagacctcctgggcctctctggggaaaccagttagcccacagcctgatgcatctgtgtcttgctttcagagtgtgtgagctggaggagctgggagagctgtccccttgctgggagagcctccggcgccaaattgtcacccagtaccagaccatcatcctcacataccaggagaacctgaccgacctccatcagtacagagggccctcgtttaaagcaagcagtttgaaagcagataaaaagttagaatttgttcccacaaacttgcacatacaaaggatgagagttcaagacga

SEQ ID NO: 44744 - DNA, 331 bp, Homo sapiens
ctttgctatagtacctgctaaaacttcaacgtgtggataaatatagcttacattgaatcgaatagactcagcgagagtggcagtgaaggatgccctctggaagattcgaggtgctgaggccaaagggctagcaaggaaagagcgtgcgggtcaggcccttcagcctggtggaagagcaggcagggagggtcctatggttcctgggaggacccgaagcatgatcgcctgtcaagagccaagagccctaatggccagcgccggggaaagggcccccgaggggcaagtcagcagccctgcaggggcggcgtccacactcctgtgtggcacggga

SEQ ID NO: 44745 - DNA, 337 bp, Homo sapiens
ctgttttgtagatgaggaaactgaggcttcagtgtatttactagcttgcccaagggctgtgagttggccactctaaatcccatgagctgagccactatgctagagtgatactatatgatactagcatgaaaaaataaaaagccacaaatctctattttcttacagagctgaaaaaggagagaaggaaggatttgataatttgtcatttgctttttatctaaacatgctttttgaagagaatctgccaccataaagttctgacattggtgtaattattctttgtgaatattgtctggaagatgtggtgttggtaactatgcttgctatctcaagtaat

SEQ ID NO: 44746 - DNA, 437 bp, Homo sapiens
  misc_feature (1)...(437): n = a,t,c or g
ccttganggcnnnnnnnnnnnnnnnnnnnnnnnnnnnnnnnnnnnnnnnnnnnnnnnnnnnnnnnnnnnnntctcgaggatccgaattccnnnnnnnnnnnnnnnnnnnnnnnnnnnnnnnnnnnnnnnnnnnnnnnnnnnnnnnnnnnnnnnnnnnnnnnnnnnnnnnnnnnnnnnnnnnnnnnnnnnnnnnnnnnnnnnnnnnnnnnnnnnnnnnnnnnnnnnnnnnnnnngnnnnnnnnnnnnnnnnnnnnnnnnnnnnnnnnnnnnnnnnnnnnnnnnnnnnnnnnnnnnnnnnnnnnnnnnnnnnnnnnnnnnnnnnnnnnnnnnnnnnnnnnnnnnnnnnnnnnnnnaaagtgtctgaataagaattttaaaaatttccaagcactttttcatattctgnatttcacttgaccctccagctgaatgatgga

SEQ ID NO: 44747 - DNA, 332 bp, Homo sapiens
gcaagttatgccctaaagtgctggtgatgaagagcaaaagaaaaatgagaaaggacataaaatagataagtttagaagtttcaaggaaggagactattaattgcaaaaatataaatgacctaatgtgacccaagaagtaaaaactttcagtaggtaaataatcaagaaaggaacttaaaatttttacaataagaactacccagaaagatgactccttcatccgggtgatttatatgtcaagttcttccagacttctgaagggcagataattcctgtgcatttcttcccacccttgccccaccctgcccaaaagagtatttcaggaaaaaatt

SEQ ID NO: 44748 - DNA, 331 bp, Homo sapiens
  misc_feature (1)...(331): n = a,t,c or g
tggagactgacttaatcaccaacagccaaaggttttatcaatcatgcttgcataataaagcctccataaacaccctgaaaggggtttgcagagctttcagggttgctggacacaggagatgctgggagggtcgcatgttcaacagagggcatgggagctctgtgcccctccgaacttaacttgccctgggnnnnnnnnnnnnnnnnnnnnnnnnnnnnnnnnnnnnnnnnnnnnnnnnnnnnnnnnnnnnnnnnnnnnnnnnnnnnnnnnnnnnnnnnnnncagtccccagctcaaggtatcctcccatctcagcttccccagtagccgga

SEQ ID NO: 44749 - DNA, 315 bp, Homo sapiens
aagaaaacaagagagagagactttctcttcagcagaaggcacagttgataaagacacgaccatcatggaattaagagatcgacttcctaagaagcagcaagcaagtgcttccactgatggtgtcgataagctttctgggaaagagcagagttttacttctttggaagttagaaaagttgctgaaactaaagaaaagagcaagcatctcaaaaccaaaacatgtaaaaaagtacaggatggcttatctgatattgcagagaaattcctaaagaaagaccagagcgatgaaacttctgaagatgataaaaagcagag

SEQ ID NO: 44750 - DNA, 310 bp, Homo sapiens
  misc_feature (1)...(310): n = a,t,c or g
aaatcatatattatacgtgggaagaagaggaggcaatgaaattatgtcttaaaacatttctggaaagactgantatattaacngnngnnntntcccagnttagctnntgnngaattctncnngngnntnttccctatctcctctatattaagantgacntttntgcagcatttttncctctgacattttacntancataaannatnccaanntcttgcacnatnngtggnagtnntntcatggattacgncnntacatagntgcctagntttttnccnaccagnttaataanacccttgtagancttgat

SEQ ID NO: 44751 - DNA, 313 bp, Homo sapiens
ctcaggaacaacagataacctcaacagccctatatctactggagaaaattcatacttaaaaaccttcctgcaaagaaaattctaggctccaatggtagaactcttatctgaagaagaaataataccagttctatcaaactcaccgagaaaattaaagaagagagaatacactgtaactcaatctacaaggccagcattaccttgctaacaaaggtagacagtgatattcattaaaataaagttagagctatttatccctcttgaacatagatgcagaaattcttggaaaaactcagcaaatcacatacaacca

SEQ ID NO: 44752 - DNA, 313 bp, Homo sapiens
aaaatattcacagtaagtctgagtgaagtttgctgtgattccatttaatttgcaagtttcatgtgtgaaagtatgaaaaaaacaatcctcggtattgtgaactaaaaccaagtagtacaaaaggtcagtgatgaaagagctaaggccaaagaatacagttaatgtagtttttgcagaggatacttatgtagacagagcaccctcacattccttgagcatttactatgcaccaggcactgtagattacacaggatgacaaggtcatctctctcctgtttatattccagaagtagctcctgtttgtattccagag

SEQ ID NO: 44753 - DNA, 311 bp, Homo sapiens
tttttttcatgtaattatttcacaaggggtaatcgcttgggaatctttaccctacagaaatattacaagtgtaattgagaggatctggggaaaaaaaatcagtactctctctaaaaataaatttaatgaatcaaactctactcctataaatgtgtttctcaaactggaactctaagtccctcagaatatggccagagatggagtgatttgttcattacttctaggaagggtattcaacaattaatatggcttggacctcccccttccgccatggctggaccttgtcccccacataacttcagaccctcctt

SEQ ID NO: 44754 - DNA, 312 bp, Homo sapiens
cgagccccttggtattgagaactgacttgaaaggacaggagcgactcccccagcccccaaatggaagagaagccaattccttttcaggacctttagaggagaaaacttcatatcttcccttagcaaaacactacagcaacaattgcgcctagaattttgtttcaacggtactgaaatacttggttttgtattactcatcttctttcaggtaattcttatccatgtgtaaccaagactctccatgcttctgcatctgttactgcatgtaagatctagctacctccttatggcatgaaacactaaaatgtaaag

SEQ ID NO: 44755 - DNA, 311 bp, Homo sapiens
  misc_feature (1)...(311): n = a,t,c or g
nnnnnnnnnnnnnnnnnnnnnnnnnnnnnnnnnnnnnnnnnnnnnnnnnnnnnnnnnnnnnnnnnnnnnnnnnnnnnnnnnnnnnnnnnnnnnnnnnnnnnnnnnnnnnnnnnnnnnnnnnnnnnnnnnnnnnnnnnnnnnnnnnnnnnnnnnnnnnnnnnnnnnnnnnnnnnnnnnnnnnnnnnnnnnnnnnnnnnnnnnnnnnnnnnnnnnnnnnnnnnnnnnnnnnnnnnnnnnnnnnncattgctgtttttattgggatcacattgaacttatactaacttatgaagaactgacatcttttttttgg

SEQ ID NO: 44756 - DNA, 310 bp, Homo sapiens
gttcactagcaacctcaaacagacaccatggtgcacctgactcctgaggagaagtctgccgttactgccctgtggggcaaggtgaacgtggatgaagttggtggtgaggccctgggcaggctgctggtggtctacccttggacccagaggttctttgagtcctttggggatctgtccactcctgatgctgttatgggcaaccctaaggtgaaggctcatggcaagaaagtgctcggtgcctttagtgatggcctggctcacctggacaacctcaagggcacctttgccacactgagtgagctgcactgtg

SEQ ID NO: 44757 - DNA, 312 bp, Homo sapiens
gaaaagctatttttccaatcatgatgaaagtctgaagaaaaatgatagatttatcgcttctgtgacagacagtgaaaacacaaatcaaagagaagctgcaagtcatggatttggaaaaacatcagggaattcatttaaagtaaatagctgcaaagaccacattggaaagtcaatgccaaatgtcctagaagatgaagtatatgaaacagttgtagatacctctgaagaagatagtttttcattatgtttttctaaatgtagaacaaaaaatctacaaaaagtaagaactagcaagactaggaaaaaaatttt

SEQ ID NO: 44758 - DNA, 301 bp, Homo sapiens
  misc_feature (1)...(301): n = a,t,c or g
ctgagcagggactctgcattnnnnnnnnnnnnnnnnnnnnnnnnnnnncttacaccnnnnnnnnnnnnnnnnnnnnnnnnnnnnnnnnnnnnnnnnnnnnnnntccagggatatgggaaagataaaaagaacatgtcaagcacttagaacagtggagaaagtgctcagtagctgttagctattattattccacccatgcaggggctgactatttgaatatccaagacaggccacgcagataccacatctcaacaatacaagagactgcaagaccccaccctggctggctctgcgtccctcc

SEQ ID NO: 44759 - DNA, 327 bp, Homo sapiens
  misc_feature (1)...(327): n = a,t,c or g
ctaaaaagaaaacccacatgctctgaacactagtcaaccccaaccttccctcacaaacacagtgatccccacggtcagcatgagagagaaaagccaaagaacaaatgggaagagacaggcacaggaacctacattctagctagtatacttagagacacttgagaagaactgcatccataaaataagactagatagctatgaaaaagagaaaannnnnnnnnnnnnnnnnnnnnnnnnnnnnnnnnnnnnnnnnnnnnnnnnnnnnnnnnnnnnnnnnnnnnnnnnnnnnnnnnnnnnnnnnnnnnnnnnnnnnnnnnnnnnnnnnnn

SEQ ID NO: 44760 - DNA, 219 bp, Homo sapiens
  misc_feature (1)...(219): n = a,t,c or g
gnnnnnnnnnnnnnnnnnnnnnnnnnnnnnnnnnnnnnnnnnnnnnnnnnnnnnnnnnnnnnnnnnnnnnnnnnnnnnnnnnagataattttcaacatatgtgtctcaagaattttaataattgggctgcatattattttgtgtgtaaaatttgttgtgctgttgatcctcatggatgttccataaaagtannnnnnnnnnnnnnnnnnnnnnnnnnnn

SEQ ID NO: 44761 - DNA, 320 bp, Homo sapiens
  misc_feature (1)...(320): n = a,t,c or g
nnnnnnnnnnnnnnnnnnnnnnnnnnnnnnnnnnnnnnnnnnnnnnnnnnnnnnnnnnnnnnnnnnnnnnnnnnnnnnnnnnnnnnnnnnnnnnnnnnnnnnnnnnnnnnnnnnnnnttaatttttatttannnnnnnnnnnnnnnnnnnnnnnnnnnnnnnnnnnnnnnnnnnnnnnnnnnnnnnnnnnnnnnnnnnnnnnnnnnnnnnnnnnnnnnnnnnnnnnnnnnnnnnnnnnnnnnnnnnnnnnnnnnnnnnnnntagcaatacactgttttgggtagtgcagaaaaatagctgctaattaatcaactaactca

SEQ ID NO: 44762 - DNA, 317 bp, Homo sapiens
aacgtactcctcctttttaaggttaacattttaaaatcttgttgagcgaaggggaggggactagcaaccatagctgcctctgtgtggataattttttggaaattgttgacttttgctttccacctttttactttatatctgttaatatggagatgaattttacacatttcaggcttaagttcttctaaatttgagttgaaagaaggcttacatttttccttacattttctttttccttctcaggattcattctctaggtttacaaaatggcttcctcttgcagctgaatttagacaaaaaaagtattaatctttcac

SEQ ID NO: 44763 - DNA, 321 bp, Homo sapiens
ggaattaagaagagaggataaagaagacaaccagaaaagaaataagaacattgcagtagtaagtccttaactaccaataagaacattaaatgtgaatggactaaattctccagtcaaaagacatagtgccttaatggattaaaaaacaaaaacaaacaaaacccacaagacccaactatatgctcctgcaagaaactcacttcatctatagattcacatagactgaaaacaaggaaatggaaaaagatacttcatgcaaatggaaaccaaaaaagagcaagagtagctatgcttatatcagaaaaaatagatttcaaaaca

SEQ ID NO: 44764 - DNA, 318 bp, Homo sapiens
aaacatggccgtcaccgacagcctcagccgggctgcgactgtcttggcaactgtgttgctcttggccttcggcagcgtggccgctagtcatatcgaggatcaagcagaacaattctttataagtggccatacaaacaactgggctgttctggtgtgtacatcccgattctggtttaattatcgacatgttgcaaataccctttctgtttatagaagtgtcaagaggctaggtattcctgacagtcacattgtcctaatgcttgcagatgatatggcctgtaatcctagaaatcccaaaccagctacagtgtttagtca

SEQ ID NO: 44765 - DNA, 318 bp, Homo sapiens
  misc_feature (1)...(318): n = a,t,c or g
nnnnnnnnnnnnnnnnnnnnnnnnnnnnnnnnnnnnnnnnnnnnnnnnnnnnnnnnnnnnnnnnnnnnnnnnnnnnnnnnnnnnnnnnnnnnnnnnnnnnnnnnnnnnnnnnnnnnnnnnnnnnnnnnnnnacccagatgagtatttttactgtgcactccatgtgatgccaggagaccactggtcttgatgacctctgatttttcatctctgatagaacacaagaacaaaccatattgagtactgagatgttagatattgccctttatacaaatgtctttcaaacatatgtcaggtttttaaaaaattctttttaaa

SEQ ID NO: 44766 - DNA, 317 bp, Homo sapiens
  misc_feature (1)...(317): n = a,t,c or g
nnnnnnnnnnnnnnnnnnnnnnnnnnnnnnnnnnnnnnnnnnnnnnnnnnnnnnnnnnnnnnnnnnnnnnnnnnnnnnnnnnnnnntttaacagcaatacggatatgccatgttcacttaaccaattgtggaactttaataagtacagccagccagattgtaggcagatgacactgagtaatagccaggtttgagaatcacagctctatgatgatggagtcttacctgtatcagtaaatgactgtatatcatatgtcaagtctatgttgacactttctgcattttctactctccgaaaaattatcccaaggaaccac

SEQ ID NO: 44767 - DNA, 173 bp, Homo sapiens
ttcacaccaaggctgttcatgaacctcagattaagaatacttgatttaggagattgaaaacagaaaagagaatgttaactatcattatcaatattaaaatgtgaaaatctgagagtgacaaagcttagctttaaatctggtatcccaaactcatttgagtttttttttttttt

SEQ ID NO: 44768 - DNA, 310 bp, Homo sapiens
cagcctttgctcttaaggagctcagagtttgatgaggctgatgtgagaagagctaggagcatagtgagatgacaggaacatagagaagtgatctcccatctcaggcaaagggagggctgggaagtggctgtacagaggaagccatgttcgagctgggccttgtagggtgagtaggagctcatccagcaaatagggcagggggacattaagggctggcagcaatgtaacagtgtaggtcacatcaaaggaagggttggtagggctgtatttccacagtgagggctgtgttggggttggggtcagggcagaa

SEQ ID NO: 44769 - DNA, 310 bp, Homo sapiens
tgtagccattaattctttattccttccgagggaaaaatgtaactcatttcaatatactggctggggacagatctcagaattgaagggaacataaaggtcatctagtccaatctcgttcttgagtcccctttacacattctcatactcccagagcagccttgaattctgtatgtcctctaacttctactttatgtgacttcatacaataaccttcgatatacttgaacaccgtaatcacgctcaaattttcttctcttgtaaacatccctagctcattatcatgtgacacaacttacaatcttctcattct

SEQ ID NO: 44770 - DNA, 190 bp, Homo sapiens
tctttgtgtatgtctcaaacaacataacttgcagtaaagccattggctgttatgtgctgtatttcttttagtaggtaaaggcagtcataaaactactgtctttaaaaaaacgattttcagtagcagcactgctgccctcatatatgcaattttttccaaagtggaacaacttaagatttttttttttttt

SEQ ID NO: 44771 - DNA, 313 bp, Homo sapiens
atatatctgacattttttcaaaataatttttaaatgttctgtttttcaattccagcttgatcacttactagctctctgatcatgagaaaattatttagcatctttgattcacagacttcagaacagatttccatattaacctcctcacaggattaccttagggattaaaagaaacagtaaaaataactgacaccaagtaggtcacatcataatgataaatttaattttaatccaaatagctccaattttaagagaagcaaaaagaatggtaatgtgtttctaaaatgcaaacaggtgaatcttaaagactgaa

SEQ ID NO: 44772 - DNA, 311 bp, Homo sapiens
ctttcagggtctgccattttctcctgtcgacgagcttcagctgctcctcttttgcccaggccagagcctcgccgactagtactagcacaggagcccgtggtcttttggcgtgtgctccgcctcaaactggggagctcagcaggtggagactcactgcgtttcttcgtagattttcttaaacttgctaatttggcctgtaatccagaaggtccaggttttgatgtctctgacttagaagaccctggaagagacagttttgttttaggaaggctaactttagggctgaaacgagcagcccaatcaaattttga

SEQ ID NO: 44773 - DNA, 313 bp, Homo sapiens
gattttgtcaacgaggttctccttgacaggaatgaggtgatggccggcacttctcagaactttggccattttcttccaataatctgtaggaatgatcaaggggtccacaccaaccctggatccttcaggaagcacactcaccagccagtcttcctgagttggtgtgtccttcagacccatcttcataagtgtccagttgctgtccatttgcttggcagcctggagaaagtagcgcccgtcagtccacatggctgcatgctcttctgtgatgatggctgtgcccgcagagccatcgaatccagagacaaaagcc

SEQ ID NO: 44774 - DNA, 315 bp, Homo sapiens
aaataatcttgggcatgtatgtgaacaattggggactataccatgttcctcccctttaaagcacacttattcagaattgtgatcctttgtaaacgacttttcattggcatatctgtagcgttggttaatacagttggctccacattatctcaagtttaaattaattggactgttgtagtaaaacgactggaattattggaattgtttaagccagctgattgagattcacattcactttccaaaatactgctattttcttcaaggtgttttttttttgacatctactttggaagtttgattatatcctgaaaccta

SEQ ID NO: 44775 - DNA, 313 bp, Homo sapiens
  misc_feature (1)...(313): n = a,t,c or g
ttaatgttaacaatattagattcttatattgtggcagtggtaccagtggtatttgttcattttgagatttgaagtttctatttcagtaatttactctttgttttagtttgaaactcagaggaagtaggacatagttatttttatttgcttactaaacatttattggttactannnnnnnnnnnnnnnnnnnnnnnnnnnnnnnnnnnnnnnnnnnnnnntgtttttatgtgttagtaactgtgccaaccctgcgaatagaacaatgatcagaccttcttgactctggctcttagagaggntaagtancngatc

SEQ ID NO: 44776 - DNA, 317 bp, Homo sapiens
aactatgcaccggaattgcaggacagagtcaccattacggcggaccgatccacgagaacggcctacatggagctgaggggcctaacatctgacgacacggccgtctattactgttctctactggatcggggaagtatgatcttctcagcaggattcagaaaacgttttctattttcataaaaaatgtgtggacattgctataaatacttttcctgagtggtaaacatgtgatactgtctgggaaagatattccaggtggtggttatttttgaacaagtaaatcttaaatgatcataagagaacaggctgtgttagct

SEQ ID NO: 44777 - DNA, 329 bp, Homo sapiens
gggaaaaccattacattatagtttctttttgtccatttttaagcagggggtatttatattatcaattagcattatttgagcatttggcagcacaacccacatttatttcctcatggaagagacaagttagaagttttccttgttgaaaatgaaatgcactccccgagggccagactcagagttggagatgctttgtttactcagggtttcagccaaggcttcaggtccacagaggaaaactcctattctggtattagggtgttgacttgcaattgtcttgaattcattatcccagttgggccgtccatacaaagtcttttgtttcaggc

SEQ ID NO: 44778 - DNA, 100 bp, Homo sapiens
gaatttcccagcctcttcctcattcttgctcctgcttttgcagtttcacagacattctttgttctcccatcacctccaccccccactttttttttttttt

SEQ ID NO: 44779 - DNA, 335 bp, Homo sapiens
  misc_feature (1)...(335): n = a,t,c or g
gnnnnnnnnnnnnnnnnnnnnnnnnnnnnnnnnnnnnnnnnnnnnnnnnnnnnnnnnnnnnnnnnnnnnnnnnnnnnnnnnnnnnnnnnnnnnnnnnnnnnnnnnnnnnnnnnnnnnnnnnnnnnnnnnnnnnnnnnnnnnnnnnnnnnnnnnnnnnnnnnnnnnnnnnnnnnnnnnnnnnnnnnnnnnnnnnnnnnnnnnnnnnnnnnnnnnnnnnnnnnnnnaacacagacatttttaagtaatctgttaaccctgtctaccagaagtgataatatttgcctgggtcaacctcttttatcttatataattttacataattacatctgccaccc

SEQ ID NO: 44780 - DNA, 352 bp, Homo sapiens
gctaaagctaagaaggcctttactactggtgaagagttgatcctgcctgctgctaaggacatctgttgtgaactcttaggagagcctgcagttcaaaaggtggcacatgttcctcttctggctagcaccatagctagatgaattaatagaggatatgaggcacagttgttagaattaatgagtcactgtggtacccaatccaggttaatgagtctaccagtgttgacagcaaggcaacaatgcttgtttttgtgtgatacatttttcaggaggatgtgcatgaggatatattatgtgcacttttgctttcaaccaacaccacagctgcagaactattcaagtctttaaatac

SEQ ID NO: 44781 - DNA, 358 bp, Homo sapiens
atagttctatatttagaggactttttatttctcataagccaaattagcccaatacataaaaattcctcaatttttactttatgaaatctgaaaaacatttatttacatttatccctaaactcacaatgtgctcatttataaacaggctaagtgttagtaagataaagcacaaaagcccttctgaattgccacctgtggtagctacaccacatgtggccccagtgcccacatctcctggtattcacacatttgtacagctcctcctccatgatgaaactgggctggctgtctcagtttaaccagaagtagacagcagaagtcatgttggccaggaccaggcttaggccttaaaaagacc

SEQ ID NO: 44782 - DNA, 340 bp, Homo sapiens
  misc_feature (1)...(340): n = a,t,c or g
nnnnnnnnnnnnnnnnnnnnnnnnnnnnnnnnnnnnnnnnnnnnnnnnnnnnnnnnnnnnnnnnnnnnnnnnnnnnnnnnnnnnnnnnnnnnnnnnnnnnnnnnnnnnnnnnnnnnnnnnnnnnnnnnnnnnnnnnnnnnnnnnnnnnnnnnnnnnnnnnnnnnnnnnnnnnnnnnnnnnnnnnnnnnnnnnnnnnnnnnnnnnnnnnnnnnnnnnnnnnnnnnnnnnnnnncataaccttagctctgccataaactcaccatgtaacgttgtgcaagatacatagggcctatctgcctgtctataaaggacatactgtggccaggtgctgtggctcacc

SEQ ID NO: 44783 - DNA, 327 bp, Homo sapiens
gtagaagttcagctctccttcatttatctcactcctttcccccctttatcccacttctttccacatgtaagcactattaggattttattgtgtttgtatttatctccccttccagattgtgagccccgggctagggttttctgtgctggagtatctaacggggcccagggcctttctgagagggatgagctcctggagagtgggaggtatagggagggatgatgagaggagatctcatgactctgcaccctggtaacctccccgatttctgtcctttcactggtgccatttctaaggatttatgagcagcttccagaagtacagaaa

SEQ ID NO: 44784 - DNA, 358 bp, Homo sapiens
  misc_feature (1)...(358): n = a,t,c or g
ttgggattaagcaaggcattttggagaagggagcattcaaagtgagtctcttgaactgaatcagacattcaggagactgggtgaaaagtgtattctgaggcatagtatctggattttcttttttttttttcntccnttttgcntttgccanggnncnnaaannngnccagnnnnnccttgcttttgnnagttnaaaaaccnaatnngnanctnnttcccctttttttgnanctgcccantgnccngnttttgggnantgcaagggtcnttttaaaannnttnantaccctcccctnantngnaatgncntncngtnccccntttcaaacttttggagccccttcatnaaattccccct

SEQ ID NO: 44785 - DNA, 328 bp, Homo sapiens
acttattaacctatttattatttatgtatttatttaagcatcaaatatttgtgcaagaatttggaaaaatagaagatgaatcattgattgaatagttataaagatgttatagtaaatttattttattttagatattaaatgatgttttattagataaatttcaatcagggtttttagattaaacaaacaaacaattgggtacccagttaaattttcatttcagataaacaacaaataattttttagtataagtacattattgtttatctgaaattttaattgaactaacaatcctagtttgatactcccagtcttgtcattgccagct

SEQ ID NO: 44786 - DNA, 326 bp, Homo sapiens
ctgggagacacagtccctttctcctccaagacccagcaaagcaaccccccagaccctgctctttgaggtgtgagattggcttgttcctggggatttcagccccagccttctccaaggccagaacctcagctttctgaagcccaagacacagaaatgcaggctcctagcccctcccatcctagggcccagcctctgactaacttaggacttcccagccttcccctattccagtacgcatgtgtcccaggccatgggctcctctactcctaggaactaatagctcaggccctcagctccttcaaagcccaggcattcattacagtctc

SEQ ID NO: 44787 - DNA, 316 bp, Homo sapiens
  misc_feature (1)...(316): n = a,t,c or g
cgcggccgcgacgaccaggacctctatgtgatgtttgtgaaaggaattacggagcgccaagtgagccatgaagacaacaaaaccaactaccctagaagcatggatgcagggggaactagagatagaaacaanancnaggnctnanaacatntgnacctcantannaccntnaaatganagnacaaacnnnaacntntangcgtanccnggaagcggaanctcaatnacnccgtganaacnnncncctanntggagtnctncnnanaantggacnaaagatgnggaaatgnnncnnccctnnngncnnggaacaacg

SEQ ID NO: 44788 - DNA, 325 bp, Homo sapiens
  misc_feature (1)...(325): n = a,t,c or g
ggctgaagtgtttgacaccaaagcacttgcagataggattggggcagaagccaagttgacagtgtcacctgtccctcatttcaccctatcgcactaaagttctcccacacttgcatttcagtttcaatactttttctcatgtgccacaaaggaggctgtgaagttatcatttccaaagtctctgctggtcnnnnnnnnnnnnnnnnnnnnnnnnnnnnnnnnnnnnnnnnnnnnnnnnnnnnnnnnnnnnnnnnnnnnnnnnnagntcatngttatcctnctgccttancctcgcgagtggntgggaccncanngtgtccccact

SEQ ID NO: 44789 - DNA, 330 bp, Homo sapiens
  misc_feature (1)...(330): n = a,t,c or g
gtgaataagcnnnnnnnnnnnnnnnnnnnnnnnnnnnnnnnnnnnnnnnnnnnnnnnnnnnnnnnnnnnnnnnnnnnnnnnnnnnnnacttgaagnnatcttttctggatgngtctntgccanagttttggnatcanggatgatnctgncctcatnnaatgagnnatgganaagtccccnctnctcaannttttggaataatttncagtangaaatgacnncaacctnttttntgacatctggaaaaactgngatagngaatncatntggtactnnactantttaggtnnntacngtatctattactgaccncantttcngancncaatg

SEQ ID NO: 44790 - DNA, 324 bp, Homo sapiens
gccggacagagtagcagagaagagagggctgtacacagagaactccagaaatgggtggcaggtttcctgggtagtcagcagagtcctggttggcccgtgtgtgtgtgtggacacgatctgaggccagggtgagaatcatctgagaaggccagagggaaccatgcctgtgtttacagcaagcttgaaatagtacctgtttctaccagtcagatgggaaaaattcatattcatggggcacgaggtagaacagtctgtcaggtctcgattcagtattgggaataactacacctagactaaatgcagctctctgattctctaataaat

SEQ ID NO: 44791 - DNA, 330 bp, Homo sapiens
  misc_feature (1)...(330): n = a,t,c or g
gacctggtatataggcatattatgtgtggcttgcacggttttgttactgtttttcaactcaagtaatatagatattttaggaaannnnnnnnnnnnnnnnnnnnnnnnnnnnnnnnnnnnnnnnnnnnnnnnnnnnnnnnnnnnnnnnnnnnnnnnnnnnnnnnnnnnnnnnnggaaannnnnnnnnnnnnnnnnnnnnnnnnnnnnnnnnnnnnnnnnnnnnnnnnnnnnnnnnnnnnnnnnnnnnnnnnnnnnnnnnnnnnnnnnnnnnnnnnnnnnnnnnnnnnnnnnnnnnnnnnnnnnnnctgggattaccggnntgcngtcacc

SEQ ID NO: 44792 - DNA, 335 bp, Homo sapiens
  misc_feature (1)...(335): n = a,t,c or g
gtttctttgtattcttcagtccttttacagaattgatgtgctaactgaatatcattgcagcaactagactaagatattcaagatctctttattggggatgggagaaatagggaaagaaatgtgtataagtaattatgatattgcaaaagtgatacttagattttacagcctcagtagtctgcccagtgtccacattaatgaaggatccatgtttgtagtgagagaaaaaaaccccaaggtaacccgatatgatttaggatgcatatcagttctaacaattcaatcanaagtcaagctcattggaattccttttttaactgatccaaatactagta

SEQ ID NO: 44793 - DNA, 337 bp, Homo sapiens
  misc_feature (1)...(337): n = a,t,c or g
gatagagtgagaagagaaatgggagagggctcagaaaaaagtttttattaatatatttggggtcggagaaatacaaatattataaagattactatattcccagtttaattgtactgnaangtntgttagtnantttnatttccanagtttactctanatanggaattgttnanntttgttantttttgtgnttttnttanaangcttgntnngatatnnntttncctttgntatttnttcnnngnttntntntttnntttttgttnnttattanangttattatnttntnttgatttgnnnttttgttatttttataatnnttttnttgattntgct

SEQ ID NO: 44794 - DNA, 341 bp, Homo sapiens
  misc_feature (1)...(341): n = a,t,c or g
tggctgttaaaaagtgtgttcaatttctatgtatgtgtgaattttcattttccttctggtatggattattggttttattccatacgtgatttggataaggngnnttgcngganttcganctctaagntnttgagacttgntttgtgcnntaacttnggntctgttctnnttaatgttnnctgtgcacttataaactgtgtgnactgntgttcttgtngngnagntcntgtttttntgntcanncttttggnttttnngtaatncttngcacattnacttgannntgnttnnancattangcnttntttatttgnatncttnnnantcnanttttttntctg

SEQ ID NO: 44795 - DNA, 348 bp, Homo sapiens
  misc_feature (1)...(348): n = a,t,c or g
gtcaaatccttgcatacttctgtgacacccctgcccattttctgtctttaattaaccaaggtgttaggtgtgactgtcacaactgttatgttttccagtaaactagaagtacgatatttgataattatatttgtatttcaccacctaaatgtaatgttgattcctcaagaatgaaatgaaggcactacattgaaatatgttttgtataaatttgtcatgttgaacagcattttagcatggtaagttcccttagctatatgaattttggcatgtttcagagagatcagtaaataaaatattagataaanaaaaannnnnnnnnnnnnnnnnnnnnnnnnnnnnnnnngg

SEQ ID NO: 44796 - DNA, 335 bp, Homo sapiens
  misc_feature (1)...(335): n = a,t,c or g
ccggcttgggcagacgctgccgtggaatccttgactctagttttctgagtcgattgtgatcatggctgctgagtctgatgttctgcatttccagtttgaacagcaaggagatgtggtcttgcagaaaatgaatcttttgagacagcagaatttattttgtgatgtatcaatttacattaatgacactgagttccaggggcacaaggtgattttggctgcttgctccacttttatgagagatcagtttttactcacacagtcaaaacatgtcagaatcaccatcttacagagtgcagaagttggcagaaaattgntactgncttgctatactggac

SEQ ID NO: 44797 - DNA, 337 bp, Homo sapiens
ctaatttgaacaaaagggagttaaaatacaaaatttgtactaataatgacatgaagattgtttctattctcttttttccctcctaaaatgaatttgggaaaaaattagaaaatgtggtcaagatcatcacaaggccagtcttcatcagtgcttatcaataagtcactctcagactcctgagggataaacatttctttataccttatggttgattttatattcacatatgattcattattgattaacttttcttatagaatcagcatctccagacttttcctctgaggaaggaaatgacatatgaaattgctttaatttatgatcagaggctgaaaat

SEQ ID NO: 44798 - DNA, 346 bp, Homo sapiens
  misc_feature (1)...(346): n = a,t,c or g
gtttcagcacatgtatacattgtagaatgttcaaattaggctaattagtttatcacttcagatatcatttgtggtaagaacatttaaaatcctctcagctattttgaaatatacaatatattattaactgtagtcattgggatgtgcaatagaacaccagaactttgtacccattgaccagtgtctcctctttgcctgttcccacttnnnnnnnnnnnnnnnnnnnnnnnnnnnnnnnnnnnnnnngggttttttttagaatccacatgtaagtgaaattatacagtatttnnnnnnnnnnnnnnnnnnnnnnnnnnnnnnnnnnnaccccctagacagaatttcc

SEQ ID NO: 44799 - DNA, 284 bp, Homo sapiens
  misc_feature (1)...(284): n = a,t,c or g
gttgcattggagcacacgctctcagtgttcatcgaagacgtacaagcagcgtcttacgacgatgttgctgcagctgccttggggtcttgttaaaagcaccattcagtagattaattcccacctgtggactgtgttttctggcttccaaaagaaactgncatgatntttnctnnganngcgatnnnctatnggtnctgttanatntttattgttnttntatttttttttnnagntntntnnangnnttttnntatttnngntncnnctntgntntgnnttntttg

SEQ ID NO: 44800 - DNA, 337 bp, Homo sapiens
  misc_feature (1)...(337): n = a,t,c or g
gctaatataatgaagtnnnnnnnnnnnnnnnnnnnnnnnnnnnnnnnnnnnnnnnnnnnnnnnnnnnnnnnnnnnnnnnnnnnnnnnnnnnnnnnnnnnnnnnnnnnnnnnnnnnnnnnnnnnnnnnnnnnnnnnnnnnnnnnnnnnnnnnnnnnnnnnnnnnnnnnnnnnnnnnnnnnnnnnnnnnnnnnnnnnnnnnnnnncntacgtnaaatgcnntattacctgggtgtggctgngcacacctgtantccnaantttacttgggagactgaggtgggagaattgtttnagcccaagngacagagattgnagtgannaagatcgngccnttgca

SEQ ID NO: 44801 - DNA, 315 bp, Homo sapiens
atttttctttgttcgctatgaaatctttcaaataagtcagaatacagcaactaacctgaccgattatacgcatggatattcccatcccatgttctgctgtattttcttctgccacgcttgattcagactttgagaaacaaaatccaagggaagcagcaaaagacgttcccagtctacctccctggacgaagccaccatctttccacctacgtttctgtgctcacacgactcgtgcaatcaggacaaacacgcatgaccctgggacctcgggtctgagctgccactgcttagagacctgcctgcgcaccttatcct

SEQ ID NO: 44802 - DNA, 405 bp, Homo sapiens
  misc_feature (1)...(405): n = a,t,c or g
ccccctttgaagggccnnnnnnnnnnnnnnnnnnnnnnnnnnnnnnnnnnnnnnnnnnnnnnnnnnnnnnnnnnnnntctcgaggatccggttagtttgactttcaggtaacttaattagcagattcatgttttgggaaaatctgatctgtgatcctgaaattggttacagttggtgtaattcgtgggtaattaggcgcctttacagtgactactctagtcattagagggctggggtaatttgaggttgaaatgtgagagtgagatggagaaggcacttgctctctagtccttaatcttttaatccatttaacctaggttgtaaattcaggccttattttaatttgaaagtatgtttagggagctgggaaggggtttcattaattcaccactttcaggtaatata

SEQ ID NO: 44803 - DNA, 316 bp, Homo sapiens
  misc_feature (1)...(316): n = a,t,c or g
ccctatagaactatttgactctaaattaaactacgtacatgaagaacactgacaaaaataaagttttttaagtttgaaagcctaattaaaactagtttgaatgcttaatcaaaacatggtaataaaatggattatgtatagaaatgttagtaaactgctctgtttttaaaacctaaatatactatataatnnnnnnnnnnnnnnnnnnnnnnnnnnnnnnnnnnnnnnnncttagnnnnnnnnnnnnnnnnnnnnnnnnnnnnnnnnnnnnnnnnnnatggacttcccgcttgctgttcttgtgacagtgattttg

SEQ ID NO: 44804 - DNA, 318 bp, Homo sapiens
gaggccttcccccacgactctcagctcggccagggcaatctcaaagtccgctttaagaaggtccctcacaacatcaacttccgtgagaagaagccaaagccatccaagaagaaagcagaaggtggcggcgcagaggagggggctggggcccggggccgcgtggcgcgtttccgctacttcgaggatatttatggctactcaggggtcttcatctgcggcccctcccctcactggctcttggtgaccggccgaggggctctgcggctacaccccatggccatcgacggcccggtcgactctttcgctccattccacaat

SEQ ID NO: 44805 - DNA, 336 bp, Homo sapiens
  misc_feature (1)...(336): n = a,t,c or g
ctcatagttttggtcctggctgcaaatctctcgtttttgatactcaagagaatgctattggggaactgactctgaagcacagcccagatgcttgagatgggttgggaaggcttacatcaacaccatgaatttaatttatcatgtgacattttatttctgagtttttaaagctgnaattaaaagaagngttnaaagngtngctttcctcttttagaataaacgtggctgggtantnntgctctnatgcctggcattccantacttntnggaggncntattcaananngattgnttgatccannngttgggacccanntaggncatcntatnggaatc

SEQ ID NO: 44806 - DNA, 329 bp, Homo sapiens
  misc_feature (1)...(329): n = a,t,c or g
gataaaacaggggaaggagggaacaggtagggctggctgcaggaaagcttgcaggtatggggtacacagttaaaagggagtgtcttctgatagtcttgatgcaggcctggaggtcgtttgttatgggggtggaggtcctgatgtacattgtggcggtaagatgccgtgctgtctttgccaccagcctgtggcagccctggtgttacaccanggcaggtggcagtttaatgtatntcatgccagatgacctgcnntgcccacctggtcacgcggncgtgaattccnnnnnnnnnnnnnnnnnnnnnnnnnnnnnnnnnatgtttacttct

SEQ ID NO: 44807 - DNA, 325 bp, Homo sapiens
  misc_feature (1)...(325): n = a,t,c or g
gaggattcatattgtcattttacttatttacagaatcaataaaccaacacatacacactattcagagaggtgggaagtgctctgcaaccttctccctcaaacctgggcccagaccccagtcctggaccactgcatccacccagcaggaaaggggtccagccaagacttttcctgactttgtaacttacagacacaagagaatagagggtagaagggaaattcttggcacctggactagagtgagataaaaggagagtaggaaagcagtgataggagagaagtgagggaggtacatacagttttataaatanctagacaaggtctt

SEQ ID NO: 44808 - DNA, 334 bp, Homo sapiens
tttttgcactttacagagtattggtagactcacatttttgaactccatttgtataaacagggaaaagtaacatagtatacaaatctccattactcagtgtttcaagagaacccaaaatcagcagtattcctagcatcaatttgctttctttgggcattccactcagatttaataatcatactgatctcaagaactgcacaaagatgaacacacacataagctcactttcacatagtcagcttatatgtatagaaagtgtttattacatcttagagtatggtataatagattatattgtaggtagatgaaaatagatcccttagaccgactcatt

SEQ ID NO: 44809 - DNA, 321 bp, Homo sapiens
tctcctcttgctccagctgggccaattgggccaggcctgccgtcgatgccagggaggccgacaggaccttcttttccagcggggccgatatttccaggggaaccaggaagacctctgggtcccatgagaccaggctccccagggcgaccagcatctccattaggtcctcggactccagcagggccacttgcaccacgactaccaggagggcccatgacgccagctctgccatcagctccaggaagaccacgagaaccaggactacctctcagcccaggaggtcctggagggccggcagatccagcttccccattagggcct

SEQ ID NO: 44810 - DNA, 330 bp, Homo sapiens
ccaatttgaattaagacagttcatgtgctgacaagggcctaagctgaagaagtctaaattccttgagggctaagaaatatatatcatgcctcaaatcttggaatgtggcagggaagagacagaccaatcctatattttcacaacatttcagccctgtaattgaaaaattatttgggcctggtctactttgccatctggtgcattacatcacttgaactattatatgcatactgtcagtgaatcagcagcagagaaaaatattttaaaactcagtataattattctaaaataccccctttatcaaaggtgacaatgaatgctcacaaaaga

SEQ ID NO: 44811 - DNA, 333 bp, Homo sapiens
cttgtcgctaaaagcctgatgattgtttaataatattctggcccaagttatttcaccccgatcactccctgctatgtacacagtatcgaaattacattcagagattaaaaaaaattgtagcaatatttttcccacaaaattaagtgcaaaatatctttaacaaataatgatggcagtaagaaatattcgacatagtcatgcaaaaatgcatctgagcttagaaaggtttagaacatttccaaaatatgctctaggttttcacatggcaaaccttataatcttactcatttttctttgaatttaaatgtggctgtttgtgtaaaagtcggtaac

SEQ ID NO: 44812 - DNA, 332 bp, Homo sapiens
gggtgagggacccaggttcctgacacagacagactacacccagggaatgaagagcaagcgccatgttgaagccatcattaccattcacatccctcttattcctgcagctgcccctgctgggagtggggctgaacacgacaattctgacgcccaatgggaatgaagacaccacagctgatttcttcctgaccactatgcccactgactccctcagtgtttccactctgcccctcccagaggttcagtgttttgtgttcaatgtctagtacatgaattgcacttggaacagcagttctgagccccagcctaccaacctcactctgcattattgg

SEQ ID NO: 44813 - DNA, 333 bp, Homo sapiens
gcatctcagtggcctggactgtgtgtctgaagggtgaggaagccatcgcagatctggactgtgtgtctgaagggtgaggaagccattgcagatctgggctgcatgtctgaaggggaaacgatcatcagaacccttgagtgagtcactgcagggctccagccagtctcactgccactcgggaggcatgccaggatcagggcgtcacctgcttctgtctacactgcaaacagaggtctctgtcccactacacgatggtcacagcacactgcgaatttgtgagactttaaaatcagagggttactcttcccaaatggacctttgggtttagtaaaa

SEQ ID NO: 44814 - DNA, 320 bp, Homo sapiens
  misc_feature (1)...(320): n = a,t,c or g
gtacataaccgacatttcacattctaaactggagctngttgcctnganctttntatagtaatttgtnttgttttttntcttnntttctncgttctgnttcttttnatntaacgnttctctngnntgtttnatnnntttnnntttntncnttganttattannncgnttaaatntttttttttantgcgtnnttttttttttngtggtntaattnttnttgngantttantnnctgggcttnatattaaanctnngtattttttctgnntnatgnngtgnnttttnttgttantantnttnnntntagtcgtgtctntgtg

SEQ ID NO: 44815 - DNA, 319 bp, Homo sapiens
  misc_feature (1)...(319): n = a,t,c or g
ataagcattcccttttctctgcaactttgccaacatcttttacttttnnnnnnnnnnnnnnnnnnnnnnnnnnnnnnnnnnnnnnnnnnnnnnnnnnnnnnnnnnnnnnnnnnnnnnnnngtattagtgatgttgagcattttttaaaatacatttgatggctgcatgtatgccttcctttaagaaatgtctgttcatgacttttgcctacttttttttttttaaattttaattttttttnatngatnattntggggggtttntcnnaangggggattnggcngggnnntaggacantaggggngggaaggtcggcaaa

SEQ ID NO: 44816 - DNA, 351 bp, Homo sapiens
  misc_feature (1)...(351): n = a,t,c or g
ataaattaggaaagaaaagtcaagctggagccatcttgatattctaatgagcaggcctatctagttctacannnnnnnnnnnnnnnnnnnnnnnnnnnnnnnnnnnnnnnnnnnnnnnnnnnnnnnnnnnnnnnnnnnnnnnnnnnnnnnnnnnnnnnnnnnnnnnnnnnnnnnnnnnnnnnnnnnnnnnnnnnnnnnnnnnnnnnnnnnnnnnnnnnnnnnnnnnnnnnnnnnnnnnnnnnnnnnnnnnnnnnnnnnnnnnnnnnnnnnnnnnnnnnnnnnnnnnnnnnnagttctacatcttttaaatcacagagaagcttttagctttggtgtgtttttgtttttgtt

SEQ ID NO: 44817 - DNA, 450 bp, Homo sapiens
  misc_feature (1)...(450): n = a,t,c or g
gctttgaggccatttgaaacccnnnnnnnnnnnnnnnnnnnnnnnnnnnnnnnnnnnnnnnnnnnnnntctcgaggatccgaattccnnnnnnnnnnnnnnnnnnnnnnnnnnnnnnnnnnnnnnnnnnnnnnnnnnnnnnnnnnnnnnnnnnnnnnnnnnnnnnnnnnnnnnnnnnnnnnnnnnnnnnnnnnnnnnnnnnnnnnnnnnnnnnnnnnnnnnnnnnnnnnnnnnnnnnnnnnnnnnnnnnnnnnnnnnnnnnnnnnnnnnnnnnnnnnnnnnnnnnnnnnnnnnnnnnnnnnnnnnnnnnnnnnnnnnnnnnnnnnnnnnnnnnnnnnnnnnnnnnnnnnnnnnaggtgtgttgacnatntggggcggngnggccttggggntgcctgccaaggctcncatntnatacctcangncnntgacctnnganatgnccactaac

SEQ ID NO: 44818 - DNA, 342 bp, Homo sapiens
gctcggtctctcagcagttgctgaataaaatatgttatatctcgtcctgcgattggaatgtgtttaatacagctgccaatcacatacccttcagccacaggaatgacatgagtgacaccatctccactgtctattaccgtaccggtcaacgtccgttctcctacttgtcttgaggtccaagatgcagctaaggcaagaacagcctgcacagcaatgtacaagcctggaacattgaaggactcaaacattatttcagcagtatattccctgttttctggagtattcaatggaggttcagtcaaaagaaaataatggtcttcaggttctgcccttaaatattta

SEQ ID NO: 44819 - DNA, 343 bp, Homo sapiens
tcagcatttagttggaatggcatataataatgttaaattttgcaaaaatttcttataatgtcatattaaaagtattgttataagttcaagagatctgtactacaacatagaaactatagtatagttaaaatcaatgtagtatattcttgaaaatagctgatagagcagattttaagtattgtcaccacacacaaaaaaggtaagtatgtgagatcatgcatatgtcagttagctagatttagccattctgcagtgtatgcatatttcaaacatgttgtataccataaatatatataatttttgtcaattaaaaaatagttttcaaaaaagaaatggcagtata

SEQ ID NO: 44820 - DNA, 352 bp, Homo sapiens
  misc_feature (1)...(352): n = a,t,c or g
nnnnnnnnnnnnnnnnnnnnnnnnnnnnnnnnnnnnnnnnnnnnnnnnnnnnnnnnnnnnnnnnnnnnnnnnnnnnnnnnnnnnnnnnnnnnnnnnnnnnnnnnnnnnnnnnnnnnnnnnnnnnnnnnnnnnnnnnnnnnnnnnnnnnnnnnnnnnnnnnnnnnnnnnnnnnnnnnnnnnnnnnnnnnnnnnnnnnnnnnnnnnnnnnnnnnnnnnnnnnnnnnnnnnnnnnnnnnnnnnnnnnnnnnnnnnnnnnnnnnnnnnnnnnnnnnnncaggngttctccacaggttggaggaaagngggaaanagcaagctgaacacgtccactcccaaaggccatccnttcaag

SEQ ID NO: 44821 - DNA, 341 bp, Homo sapiens
  misc_feature (1)...(341): n = a,t,c or g
tggatttcaaacttaaacaaaaaactatcaactacaaattagttgcctgactttggtttttccaaccaaggaatttaaaactgttatttttacagcaaaagatgtgcaaaatcactggattataagttctattttactgtcttgaattagtatttcagtgttttcattttagacattcagactaaaaatacaccgtttagaaaaaacaatttttgaaaaagagattttttttccctgcaggtagttgagttggaacaacatgttctaccgtggatttgtacttgctccttttgcnnnnnnnnnnnnnnnnnnnnnnnnnnnnnnnnnnnnnnnnnnnnttg

SEQ ID NO: 44822 - DNA, 164 bp, Homo sapiens
gccatatgaaaacacacaagaaaggccaaatgtttgcagaaaatgacattcaatgtgaacattctgaggctattgatggcttaggaaatttggttctagaaattcaggaaaattaactttatatttaaacgtatactatttgcagacatctttttttttttttt

SEQ ID NO: 44823 - DNA, 341 bp, Homo sapiens
ggaataaatcagttttcctatttgtttcctgaagagtttaaagccatttatttaagaagcaaaccttccaagtttcccagatactcagcagaagtacatatgtccatccccaatgtgtctttgccgttaagatttgactggagggacaagcaggttgtgacacaagtgagaaaccagcagatgtgtggaggatgctgggccttcagcgtggtgggggcagtggaatctgcttatgcaataaaggggaagcccctggaagacctaagtgtccagcaggtcattgactgttcgtataataattatggctgcaatggaggctctactctcaatgctttgaactg

SEQ ID NO: 44824 - DNA, 346 bp, Homo sapiens
atttgaatgcccacgtatttgagttccgtaaatagactctcttaatttgggtaactatataattacccttcagagttgcagacaacaatggaagctttaaaacctcttcaacacaaatgctacccctaaaatgaaagaatttagaggttaaataaaacaagtgagagaccatttacttacatcagttcggtttatagacatttgaatcatatctgaatgactgacttgtttccaatgtgaaaaccaaattaaaaataacttgatcactgtgcttcaaacacaactgttcacatatcaaattctagctccagccatgtaaaattcaacttttctgtatcagagaaaa

SEQ ID NO: 44825 - DNA, 353 bp, Homo sapiens
  misc_feature (1)...(353): n = a,t,c or g
ggagacagcacttcagcattatacttgaaggccaatcaccaataaaaaacacaaaggcaaatccatagacagaaagtagattnnnnnnnnnnnnnnnnnnnnnnnnnnnnnnnnnnnnnnnnnnnnnnnnnnnnnnnnnnnnnnnnnnnnnnnnnnnnnnnnnnnnnnnnnnnnnnnnnnnnnnnnnnnnnnnnnnnnnnnnnnnnnnnnnnnnnnnnnctggtcannnnnnnnnnnnnnnnnnnnnnnnnnnnnnnnnnnnnnnnnnnnnnnnnnnnnnnnnnnnnnnnnnnnnnnnnnnnnnnnnnnnnnnnnnnnnnnnnnnnnnnnnnnnnnnnnnnnnnnnnnnnnnn

SEQ ID NO: 44826 - DNA, 354 bp, Homo sapiens
  misc_feature (1)...(354): n = a,t,c or g
aaacaattaccggtgaactttctgaactttgttagattaaaactcactggcttattgtgcactttgaatttatcaaaaccatgtatgatttttataatattggtcatagtaaaatactggtttcttttattctgcaatatttttaaaaannnnnnnnnnnnnnnnnnnnnnnnnnnnnnnnnnnnnnnnnnnnnnnnnnnnnnnnnnnnnnnnnnnnnnnnnnnnnnnnnnnnnnnnnnnnnnnnnnnnnnnnnnnnnngtgcaatcntnaccatctcaatannnnnnnnnnnnnnnnnnnnnnnnnnnnnnnnnnnnnnnnnnnnnnnnnnnnnnnnnnnnnnnnnnnnnnng

SEQ ID NO: 44827 - DNA, 353 bp, Homo sapiens
cttccttccaccaagtccaagaacctgagatttttaatcattaggttttagatttcctttagcagcagagactgacttgctgtatagagggaagtcaagtagtgactaactcactatatgtcaaacacatcattactcttctcttttcctactttacatgtaatggttgcgaggaccaactttcaaatgagctaacttgggtgagacgttcactaaagtaccaagcacaatacaaatgcatcttcgagttctttgggcctcactttccctatctgaataataaggatagtaatcccttgccttttctcaaaccagttcaactcagcaaacacttcctgagcacctgctacatg

SEQ ID NO: 44828 - DNA, 338 bp, Homo sapiens
  misc_feature (1)...(338): n = a,t,c or g
ctgaaacagacccaggagacctatcaactgagtctatcaattcaggaaaagtccttttgaattccaaagagtcatgaaaacacttgtgggcaacaccctcaaatccccacactcctgacagtgtcacagatgcatgactctagcacgagagggggaactgaaactgacttttacacttggcccccaccctgcccagtgtgtccgattctgtgggctggcaggtttctgcctgcaattattttctttgatnnnnnnnnnnnnnnnnnnnnnnnnnnnnnnnnnnnnnnnnnnnnnnnnnnnnnnnnnnnnnnnnnnnnnnnnnnnnnnnnnnnnnnnnn

SEQ ID NO: 44829 - DNA, 354 bp, Homo sapiens
ctcattaccattatatgtaatatttcctttttgtttgtttatatgggttactatttgtatcctgtaaatgtaagcagttcttcagtaaccagaaatcttaaaagccaaaagcttatttttatcttttccatgttggaagaagaacaatagtgataacagctagtataatatgaattcaaggcttgttaattcttactcttccttaattcttactacttcattctctgtgaggtgagtgttatccccattttacagagctgtaaatgaggctttgtaagttgagtaatttgcttgtgttacacagcaaccctgtgacagaaaattcaccgaagtttctccaaacctatgttccta

SEQ ID NO: 44830 - DNA, 309 bp, Homo sapiens
ctcctatctttgtttctcaaccactcagttagttcccctgccaagagaaaaacaatagacaatgtttttctctgtttatctttttaaaggcatttgatgcacacacaagccaataagaatatatcctccttttctttccccacccccattttttctgcacaagcatgcatgtgacattcttctgcaccttgctttttctgtttaacaatgtacctcagaagtcttcccaaatcagcttcctcaacactttgttttatggttgtgtagagttccagtgtatgaaggaactgctcatctaagcaaaagatt

SEQ ID NO: 44831 - DNA, 333 bp, Homo sapiens
  misc_feature (1)...(333): n = a,t,c or g
nnnnnnnnnnnnnnnnnnnnnnnnnnnnnnnnnnnnnnnnnnnnnnnnnnnnnnnnnnnnnnnnnnnnnnnnnnnnnnnnnnaacttgtatcacatatttagaatattgtttccctccagtatcacatacaaacttggtttattttaaaccactgaatgttacaataagatcagactattgtatattgggattacatgctagcagtataggaggtagtgattctttgatcatagactgctgggattgagtgttgttagtaaatagggtagtggcagataaacagtgggagctgagaccattggttacatgttttgtactttggaatactggtc

SEQ ID NO: 44832 - DNA, 334 bp, Homo sapiens
  misc_feature (1)...(334): n = a,t,c or g
nnnnnnnnnnnnnnnnnnnnnnnnnnnnnnnnnnnnnnnnnnnnnnnnnnnnnnnnnnnnnnnnnnnnnnnnnnnnnnnnnnnnnnnnnnnnnnnnnnnnnnnnnnnttccccattttattctaagaaaacaagagctcttatctttaggtctttgatgcattttgggttaatttttatatatgttgttaggtaagggtctggcttaccttatttcacttagcacttgctatgtgaaataaggtaactaagaaaaaagttggctaagaaataagccaacttttttcttttgnatgnggatatccanttttcccagtgccnttagntgaaaaaac

SEQ ID NO: 44833 - DNA, 316 bp, Homo sapiens
  misc_feature (1)...(316): n = a,t,c or g
ttagtatcaagatgatacggtgatggtttttttttaataatcaaaacaagcagtgccaaaaatggttaaattattgtatacataggtggttatgggataataaggagcattagatatcagattttaagttgaggtgaatataacgttctagagggaattcaggggtctaaagggaacactgacagccttccatttttaatatgnnnnnnnnnnnnnnnnnnnnnnnnnnnnnnnnnnnnnnnnnnnnnnnnnnnntttttttaatcntancagggnantaagggnngnatntnaattagngcnttttttncccaaa

SEQ ID NO: 44834 - DNA, 318 bp, Homo sapiens
  misc_feature (1)...(318): n = a,t,c or g
cgagacctgatggttttataaggggaaaccccttccactcggatctgattttctctcgtctgctgccatgtaaaacatgcctnnnnnnnnnnnnnnnnnnnnnnnnnnnnnnnnnnnnnnnnnnnnnnnnnnnnnnnnnnnnnnnnnnnnnnnnnnnnnnnnnnnnnnnnnnnnnnnnnnnnnnnnnnnnnnnnnnnnnnnnnnnnnnnnnnggtgccacatgttgagattcttgattcctcatatttagcaaaatacctttccatggagaagcatgtaatactttaaagacatagcttaagtnagacatttaaaatt

SEQ ID NO: 44835 - DNA, 330 bp, Homo sapiens
cacccgtctcagctctcttttctcagttctgactactcctgtgccctgctgtcccattttaaaccaggtcaaactcccatttggggaactagcaggggttttgccatatatcctcaacaggaagccacccgacacctcagtgtgacccaggaagttgactctcctcccatcacatcttcttcagtcttccctctgttgccaagagctacctcccatcttcctggcacccggctgcctcttcctttagcactgatccacactgctttgtacctaggccatggactaacaaacttcaccttctgactcttcagaaacataactttaattatt

SEQ ID NO: 44836 - DNA, 330 bp, Homo sapiens
tgtcctttaaaatttttattgaccaagacagatttcaaaatgttttctctaataccccaaagtgaaactttgattgaggttttcaggaaattccagggatcaagtatgtcacccggactttggtttccaggtttcccaaagccttgaaatttccctacagtctaattgctgtttattgccacagaccttcatcctttttcttttgtaacattttccatcttaagaagggtcgtcccattcggccgaggagcgtgttgtctgagtagctgaatggaattactaccagtggaaactatgctgcaagagaggttgataaagcagctgtgaagc

SEQ ID NO: 44837 - DNA, 324 bp, Homo sapiens
  misc_feature (1)...(324): n = a,t,c or g
aataaagccattgcacctagttaagtattcatttgaaacgaaaaacgaaaatgcagccaagtttaaattttgtttgcctgccactgactccaagatccttccaatgatatcaatttttgccttagaaaaattaagtttcatacagttcaacaatttaagttatccaatatcgtaccaatattctgcacctacatttatgtgaagtgttagttttctggtttctgccttattttttcctaaagaaaacatacactggtannnnnnnnnnnnnnnnnnnnnnnnnnnnnnnnnnnnnnnnnnnnnnnnnnnnnnnnnnnnnnnnnn

SEQ ID NO: 44838 - DNA, 325 bp, Homo sapiens
cttgggctttcactgtttctgtcttggttggagatgacatggcatccatggatttcaggacttcctcttttgattccagccactgcagcacagagtttgcctccttgtgaacctcctccattctgttgaggatagcctgaaggctttcctggcgttcatgaagtactccccctagtttctcatacttcaagtttacatctgacatgtcacactggatctccgtcagatctgtcttgccttgggaatcaggtgctgtgatttccatgatgagattttctaaagaagtacctttgcaattgatttcttccaccagagttcccttacg

SEQ ID NO: 44839 - DNA, 325 bp, Homo sapiens
  misc_feature (1)...(325): n = a,t,c or g
ccggagaaagggtttaaactctttcannnnnnnnnnnnnnnnnnnnnnnnnnnnnnnnnnnnnnnnnnnnnnnnnnnnnnnnnnnnnnnnnnnnnnnnnnnnnnnnnnnnnnnnnnnnnnnnnnnnnnnnnnnngtctcattttaaaaataaaaaaataaaaataaagagttaaaccttttcagttttagtcctgttgcattttgggtttcttgttctccaacaatattgtaaataatattgtcagacgtcnacgcggccgcgaattccnnnnnnnnnnnnnnnnnnnnnnnnnnnnnnnnnnnnnnnnnnnnnnnnnnnnnnnn

SEQ ID NO: 44840 - DNA, 182 bp, Homo sapiens
ctaaaagtgaaaaatatatcacacttaaatataatttttgtcaagacattttagctcacccaagtgaaaactcagttcagtctaagaattagaatatagttatgactattgactaaattttgttaaatgtaatatgaaataaacttgttttcatttctttttttcaagaaaaaaaaaaaaaa

SEQ ID NO: 44841 - DNA, 298 bp, Homo sapiens
caagcacagtgcgaatcagtttcccctggacgctgatcctggtcgccatatgtggggaggcgacagggtcggacccaaaggagactgactgcagcttggggacagtgacaggtggatggacattcgggtctaagcctggagtctccttagtagcaacctccctaccccttcaccgcagacactccactgatacaagtcgagagcacttcttcctagtatgcaccccacaacaccatgtggttctgcatcccataccctctggggccttggccatccctgtagccagaaacctcagctg

SEQ ID NO: 44842 - DNA, 291 bp, Homo sapiens
ttggaactcaggactgcctccagcagctgatgctaccctgtactgtccagctgctctcttctcaggggagcttagaagaaggaaatagagtgccacagatggaagaaatgaaaaaggggttagctagagagacagaggcagactaattaccccaagagggaggtagacgctgtccctagagcaaagaaaagggcaagacaaatatattccatctgaaaaaaccttattatgctttaagatacgtctgatttaagtaacaacattcttaagtaaataacaggttttattttt

SEQ ID NO: 44843 - DNA, 286 bp, Homo sapiens
  misc_feature (1)...(286): n = a,t,c or g
gtttctggttttgagtaacctaggtctgggccctctgtcttgtggttctgggtgtgggtggcagatggggtgggggccaaggctntaatcctgttcctcaggaactggggctgtcanttgangntctannactctctagactgtcacagctggatagctntggtccatttttgnntcantgannntttcnnctnctntgnttaangcattatnttgncttnttttattnantatatgggattacaggtnttgcnnaacntagctatgatnatgnattttttataaa

SEQ ID NO: 44844 - DNA, 329 bp, Homo sapiens
  misc_feature (1)...(329): n = a,t,c or g
nnnnnnnnnnnnnnnnnnnnnnnnnnnnnnnnnnnnnnnnnnnnnnnnnnnnnnnnnnnnnnnnnnnnnnnnnnnnnnnnnnnnnnnnnnnnnnnnnnnnnnnnnnnnnnnnnnnnnnnncagctgagtgagataataaatttgcattgttttatgacaaaaagcttttagtgatttgtttcagcagcaatagaaaatcaatagtgtgtcaggttgtgctgtctctatctggttgtcaggatgtgaacttcatgatctatttgtgagggtgtgtgtctgatagtggaggtcactgatttctgtgcagggtctctgatctgatgacctat

SEQ ID NO: 44845 - DNA, 327 bp, Homo sapiens
ttctcttcctgttactgaagatgaaaaggaagaagaaagcagtgaagaggaagatgaagacaagcgccgtctcaatgatgaattactaggaaaagttgtaagtgtggtgtctgcaacggagaggactgaatggtatcctgctttggtaatatctcccagctgtaatgatgacatcacagtgaaaaaggatcagtgtttagttcgatcatttattgattctaaattttactctatagcaagaaaggacattaaggaagtagacattctcaatctaccggaatctgagctctccactaaaccagggcttcagaaagcaagcatcttctt

SEQ ID NO: 44846 - DNA, 303 bp, Homo sapiens
gcagcagttgccagagcagccttttgagaaagctgcctttcagaaacagaatgatacccccaaggggcctcagcctcccactgtgtctcccatccgttccagccgccccccaccagcaaagaggaagaaatctcagtccaggggcaacagccagctgctgctatcttagatggttgaaaactagacgggtggctcactgccattgtcaccaggttggaactcttgcctctgtgaggatgccttctctactgtgcatacccatgaaatttaatacacattttaaaacctcaaaaaaaaaaaaaa

SEQ ID NO: 44847 - DNA, 307 bp, Homo sapiens
tgaaagtctgtgaaatgtatttctttcaaacggctactttgaaatgtctttgaagtcagattcatgaaatacttaaagcatttgtattgtatatttctaaaaataaatccatggcatttttttagatgtgtatagtttgtttaaaaatactttttttagcagatagtcttcaagatattaagtattccttgaaattttgattattatactttttaattgagttatttggcaaaatttcaagcaattgatacatacaaagtaatgtgatggatccttttaatacagtttcataggatagataaatctg

SEQ ID NO: 44848 - DNA, 304 bp, Homo sapiens
  misc_feature (1)...(304): n = a,t,c or g
cgcggccgcgtcgacgtttttgtttttggttctgtttatgtgataaattacacttactgatttgcannnnnnnnnnnnnnnnnnnnnnnnnnnnnnnnnnnnnnnnnnnnnnnnnnnnnnnnnnnnnnnnnnnnnnnnnnnnnnnnnnnnnnnnnnnnnnnnnnnnnnnnnnnnnnnnnnnnnnnnnnnnnnnnnnnnnnnnnnnnnnnnnnnnnnnnnnnnnnnnnnnnnnnnnnnnnnnnnnnnnnnnnnnnnnnnnnnnnnnnnnnnnnnnnnnnnnnnnnnnnnnnnnnnnnnnnnnnnn

SEQ ID NO: 44849 - DNA, 306 bp, Homo sapiens
cttacctaaaaagaacataaacagaaactggtggggggaaaaggacctgataatatttgaagtgtctcagattcacatttgacctttcaatgtcaggggttaacttgacagaggagggaaaatattggctgtaatcacatgagcgcaaaaggaacatatcaacagtcataatttatattatttacgtatttccagcaatacatcttacccattttatgctgattggttggatttcccagtgcttattacgaatgcatcaggaagtcttaacaattggcatcagcaggattctttataatggttgaa

SEQ ID NO: 44850 - DNA, 340 bp, Homo sapiens
ggtttttcaagttggaaacctagtcaagtcatcatggatgactcctcccttgccctcaaatacatgccagttatgcagccaatgtaatcatttcatcttcaggttgcccctggcctgtccatctttgcatccccaagaccaggtctctggtccagatctccatcaccctcatgattctcagggcaacatcctttgctcatctcctccctctaatcttgcttccatcaaatgtgttatttgcacttcaactagatgggatattttaaagtgcacatcagattgtatcattttcctacttacctccttaatacactaaggattaaataaatgggtttttaag

SEQ ID NO: 44851 - DNA, 332 bp, Homo sapiens
caaacctgcaattcttaatatagaagctcatcgtcagtggagtccatccatccacaaaggacattggagagagtcaaactactcctccaaattgacaaaaaccatgtgttttatatccagtcttcaatacgcaacgtgtagtaagagctcatttctctgagcatacattcttggagaaatacaaactttcttcggatatcaaattatttactagaaaaaacatttttatgaagggaaaataatatatgtgagtttaaataggagacaggattcaaagtttcatcatttcactaaatgcatctccatctgaattgtccgtgtgatttttgtga

SEQ ID NO: 44852 - DNA, 329 bp, Homo sapiens
  misc_feature (1)...(329): n = a,t,c or g
ttcccacccagttccctaccaaccccttattttgaaccaattttgacaaatctattttttccctttttttttttaagagataaggtttnantntgtngcccaggccaaagggccnttgaatttganaaattcnnnnnnnnnnnnnnnnnnnnnnnnnnnnnnnnnnnnnnnnnnnnnnnnnntantaaagcctntccantttcaangggtttctgacttccttcntcccgntgggggngaatcanggggacncttttccttttccagctgaatctgaaaccctccntnttgctgaggcgggnggatcntgaggacaaganatcgagacc

SEQ ID NO: 44853 - DNA, 341 bp, Homo sapiens
  misc_feature (1)...(341): n = a,t,c or g
ctgaaaccaagctggtttcaggtcatcactgtcatctgaacagcagagaaagagacacgtgtgtggaaggggtagcatgtgttcagtgtatttttgctgtcagattagcgttttttttttgttgttgttgttgttttgtcgacgcggccgcganttncannnnnnnnnnnnnnnnnnnnnnnnnnnnnnnnnnnnnnnnnnnnnnnnnnnnnnnnnnnnnnnnnnnnnnnnnnnnnnnnnnnnnnnnnnnnnnnnnnnnnnnnnnnnnnnnnnnnnnnnnnnnnnnnnnnnnnnnnnnnnnnnnnnnnnnnnnnnnnnnnnnnnnnnnnnnnnnnnnnnng

SEQ ID NO: 44854 - DNA, 363 bp, Homo sapiens
  misc_feature (1)...(363): n = a,t,c or g
gggtgagacacagccaaaccatatcactgtctatggaggtatatccagtgtgggtagaagacatcccacatgcatgagaccatcacacacagatctgttgtcaactaaggacctgagctgaagagcctggaatggtagtgatgacgactggcatttggaagctgttccacgtgcttccctctcacctagactgttttgtattatttaatttaatttaacnnnnnnnnnnnnnnnnnnnnnnnnnnnnnnnnnnnnnnnnnnnnnnnnnnnnnnnnnnnnnnnnnnnnnnnnnnnnnnnnnatgtactncagcntnggcaacagancgagtcgacgcgnnnngngaattccagatctatnaatt

SEQ ID NO: 44855 - DNA, 318 bp, Homo sapiens
gctgcttgctcatgctctggaggaggtgggggagtagggggagcaggcaaagaaggctccaggccaccccttcgtgggaaagcacaaagactgctgatggtcaaggagacagacgagaaagtggctcccagaggcattgcagctccccccacccccagagcaagagcaccacaacctcatctgttcccgctgccagggagggggctcaggaagctgcacagggagggccccggaaaggccagacttccaggcctcaagtgtctacacgtcagtgtgcaatgccccctgcccgccaccggaaactagagaatgatgcct

SEQ ID NO: 44856 - DNA, 330 bp, Homo sapiens
ttttcagcgacaatccatggctcagagaagttaagtatattgccctcaaatcacacaattaatacataacagagttagggtgagcctgtgctgttcttcagtgggctatacaatagtgttcctttttaactattgaactttgataagagttaagggtatctcataacatggcagagtatagttaaaatccaggtgatcttccgtattttactttaaccacttaggtcgtattgtgttttaaaatttcttttactgtaaaagggaattaaatggtcacctttttggaattttgtgtttacaggtaaaatttatgaagaccattcctggtac

SEQ ID NO: 44857 - DNA, 311 bp, Homo sapiens
cccgtctgtacttttgtttaaatggcatacctttcttctagcacatttatactatctctcttgtcccacagggccatggacattttgagacagcctaatagccactaagtgataatctgatatggtaaaggatttgatgaagtaaatgcgcaaaagcttgatgctttccctgccactcccaggaggtaggtcagttcagtttcggaaccatccaaggaattgtttcattcaactaggaccaagctttgatcttcccaggtggacaccctagatgtccccgcctctcccttaacttggacccaaatccctgg

SEQ ID NO: 44858 - DNA, 349 bp, Homo sapiens
  misc_feature (1)...(349): n = a,t,c or g
gccagtgtttgaaggatagggaaccagaaaggagggaactgcacagagagggagcccaggagttgtgcagagggtcacactgagtgttcagcatagcaccgactggtacatgtatgtgaggaactaccttgagccaagggaaaaaaaaaancttntgaaagcttaaaggtaataatgcccatgttcatgcanagctggnaatanaacntgttcccaccagcctgantggaaaagntnacaattcacaaggctcncaattgggtagggaacccntaagggtcttgcctnantattggggaaananttanccctnnacttgancnctgttttnttccccctncncattttt

SEQ ID NO: 44859 - DNA, 312 bp, Homo sapiens
  misc_feature (1)...(312): n = a,t,c or g
tttccttttatcaggaacttgtttttaaacttgtgactgaaatatcataaatttgcttggcaaatttattgtaaagggtcttgggattaatagattattttaaagcctccacactgatttttttccttagcagacaaggtttttaaactaatcatattttagataacccagtatatgcctctgaacatgaatcagttctaatttctgcactctgttcattttaggaagtgcagcctgtggtgcatacaataatttattctcttgtttagttttttaaaactggatttctggctcatctcttgnaagatgtta

SEQ ID NO: 44860 - DNA, 236 bp, Homo sapiens
  misc_feature (1)...(236): n = a,t,c or g
ctttgttctctttaatgctattgccacagaaacaggatacagatgatatagatactattacactaaacaagctactgaatacgtgtctattttcctttgacccaataatttgtatttatgtattcaaaagtttattcttgtcatataaatgtacnnnnnnnnnnnnnnnnnnnnnnnnnnnnnnnnnnnnnnnnnnnnnnnnnnnnnncgaaactccacctcaaaaaaaaaaaaaa

SEQ ID NO: 44861 - DNA, 315 bp, Homo sapiens
gggcatctgaaaacttgatgttagcattaaaaccaggctgaactttgcatgcaaagcacctttccaaatcacgactctatacatctctcccaccaaaagcagtagcaaatgaggactaccatgataaaatgagcaacccctgacctgtggacaaacatttaacacacgctttccagttaaatgttactattttctgtaggacaacggccatgtataccctagcaaacggataaacataggattccacagtcttaaaaaagaaaggcggttaagggtcgacgcggccgcgaatccagatctatgaatcgtagatac

SEQ ID NO: 44862 - DNA, 330 bp, Homo sapiens
gttcattctaattgatcgactagtaacaaatccctctaaattgaaaaaggtaaaataagcaatgatatggagtctcaaaaaaagtatcatggagcactgaggaaagtttaaattattagagatttgaaagaacatttaaataggattaaaataataaacttttagctacttctgttttctaataagaatatcatatgcagagaaacaaaactgcaagcttattaaaatgggttaaatagcttttaagctgattaaaactacttaatttaaaatgaattatttttgaacctcaagtaaatgatgtaatactcaacaatttattaaaaaata

SEQ ID NO: 44863 - DNA, 331 bp, Homo sapiens
  misc_feature (1)...(331): n = a,t,c or g
tggaggctaaatcacagtcaaaaacaaactgcgtgactgggaattatagtaagaggagttannnnnnnnnnnnnnnnnnnnnnnnnnnnnnnnnnnnnnnnnnnnnnnnnnnnnnnnnnnnnnnnnnnnnnnnnnnnnnnnnnnnnnnnnnnnnnnnnnnnnnnnnnnnnnnnnnnnnnnnnnnnnnnnnnnnnnnnnnnnnnnnnnnnnnnnnnnnnnnnnnnnnnnnnnnnnnnnnnnnnnnnnnnnnnnnnnnnnnnnnnnnnnnnnnnnnnnnnnnnnnnnnnnnnnnnnnnnnnnnnnnnnnnnnnnnnnnnnnnnnnnnnnnnnn

SEQ ID NO: 44864 - DNA, 324 bp, Homo sapiens
  misc_feature (1)...(324): n = a,t,c or g
ttacaagtttggatgttaagggtcttaacatcaagtaaattatagaggtttttgagcatacaggtgatgtgagcaaaggggagtttttatttttatttatttttctttctttattttttggagacagtgtcttaannnnnnnnnnnnnnnnnnnnnnnnnnnnnnnnnnnnnnnnnnnnnnnnnnnnnnnnnnnnnnnnnnnnnnnnnnnnnnnnnnnnnnnnnnnnnnnnnnnnnnnnnnnnnnnnnnnnnnnnnnnnnnaattctnttttantttttttttttttnnanaaaaanggccttcatttccttnncnnnatctcc

SEQ ID NO: 44865 - DNA, 322 bp, Homo sapiens
gggattcacagcctgaagcacaataaacgggtactcttctctcggatggggccctaccctcaacgcaaagtcatcacctttaaccgctacagccatgatttcaacttccacatcaactacggcgacctgggcttcctggggcctgaagatcttcgggtatttggctcccagaatctgaccacagtgaagctaaaaggggtgggtgacagcttcaagaagtatcctgactacgagtccaagggcatcaaggctcacttcaacctggatgagagtggcgtgctcagtctagacagggtggagtctgtatttgagacactggtag

SEQ ID NO: 44866 - DNA, 309 bp, Homo sapiens
  misc_feature (1)...(309): n = a,t,c or g
ggcattcttgcaggagcaggccagtggagagcagctgttcctccaaattttcctgggatgaatatgaacagtacaaaaaagaataaattctaccagaagataaagaaaaaagcaagtattgcataggcacctgagcataggtatgaccttgggaagacattggctccataagcaatgccaagagaatgatcaatagtgagtttgggtgatgcagataaacaatctggataattccatttcttttttcccaaaccctcaaacagagtgccttaaaaaattgttttatcagggaaattgnctnntgccagc

SEQ ID NO: 44867 - DNA, 147 bp, Homo sapiens
gttttatacaagttagaaagtaaatcatttgacagtgtttattctttacatgtactggtttgacttatatgtgtttgttaagtgattattataaggaaaacacattctctatagagcttttatttttttttcctttttttttttttt

SEQ ID NO: 44868 - DNA, 309 bp, Homo sapiens
  misc_feature (1)...(309): n = a,t,c or g
ctcattttgagcccctctcctctgctgctgtttatccccttcttccctctattccttctcttccacctcttctgctccatcctcgcaacttacctaacttcttgctgttccttttccccctcttgnatgatgnaaaaaaataanntgacanggctcncctacanngcannnaaaatgncaaccnnnggaacnantatanannannacataagccanananncancaagcnnntnncatatgggcttgcantantcannnanattncctnngnaannacntnnnnnntncacgaanactcnactnntgat

SEQ ID NO: 44869 - DNA, 306 bp, Homo sapiens
tggggcttctgtttaaaacaacatggacctggctttttccccccttctttttaatttggaatttttttaacagcacatttgctcagatgatttaaaccagggattgtcaaggcagactactgtccaagggctaaatcaactcttcacctgttttatgaatacagttttactggaacacagctatgttcattcatttatatatcatctgtagcagctttggggctatatggacagagttgagtggttgccgtagagactgtgtggcttacaaagcctaaaataattaatgcctggctcttgacagaa

SEQ ID NO: 44870 - DNA, 309 bp, Homo sapiens
caaaacaggactctgcctcttagactgtgttgccctggaagcctgagatggggcattctatgactaccaatattactttcactatcaaccacatgaagtgatcatatgtttcagtaccagatggtgtactgatactttatatatattctcatctgatccttacagggctcatttgagggagataactattatttccccattttatataagagaaaattgaagtttagagatgtgaagcttctttcctaataagtagtttccaggtactaattggcccccccttcctttgctcctcatgtcccagaatgc

SEQ ID NO: 44871 - DNA, 308 bp, Homo sapiens
aattaataatgtaatatccttaaaaaacattaaattgtacactttaggtgaattgtatgtgaatgatgtcttagtaaagctgttttcttaaaaatatactctacagcaaaataacatctttgcccatgtttgtgctactgagaaactcattttggaagccataacatcttgctgtgtgtacactgccatatgtagcctttactcatgctcctcagaggcttccaattcagagagctttctcagtgagccaatgaggatgcacattccagctttgtgcctcctcctgggctgaggatagggcaggtggg

SEQ ID NO: 44872 - DNA, 311 bp, Homo sapiens
ctttcatcaaaggcacagtgtgagagagtagagattttactatattgtctatttctccaaaaaggcctcacctagcactggccttctcatcaggatgggttagctccttgctaaatgttaactgcggaccagcagaatcgacatcagcttcatcagaggagcttgtaagaaatgcagaacctcatggcacactccagacttattgaatcagaatctacattttaacacgttctccatgtgatttatacgaacattaatgtttgagaagcactgggttaattgacgattaagaaatatagtgcatctgtttg

SEQ ID NO: 44873 - DNA, 296 bp, Homo sapiens
  misc_feature (1)...(296): n = a,t,c or g
nnnnnnnnnnnnnnnnnnnnnnnnnnnnnnnnnnnnnnnnnnnnnnnnnnnnnnnnnnnnnnnnnnnnnnnnnnnnnnnnnnnnnnnnnnnnnnnnnnnnnnnnnnnnnnnnnnnnnnnnnnnnnnnnnnnnnnnnnnnnnnnnnnnnnnnnnnnnnnnnnnnnnnnnnnnnnnctcaatcttgaacccgggaggcggaggatgcaatgtgccgtcntnnnantgnactccaccctntctaatatancntgattttntnttccaacnttgtngaanntttntttttnanctctttt

SEQ ID NO: 44874 - DNA, 293 bp, Homo sapiens
aaaagagtgaaatatcataagaattattgacttaagtatattggtactgtgttctttagctttctactgaattggttatagaattgaattttatgttaaaagtgggtatatggtgattggaagcattatttaacttagttctttctgaaagttctgtgcctttggaaactctaaacatagcatatgatgaatctgttccaaaggctgtgagattgtgtgctccacttcgggctcttgctccatagtaagatgcacaattgcactactttctcttctctgtctcctatcttgat

SEQ ID NO: 44875 - DNA, 380 bp, Homo sapiens
ggagaaatagcattaattttgaaagactagaagctcaactgaaggcatgtcattgcaggatcatattttctaaagcaaagccttctgtgttggcattgtctatcattgcattagagatccaagcacagaagtgtgtagagttaacagaaggaatagaatgtcttcagaaacattccaagataaatggcagagatctgaccttctggcaagagcttgtatccaaatgtttaactgaatattcatcaaataagtgttccaaaccaaatgttcagaagttgaaatggattgtttctgggcgtactgcacggcaattgaagcatagctactacagaataactcaccttccaacaattcctgaaatggtcccttaactggattat

SEQ ID NO: 44876 - DNA, 365 bp, Homo sapiens
gccatggggtgaaccaggcaggcatcaccggcacattttgttgaagaagctctgaaattgcggtaagttcagtaacccaatggaagtcgcgcccctagaagaagtggagccagggcaggaaccccatttccccagcactcaggtctcctgctaggactccactgccaacagtgccacacagatccgggcaggaaatccagcattcgatgcaaaagcggtggctcgcacttgaggttaggagttgaaagcaagcaccgataggggagagggaagcctgtgacaccatgggcgcctctggctgctccatccctgtgcctttgccctttccttctggctgctgtggctgtgctgccctgcagccctgt

SEQ ID NO: 44877 - DNA, 373 bp, Homo sapiens
  misc_feature (1)...(373): n = a,t,c or g
cttttnnnnnnnnnnnnnnnnnnnnnnnnnnnnnnnnnnnnnnnnnnnnnnnnnnnnnnnnnnnnnnnnnnnnnnnnnnnnnnnnnnnnnnnnnnnnnnnnnnnnnnnnnnnnnnnnnnnnnnnnnnnnnnnnnnnnnnnnnnnnnnnnnnnnnnnnnnnnnnnnnnnnnnnnnnnnnnnnnnnnnnnnnnnnnnnnnnnnnnnnnnnnnnnnnnnnnnnnnnnnnnnnnnnnnnnnnnnnnnnnnnnnnnnnnnnnnnnnnnnnnnnncctacaaagtgctggtattccaagcgtagccaccacacccagccaaggccaagtctttctaacgattacttttgtccttcagttcttggaaccttgggcctcta

SEQ ID NO: 44878 - DNA, 362 bp, Homo sapiens
  misc_feature (1)...(362): n = a,t,c or g
gatcattatccttaaagatccaaacatgactgaacgaagttatacaatacaggacctgagagaataattcagctagaggtaagtctttatattagagttctatattcattaagtatcccacaattaaagtctgatgttaataacatgaatttggtccagtagagaaatataaaagtatataaaaaataggctctatatgaaaggataaaagaactagactgttgtacaatggtattattttgtttatgttattttgttgccttgacactctgtcagtttgattttagttccttcccttcatgacacttgntaacaatacaaaatggcacttcaaaacagtaagctaaaactcatttggctta

SEQ ID NO: 44879 - DNA, 315 bp, Homo sapiens
caaagttcttcaatgggacataatgtaaaaggacaagggccggcgctctttgcccaactgtgtccagcagctttaaattctactacttaagtagttaaaaatctgttcttttgttgaaggagagaacttatgaatagaaggcagcaaccccagaccctttagaaatgactagtattcagtccctgtaatttaccgggcaataatttcaaactcaaacaatcccaacagcaaggtggctgaagtccaccaaaagttcaaaatgggatatgttctctttaaaattttgagagcgactaaatatgacaaccatctgat

SEQ ID NO: 44880 - DNA, 304 bp, Homo sapiens
  misc_feature (1)...(304): n = a,t,c or g
ctgaaatagagcagtaagcttgtgataaaggccaattccaggtagctcttgaaggttagccatctactttccagtggctgccaaccacagggagtgccagttaacactggaaggattaaggcaaggtcccttctcttgagactcccctctgagatctgaaaaatgaagtggcttaggaacatcagcagtgaagaactgccaagagttggtgaaggttgtctcttccgagggccttctgaagacagggctcttgaacagacaactggaagggctggaccagggataacaggaaagaantgcctgt

SEQ ID NO: 44881 - DNA, 359 bp, Homo sapiens
attttcttccgttttttaggaacctagagacgcgtgcccatttgataagggcttcgtcttccggtttgaccccccaccttcggccttcactgactctcctcctcgcaacacactgcactgtcttcctgacaccctccacgcactcaccgccaacccagccctttcttgttgcttcccatccctcaagcttctgcctcacttacttcccctctgctgggcctgtgcgattctcacaggctgggcagggtaggtagaccgcaatttttttttctggccagtccgaatcctcccttcctctgaaaaaccatctccccacccaccacactgcctcattgcgggggcgagggctacttccgtgt

SEQ ID NO: 44882 - DNA, 344 bp, Homo sapiens
  misc_feature (1)...(344): n = a,t,c or g
annnnnnnnnnnnnnnnnnnnnnnnnnnnnnnnnnnnnnnnnnnnnnnnnnnnnnnnnnnnnnnnnnnnnnnnnnnnnnnnnnnnnnnnnnnnnnnnnnnnnnnnnnnnnnnnnnnnnnnnnnnnnnnnnnnnnnnnnnnnnnnnnnacacttactgtattgattaaggttttctttattttattttttaaaattttacacacacacacacacatattttttttttctttaatttgaaacagggttttgctatgttgcccgtcgacgcggccgcgaattccnnnnnnnnnnnnnnnnnnnnnnnnnnnnnnnnnnnnnnnnnnnnnnnnnnnnnnnnnnnnnnn

SEQ ID NO: 44883 - DNA, 316 bp, Homo sapiens
  misc_feature (1)...(316): n = a,t,c or g
gaacgattgggctgagcataggacgacatgttgcttttcgtggagatgacaaaaccgagccccagaggttaaagtaactttacttagtaaaagtaaagtagtttaactgggatttaaatccagggcatgctgatgtcaaatcatggacgggatgttagcaattcaggcctggccgactccccagcaggtagcatctaaaggaactggtttaaatcctaatgccaaagtatggcaagaaattgctcctggaaatactgatgccaccccagtaactcatggaactgaaagctcttggcatgaaatagcagntacatca

SEQ ID NO: 44884 - DNA, 354 bp, Homo sapiens
tgaggtcttgtcacctggtcctgtgcccccacaggaaccagaggtaggatgggagggggaacgagagcctctttctccccagaccccccggcccaggcctgttgatccgcgccccaggacccccttctttgcagagcccgaggagcctcccctgtcccctcgggcagatctgttgtgtctgctgggctggagataagactggggagagacaccccaacctcccagggtgggagctgggccgggctgggatgtcatctcctgccgggcgggggagggctctgccctggaagagtcccctgtggggaccaaaataagttccctaacatctccagctcctggctctggtttggagca

SEQ ID NO: 44885 - DNA, 329 bp, Homo sapiens
  misc_feature (1)...(329): n = a,t,c or g
cnnnnnnnnnnnnnnnnnnnnnnnnnnnnnnnnnnnnnnnnnnnnnnnnnnnnnnnnnnnnnnnnnnnnnggtgaaataagccagacacagacagacaaaatctacacaataccaattatatgataagtctgagtcaaaatcatagaagcagagagtaaaaggcagtagccagggactcagggagaaggaaatggggaggtgccagtcaaagggtacaaagttataaacaagatgaataagtcctagagttctactgtttagcatattgcttgtagttaacaatactttttatatacttaaaaatttgctaaaagtgtagatcctatgt

SEQ ID NO: 44886 - DNA, 67 bp, Homo sapiens
ggatccctaggtttggattagcagtcggaccagggtgggcttgcaggctgcactttttttttttttt

SEQ ID NO: 44887 - DNA, 318 bp, Homo sapiens
  misc_feature (1)...(318): n = a,t,c or g
gcaagattaatttccacaatgcttgggccacttgtttgaacctgcaacttcatcctaatttaaaacaatcctttaaccctaggcaaaaatttacatttccatgccttcttataaccttttacaaaaaaacacatttnnnnnnnnnnnnnnnnnnnnnnnnnnnnnnnnnnnnnnnnnnnnnnnnnnnnnnnnnnnnnnnnnnnnnnnnnnnnnnnnnnnnnnnnnnnnnnnnnnnnnnnnnnnnnnnnnnnnnnnnnnnnnnnnnnnnnnnnnnnnnnnnnnnnnnnnnnnnnnnnnnnnnnnnnnnnnnnnnnnnnn

SEQ ID NO: 44888 - DNA, 325 bp, Homo sapiens
gaaaattatcatgtaagacaatcaaggaaaccatacttttgtagattatttttccatgaaggcaatttgacaagcctaacaaagaccaagttgttcaaactatgtttctaggaatatagtttaacagaaacaagaacaagttgaaaactgttatgactattcatatgtctctatattgtacaggcaagtaagactgttgttcttccaaatgttcccaattgaaatcaaaagaatatctgtacagctcaattttcacaataagtttagaatcagaaaaaaaaattttactaaatcctaatgaaataacaatcttccacataaatta

SEQ ID NO: 44889 - DNA, 324 bp, Homo sapiens
cttggaacacatgttttctggcaaagagtggttctaagagatggatgcttttccttaggttttcttactgaaagctgtatgtaactgaagtaatattaaaagtaagtttttttctaagcctaggctggttttggcagtagaagcaggtgaatgaagtggcaggagcagtggctgtttcagtgggtcacacataaagtggctgtaagactgttgttcaaagcaaagcaaaaatcttaaatgccttctattcttcaaagaatgactagaggttcaaaatactgtaaaactggacctggccttgttaaccttttttcctcctagtat

SEQ ID NO: 44890 - DNA, 329 bp, Homo sapiens
  misc_feature (1)...(329): n = a,t,c or g
cttatggtcttgtttgttgacatgacaaattaacattcttatagttacatctggaaatgagcatttgaaatagataatcctttaagccttgtggcaaaatttttgtggcttttgtttaactttgaaaggttattatgcactaaccttttntggaggccaatcttnggnttatatacaganacangatntttaannaaactgtntttggnagngataanatnntntatttngaagtagantngntnttncntnataagaagtatngtaaantcttgtttcngnnnncanttttntcnntaatntnatnatnngnntgntannntcatact

SEQ ID NO: 44891 - DNA, 309 bp, Homo sapiens
cggaaccccgaaggggtcagtccgggatcggcagatggggcgctgtagaggacgttcttaggcagtagaggactgcgcggccggcgaaagcctagaagacttgggaattttgcctaccttgtgttcctcctttgtctctcggtatcttcgttccagggccagaggcaggattggttttattttgcagacagaaatcacacctcaagtggacagcgctcaaaacacgttataagcagtatagtacaacgataatactaaacaccgatatggcacttgctcgttgccgtctgcattctttttttttttttt

SEQ ID NO: 44892 - DNA, 312 bp, Homo sapiens
  misc_feature (1)...(312): n = a,t,c or g
atctcgactcactgcaacatccccgggnnnnnnnnnnnnnnnnnnnnnnnnnnnnnnnnnnnnnnnnnnnnnnnnnnnnnnnnnnnnnnnnnnnnnnnnnnnnnnnnnnnnnnnnnnnnnnnnnnnnnnnnnnnnnnnnnnnnnnnnnnnnnnnnnnnnnnnnnnnnnnnnnnnnnnnnnnnnnnnnnnnnnnnnnnnnnnnnnnnnnnnnnnnnnnnnnnnnnnnnnnnnnanccaanacttgctttccttattnggnctaagaactcactttttntttgggcaagcncacagacattaagaccanaaagt

SEQ ID NO: 44893 - DNA, 335 bp, Homo sapiens
  misc_feature (1)...(335): n = a,t,c or g
nnnnnnnnnnnnnnnnnnnnnnnnnnnnnnnnnnnnnnnnnnnnnnnnnnnnnnnnnnnnnnnnnnnnnnnnnnnnnnnnnnnnnnnnnnnnnnnnnnnnnnnnnnnnnnnnnnnnnnnnnnnnnnnnnnnnnnnnnnnnnnnnnnnnnnnnnnnnnnnnnnnnnnnnnnnnnnnnnnnnnnnnnnnnnnnnnnnnnnnnnnnnnnnnnnnnnnnnnnnnnnatctgccnagccangacgttgctttncttatttgtnctntaacntactattttttgggcangcttncattnnttnnacctgtnnntccgtttnacnccnattcngagnttaac

SEQ ID NO: 44894 - DNA, 322 bp, Homo sapiens
tgacgagtcaaaggtattctcagggatcagttagaagacatagtgaatgtaagtttaggatcaagattgtgtttgtatttctcagtggtgctatggcttacctgacaatataccctatgtatattacctcatttattccacacagcagttcttgagactacatcacacagcagttcttgagactacatcaggatactgtccatgggtctttgtgtatttccagggaagggagtttctaaagagaggccccagaaagctctgtccctacaatgagaaggcgaccttgcttttctttgctgagcattgctatattaagaccacc

SEQ ID NO: 44895 - DNA, 347 bp, Homo sapiens
  misc_feature (1)...(347): n = a,t,c or g
ggtnnnnnnnnnnnnnnnnnnnnnnnnnnnnnnnnnnnnnnnnnnnnnnnnnnnnnnnnnnnnnnnnnnnnnnnnnnnnnnnnnnnnnnnnnnnnnnnnnnnnnnnnnnnnnnnnnnnnnnnnnnnnnnnnnnnnnnnnnnnnnnnnnnnnnnnnnnnnnnnnnnnnnnnnnnnnnnnnnnnnnnnnnnnnnnnnnnnnnnnnnnnnnnnnnnnnnnnnnnnnnnnnnnnnnnnnnnnnnnnnnnnnnnnnnnnnnnnnnnnnntntgcatnacggtttnaactgggantnatttagaaccaacncaanccctttttatggattcnngnnnaaaaaaatttnccccc

SEQ ID NO: 44896 - DNA, 315 bp, Homo sapiens
gtccacagctgctcccaaattaccaaaaatcaaataagtagttgccatgtgtgatagcaggattagaggctgcctcaatttccattatggaaaaataacgtaaattgccacaagtcccgccccccagtctcaaataagcacaaaggacacttttattcagatcctgcatactgtgaaacagcattgttgcctggctgcttcagtggcgggctcaattctgctggatctgtcactacacaaccaacagccagttaaagctatttcctagcttctgcaggacagctcaattcatgatttttcttctgaaataactga

SEQ ID NO: 44897 - DNA, 314 bp, Homo sapiens
  misc_feature (1)...(314): n = a,t,c or g
gggatataatattgtcctcattataattcacttcaactttgcacaagtaacaaaattataatgaggacaatattatatcccctgaatataagaggccactcataagatgtatcattatttcatgagaaactaagaaagaaaaagcactgccaattaaactatgacgcctgttcactgaaatacacaactgatttcagagatattaaaaagtgaaaaaacttgcatcttaaaatcaatgaactctactactaagaatggctgactgcactgagctttactatgtatagagcantantctaanagctatgnaaaaa

SEQ ID NO: 44898 - DNA, 318 bp, Homo sapiens
  misc_feature (1)...(318): n = a,t,c or g
ctcgctctctcnnnnnnnnnnnnnnnnnnnnnnnnnnnnnnnnnnnnnnnnnnnnnnnnnnnnnnnnnnnnnnnnnnnnnnnnnnnnnnnnnnnnnnnnnnnnnnnnnnnnnnnnnnnnnnnnnnnnnnnnnnnnnnnnnnnnnnnnnnnnnnnnnnnnnnnnnnnnnnnnnnnnnnnnnnnnnnnnnnnnnnnnnnnnnnnnnnnnnnnnnnnnnnnnnnccgcctcagnctntcaaagggggattacangggngagccactgccccggncttcacgagnnanncctttnngtaggaaccaantnnaaaagaaagcc

SEQ ID NO: 44899 - DNA, 352 bp, Homo sapiens
  misc_feature (1)...(352): n = a,t,c or g
tttttatatatatttattgtattttaaaacatgggtccacatacagctcatatattacattatgaattaacagcatgatttaagaaaagtaattttgttaattatttttataaaacaaacccagnnnnnnnnnnnnnnnnnnnnnnnnnnnnnnnnnnnnnnnnnnnnnnnnnnnnnnnnnnnnnnnnnnnnnnnnnnnnnnnnnnnnnnnnnnnnnnnnnnnnnnnnnnnnnnnnnnnnnnnnnnnnnnnncnnncnncaaantnatccggccatggngcncttnncnngnnnnccnnttatnntnagnttagnncnnnnnnntnnctanctgcttactctcncgagtctc

SEQ ID NO: 44900 - DNA, 342 bp, Homo sapiens
cttcgtagagtttttgtgagaattaaaggcaataaagcatataatgacttagcccagcggcctgcaggcaatacatgttaatgaatgttagctattattactaaaggatgagcaattattattggcatcatgatttctaaagaagagctttgagttggtatttttctctgtgtataagggtaagtccgaactttctcagactggaggttacattcacatcagtctgtcttcccctgcggatggcctcagccctgggtggccagactctgtgctcacaatccagagcaatggatcctccaacaccaccaggtggatgtggagcaggagagctggatcgtggca

SEQ ID NO: 44901 - DNA, 353 bp, Homo sapiens
ccacgctttcttcttctccagaaataaaccctgaaactcaagcagctttaatcagagggcaggattccacgatagcagcatcagaacagcaagtggcagcgagaattcttgattccaatgatcaggcaacagtaaaccctgtggaatttaatactgaggttgcaacaccaccattttcccttctggagacttctaatgaaacagatttcctgattggcattaatgaagagtcagtggaaggcacggcaatctatttaccaggacctgatcgctgcaaaatgaacccgtgccttaacggaggcacctgttatcctactgaaacttcctacgtatgcacctgtgtgccaggatac

SEQ ID NO: 44902 - DNA, 157 bp, Homo sapiens
atttattcaataatattaccacatgctgggtttctgtaccagaaatggccagttgatgtacaaatgtatgttatttttgcttaaattcatttaaattttttttaaaataaaggggcagcatcttctaaataagttttatcagctttttttttttttt

SEQ ID NO: 44903 - DNA, 345 bp, Homo sapiens
  misc_feature (1)...(345): n = a,t,c or g
nnnnnnnnnnnnnnnnnnnnnnnnnnnnnnccnnnnnnnnnnnnnnnnnnnnnnnnnnnnnnnnnnnnnnnnnnncgtccagcctcattatagatttaagtgggaatttgttgatgttgaatcatgttgaaacatttttcttgagattattggcacatttgtttccttcctatgtggattctctctatattctgaatataagtatcttgtccaatatatgttttgtgaatattttctcagtcgtcgtacaacatcttaagagactgctgttgtattttgtgccttttctttttttttcccacccccctatagtttttgctacttgtctgggtctggngtacatat

SEQ ID NO: 44904 - DNA, 317 bp, Homo sapiens
  misc_feature (1)...(317): n = a,t,c or g
gccatgattgctttttataatgtaaaagccctaggtatttatttttaattagagtgatttttataagcttaattatttttgcctaattcttagcatgttattgttgaatattttttctgttcctacatcacctctcttacactaaaatgaaaaactatgcttatacacatgccctgcctcattaactatgcagtttgatattacattagctccagtttaataaatatgtccaagatcctcaatgaatttgtgatctgggaagagatctcaagagatcattctcttcattcaggctgtttccangacatctggtgccc

SEQ ID NO: 44905 - DNA, 306 bp, Homo sapiens
cctgaaataccttactttttaactgtcacacttcaatactcattctctacacctcctaaccaggatctttctccctaaaaatccttacaactgggcttctgccttctctttttaatctgtactcacaatcaaagagttcttaatctcactctttagtttttgctttaaacttgatatggaacttaagattccctctggatcctctcttgaactctggctttttgaagtaatttttccatctccagtgcccatccatatccaaactgatcaaagtcccttgatcccttttctataatctttctgtta

SEQ ID NO: 44906 - DNA, 308 bp, Homo sapiens
  misc_feature (1)...(308): n = a,t,c or g
gtatattttacaacaatagaaaaactgtaaaaccatactaattagaacctataataaatactcattacttactgatattctgactgactacctggagcagattaccagaaattccagatcaagcccaatgtctaagttagtaatgaggtatggatctgtggttaatgcttactaaataagcattctatttacaaattcatttttacctgttctagaatctaggtttcanaattattcancagttttctacttacacctttctnacatgtangtnaccaaacnaaggtttactggncatgaacaaatat

SEQ ID NO: 44907 - DNA, 306 bp, Homo sapiens
tcgtcgtcatcctcgtcctcatcatcctcttcttcatcttcatcctcagccacgttcttggctttcacaggaacaacttttgcagctttctttcctttggctggtgtagtctccatagcttcttcttcagagtcatcttcctcatcgtcatcgtcatcctcatcatcttcgtcatcctcatcgtcctcatcctctgaggcaggggcagcagctgctgctttcatcgctgctggttcaatttcatcttcatcctcatcctcgtcctcgtcatcctcctcatcctcctcactgtcatcatcctcctct

SEQ ID NO: 44908 - DNA, 326 bp, Homo sapiens
  misc_feature (1)...(326): n = a,t,c or g
ccctaactgcccattgggtacttgtgacgtagtacatcaagtactattaatatttccagttttcactcctctttcacctgaacgnnnnnnnnnnnnnnnnnnnnnnnnnnnnnnnnnnnnnnnnntcactcgcttgctgtctcccaatccccaccatccaattagtttttcccactcccattctttctaatccaagctcaaaatcctcaaagtcatatctttgacatcctctctttgacattctgttctgctatttaaacgatggncanttntgnagttcttcttgcataacttcttatatatgtatcatatactccctntncatt

SEQ ID NO: 44909 - DNA, 312 bp, Homo sapiens
tgcccccatgaccatacagtaagagccagactcccccaggaccctgcccgatcctgcccctgctgacccccagggcctggcccacagatctcagtggcacaaatctgccactagggaccccgcgtgcccagttctttcccatcccagagacgggaccaggctgattcctctgcctagaatgctcttccccaggtctttctcctggcttgcgcttcctcaatcctcacatgccagcctgaaggcggcctccccttcctcctcctggcccgtttagcagggtcaccccaacccctctatcacatgccatgtgct

SEQ ID NO: 44910 - DNA, 322 bp, Homo sapiens
gttgatctgagtttctcagttagccattcctagaagtcccctgctccttccaaatcctagaattcgtgaattacaacctagggggacagattcttctttccatgctactcctttcttacaatttgaagttgaaattctgacctaatgcttattacagggaaagcaaactgttccgtagttcttctgggtgcctgagattctctgctgaggggtgacacctgcaggagaatttggactcagagcaaaagtaactagatgctggagaagtaaatacagtatttaaaaaaggccacagactgaacaactgaagctaaattattgg

SEQ ID NO: 44911 - DNA, 320 bp, Homo sapiens
  misc_feature (1)...(320): n = a,t,c or g
ttgagatcgaattggcaggatgctttcactagtgaactagcgaagtaaagaatatcacaggctgtgatgccagtagcattggagggaggggaactctttgtcatgccaggtactttatttctctcgtaattactcccatttaagagcaattgcttttacannnnnnnnnnnnnnnnnnnnnnnnnnnnnnnnnnnnnnnnnnnnnnnnnnnnnnnnnnnnnnnnnnnnnnnnnnnnnnnnnnnnnnnnnnnnnnnnnnnnnnnnnnnnnnnnnnnnnnnnnnnnnnnnntatcctgggaccacaggcacgtgtcacagca

SEQ ID NO: 44912 - DNA, 320 bp, Homo sapiens
ctcaaaggcttttgtgtaaaccggtcattctctttttttggttatttttggtttagttggactgtcattgctaacaaggtttgttacagggtcagctagaaaggattagcaatgctttccctcccagagccaggctacttggtggaacaaagtgagatttcactgcttgtgattattaggtgagaagatactgttctgagacccactaaagttgcaaaatggaatgtgaattaagctggagtatttatttaaaaataaagtaatagaagactcccctttaaaaaaagcttcatttcgacataatttcaagacttgtagac

SEQ ID NO: 44913 - DNA, 321 bp, Homo sapiens
  misc_feature (1)...(321): n = a,t,c or g
catggtttaatccagtgattgaccaagaattgttttttgtgtctaggaatgcgtcatgaaaggcgtcacttccacgagagtttatgagagagcataagccaagggacgttgacctggactgaagttcgcattgaactctacaacattctgtgggatatattgttcaaaaagatattgttgttttccatgatttagcaagcaactaattttctcccaagctgattttattcaatatggttacgttggttaaataaactttttttagattcaagtcgacgcggccgcgaattccnnnnnnnnnnnnnnnnnnnnnnnnnnnnn

SEQ ID NO: 44914 - DNA, 323 bp, Homo sapiens
  misc_feature (1)...(323): n = a,t,c or g
tttaatttggagggacattaatttctagcaaaagagatcaggcaagtcccttctacaccctaaaacccatttcttttttgcccccaattttaaacctgcctcactattaaagcttcaagacaaactctacaatcattttatcaagctccaaacaagctgcagaagtactgaaattgtttttaaattataaatcaatttgggaagaagtgacattgataatattccagtttctcacctagagaaaatggcatttcgcttcatttaaatctctttttctttattttgaaacagggnctcgctctgnnatccaggctggagnacac

SEQ ID NO: 44915 - DNA, 321 bp, Homo sapiens
ggtacctggtgctggactaggaagactggcctgggaaatagctatgctaggttatgcttgtcaaggaaatgaatggagtttttttatgctcttttcttccaactttgtactcaacagatgttctgaaattaataaatataaactttatccttggatccatcagtttagcaataaccggagatcagctgatcagattcgacccatctttttccctgatgttgacccccacagtcttcctcctggttctaacttttctatgacagcaggagattttcaagagatttattcagaatgcagtaagtccaaatcaagcgtttaaat

SEQ ID NO: 44916 - DNA, 332 bp, Homo sapiens
ctaaaccagtctgtccctgcccccagaacagaggcattcctgccttctcacttgtgaccaagctatgcactccaaatggaatgccctacctattacatacccatttaccaagtcccatctggtctgtgaatcttttcctaatcagtttgctacacactaaatttttctagattacccaaaagcatatattttgatacttgtactatcttctgtttcatgagaaaaaaatcctgtctctgaaactaaaataccataatcttcttgaagacaggcaatatgtcatatatacttcattatttcctactatgcatagtgtagcacaaacctagtat

SEQ ID NO: 44917 - DNA, 243 bp, Homo sapiens
gcggcatcggtgaggctgggacccccttctcaagctggtggcctctgcaggcctaggtgcagctcctcagcggctccagctcatatgctgacagctcttcacagtcctggactcctgccaccagcatccacactgccggcaggatgcagcgccgtgtcctctctgtgtccctgctgctgccagggcttcctcttccgggcagaaacaataaaaccacttgtgcccactgaaaaaaaaaaaaaa

SEQ ID NO: 44918 - DNA, 334 bp, Homo sapiens
caacaactgatttttgtttaagaaggaatcgtagcgtatgtctgttaaacaccatataagtaactgactctgaacaccagatgaggctgtaacaggtcaggtttaagcacaagcatatagattcacgaaatggcgtcagaccctgccctggttgcttaggatgcacaggagaataaattgcactctctccttcagtttgcagtctgatgagagagacagccagatgtacagtttaattcatgttagtatgggaagtactgggactgtaatattaataacatgccaacaaggaaggaccagttacaatagcttagccggagtgtcaaggaaggct

SEQ ID NO: 44919 - DNA, 332 bp, Homo sapiens
  misc_feature (1)...(332): n = a,t,c or g
cctgcctctacttacttaatggtccagcttgtatttataaatgactcagcttgtatttatccacatatatcactcttttttctggggagaannnnnnnnnnnnnnnnnnnnnnnnnnnnnnnnnnnnnnnnnnnnnnnnnnnnnnnnnnnnnnnnnnnnnnnnnnnnntctcatagtgctgagattataggcttgggcctgnaaacncntgccccagtatgnttntcgaagagataaatnaatagataanataacannantagctgcnatttattaagcatctattacataccangtatnacattaggtcctggacatacattccctctaat

SEQ ID NO: 44920 - DNA, 333 bp, Homo sapiens
  misc_feature (1)...(333): n = a,t,c or g
cgannnnnnnnnnnnnnnnnnnnnnnnnnnnnnnnnnnnnnnnnnnnnnnnnnnnnnnnnnnnnnnnnnnnnnnnnnnnnnnnnnnnnnnnnnnnnnnnnnnnnnnnnnnnnnnnnnnnnnnnnnnnnnnnnnnnnnnnnnnnnnnnnnnnnnnnnnnnnnnnnnnnnnnnnnnnnnnnnnnnnnnnnnnnnnnnnnnnnnnnnnnnnnnnnnnnnnnnnnnnnnnnnnnnnnnnnnnnnnnnnnnnnnnnnnnnnnnnnnnnnnnnnnnnnnnnnnnaccaaggggtattcttaacagagatggcancatcacaccctaattntnatgttgg

SEQ ID NO: 44921 - DNA, 327 bp, Homo sapiens
attttatatgtaccagtgaaataagtgtgctttaagtataaagagaaaattttaacatgcttccactttaaaagaataggttacttaaaaggaaataatgataatagtaataccagtagctaacattcattgaatatttgccgtatgccaggccttgttcaagtgctaacacatgtgatattttccatccacacaacaaacaacccagtgaggttgtcaccctcactttacagaagagaaaatgggggcatagagtggttaatagtctggccaggatcatgcatctggtatgtggtgaagttggaattcaaacccaggaagtttggt

SEQ ID NO: 44922 - DNA, 324 bp, Homo sapiens
gctggatataggattctcagttgatatacttgttctttcattactttaaggtagttgttctatggtctcctgatctgcgctgttgctggtaataagtatgtaatgaatcctatctttggttcagtgtagttaatgtgtctttttcctgttgccttaaagctattttaattgttcttgctgtgaagtagtttactgatgatgtgcttggtgtagatttatatacatatatgctcatggtttgttgaacttttttgatttctgggtttataattttcatccagtttggcaaatgtgaaaccagtatttgttgaaatattttttgtc

SEQ ID NO: 44923 - DNA, 330 bp, Homo sapiens
caggcatgggccaccaaggttggcccataagaatttttctgtgtaaaacttcccataggtattgaatctgtaacctctgctacattagggaatgatgccatatagtgaactaaccaatttaaaacaaagaaagagagagaagcaggcaagaaaaaagtgaaagagctggaaagagagagagaaagaggaaagaataggaaggagcagagaaagaatgagaaggaaagaagataaccataaaatatggactgaagaagaattagagagagaaatcacagttttgatgtttacgaatttttaatttgtggccttttaaatctacttcatgtg

SEQ ID NO: 44924 - DNA, 330 bp, Homo sapiens
  misc_feature (1)...(330): n = a,t,c or g
ctgttttctaggctggagtgcagtggcatgattataacgcattgtgatctcaaactcctggcctgagcctcctgaatgtgtannnnnnnnnnnnnnnnnnnnnnnnnnnnnnnnnnnnnnnnnnnnnnnnnnnnnnnnnnnnnnnnnnnnnnnnnnnnnnnnnnnnnnnnnnnnnnnnnnnnnnnnnnnnnnnnnnnnnnnnnnnnnnnnnnnnnnnnnnnnnnnnnnnnnnnnnnnnnnnnnnnnnntgcactttacttttgataagcatgacattaatgtaacaatttcccaaaataaaggagaaagtactttttttttttttnaaac

SEQ ID NO: 44925 - DNA, 330 bp, Homo sapiens
  misc_feature (1)...(330): n = a,t,c or g
ttatgaggtcatcattatgttctggtcactagcacagaataaggtccatttatttatttagtttttaaaattttttttttttcaaaaaagggggganaaaangtancctttgngatnggttnaccttttctttaattctagggngggtatatggctgccaaggnccaaaaattggaggancagtttcgatcaaatgctgctntgcaaaaggatgggacttcntctacaatttttaggggagtngccatctatgttaanggatncccaggttgagtnctttttacttaaccctattttggcatgtatttttattaggattgaaaatgattt

SEQ ID NO: 44926 - DNA, 328 bp, Homo sapiens
  misc_feature (1)...(328): n = a,t,c or g
ggaattcttaattgataaactgaatcttccataaatcaagagaactgatgtgtactaaaatagcacagctgaactaaacctttccttgttaggaaaaaaacacaaagaccatgttcaaagcttaactttccaaaccttactagacgtcgacgcggccgcgaattccnnnnnnnnnnnnnnnnnnnnnnnnnnnnnnnnnnnnnnnnnnnnnnnnnnnnnnnnnnnnnnnnnnnnnnnnnnnnnnnnnnnnnnnnnnnnnnnnnnnnnnnnnnnnnnnnnnnnnnnnnnnnnnnnnnnnnnnnnnnnnnnnnnnnnnnnnnnnnnnnnn

SEQ ID NO: 44927 - DNA, 324 bp, Homo sapiens
tctgtaaggcctggatttaaacttgatccccaagtaatggagaaccaaaggaatgacattccctgctagaaacatcattccatccacagtcgtggaaggtggccggtggcagggaacactgttaggaggaactccctgagccgtgaaggccagtggtgggcaggacggggtgggaggagtgtgcagacctgctggactctggcttggctgtttgcgggcactcatgccatgccctgaagcaggggactttgctgcagatccaggttctctctgctgggattccctggccttcctggtgtggttttgcttttgttcttagaattg

SEQ ID NO: 44928 - DNA, 335 bp, Homo sapiens
aactgaaccattatggtttaattagtttatccacttgagccttttaatatttacaagggcaaaatttgaaaattgactacagaatgaaaggagagtctcatgacccaaatgctgagtgaaatagatgctgcaatccgattcctagcatttggaagaacactaaaagcatttctacatcaccttctgataactcccatagctgttgagtcatctgcaaccaactttattaaaaacattatatttcaaactatataattttaaacatcagtgacaggacacgctgctatctgaattccaaggtgtttctgacttgctaccattcccatagcatcatg

SEQ ID NO: 44929 - DNA, 326 bp, Homo sapiens
  misc_feature (1)...(326): n = a,t,c or g
nnnnnnnnnnnnnnnnnnnnnnnnnnnnnnnnnnnnnnnnnnnnnnnnnnnnnnnnnnnnnnnnnnnnnnnnnnnnnnnnnnnnnnnnnnnnnnnnnnnnnnnnnnnnnnnnnnnnnnnnnnnnnnnnnnnnnnnnnnnnnnnnnnnnnnnnnnnnnnnnnnnnnnnnnnnnnnnnnnnnnnnnnnnnnnnnnnnnnnnnnnnnnncaaagggactctttattgagcacaaactttggccataaagcctatcctctgtttgggctgtcctttcatatgcttaaaataaccctttgacccacaactctgcaactgtcttctgtgttt

SEQ ID NO: 44930 - DNA, 325 bp, Homo sapiens
  misc_feature (1)...(325): n = a,t,c or g
attaacagtcaccatggtctgatttggggaacagtattttatcatggcggggacctctcctacccatgtatttcttgaaagcagtggggcctgagggagaagagggccacggagccagctgcaggcagcctgcgtagagggcttccccagctctgtggtgagtctggtccactctgtccacccagccccaaggcagcctcctgagctgggagagaggcttcctgaggtcgctttctttgctgcctggggtttgtaggagggagggaggtctttttctgtctagtcgacgcttgancnatannatntncaatttcnnntntccaat

SEQ ID NO: 44931 - DNA, 335 bp, Homo sapiens
  misc_feature (1)...(335): n = a,t,c or g
aatagatttgtggactgagacctcaggagggagaattccttcagaatccctaagggacgtaaaggctctctcactgtgctctcaaaattaaggtgctgatggattacttggagatcacgagtcacacaccagaggcaaatatcgagaaggaaaagtcacacagaactataaaaatggccagagaaacagaaatgttaaggagatcttacttattttaaataacatattttggacaagggactaatctcaaagaggnnnnnnnnnnnnnnnnnnnnnnnnnnnnnnnnnnnnnnnnnnnnnnnagcaaaagaaggaccatcacccaaatgcccatc

SEQ ID NO: 44932 - DNA, 326 bp, Homo sapiens
tttacagggtgatgtaaatgaaatccaaaaggtaaagcttgagatcctaacagtgaaatttaaaaagcgccctcggtggacacctgacgactatataaacatgaccagtgactgttcttctttcatcaagagacgcaaatatattgtagaaccccttagtaaagaagaggcggagtttccaatagcatattctatagtggttcatcacaagattgaaatgcttgacaggctgctgagggccatctatatgcctcagaatttctattgcgttcatgtggacacaaaatccgaggattcctatttagctgcagtgatgggcatcgctt

SEQ ID NO: 44933 - DNA, 326 bp, Homo sapiens
gcgatggaaccaccagggtgagtggtgcaggtagtacgccacaggattgggcatcggctgggtctcatagtggaagtccatgcaggtgaggtctcgccagcaccggtccccccggatcttgatcaggcctgctccaagcatgatcctgaagatcagccaccggaagccccacaggacaatccgggatgtgggggtatgctggggcagccttgacagcgtccacagagggcacaggaagatccccaggaaccccgtctccagaagctgggactcccatccgaaagagtaccagacatggcccacattaaccagggacatgtagaggg

SEQ ID NO: 44934 - DNA, 325 bp, Homo sapiens
gtttggaggaaccttctcaccttctcctaacacatggggaccattcccagtgagacctgtgaatcctggcaacacaaatagctctccaaagcataataacacaagccgtctacctaaccagaacgggactgttttaccctcagagtctgctggactagctactgccagttgtcctatcactgtctcttctgtagttgctgccagtcagcaactgtgtgtcactaatacccggactccttcatcagtcagaaagcagttgtttgcctgtgtgcctaagacaagtcctccagcaacagtgatttcttctgtgacaagcacttgtagt

SEQ ID NO: 44935 - DNA, 332 bp, Homo sapiens
gggtactatgggccccagtgtcagtttgtgattcagtgtgagcctttggaggccccagagctgggtaccatggactgtactcaccctttgggaaacttcagcttcagctcacagtgtgccttcagctgctctgaaggaacaaacttaactgggattgaagaaaccacctgtggaccatttggaaactggtcatctccagaaccaacctgtcaagtgattcagtgtgagcctctatcagcaccagatttggggatcatgaactgtagccatcccctggccagcttcagctttacctctgcatgtaccttcatctgctcagaaggaactgagtt

SEQ ID NO: 44936 - DNA, 337 bp, Homo sapiens
  misc_feature (1)...(337): n = a,t,c or g
cgcggccgcgtcgaccacagatcaaggagaaaaagaaaaatgagcttctgcagaaagccgtcattacacctgattttgaaaaaaaccactgtgttccaccatatagtgaatcaaagtatcaacttcagaaaaaacgcagaaaagaacgacaaaaaacagcaggggatggctggtttggtatgaaagctccagaaatgacaaatgaactgaaaaatgatctcaaagcactgaagatgagagccagcatggacccgaaaagattttacaagaagaaatgatagagatggcttccccaagtacttccagattggaaccattgttgcaatccanctgattt

SEQ ID NO: 44937 - DNA, 336 bp, Homo sapiens
ccattttccatttagaagcaaatccctacttacctccctgcacttagctcagattcccctgggatgtctttcaaaatttcacacggctcctagcctgccttaggtagcggtccttgtttctccacagcaacacctggatactggcatcacagcacttaatatattttattagtatactgcacttacagtatcacaatcctgtagtgttggttttctgtcttccccactagactgtaagtaacttgataatggggactgagtatcccatttctctattcccagcatctggttcaagacctggcatatagtacctgttccacaaaaatgtgtcttgaa

SEQ ID NO: 44938 - DNA, 267 bp, Homo sapiens
tttggaatgaagatagatacggatttaaatgccaggtctgccacttactagctgtgtgaccataaacaattcaacaagtatttattaaatgcaaaactgaagatacaaaatataggacatggactgtgatctcagggagctcatattccactgaaatcattgaaatggacaatcaaacatatcattggaatttggtgttaagtgcaacaagaatggtgggtctgatgtttttagaaaattaactcagattgggtttttttttttttt

SEQ ID NO: 44939 - DNA, 327 bp, Homo sapiens
aaggtaatgtatgctgtttgtttatttgtttgtttgggggagagtttacttcctgctccagccttgccccctacacatgtgccacatgctttccttactctgtgctcacctctccactgcagtcctagggcacatctggacaccaaggtgtggtgagcctccagaagataacctggcctcctcaccccaggcaatgacccaggagtagcggaattactagaagaaccacagcccagcagagaagtcatcctcttcgcttattatgttattccatagtagtaactgaggcactgcagagaaaaagtctcaagattaaaacctcaaaag

SEQ ID NO: 44940 - DNA, 335 bp, Homo sapiens
  misc_feature (1)...(335): n = a,t,c or g
ctaccatagttacttattttactataataaaaaaagaaaagaaaaaaagctgcctgttaagtttcacgtccacctctctgttcaaattctagtaaaagagaagaacaaagacacactcaaaactgaggtaggnnnnnnnnnnnnnnnnnnnnnnnnnnnnnnnnnnnnnnnnnnnnnnnnnnnnnnnnnnnnnnnnnnnnnnnnnnnnnnnnnnnnnnnnnnnnnnnnnnnnnnnnnnnnnnnnnnnnnnnnnnnnnnnnnnnnnnnnnnnnnnnnnnnnnnnnnnnnnnnnnnnnnnnnnnnnnnnnnnnnnnnnnnnnnnnnnnnnnnnnnnn

SEQ ID NO: 44941 - DNA, 336 bp, Homo sapiens
  misc_feature (1)...(336): n = a,t,c or g
attttgagatcagggtcnnnnnnnnnnnnnnnnnnnnnnnnnnnnnnnnnnnnnnnnnnnnnnnnnnnnnnnnnnnnnnnnnnnnnnnnnnnnnnnnnnnnnnnnnnnnnnnnnnnnnnnnnnnnnnnnnnnnnnnnnnnnnnnnnnnnnnnnnnnnnnnnnnnnnnnnnnnnnnnnnnnnnnnnnnnnnnnnnnnnnnnnnnnnnnnnnnnnnnnnnnnnnnnnnnngatcctgannttccagccnnatnganggtaantagttctatgtnncangnaggcctgnnttaannatactatcntaccntaacctgtttanngtggacnttttnctat

SEQ ID NO: 44942 - DNA, 288 bp, Homo sapiens
  misc_feature (1)...(288): n = a,t,c or g
nnnnnnnnnnnnnnnnnnnnnnnnnnnnnnnnnnnnnnnnnnnnnnnnnnnnnnnnnnnnnnnnnnnnnnnnnnnnnnnnnnnnnnnnnnnnnnnnnnnnnnnnnnnnnnnnnnnnnnnnnnnnnnnnnnnnnnnnnnnnnnnnnnnnnnnnnnnnnnnnnnnnnnnnnnnnnnnnnnnnnnnnnnnnngaacnnaacanaaaacagnagaancggcttatcaanaggggatnagantctatggctatgatgtaccnacnaaacanaaatgaaanagnngnaanaaaa

SEQ ID NO: 44943 - DNA, 329 bp, Homo sapiens
gttcctctttgtagttctgctaaagtattttctaactgtagccatttgtgttgaatgtggtcaagcaatgtttcacttcttagtcttcctgcatgaaagatcatagaaagggtaaaaatgaccttcattttacatcatacatttaatccacaaatgtttgtagataaataaccttgattgaattatattttaaatgcataaacaaacctgccaactgaagaaattatacattctttatataacgaaaagacttcttgcagtgtaaacaattgtttatttcatttacacaaggtgaaaaaagtacttactcatttctgccagtttctgct

SEQ ID NO: 44944 - DNA, 338 bp, Homo sapiens
ctttcttgctgatctgccatgcagtcttcttcctatgcaatggcaagacatctgtgattgcttctcttttatgtctttctctgtccagcgctcccacccctgaaaaatataagtacccagttgaggagttagaataaagcaaaatatgctgcattgtccttaaaaacaacagaaaagtattgggtacttagtatttctattctctggatagtaataccaaaatgcaatattatagtggtttgtgtgtcactccatgtgggtaaaagcacacgatttcttggctttccatttttctgtgtcccaatttaaagtaccacacacagctggttttttacctt

SEQ ID NO: 44945 - DNA, 329 bp, Homo sapiens
  misc_feature (1)...(329): n = a,t,c or g
ggttaatcacattatacttaaaacacattatccaatggtccaggagaaaaaaattaaacatgctgtcactttcacttaccagacattatctcacactagagacaaaggaaaatatatattacctcagatttggaaattcaaaaccctgccttacaatttcctttattactgtatcnnnnnnnnnnnnnnnnnnnnnnnnnnnnnnnnnnnnnnnnnnnnnnnnnnnnnnnnnnnnnnnnnnnnnnnnnnnnnnnnnnnnnnnnnnnnnnnnnnnnnnnnnnnnnnnnnnnnnnnnnnnnnnnnnnnnnnnnnnnnnnnnntggtggtgg

SEQ ID NO: 44946 - DNA, 325 bp, Homo sapiens
cttggttaagtttggtccgtcggaggctgcggcttggtattctgttgggctcctcctctgcctggtctctctttctcttgcctggttttggagtcacgacatcctcttccttccctggcttctctgcagtatcttcttcctcttccttgataatcactgtcttctgggagacttcccctctttggggctgtttttgatgtggtggtgaatccatggtagctaaagacctcttgcggctttgagaggccttaggctggagctccggggtgaacctagatctacctgctggttccaccttttggatctgggaggcatgaattggtgg

SEQ ID NO: 44947 - DNA, 337 bp, Homo sapiens
cttccttctcagtcggatcaacaaagactggctggagggcactgtccggggagccacgggcatcttccctctctccttcgtgaagatcctcaaagacttccctgaggaggacgaccccaccaactggctgcgttgctactactacgaagacaccatcagcactcccctattgaaagacctgctggagctcacaaggcgggagttccagagagaggacatagctctgaattaccgggacgctgagggggatctggttcggctgctgtcggatgaggacgtagcgctcatggtgcggcaggctcgtggcctcccctcccagaagcgcctcttcccctgg

SEQ ID NO: 44948 - DNA, 251 bp, Homo sapiens
tgagaatcagcctaaatgaaaattttccaaacaaatacattctgcttttgctaaatcctatgctaataaaagacactgtgcttcttataaaactttgacccacattatgtagcctaacagaaataaaggcatctgctaccctctatgaatttactattggagtctaccagtccctaatacaaataggaaaagaatgctcccaataaaagactcaagttactgaactttcccctccttaaaaaaaaaaaaaa

SEQ ID NO: 44949 - DNA, 321 bp, Homo sapiens
gagagatatgagaattaatgaagttgtgttctctttcataccaataggctgtgcatacactgtgtgcttggcactatgctaggcactagataaagagacatggtttcaattatcaaggaactcagtcttgtaatcagggcaaatgtaggaaagcagacaatgaatagaacctcccagaacatttttgtgtttcaatttttaaagtagagatttttcattagagtttgaaatagttaattaaattttcttgggctggtttgatccaattcctccctacttctctattttagatggaaattgaggcccacccatagaggttaa

SEQ ID NO: 44950 - DNA, 320 bp, Homo sapiens
  misc_feature (1)...(320): n = a,t,c or g
ctcattacagaaatggacaggtctttattggaaaatcagagtctcagcagctcctgtgaaagtctaaaactagctctagagggtcttactgaagacaaggaaaagttagtgaaggaaattgaatctttgaaatcttctaagattgcagaaagtactgagtggcaagagaaacacaaggagctacaaaaagagtatgaaattcttctgcagtcctatgagaatgttagtaatgaagcagaaaggattcagcatgtggtggaagctgtgaggcaagagaaacaagaactgtatggcaagttaagaagcacagaggcnaacaa

SEQ ID NO: 44951 - DNA, 315 bp, Homo sapiens
  misc_feature (1)...(315): n = a,t,c or g
tcttacataggttagaacacaactatttagtgatagtgcattataattttatttcctttaaaacattgcgtgtgtgtgtttaggaaagatattattataattaattcatcatattatagcaaatttggaaaacaaatatcacccttaattctgtcactgaattacaacatcttatcatttttatatgatttttgtagtcttttcctaaatgtttttccattgttgtaatcctagtatactaacttatagctcgttttttaaacacaatgtctcctgtatgcattttttatgttacagtcgacgcggccgnnaatg

SEQ ID NO: 44952 - DNA, 329 bp, Homo sapiens
gtccatgagtcatttcagaaggtttaaagtggtgggagaaaaatgcccctcattttgcatggaacattgaccataccctaactaccactatctttctctgttttttcttgcatctcatttctcagcttggttgcaccctttgagaggcagctggaggtaaagctgacctcaagaacctgagtcttattctgcatggtgaatctgttggcattgatagtctgtctggtagcatgagaagaatcccagcatgcatccttaatttgggagattgtttctacagcaaaatatagggaaataacagagttccacttggaacattttaatctttt

SEQ ID NO: 44953 - DNA, 330 bp, Homo sapiens
caagaagacccacacgcccccctccagcagctgaattcctgcagctcagcagccgccgccagagcaggacgaaccgccaatcgcaaggcacctctgagaacttcaggatgcagatgtctccagccctcacctgcctagtcctgggcctgacccttgtctttggtgaagggtctgctgtgcaccatcccccatcctacgtggcccacctggcctcagacttcggggtgagggtgtttcagcaggtggcgcaggcctccaaggaccgcaacgtggttttctcaccctatggggtggcctcggtgttggccatgctccagctgacaacaggag

SEQ ID NO: 44954 - DNA, 329 bp, Homo sapiens
gttggcttgttacaaaacgactgaattagctttgagcaaaatataaaagtaatcatattttcaaagtaaagttttaaattctgtctatcagctttcagcaaatacttactgagttgaattgttaaggcaatattttggggagaaagacaaaagttatagcatttaaatagcattatttattttgaaaatttcttccagaaaaacggaggaaacctcaactgccaaagccatttatttttagctagacgaaaaaataaagtttaagaaggccatttgtgggtctcttgtctttattgcctctggggaactgaatcagactaaagcctttt

SEQ ID NO: 44955 - DNA, 330 bp, Homo sapiens
  misc_feature (1)...(330): n = a,t,c or g
nnnnnnnnnnnnnnnnnnnnnnnnnnnnnnnnnnnnnnnnnnnnnnnnnnnnnnnnnnnnnnnnnnnnnnnnnnnnnnnnnnnnnnnnnnnnnnnnnnnnnnnnnnnnnnnnnnnnnnnnnnnnnnnnnnnnnnnnnnnnnnnnnnnnnnnnnnnctgccttacaggagtcagtcatcaactccactcattcatcctttagggcagcggtcttctaaccctggcatgaaggaagttttcttgtctcttacacctactggggatattgctatgaaaggcaaaatcatgcgcttgaatatcatantantattaaagttttaaagacttaccc

SEQ ID NO: 44956 - DNA, 333 bp, Homo sapiens
  misc_feature (1)...(333): n = a,t,c or g
cnnnnnnnnnnnnnnnnnnnnnnnnnnnnnnnnnnnnnnnnnnnnnnnnnnnnnnnnnnnnnnnnnnntttttttgagtnggancntnantntgtcncccaggctgnagngctggggngcgatnggggntnantgcancctctgcntcccnggttccngcnaggacatgantaggancngcagcnnanccanagaanacgaactatangattagtangttaagttcncnantcataattgnntcttnaatatgctttgaatatnnangatactnccngacnccnttatcntnntngctatctgcgngtntactcntttgngttnttcatttgc

SEQ ID NO: 44957 - DNA, 330 bp, Homo sapiens
ctctttcaaaacaaaattccataaaatagaatttaaaatgccatacagaaggaagaaaaacttagtctaaatcacctcttggatgctttgatttacccttttcaaacaatggatgaatggaaaaagaatcctggcctgttactaaacattggtcaaagacatgagtaggagcagcagcagacccaaagaaaacgaactaaaagattagtaggtaaaagttcaccactcataattggatactttaatatgctttgaatatcaaagataaaacagacaccattataaataaaagctatctgtgtgtatacacatttgtgtttttcatttgct

SEQ ID NO: 44958 - DNA, 329 bp, Homo sapiens
ctttaattaaggcaagtcactttcttcttcttaaagctgttttctagtttgagaaatgatgggattttagcagccagtcttgaaggtctctttcagtatcaacattctaagatgctgggacttactgtgtcatcaaatgtgcggttaagattctctgggatattgatactgtttgtgtttttagttgggagatctgagagacctggctttggcaagagcagatgtcattccatatcacctttctcaatgaaagtctcattctatcctctctccaaacccgttttccaacatttgttaatagttacgtctctcctgatgtagcacttaag

SEQ ID NO: 44959 - DNA, 337 bp, Homo sapiens
ctttcccggagctgcgcctctgcatgtgttccctttcgggtctcattccctcccccgatatgtcaggtgaaatggcactgggcgtaacgggcgcccttgctgtgtttccttgtccgagggaatgactgggtttgcccaggaggaaagagccggctctgggatgaggtgtcagcgtgtgtggggtgggatgtttcgaatccacgtctcatgtggtattcagcgtggtattcagcgttgttgctattaaactagaaataataacagtgaaaagacatagcgtttcacttataaggctagagtatagaactgtgccataaatgagggaattacggaaggg

SEQ ID NO: 44960 - DNA, 330 bp, Homo sapiens
caggatctgggggaagaggggccgctcctcccgctggaacttgaggcagtcagacagcaggcgccgcatggccttggggcagttgctggagattttgctgaggtccggggacagatagccacggcccaccataaagataatctggtcacggcagccaatgtggctgtaaggcagtgagccagtcataagctcgtagagcacaaccccgtaggcatagacgtctgactggaagctgtaggggttcgggtcctgcatacggatcacctcagctgccatccacagcacagatcctgagggctgctccaagggctgggccccgctccatcgagt

SEQ ID NO: 44961 - DNA, 337 bp, Homo sapiens
aaaatgtcatataaatgaattcatatagtttgcaaccttttgtaccttcttaaaaacaaattagtgtattttggatatagatttgcctttttaatttcatgtctgcatagtattccattttataggcatactttaatcaatattgatgggctgcttatagcaaaaatttgtaactatgaaattacagtatcagaatgtatgaatgaattttgataggtattaccaattttctctcaaaaaagagtggttctaatgtgcaaaagttgttatttttgtataagaatgcctatatccccataccaccagcaacatggtatatcatagaacattttacttg

SEQ ID NO: 44962 - DNA, 331 bp, Homo sapiens
  misc_feature (1)...(331): n = a,t,c or g
tgagactataggcgtgagccaccacactcggcttattttannnnnnnnnnnnnnnnnnnnnnnnnnnnnnnnnnnnnnnnnnnnnnnnnnnnnnnnnnnnnnnnnnnnnnnnnnnnnnnnnnnnnnnnnnnnnnnnnnnnnnnnnnnacagcacccagcccttaatattaagatgtctaccacccagatccatctacagattcaattcaatccctatcaaaatccaagtgacctttttctggagaaaaagaaaaatctctcctgaaattcatacagaatctcaggggaccctgaataaccaaaactatcctgagaaagaagaangttgacg

SEQ ID NO: 44963 - DNA, 337 bp, Homo sapiens
gagagcgtagactttttgaactttctataagagtgtacctccacagtatacagaagacgacgtgaaatttgatctgcaagaaaactgagtccatattcacatatgtatcaaatttgcacttcatttagaagtgtctgtcatcaagtacagcactgaattgaaactgaaaacaagagtcaagaaagagcaaagtcagccatctttatattccacatgaatcctttccctttatggtcttatttgtttctcctcagaaaagacaaaaagctgagctgtataaacacctgtgggctgggggttgagggataaatgaggggcgaaatggaagctgaaggaa

SEQ ID NO: 44964 - DNA, 336 bp, Homo sapiens
  misc_feature (1)...(336): n = a,t,c or g
tttttatatatcctattttttatgtagtgtatgcgtgagccaccgcgcccgnnnnnnnnnnnnnnnnnnnnnnnnnnnnnnnnnnnnnnnnnnnnnnnnnnnnnnnnnnnnnnnnnnnnnnnnnnnnnnnnnnnnnnnnnnnnnnnnnnnnnnnnnnnnnnnnnnnnnnnnnnnnnnnnnnnnnnnnnnnnnnnnnnnnnnnnnnnnnnnnnnnnnnnnatttttagtanagaccgngnttctccatgttgngtcaggnttggattgagctnttgacttcatgatctgantcctggnatcctcnnatngcacactactaanggcnnttttnnaatc

SEQ ID NO: 44965 - DNA, 438 bp, Homo sapiens
  misc_feature (1)...(438): n = a,t,c or g
cttctgttgctatccaagatccactctctttcctccagcaccctgctctctacctggggaggctgacctgtgtggacacaggctctgagtccctaacatgaccagtggaggcaggaaggagagtaagatggaagtacttactgctctggtttccttcctaggaggtcatcctgagccgaccagtccttccactgaagcctgctgctctgctccaggctgnaacgtgtacatgactttctctcttactgggctctattgagggcttccactgctcattccttggggcccagaggtggtatcagtttagcagccaccggccctggactcctgcaccttccctatgccaggagctancttnactntannnnatannattatnnccnanttnnngcncnttacnccctancnntttgantacnnnnagtttgttngtcctat

SEQ ID NO: 44966 - DNA, 444 bp, Homo sapiens
  misc_feature (1)...(444): n = a,t,c or g
atctatagctnnnnnnnnnnnnnnnnnnnnnnnnnnnnnnnnnccnnnnnnnnnnnnnnnnnnnnnnnnnnnnnnnnnnnnnnnnnnnnnnnnnnnnnnnnnnnnnnnnnnnnnnnnnnnnnnnnnnnnnnnnnnnnnnnnnnnnnnnnnnnnnnnnnnnnnnnnnnnnnnnnnnnnnnnnnnnnnnnnnnnnnnnnnnnnnnnnnnnnnnnnnnnnnnnnnnnnnnnnnnnnnnnnnnnnnnnnnnnnnnnnnnnnnnnnnnnnnnnnnnnnnnnnnnnnnnnnnnnnnnnncacnanaacaagaaacataaaagcatttataaagcaattttacattaggatcctgaatcttctaaacatttttcttatgggatattggtagtgccagtaaaagaaactgtgtnataacactattacgntttactgaaatngccnnattgtg

SEQ ID NO: 44967 - DNA, 480 bp, Homo sapiens
  misc_feature (1)...(480): n = a,t,c or g
ccaggatgtgacatagagagtagaaactgagatgtggagtctggcagactctgagttgagaagatgttgctgctctggagcgaactagtaaattataaaagcaagacttgaaaggaacaaactatttccaaattactcaactgtatgcctggacaaagtccaaaaagatttataggagtcatatagcaaggtaaaattaacaaggtatgtcattcagttaaagattaccatgtatgcaaagaagcatgaaatatgacccataattatgagaatcttccgtcaaaattgacacagaactgacacagatgatagaattagcagagggcattaaaacattataactgtattccatgtattcaaaaagttagagatacagaagagacnaaaagacccatatcagacttacaatgatgaaactccactgagatgaanaatatcggatgagattaatggaaattagacattgagaaaaattatgat

SEQ ID NO: 44968 - DNA, 466 bp, Homo sapiens
  misc_feature (1)...(466): n = a,t,c or g
agttcattcttcactctgaagttaatgtacacaagaggccaactaaggatttgcatcctatttactttaaaatgcccaggtgcaattttgaaacaagattctcctttcagaagggcaatcacgaatataaagtagagaattagtagcagtgtcaagagtaaagccccgaggctaataccaaacttctaacataaacggagtgttgaaaggcacatgccaggaattatataaaccgaaggaaaaagacaactggggggtgtgttcccatgcattcgatttggtccaaggagagccaggcccacggagagaggacagacagcctcggccccttcaatcctctctaccatgtcaagaatacctgggctcatggggttangaaaccaatgttattccattcnggccgttctagaataggcatgaatcatttatctgattatggggatcattgcagttactcaagtntttg

SEQ ID NO: 44969 - DNA, 471 bp, Homo sapiens
  misc_feature (1)...(471): n = a,t,c or g
agattatacggaaaagaacatgaagaaagaaagtatgtgaaagttgtgtactggtgagggagtttaagtaatgcctttgattctccaaagttttctcctttatctgtgcctaagatggaatatatatatatttcttactaacttctaatcatctctatagtgccaagaaataggtgttatcacaatctgatagataagaaattttaagggtaggggctcgcacacaattaataaatgaacgagcttggatttagaaccagctctctcagattccagagcaactgatgtttctactgtaccatgttgcttttatgtatgggggaatttttttcttttattgatcataatattttacatatttgtggggcacatgtgagtattcttacatgctaaattgtgcaatgacaagtcagggtatttgagtatcacancttganattatcattctatggnnggatcattcaggctctt

SEQ ID NO: 44970 - DNA, 467 bp, Homo sapiens
  misc_feature (1)...(467): n = a,t,c or g
cacacgaagttanggtctgagcgtgtgtgtgtgtgtgtgcgtgtgtgttcatttagcacgtttaaaaggacacttcattgtcttcttggttgtgtggaacgtttgagaagtctgctgttatttttaacactgcttttatgtaggaaatatgtctttttctgaatgcctaagagatgttctatttgtctttgacctttggcagtttcaacatggcacaactaggcgaggtttttgtttgtgtttttgctgttgctttatttgtttttattctgcttggtgtcctgagcttcttgaatctgtcgtttggtgtctggcactgattttgcaaaattctcaaagtgtaattgttttcagccctttctgctttcttctctttctgagtgcaactatgtgtatgtagtatatataaattgcctacacttttctcttgcttttttantttcctcctctttcctcttgggnnaatt

SEQ ID NO: 44971 - DNA, 383 bp, Homo sapiens
  misc_feature (1)...(383): n = a,t,c or g
nnnnnnnnnnnnnnnnnnnnnnnnnnnnnnnnnnnnnnnnnnnnnnnnnnnnnnnnnnnnnnnnnnnnnnnnnnnnnnnnnnnnnnnnnnnnnnnnnnnnnnnnnnnnnnnnnnnnnnnnnnnnnnnnnnnnnnnnnnnnnnnnnnnnnnnnnnnnnnnnnnnnnnnnnnnnnnnnnnnnnnnnnnnnnnnnnnnnnnnnnnnnnnnnnnnnnnnnnnnnccccatcacatctgattgttcactttttcactgtccctttcctgattccttctcttctccccaacctcttcatgctgaatgtcccatgggctctggccttggtcctcttctctatattcattcccccagntatctttnagggncntgactttantccnnctag

SEQ ID NO: 44972 - DNA, 378 bp, Homo sapiens
cgcagatgtaagaatcagtgtcatggaagacctttgtcaaaacatgtgaacttttatctccaatcttaacagtaatttagagtcattcctctatggattgcatgccctatttaaaggagatttccgtatttcttcaattcgagatgaatggatctttgctgacatggaattgctaagaaaagtagtagtccctgggatccgtatgtccattaaacttcatcaggatcattttacttctccagatgaatatgatgaccctactgtgctctatgaagccatagtatctcatgagaagaacctcgtaatagcccatgaaggggaccctgcatggcggagtgcagtacttgccaactctccctccttgcttgctctgcggca

SEQ ID NO: 44973 - DNA, 379 bp, Homo sapiens
  misc_feature (1)...(379): n = a,t,c or g
nnnnnnnnnnnnnnnnnnnnnnnnnnnnnnnnnnnnnnnnnnnnnnnnnnnnnnnnnnnnnnnnnnnnnnnnnnnnnnnnnnnnnnnnnnnnnnnncctgccaaaaaaaagaaaaaaaagaaaaaagtgtttcaaaatgctgccaaggggttaaaatgtcgacgcggccgcgaattccnnnnnnnnnnnnnnnnnnnnnnnnnnnnnnnnnnnnnnnnnnnnnnnnnnnnnnnnnnnnnnnnnnnnnnnnnnnnnnnnnnnnnnnnnnnnnnnnnnnnnnnnnnnnnnnnnnnnnnnnnnnnnnnnnnnnnnnnnnnnnnnnnnnnnnnnnnnnnnnnnnnnnnnnnnnnnnnnnnnnnnnnnnnnnnnnnnnnnnnng

SEQ ID NO: 44974 - DNA, 375 bp, Homo sapiens
  misc_feature (1)...(375): n = a,t,c or g
gattaactgacacatttgagaaaatgagaaaggaagggatgaataaaacaaactgctgacttcccagttttgctgagtccagcttgccaagcataatagggttaagtgattctgaaaatctcaagggaactttggagctgggaacgttgctggctccaactggttctcacttcaaatgtaacataaactgggattagcaataataggttctggaataaatacagtaggagtttctgccacatgcacttccaaaagttgcattgttgagcacttgcaagaatgtgcccaggcagaagtatatttgctaataataaaaagnnnnnnnnnnnnnnnnnnnnnnnnnnnnnnnnnnnnnnnnnnnnnnnnnnnnnnnnn

SEQ ID NO: 44975 - DNA, 372 bp, Homo sapiens
  misc_feature (1)...(372): n = a,t,c or g
cttgatgatatttgcttttatattagaaaatgcctggttcagtttctaaagttaatctaagttaaaaagaattatatggtctctttttaccccaaataaaagacaagttgcaaaactgtcatcttatgaaaaaaatgtagtagctgtagcttttgatttccaaaatctactgcctacttctttttttctttttttttttnaaaacggnctnncttngtcgctnaacngncnacttnnatnnctaanaaannncccntncnttcctnttttcccnccaaaagtngttnctaanncaaaatgggctntaggggtntncnttagcccngaaacanggntnggnancctngggncttnaggttncntngttnaagg

SEQ ID NO: 44976 - DNA, 106 bp, Homo sapiens
gggaatgttcagatggtcactcaggtactgccggtgggagtgagtagctggctctgacaaaagccatggcttctgatccaggaatttcacagtttttttttttttt

SEQ ID NO: 44977 - DNA, 364 bp, Homo sapiens
cttatattgagcagcaggattttttaaaagaatatttatcacaaaaagtatgtttgaaaaagaaaaactccttaactgtataacactgagtcatacacaagacacattagacaaaagaaaaattaccataaccagatatttgaagaggttgtaaccaaataacctttggcatataaagataaacatgtaaataattttctacatgcaggccttatcttaatatgccaagtcttggtccagcttatatttatgagcactttatattcacttacccatcctttggtttaatttcttgtgtgtgtgtgtgtgtttgttttacagagggttggggaggaatggaagaaggtggttactatttcttatc

SEQ ID NO: 44978 - DNA, 362 bp, Homo sapiens
atttcatgattttccctcagaaaatgagtaacggagtccacggcgtgcaatggtaattataaattggtgatgcttgtttgcaaattgcccactcgtgataagtcaacagccaatatttaaaactttgttcgttactggctttaccctaactttctctagtctactgtcaatatcattttaatgtaattgattgtatatagtctcaagaatggttggtgggcatgagttcctagagaactgtccaagggttgggaaaatccaaattctcttcctggctccagcactgattttgtacataaacattaagcaggttgcttaacctttttatttcaaactctctcaactctaaagtgctaataata

SEQ ID NO: 44979 - DNA, 363 bp, Homo sapiens
ccaggtatgtcacaacttgtgcttttgcacctaatacccttttacttgctactggttcaatggacaaaacagtgaacatctggcaatttgacctggaaacactttgccaagcaaggagcacagaacatcagctgaagcaatttaccgaagattggtcagaggaggatgtctcaacatggctttgtgcacaagatttaaaagatcttgttggtattttcaagatgaataacattgatggaaaagaactgttgaatcttacaaaagaaagtctggctgatgatttgaaaattgaatctctaggactgcgtagtaaagtgctgaggaaaattgaagagctcaggaccaaggttaaatccctttctt

SEQ ID NO: 44980 - DNA, 366 bp, Homo sapiens
  misc_feature (1)...(366): n = a,t,c or g
ctaagatagctaagagcttangaaaataggactgcnnnnnnnnnnnnnnnnnnnnnnnnnnnnnnnnnnnnnnnnnnnnnnnnnnnnnnnnnnnnnnnnnnnnnnnnnnnnnnnnnnnnnnnnnnnnnnnnnnnnnnnnnnnnnnnnnnnnnnnnnnnnnnnnnnnnnnnnnnnnnnnnnnnnnnnnnnnnnnnnnnnnnnnnnnnnnnnnnnnnnnnnnnnnnnnnnnnnnnnnnnnnnnnnnnnnnnnnnnnnnnnnnnnnnnnnnnnnnnnnnnnnnnnntccagcctgggcgaccgancnagantncgnntcatnntatcgngattttctntaaatntggttccngccggaattnncaatat

SEQ ID NO: 44981 - DNA, 361 bp, Homo sapiens
tcttttttgattagttcttcacttttctgtaaatctgttaaaggcggttctacatttaagggtcttagaatagtttcatttacttctgatggtcttggcagatctttctggacagctttatgcattcgtttcatttcctttacacgctctgcatctcgtatggcctgctttcgagcatccacatcagcagcatcttcaatgtaagtatcatctatttcacgttcttccagctccttctcggcattttctggtagaacaatttcaaaatcattcttaggggcaggaaggcccaacaaccctaaacggagatgttctcgggattctctttccatctgcttcacgtaagagggatcactatagt

SEQ ID NO: 44982 - DNA, 287 bp, Homo sapiens
  misc_feature (1)...(287): n = a,t,c or g
ggcacataagcgttggctattttatatatatatgtgtgtatatacatttgatataaacatatatgtatatatatatatgtttggggtttcttttgatacagacaggatcttattctgttnnnnnnnnnnnnnnnnnnnnnnnnnnnnnnnnnnnnnnnnnnnnnnnnnnnnnnnnnnnnnnnnnnnnnnnnnnnnnnnnnnnnnnnnnnnnnnnnnnnnnnnnnnnnnnnnnnnnnnnnnnnnnnnnnnnnnnnnnnnncaaatttgggaggccgaggcgggcggat

SEQ ID NO: 44983 - DNA, 286 bp, Homo sapiens
gctagtccttgccagagacattcttacctctgccctgtgataatattttatgcttgacagtgaaaacaagtgtggccccttgcaccggttagctagaagtacagccagatttcaagctagtgcagtcacctcttccgtcattcttcacaaatcttgtcaacctggatcttagacttcatctgaatcgagttctttgccctcctttgtgcctgcagctcatatggaggtctttgccaccaatgggagatgagcccaaactttcgatctaggtgggtgatgtgtagca

SEQ ID NO: 44984 - DNA, 271 bp, Homo sapiens
atgctctccacaagagatgcatctatctacactctcatcaatcggtcctgttattcagctttccatttttttcttatgtgaatcaaattatatctccttttactttctatatctctgcttactcttgagtttgagcactttatttgcttataagcctttgtggtttcttcttctgtaagttgccagtttctaccttttgaccattttttgtattgggagtggcatatgtttctagttcccttgtaggggatcctttatattgcagacatta

SEQ ID NO: 44985 - DNA, 271 bp, Homo sapiens
ggggaggggagagagagaaaaaaagcagatacttgctgccatattagagaatatgttctaacattcaaacaccagtagctgatgtttcttaactggggtagttaatataacccattttgtttctcttaatagatctcataagtctattttgagaggtattttttaccttacagatagaaaaacacaagaacttgtcttcctcatcaattggtttttaagggagtaaggaaaactgtgtggttggacatacatagctccaacagaaaagtag

SEQ ID NO: 44986 - DNA, 284 bp, Homo sapiens
ctttaaagctggctttgtggtgtgtttgtttacaaccttcctaaggtgtcgatgtctaccagttggaacagtgacacaagagatggtaggcatttcttgactttccatctcacaaattaaatttgtttggtgaattcctgaaggatccatacagagcctggactgaaagcacctgtttcgatcttatgtgctgaaagcaaaaccttttctcatcaaatgtttctcttctttgtctttctggctttcatatgtgtgatctaacttcattggttacatctttatta

SEQ ID NO: 44987 - DNA, 285 bp, Homo sapiens
  misc_feature (1)...(285): n = a,t,c or g
gtaaatttgggtaaggagtttggatttcatttgatgtaatccaaccaaagagttttaagcagaaaagtcttataatctgatctgcaatttgggaacagaactgtaggaaagcaagtctaggtcgacgcggccgcgaattccnnnnnnnnnnnnnnnnnnnnnnnnnnnnnnnnnnnnnnnnnnnnnnnnnnnnnnnnnnnnnnnnnnnnnnnnnnnnnnnnnnnnnnnnnnnnnnnnnnnnnnnnnnnnnnnnnnnnnnnnnnnnnnnnnnnnnnnnnnnnnnnn

SEQ ID NO: 44988 - DNA, 285 bp, Homo sapiens
ataggagcaaccctgcacagagaaacagatcaagtctggaactagaatagagtaggtagcaagcagaaagtagaaggaagagcaagcaaaataaataggttcctaacatctgctatttcccgatttttaaaaagtgaatgcacagacaacagacaccaactctgtacacaaaaacacactttaatgttaactagaattattcctcagatgcacacagtttgcgtttgtttatgcatggtgtagctgccacttacgtagtgtttattacatagctggcactgttct

SEQ ID NO: 44989 - DNA, 270 bp, Homo sapiens
tgcacgtcattaattctggttaatacaactatattagaaactgagaaacaatatggcatggaggttaagatacccgagagctccacagtccttcagacagggttggaattccaggaatcattactctaaccctcttttctgtaaacaagacactctagcacagcacgattaagagttctgcccaaggatgcaatgtgaaacctttaggaagttactgcatttctttgtgctttgaatactccatctgtagaacgggtaatcgtgtaagga

SEQ ID NO: 44990 - DNA, 284 bp, Homo sapiens
ctttcaactatattacattatgcctgaatttgagagggaaggaaggtcctaaagtaaggcaaaggattcatttaggacaacgttctggcctttattttagggcagagtgccactgtttccctttggacgcaggtttcaggctaatctatttgtgcacacaccatcctctaaatgggatgcctccaacccccaaaacgttagttgccagaaagaaagaactaaatcttggtagggtgcttaaaatggtaactaatggaataatcaaagcatcctgcctgcttata

SEQ ID NO: 44991 - DNA, 271 bp, Homo sapiens
  misc_feature (1)...(271): n = a,t,c or g
nnnnnnnnnnnnnnnnnnnnnnnnnnnnnnnnnnnnnnnnnnnnnnnnnnnnnnnnnnnnnnnnnnnnnnnnnnnnnnnnnnnnnnnnnnnnnnnnnnnnnnnnnnnnnnnnnnnnnnnnnnnnnnnnnnnnnnnnnnggaaaaaaaanaaaanaaananttaagngngggttatnctanngntggtnctacnggatntccnggtttnttttttnttntttancncgtgtaaaagggnntactgnagggtnnntttgggnttaattactag

SEQ ID NO: 44992 - DNA, 347 bp, Homo sapiens
  misc_feature (1)...(347): n = a,t,c or g
tcctttcatattcttcaaccaaaacaacatattacagcagattgaatgcagctgttttccattaaagtcagacatttaagagatttgtaaagatataaaactgcttttctcactaaattttctgttttagaaaatatagttctnnnnnnnnnnnnnnnnnnnnnnnnnnnnnnnnnnnnnnnnnnnnnnnnnnnnnnnnnnnnnnnnnnnnnnnnnnnnnnnnnnnnnnnnnnnnnnnnnnnnnnnnnnnnnnnnnnnnnnnnnnnnnnnnnnnnnnnnngtatagttctttttcatacaaatatatttatattaccatgtaatagagttactttttaatgaaataa

SEQ ID NO: 44993 - DNA, 349 bp, Homo sapiens
  misc_feature (1)...(349): n = a,t,c or g
cccgtatctaactcattcacacttacttcacctctattttggctctagttttcttgattatactatttttagaccttcaattggatagctctgtttcctgtttcagcagtattacacagtatttctctacatcccaccatgtacaagaagaaaatgagtaccaagggccctctccctcctgcctctttttctgccttctagcctcaggcttctgtctgctctttcactccctttgcattgctagattttaaaaccttgatgatagngatctctctggagttataatnacatctttcctgtcttgtgtggggattaaccaatagactatttagctacntccacagcagta

SEQ ID NO: 44994 - DNA, 341 bp, Homo sapiens
  misc_feature (1)...(341): n = a,t,c or g
attttaaaaatcaattattaatatattccatcaaaaatcattactactggggccactgactgaatacatttttgaaatctaaatagattcatttagattcaggactgccctatcttaacaataatcatattgttaaaattcagcatagaaattaaatccaatcttcagaaaaaacatttatgccaaatgagtaagactggggatatgtaaaattaagacacagtctgtgctaaaataacttgtcaaaaagaccttaaaagggctgggcgtggtggttcaagcctatnancctggnctatgggaggatgacgcncntgnttantagtngttnngannttaaa

SEQ ID NO: 44995 - DNA, 338 bp, Homo sapiens
  misc_feature (1)...(338): n = a,t,c or g
ctcgtacacgacttaggatttcctcagctttacctcaatattcttccggatgaatcccatgtggagaattctctgcaagtattcattccccttgtggccccttgtctcatagagtnnnnnnnnnnnnnnnnnnnnnnnnnnnnnnnnnnnnnnnnnnnnnnnnnnnnnnnnnnnnnnnnnnnnnnnnnnnnnnnnnnnnnnnnnnnnnnnnnnnnnnnnnnnnnnnnnnnnnnnnnnnnnnnnnnnnnnnnnnnnnnnnnnnnnnnnnnnnnnnnnnnnnnnnnnnnnnnnnnnnnnnnnnnnnnnnnnnnnnnnnnnnnnnnnnnnnnnnnnnnnnn

SEQ ID NO: 44996 - DNA, 343 bp, Homo sapiens
  misc_feature (1)...(343): n = a,t,c or g
nnnnnnnnnnnnnnnnnnnnnnnnnnnnnnnnnnnnnnnnnnnnnnnnnnnnnnnnnnnnnnnnnnnnnnnnnnnnnnnnaccacttggggctacaaacacatgccactatggttggctaatttgtatgnnnnnnnnnnnnnnnnnnnnnnnnnnnnnnnnnnnnnnnnnnnnnnnnnnnnnnnnnnnnnnnnnnnnnnnnnnnnnnnnnnnnnnnnnnnnnnnnnnnnnnnnnnnnnnnnnnnnnnnnnnnnnnnnnnnggctatcctttaaaaagtaattttaaagctacactatacatttaaaacacagaacactaaaatacctcctttgagcgttgaag

SEQ ID NO: 44997 - DNA, 341 bp, Homo sapiens
gtttgaaataaagctattttcctgactagttaaaatgtaatatatttctataaaatatatatcaaaaattgtaaaaaacattcattcctttgaataagtatcttaagaatttttacaaaagaaacaatgcaagaaaaaaacatgaacaaaggagattcataatacatatctataaaaattaacaacaaattatacctccaaacctaacagaacaattataaaaatactatggtgactactaattcaaaataattatataaactagtatcatcagttaatgaatacaattataaatcaaacccataaaataaacatcttaataatatgcaataaaggaaaat

SEQ ID NO: 44998 - DNA, 345 bp, Homo sapiens
  misc_feature (1)...(345): n = a,t,c or g
gccgaaannnnnnnnnnnnnnnnnnnnnnnnnnnnnnnnnnnnnnnnnnnnnnnnnnnnnnnnnnnnnnnnnnnnnnnnnnnnnnnnnnnnnnnnnnnnnnnnnnnnnnnnnnnnnnnnnnnnnnnnnnnnnnnnnnnnnnnnnnnnnnnnnnnnnnnnnnnnnnnnnnnnnnnnnnnnnnnnnnnnnnnnnnnnnnnnnnnnnnnnnnnnnnnnnnnntgtcaaattaactaaatgttattccctttagggtattatcttggaatgagaatttgttggaagctaaaacttgaccacattgtaatgtattttattcaaatggtttagaaacaccaaaaattaatg

SEQ ID NO: 44999 - DNA, 348 bp, Homo sapiens
caaggccaggattcccatggcaggagatacccaaggtgtggtcgggactgtctctaagccttgtttcacagcatatgaaatgaaaatcggtgcaattacttttcaggttgctactggagatatagccactgaacaggtagatgttattgtaaactcaacagcaaggacatttaatcggaaatcaggtgtgtcaagagctattttagaaggtgctggacaagctgtggaaagtgaatgtgctgtactagctgcacagccttaccagagattttataattacaccaggtggatgcttaaagtgcaaaataataattcatgttcctgggggaaaagatgtcaggaaaacgg

SEQ ID NO: 45000 - DNA, 343 bp, Homo sapiens
ctgagaaactttatttctccaaagacttgattccaagaaacatctgtgaaattcactaagtttaagatatgaagagacagactagttatttctggatctaaacaagtagacttagttgtaaagagaacattttactctatctacagaagagcttttaaaaactgcagccaagcctgagggtaagttcaggtgtgtgtgtgatggggcaggaatgcaaaaatgagagcaaaggagaatgagtctcaaattctgtgtgacaagcactgctctgcgtgtttattcctattgactgaggttgttcgtgctaccggctgcaatgcagccagcatcacctgtcagctag

SEQ ID NO: 45001 - DNA, 350 bp, Homo sapiens
tttttttcaagggttctgcatctcgtttattagcacagaaataacaggtttagagtatattacaaaaagagctcaaactgttcagatacagcaactgggcttactaggggacagaaggggaaatacgtcagactactgtacagggacacaaagactcctcatcctaaacaaagtattaaggtacatagacaagtttcttgtaagacagaaaacagagaaatccacagtaactctaacacatcccttaaggaataagcatgtatttgtaggaagcaaacaaagctttccatagagaaaccactttcacaggatgattaggtggacagttcttttacaggtgttagagaagg

SEQ ID NO: 45002 - DNA, 416 bp, Homo sapiens
  misc_feature (1)...(416): n = a,t,c or g
agggnnnnnnnnnnnnnnnnnnnnnnnnnnnnnnnnnnnnnnnnnnnnnnnnnnnnnnnnnnnnntctcgaggatccgaattccnnnnnnnnnnnnnnnnnnnnnnnnnnnnnnnnnnnnnnnnnnnnnnnnnnnnnnnnnnnnnnnnnnnnnnnnnnnnnnnnnnnnnnnnnnnnnnnnnnnnnnnnnnnnnnnnnnnnnnnnnnnnnnnnnnnnnnnnnnnnnnnnnnnnnnnnnnnnnnnnnnnnnnnnnnnnnnnnnnnnnnnnnnnnnnnnnnnnnnnnnnnnnnnnnnnnnnnnnnnnnnnnnnnnnnnnnnnnnnnnnnnnnnnnnnnnnnnnnnnnnnnnaggtttgtgcactngccaagctcttcctaagntggcgncgacgcggncgcgagttccanatctatgaa

SEQ ID NO: 45003 - DNA, 307 bp, Homo sapiens
  misc_feature (1)...(307): n = a,t,c or g
attaaagtgattcatttacctagatagatcacaaatcttggcaatattttgttcctgactttgtggctatcacactataactctgggcatcttaaatctttctttacttcagttttctatggggaaaatgttgcattttgacttctttcaaaaagnnnnnnnnnnnnnnnnnnnnnnnnnnnnnnnnnnnnnnnnnnnnnnnnnnnnnnnnnnnnnnnnnnnnnnnnnnnnnnnnnnnnnnnnnnnnnnnnnnnnnnnnnnnnnnnnnnnnnnnnnnnnnnnnnnnnnnnnnnnnnnnnnnnnnncg

SEQ ID NO: 45004 - DNA, 307 bp, Homo sapiens
ccacaatacagattaaagaataattttcaaagtcttttctagtgaaattagcacagttttctacctaaaattgtcatgaggtgattaaaatcctttggtgtagttcaggacaattgggagttacggcacctgatgggtgtgctgccggacacaccgtgaaagctcctgcagggcagagcccagcccagcagtgtacacatcccagagcagagcacacattccctatctgaacttatagatgaaatcagcctgccagaagttgcctatttagcaataatgtgataactaaaagaaaattaggaaaaga

SEQ ID NO: 45005 - DNA, 317 bp, Homo sapiens
  misc_feature (1)...(317): n = a,t,c or g
tttagtttgtcacagtcttggggacatgggatcatttgagcttaaaaaatactgnnnnnnnnnnnnnnnnnnnnnnnnnnnnnnnnnnnnnnnnnnnnnnnnnnnnnnnnnnnnnnnnnnnnnnnnnnnnnnnnnnnnnnnnnnnnnnnnnnnnnnnnnnnnnnnnnnnnnnnnnnnnnnnnnnnnnnnnnnnnnnnnnnnnnnnnnnnnnnnnnnnnnnnnnnnnnnnnnnnnnnnnnnnnnnnnnnnnnnnnnnnnnnnnnnnnnnnnnnnnnnnnnnnnnnnnnnnnnnnnnnnnnnnnnnnnnnnnnnnnnnn

SEQ ID NO: 45006 - DNA, 284 bp, Homo sapiens
  misc_feature (1)...(284): n = a,t,c or g
caaataagaaaattatgctcttaaaattttttgtttatttgtttagtgcctagtctgtgcagggtactgaagcaggcatggctggagataaaaaggatataatcagttatggacaaagcgctcaagacctaatggtgtttttgaggagcaagatactggtatgaggtagaaaatggtacaggcctacatgccataagggaggtatgggagtgggtataagaagtgtggggagtggngagtctggnattccttngnnnnngaaagggctnnnggntggnnaggtt

SEQ ID NO: 45007 - DNA, 344 bp, Homo sapiens
ctttatttaaaaatctctaactgtaatgtttcataaaaaatatacacgtttctatttacatattccattaattctattagtttgaattagattttaagtccaattttgaaaagcttgcagaatttcttctgaaattacttaaaattactgtatgcataaacttacaaaaacatatgctataccaaggcagagaaaagaaaaaaagtgaagtggctacaaaggtccctggggcatcacctgctcacctaggaaccaggagtactggatactgttccgttactggtaacctatctggatgtaaaggttcataagttacaatgctttttttggttaaaaaaaaaaaa

SEQ ID NO: 45008 - DNA, 346 bp, Homo sapiens
ggaattttcatagttgttgctgcaggacctacaaaagtttaaaattacattggatgtgactcaatgacaagtcccatctgtgtaattgttaaggggacctgattgactcctgtggtttgattgagcaaccaggtaaatagagacctctctccagctttggcaaaacccatcagaggctgctgcagaactcagacagagggatctgcccttgggtttgcttccatcctgttccattgctaagcccttgtgacttggatcctaggactgaaaagtttttagctgcctcagctttcccctgaccttactggcagaggttctgcagatgtttcctttggaagatctcttg

SEQ ID NO: 45009 - DNA, 342 bp, Homo sapiens
gctcctacaacttcttccgccccgacaatgaggaagccatgaaagtccggaagcaatgtgccttagctgccttgagagatgtcaaaagctacctggcgaaagaagggggacaaattgcggttttcgatgccaccaatactactagagagaggagacacatgatccttcattttgccaaagaaaatgactttaaggcgtttttcatcgagtcggtgtgcgacgaccctacagttgtggcctccaatatcatggaagttaaaatctccagcccggattacaaagactgcaactcggcagaagccatggacgacttcatgaagaggatcagttgctatgaagcca

SEQ ID NO: 45010 - DNA, 347 bp, Homo sapiens
gtagcaaagaggtccctggaattggagcaccgtgccccagggcgagcagtgggccatgaggtcagagaggttttatcagagtgtgttattggatacttaccaggtgtgcagattacaccagcttctttggtttgtatgaggcatacataatggaaagccctgccctaggatagctttcaatgtatttgagaagtccagatgtataatgaaaccagaagacatttgaaaagcaaatgaacagtaattatactgaacaaattttattatatgcaaagtggccctgaagatgtagaataaaggagtgacctgcttagtataggctcagtaagaaaggcacatcttgttgg

SEQ ID NO: 45011 - DNA, 347 bp, Homo sapiens
ctgggccgggcggtttagtgtaattgccgccggaggaggaggcggagtaacctctggtcagccgagaaaccccactatcctgtagccataaccgcttaaacgatttgggaggtagtgaagggcagggagctggacctggaggcgccgccgcgacagcagcagccatggaggacgagatgcccaagactctatacgtcggtaacctttccagagatgtgacagaagctctaattctgcaactctttagccagattggaccttgtaaaaactgcaaaatgattatggatacagctggaaatgatccctattgttttgtggagtttcatgagcatcgtcatgcagctgca

SEQ ID NO: 45012 - DNA, 340 bp, Homo sapiens
  misc_feature (1)...(340): n = a,t,c or g
caagttctctggttctgtgtctattctgctgctagcagagtaacctcagacaaataactttataggcatcctnnnnnnnnnnnnnnnnnnnnnnnnnnnnnnnnnnnnnnnnnnnnnnnnnnnnnnnnnnnnnnnnnnnnnnnnnnnnnnnnnnnnnnccctccttcccttcctttcttcctttgtttctttccttctctcctctcctcttttctcctctcctcttcctctacttcctctcctttccttttccttttcnnnnnnnnnnnnnnnnnnnnnnnnnnnnnnnnnnnnnnnnnnnntttttttttaatgagagacagggtctctctctgtcacc

SEQ ID NO: 45013 - DNA, 343 bp, Homo sapiens
gaaagtgccattgtgagacgagcccctggaagagtggacactttcagtctgttctggtggacctgcataccttccttgagttgtggtggccacttgggaccaagacccacacaagcacagtactgctgcaatacctgcaagacagtgcttcccaatagtactgctatgttagtttctgcaagaaattgccacttgagaacacaattgagattcaaatccaggatagttaccttatcaaaaaggaatctcaagaagagtttgatgatacttttccaatttccacttagtcccatgaggacatccacagagaaaaatccgaaacagctgctgaagtactcctgaa

SEQ ID NO: 45014 - DNA, 343 bp, Homo sapiens
  misc_feature (1)...(343): n = a,t,c or g
cgcggccgcgtcnnnnnnnnnnnnnnnnnnnnnnnnnnnnnnnnnnnnnnnnnnnnnnnnnnnnnnnnnnnnnnnnnnnnnnnnnnnnnnnnnnnnnnnnnnnnnnnnnnnnnnnnnnnnnnnnnnnnnnnnnnnnnnnnnnnnnnnnnnnnnnnnnnnnnnnnnnnnnnnnnnnnnnnnnnnnnnnnnnnnnnnnnnnnnnnnnnnnnnnnnnnnnnnnnnnnnnnnnnnnnnnnnnnnnnnnnnnnnnnnnnnnntgagttctttctaccaagaatgttcttcctgtagacttttgtaaggtttgctaccccactctgcccttcaccatgctacctaagct

SEQ ID NO: 45015 - DNA, 347 bp, Homo sapiens
ggagggttcctcttaggtcagatggaggttctcagagccaagtcctccctctctactggagtggaaggtctattggccaacaatcctttctgcccacttccccttccccaattactattccctttgacttcagctgcctgaaacagccatgtccaagttcttcacctctatccaaagaacttgatttgcatggattttggataaatcatttcagtatcatctccatcatatgcctgaccccttgctcccttcaatgctagaaaatcgagttggcaaaatggggtttgggcccctcagagccctgccctgcacccttgtacagtgctgtgccatggatttccgttttt

SEQ ID NO: 45016 - DNA, 323 bp, Homo sapiens
acctactctatcagagaaaaacaggaaaggctcgaaatacaagccattctaaggaaattagggagtcagttgaaattctattctgatcttattctgtggtgtcttttgcagcccagacaaatgtggttacacactttttaagaaatacaattctacattgtcaagcttatgaaggttccaatcagatctttattgttattcaatttggatctttcagggatttttttttttaaattattatgggacaaaggacatttgttggaggggtgggagggaggaagaatttttaaatgtaaaacattcccaagtttggatcagggagt

SEQ ID NO: 45017 - DNA, 322 bp, Homo sapiens
gtcactgagttccacaccacgcccaagatgtccacgtacttgctggccttcattgtcagtgagttcgactacgtggagaagcaggcatccaatggtgtcttgatccggatctgggcccggcccagtgccattgcggcgggccacggcgattatgccctgaacgtgacgggccccatccttaacttctttgctggtcattatgacacaccctacccactcccaaaatcagaccagattggcctgccagacttcaacgccggcgccatggagaactggggactggtgacctaccgggagaactccctgctgttcgaccccctgt

SEQ ID NO: 45018 - DNA, 321 bp, Homo sapiens
  misc_feature (1)...(321): n = a,t,c or g
gttatttgtaaaaattaaaagggttagaagaaaatttcagataaagaatgctatatataagtagaaattggtaaaccagaaggctttataatttcagatcattcaatgacaaagtcacacgtaacacctgttacagaagatacactatcaaggtgtcatgtgacatcttaaaaaactggtgaagtgtgtggntgtctcaaacatganggaaattttatcgcataggttttcccatgtcattactagcccaggtaagaattcttatatattannnatattaccactgngatttcaaaagtgaggccaagtactcttattgga

SEQ ID NO: 45019 - DNA, 318 bp, Homo sapiens
  misc_feature (1)...(318): n = a,t,c or g
nnnnnnnnnnnnnnnnnnnnnnnnnnnnnnnnnnnnnnnnnnnnnnnnnnnnnnnnnnnnnnnnnnnnnnnnnnnnnnnnnnnnnnnnnnnnnnnnnnnnnnnnnnnnnnnnnnnnnnnnnnnnnnnnnnnnnnnnnnnnnnnnnnnnnnnnnnngccgcctgaaagaaagaaaaaagaaagagaaaggaagagaaagaaaggaaaagaaaaaggaaacatacgaggctatggggccgtgtacgggggccaggctgtggcagaagcatcctggcgtggccttctccagccccatcctggttgggtaaggtgtcgccgt

SEQ ID NO: 45020 - DNA, 323 bp, Homo sapiens
  misc_feature (1)...(323): n = a,t,c or g
nnnnnnnnnnnnnnnnnnnnnnnnnnnnnnnnnnnnnnnnnnnnnnnnnnnnnnnnnnnnnnnnnnnnnnnnnnnnnnnnnnnnnnnnnnnnnnnnnaactgcaagtacgtttctaaggaagaagaagccattgaagtttgcaacttgaagtctctgccacagcattatataaaaatatgaatgtttttggttataaattnnnnnnnnnnnnnnnnnnnnnnnnnnnnnnnnnnnnnnnnnnnnnnnnnnnnnnnnnnnnnnnnnnnnnnnncagtatacatacctgggttcatggtcactggcataaagattatatttctca

SEQ ID NO: 45021 - DNA, 318 bp, Homo sapiens
cgacagcagtgccgactggttctctctggggtgcatgctcttcaagttgctgcgggggcacagccccttccggcagcacaagaccaaagacaagcatgagatcgaccgcatgacgctgacgatggccgtggagctgcccgactccttctcccctgaactacgctccctgctggaggggttgctgcagagggatgtcaaccggagattgggctgcctgggccgaggggctcaggaggtgaaagagagcccctttttccgctccctggactggcagatggtcttcttgcagaagtaccctcccccgctgatccccccacg

SEQ ID NO: 45022 - DNA, 328 bp, Homo sapiens
ctcaattttgccaagacatttgaaggctggtgaaacaaaacttcggttatattttcagacttctttgttgaagtgaacagagttaaatcaacatactcttagaatggaattcccctaactacttagttcatatattttttagaacaacaaggatatcagacaattttttcaaaccgtagagactaattcattagtaggctgcaacccacatttaaaaaaatagagggtatgtcagtgaaaatagtataataaacaatgacaaaagcttgtccctccacgaaagcagcaaattaaccagcaaaatctgtcagaatcaactgttggaact

SEQ ID NO: 45023 - DNA, 327 bp, Homo sapiens
cgcggccgcgtcgactcagagactttcaacaacagaatgaagagaggaaagaatcagtgagctcaaagataggctatttaagaatcctgtcagagaagaaaaaaacaacaatgaaaagaaatgaagataacctaaaagacatatacaaaattacctaaaaagaccaaatctaagaattattggtatttaagaggaagtggagaaacagcagaaagtggaaagcaataataacagaaaacttttcaaaacttgagaaggagataaaatccaggtaaaggaaggtcagacataccaaacagatgtgacccaaataagactaccccaagg

SEQ ID NO: 45024 - DNA, 219 bp, Homo sapiens
  misc_feature (1)...(219): n = a,t,c or g
cacagctccaattctgtcacttccctgcttactgaaaaactttaaaagtccactttccctacaaaaacacatcacaatccctgtcttagatttaagaacttttgtgttctgatttccccagccttatcttctaactctccctgttggncaanatgccccattcncctttgnacctttaatananantngnttttgnttntnncnnnnnnatnntnatat

SEQ ID NO: 45025 - DNA, 277 bp, Homo sapiens
cagaacaaggactctggctactgtccttgttctggtcacatttgttagccaagaggacagcagggatagggctgccatttggaagatgaactttactatccagatcacttttccattttaagactgcctcaaatgtggaacttcttgatatatcaaagactacaaaagcaccaacagcttccttgtagtatactcgggtcatgttgccaaatcgctcctgccccgcgatgtcccacagctgcaggcgcaccagagtcctgctgtcccagttgaggac

SEQ ID NO: 45026 - DNA, 120 bp, Homo sapiens
attgtactttatcaaaaattaaaagcattagctgtttgaaagcccctattaagaagatgaaaggcaagttacagactgggagaaatatttgcaaaacatttttttctttttttttttttt

SEQ ID NO: 45027 - DNA, 276 bp, Homo sapiens
ccagatttggggttattaccttagcaggttttatataatttaaattactggattcaacattataaatgtgaagatggctaagtcatgatggccatattttgtcaaaatgctatttatatgtgaaaatgttggttttacttgacgcttattattgggtattataatttttatgtcaaagttcaggtaataaattgtgtcttactttgatttgcatttttaaattaatgagattgaaatatttggatgtcgtatgttaatttgtttcctaccttttaa

SEQ ID NO: 45028 - DNA, 281 bp, Homo sapiens
  misc_feature (1)...(281): n = a,t,c or g
ttttttttctnnnnnnnnnnnnnnnnnnnnnnnnnnnnnnnnnnnnnnnnnnnnnnnnnnnnnnnnnnnnnnnnnnnatatcccattaacctattttcaaaacttattcccagacctgtgnnnngncntnctngnctgggtgtaatgntannacntatctgantggtattggacnaagggttatggaccanctngnnnattgcacctnaancnttnnngttaacattgttgnaggnctnatnaaaaagctntngacttctnaganatnngatgnaataagc

SEQ ID NO: 45029 - DNA, 278 bp, Homo sapiens
gtggtttttaaaaatttaccgtcaacttgaagtattttcctttctcttccatgaagagcagtaacattttttctcttttcttatttttagtaacttttatcttcctgacttccatagccagcatcttattttcttcttggtgtcctttttcccttatcaaatgtaaccaggatctttattatagtggaaatggggccagttgatgaagtctaatatgaaacgaatattttaactttcaaatgcagaagagctaagttgcaaagatagcagaactgtcc

SEQ ID NO: 45030 - DNA, 275 bp, Homo sapiens
  misc_feature (1)...(275): n = a,t,c or g
acaaaattggatgtaattcatagatgctctgtttgggtagagaattggctgtagcatcctgtcctgttcatacatggatcccatagtttggaaaatattgttttagatcaaaggtgctaaaagtatggtttctggatttttaatggctttgaggcacttcctggggttctgtgaggtcaaaaattcttttgatgataatactaagtttttttttcttgtgtgtgtgtgttttgttgnntgttttctggnttttttctttncctttaaattgactc

SEQ ID NO: 45031 - DNA, 341 bp, Homo sapiens
  misc_feature (1)...(341): n = a,t,c or g
gggcctttaaaaatannnnnnnnnnnnnnnnnnnnnnnnnnnnnnnnnggccatgctgctcttagtttcatcacaagtgggtgacttctggctaaataaggtaaaattttagcatgagcaccaatccatggacagggtgatgattttaatgagtttcactgagagctggccaagtgagcatctgatccttttgttttctccatactttgtaagcctgggtgacaagatttntnncncttacnnnacnctnanattagncanannttgtcttnananntntttgnctttnntttgtnannctnannnntagagcannggtaagnatcccatncnngtaattt

SEQ ID NO: 45032 - DNA, 343 bp, Homo sapiens
  misc_feature (1)...(343): n = a,t,c or g
nnnnnnnnnnnnnnnnnnnnnnnnnnnnnnnnnnnnnnnnnnnnnnnnnnnnnnnnnnnnnnnnnnnnnnnnnnnnnnnnnnnnnnnnnnnnnnnnnnnnnnnnnnnnnnnnnnnnnnnnnnnnnnnnnnnnnnnatntaagtggngncggggtttaancaagttgcccgnnctgttntctgtctcctgacctcnnntgactccatgcctanngncnnccanagtgctnngattntttgccnaaantttctactatnattnnggagattgataacntttcnntcnntaggngngtttgntttgaantgtangntnnattnncttngntaagtaaatttcccag

SEQ ID NO: 45033 - DNA, 348 bp, Homo sapiens
ggcgggaggatcaaaatacttgctggatggtggactcagagaccaataaaaataaactgcttgaacatcctttgactggttagccagttgctgatgtatattcaagatgagtggattaggagaaaacttggatccactggccagtgattcacgaaaacgcaaattgccatgtgatactccaggacaagggtaggtgacttatttcctggtgctttaccacacttgttgagcctttgtttaaggataacattttaacttcttgccatttacattctctggatagattttttggtggtttcacttcgtggtaaagtagagtgttactgatgagatggcatctttttgatg

SEQ ID NO: 45034 - DNA, 343 bp, Homo sapiens
  misc_feature (1)...(343): n = a,t,c or g
attttattgtggtaagaacattaaacaggagatctagcctgttaacaaacatctaagtgtatagcaccgtgctgnnnnnnnnnnnnnnnnnnnnnnnnnnnnnnnnnnnnnnnnnnnnnnnnnnnnnnnnnnnnnnnnnnnnnnnnnnnnnnnnnnnnnnnnnnnnnnnnnnnnnnnnnnnnnnnnnnnnnnnnnnnnnnnnnnnnnnnnnnnnnnnnnnnnnnnnnnnnnnnnnnnnnnnnnnnnnnnnnnnnnnnngtgactggctcatttcacatagcataatgcccccaatataacaggatttctctctcttttaagactgaatattactccactgtat

SEQ ID NO: 45035 - DNA, 332 bp, Homo sapiens
  misc_feature (1)...(332): n = a,t,c or g
cctggattaaatttgcagggggtcagctcaatatatgactacatatttgaaaggtatattaaggaattaaatactgaatgaactttaaaaatgtctttccttgctctttaatgataaagaaattaggtatcttcaaatggtaaactgaatttagctttagcaatagattagacgagctaattttaaaattttaactgaaannnnnnnnnnnnnnnnnnnnnnnnnnnnnnnnnnnnnnnnnnnnnnnnnnnnnnnnnnnnnnnnnnnnnnnnnnnnnnnnnnnnntctgttgtttcttttttttatactgccactatactaatgnggaaaaa

SEQ ID NO: 45036 - DNA, 335 bp, Homo sapiens
atagcacttaaccttaacacaaacaagtactggcagaaaaaaagcacaaatacctcttcctttgccaaaacctatagactcattcaaagaactcaggggctgaggtctaaactagttacagtgggctgagatagaaagggcagcaggactgagaaactgttgcatctgatgcggtttaacaggtttaccgtatcactgtggttaagaacctaggctctgtagcctcattgcctccattcaaatcccacctctgccatctgatagctgcatgaccatgggccattcatgtaacctctctatgcctcagactgctcatccaaaacactggaattatt

SEQ ID NO: 45037 - DNA, 328 bp, Homo sapiens
  misc_feature (1)...(328): n = a,t,c or g
gggtattcatgatttaatggaataatctctgattaaaatccaattgcttggcgggactcctttctgagcaagtgagaaaacagaaatacagatttgggccgcatgcnnnnnnnnnnnnnnnnnnnnnnnnnnnnnnnnnnnnnnnnnnnnnnnnnnnnnnnnnnnnnnnnnnnnnnnnnnnnnnnnnnnnnnnnnnnnnngaccccatctcaaaacaaaatacaaggaacaaaccccacagattaggagtctattggccttggccctgaaaagctatatttcatagagttttgctttttcttttaagtaagtaaaaggtagtcatgac

SEQ ID NO: 45038 - DNA, 171 bp, Homo sapiens
ctagtgtaaaaataatgcacaaacagaatactgttttggttaaaatgcaatgctctaaaatctttcctttcaagaagttctatttattgtttcaagcagactactatttgcatttagagcttcattttaagtttatggcctgagtttctcagcagactttttttttttttt

SEQ ID NO: 45039 - DNA, 332 bp, Homo sapiens
  misc_feature (1)...(332): n = a,t,c or g
nnnnnnnnnnnnnnnnnnnnnnnnnnnnnnnnnnncaactaaaccgcatagaagaaggcttggaccaaataaataaggacatgagagagacagagaagactttaacagaactcaacaaatgctgtggcctttgtgtctgcccatgtaatagaacaaagaactttgagtctggcaaggcttataagacaacatggggagatggtggagaaaactcaccttgcaatgtagtatctaaacagccaggcccggtgacaaatggtcagcttcagcaaccaacaacgggagcagccagtggtggatacattaaacgcataactaatgatgccagagaa

SEQ ID NO: 45040 - DNA, 325 bp, Homo sapiens
ctctacagcagtgtcctcatcctggccttcatcagtctggaccgctacctggccatcgtccacgccaccaacagtcagaggccaaggaagctgttggctgaaaaggtggtctatgttggcgtctggatccctgccctcctgctgactattcccgacttcatctttgccaacgtcagtgaggcagatgacagatatatctgtgaccgcttctaccccaatgacttgtgggtggttgtgttccagtttcagcacatcatggttggccttatcctgcctggtattgtcatcctgtcctgctattgcattatcatctccaagctgcaca

SEQ ID NO: 45041 - DNA, 327 bp, Homo sapiens
gtgccctttccagacacttccatccacttttcctctcccctaactcctccattcacctgtccccatctcctcacccactgtgccccaggaaatcatcctgggtactcacatcattgtctagtaggttaaattttaacagggaataaatagttaacacttccaaactgtaatgtctcagtacagtatacagcagaaagggtgctaaatcttacaaacaagtaatagggcttcattttcttcagctttgtagtttgtgaaacatcctagacttctctccgagtgctttccaaatctgtagttgcgcagtcttcaacaaaaactttgggg

SEQ ID NO: 45042 - DNA, 323 bp, Homo sapiens
  misc_feature (1)...(323): n = a,t,c or g
gcagagccttgttagaaattacaacattttatgtgtgtctaattagtatagttactagtaactatataaaacttcttttattttaaaaaatttgataaattgactaaaagatggtatgtgtcatttttctttccctcttgagcttttctgggttaacatctcagggtgggaacaaaatcaaatctttggaaaatcatagactgcttttatgaaccttaaatgatacttttacaataaactcagatttatataaccttttttgagcaaacatttcaaaaaccaatgcatttcttggttcctttataattntactggatgctcac

SEQ ID NO: 45043 - DNA, 322 bp, Homo sapiens
gcgaagtacatgattttctaaataatctgtttcaaagacaaaaaattaggacgcagagaaataatttaattactagagctttgaggccattttaggctaataagcatttgtgggtgggaagcccatttatatacaacatcacatttgtatacctaagaaaagaatcttcaccttatagacatatctatagtaatgtgaacacatttagtctttagaaatttttggccccgatccttagattacaaattggttgtctacacagaagcctcttgatttttcttctatataccgctaccaactctattttgtatcttcaatacag

SEQ ID NO: 45044 - DNA, 326 bp, Homo sapiens
caaaccatcttaaacgttgtgagtaaaagagaagaatatttgtactcttctgccctggagtgaaatcccaacaaatacttgagtaactgtgtatgtcaagagattgtgctgagtggtggagatcagcaggtcaggagatacacggtcctggttctcaatggggcttccagatgagtaagattgttatagtgcagttcagcaagtcttgctgagctcacaagagagactgctcctggaagtgtgctggaaactagatacaattcagggctcccaaaggatgtttaaaaacaatattaattgtcgacgcggccgcgaattccagatct

SEQ ID NO: 45045 - DNA, 325 bp, Homo sapiens
ttttaaacttaacatttttttttcctaaataggaaaaaatgtacactgacaattagattcctctgatgtaataaggtagatcatttattgcacatatttggggttcctactatttttttttctgcaataataatgcaagcagtacatacaggaacatgcttttgggatcttaaactttggaatgtcccgtctaatgtttacctaaactgctaagtttaaatttgctttgatatattttcagttgttggattcttctgagcagagagaaaggtttttttctttaagtggagtaatcatgaacgtctatgaattcgttttctactgg

SEQ ID NO: 45046 - DNA, 331 bp, Homo sapiens
  misc_feature (1)...(331): n = a,t,c or g
nnnnnnnnnnnnnnnnnnnnnnnnnnnnnnnnnnnnnnnnnnnnnnnnnnnnnnnnnnnnnnnnnnnnnnnnnnnnnnnnnnnnnnnnnnnnnnnnnnnnnnnnnnnnnnnnnnnnnnnnnnnnnnnnnnnnnnnnnnnnnnnnnnnnnnnnnnnnnnnnnnnnnnnnnnnnnnnnnnnnnnnnnnnnnnnnnnnnnnnnnnnnnnnnnnnnnnnnnnnnnnnnnnnnnnnnnnnnnnnnnnnnnttggccttggagtatctgtagcaagtgataatgcatatcctgagagctagaagatttttctttaatttttcatcactgnggcatga

SEQ ID NO: 45047 - DNA, 333 bp, Homo sapiens
atttgcacttgtcacattgcttaagtatctgtatgtgttattcatctagctctttgaggggaggatctctataacgttaaccagtgtatcaacagtgtctagcttagtgcctagaatatagaaatatctgtggaataacaatctacttagagtcctctcaattcaaatttgcttttatgcctataggcttctataaggctattctagttaataagtgtatcttcttcctaactcacagttctcaaatattatttcctctataaaattttctcagataactaccaacactctcaccacctcctatcctaagtgctatccatggtactttcataa

SEQ ID NO: 45048 - DNA, 316 bp, Homo sapiens
  misc_feature (1)...(316): n = a,t,c or g
aagagttcttctcatgatctagaacaacatcatgtacccaataatctttttgtttatttgttttgagatacggtctggctcagttgcccaggcagagtttgcnnnnnnnnnnnnnnnnnnnnnnnnnnnnnnnnnnnnnnnnnnnnnnnnnnnnnnnnnnnnnnnnnnnnnnnnnnnnnnnnnnnnnnnnnnnnnngcccagccaacctttctattttttgttagagatgggggtttcngngtgnccgnggctnactgnaatncatgtgttaacnnnncannnanctgntnctncccagngngtnnnccacaaggg

SEQ ID NO: 45049 - DNA, 332 bp, Homo sapiens
  misc_feature (1)...(332): n = a,t,c or g
caaaatattccttcaaatgttggctgctaaggcattggatgttgatcataaaaatatcaataatggaaggnnnnnnnnnnnnnnnnnnnnnnnnnnnnnnnnnnnnnnnnnnnnnnnnnnnnnnnnnnnnnnnnnnnnnnnnnnnnnnnnnnnnnnnnnnnnnnnnnnnnnnnnnnnnnnnnnnnnnnnnnnnnnnnnnnnnnnnnnnnnnnnnnnnnnnnnnnnnnnnnnnnnnnnnnnnnnnnnnnnnnnnnnnnnnnnnnnnnnnnnnnnnnnnnnnnnnnnnnnnnnnnnnnnnnnnnnnnnnnnnnnnnnnnnnnnnnnnnnnnnnn

SEQ ID NO: 45050 - DNA, 320 bp, Homo sapiens
  misc_feature (1)...(320): n = a,t,c or g
aaaagagctatattttttatactcttaatgtaattataaatcagacaataatctgtctaaaaggtttggtcattatgtcagtcagcagtttcaaacagaacatcccaacacccaattnnnnnnnnnnnnnnnnnnnnnnnnnnnnnnnnnnnnnnnnnnnnnnnnnnnnnnnnnnnnnnnnnnnnnnnnnnnnnnnnnnnnnnnnnnnnnnnnnnnnnnnnnnnnnnnnnnnnnnnnnnnnnnnnnnnnnnnnnnnnnnnnnnnnnnnnnnnnnnnnnnnnnnnnnnnnnnnnnnnnnnnggaggctgaggcaggaggat

SEQ ID NO: 45051 - DNA, 318 bp, Homo sapiens
  misc_feature (1)...(318): n = a,t,c or g
ggtttctgctcctacccttacatagaaattcttctcactaagatcagtagcagcctcatgtcactaaattcaagcccttatttcatttgatctctcagtagtagtcaacactgttgaccactcacttctggaaaaactttcctcgcttggattctaaaacaacaccctctggttttttttcacctctcccatctatagttctcagttgtcttttctttgaaatgttggtattctttgatactctgttctcttgtcactctctaaattccccatgggttattttatccatttanttattgggncaaaatagcagactcc

SEQ ID NO: 45052 - DNA, 319 bp, Homo sapiens
tttcaacttaattgtagtcatctcaactaacgctttctaagcactaactcagtgcctggtatcacagtactgacaatgataggagcaatgatacccagcaagatataaacatagtgatattacactacagtaataagacactcttctcattaaggaatcaagatatacacatgtggcctaatttggatacaggacaagacaattaaaaactactgctacgtatggaaaattaaatttgtatggaattagattaagaatagatttgttttgtcttccctttaaaacactgctaaaacaagttcaaaatattttgcccagg

SEQ ID NO: 45053 - DNA, 314 bp, Homo sapiens
  misc_feature (1)...(314): n = a,t,c or g
atctttcccagtgattcgccagatagtcactgtgtctttcattactttcaactgaagtggccctatgtatttatttatttannnnnnnnnnnnnnnnnnnnnnnnnnnnnnnnnnnnnnnnnnnnnnnnnnnnnnnnnnnnnnnnnnnnnnnnnnnnnnnnnnnnnnnnnnnnnnnnnnnnnnnnnnnnnnnnnnnnnnnnnnnnnnnnnnnnnnnnnnnnnnnnnnnnnnnnnnnnnnnnnnnnnnnnnnnnnnnnnnnnnnnnnnnnnnnnnnnnnnnnnnnnnnnnnnnnnnnnnnnnnnnnnnnnnnnnn

SEQ ID NO: 45054 - DNA, 329 bp, Homo sapiens
  misc_feature (1)...(329): n = a,t,c or g
nnnnnnnnnnnnnnnnnnnnnnnnnnnnnnnnnnnnnnnnnnnnnnnnnnnnnnnnnnnnnnnnnnnnnnnnnnnnnnnnnnnnnnnnnnnnnnnnnnnaaaaanaaanaanggaaantnggcccaggntntntgcctcccagnggngaaanaaangggntttagtttttccgtagtctgngaagtctgcntgccgnattcgnaccntcccntgagttntggccaggaggnttcccaccccnttcaaanggttacaaaatttggctanaaaattccnaatntttgaggcntananncnnannanccccnnangttcntttnnanngggg

SEQ ID NO: 45055 - DNA, 214 bp, Homo sapiens
ttcttgtatgttgaatattaatactaatattagtatttgaatactaatgagattgagtcttttttgttatgtggttggccaattttatttctttgttgagttgcctagttatattctttccttatttttatttgcactatctcctattgacatagaagagctcttcatatattaagggtctttttgtcaaatgttttaagtttttttttttttt

SEQ ID NO: 45056 - DNA, 325 bp, Homo sapiens
  misc_feature (1)...(325): n = a,t,c or g
cgagacaccatgagagccctcacactcctcgccctattggccctggccgcactttgcatcgctggccaggcaggtgcgaagcccagcggtgcagagtccagcaaaggtgcagcctttgtgtccaagcaggagggcagcgaggtagtgaagagacccaggcgctacctgtatcaatggctgggagccccagtcccctacccggatcccctggagcccaggagggaggtgtgtgagctcaatccggactgtgacgagttggctgaccacatcggctttcaggaggcctatcggcgcttctacggccggtctagggtgncgctctgct

SEQ ID NO: 45057 - DNA, 325 bp, Homo sapiens
  misc_feature (1)...(325): n = a,t,c or g
ttcaagagtcagatactgagctcttattctctggactgggatcaggagaagaagttttacctactctaccaacagagtcagtgaattttactgaagtggaacaaatcaataacacattatatccccacacttctcaagtggaaagtacctcaagtgacaaaattgaagactttaacagaatggaaaatgtggcaaaagaagttggaccactcgtatctcaaacagacatctttgaaggtagtgggtcagtaaccagcacaacattaatagaaattttaagtgacactggagcagaaggacccacggnggcacctctcctttcttc

SEQ ID NO: 45058 - DNA, 318 bp, Homo sapiens
  misc_feature (1)...(318): n = a,t,c or g
cactatccaaaggagaaaaagagaaaataaataaataaataagacactggttctttaaatctcctggaagccacttcagccagaaagagggcctgcaaaaatggtgtgtctgtatgtatacacaacaatagctgcttgcctttgcgtttgtacctccatgatcagaagcaacaattagtgatcagaatgcagatctcgtatatttgaaagacaaggtcattattgtccaccctgctcccataagctgcctgcaagctgctttaggaacacagacatggcagcctgtcacagggacaggggatgangaattggtaaccc

SEQ ID NO: 45059 - DNA, 313 bp, Homo sapiens
atttgaatttattattgctttatcctcccaattactctgttaaatatgttttgtttgcacaatttagctttgtagtactacaaagcatcaacacttaaaaatgatataattgtaaccccaaaaagcattttccaccaattttccagtaattgtaatgtatttgcactctactgcacattcttttccccagtacctctcatgacaagcgctacatatttttaaaaagctggttagaattaccatgttcattatacacaccttagcacagtagtcagaacaggctctagaatcaaactgtgtgggtcagaatcag

SEQ ID NO: 45060 - DNA, 311 bp, Homo sapiens
gggagtcaaattttttatgttcaacattcattgcagggtaattagcaaaacttaaaagataaagtaggattctagcaaacaggactcttcatacagtcatctaatacagctaatatcaataatgctctattaaacagtatgtagagtttggattctagaacagaataagtaagcaaaaaataaaaactgttttagtgtctcattaaatgtcaggatcatttttctcaatataaatataaggcctgtcttttcagactgtcaaaaattacattctttaaaaaaaagtcttattctattcacctcatgcattg

SEQ ID NO: 45061 - DNA, 318 bp, Homo sapiens
cacttccagattcttaggaaaaaattaaaagaactgacaacactgggcccagattttcacacagcaccaattggctagagccaaggggcctcaactgggactcatggcctttcaatgggacatgggctgttgctatgtctatggcctacttcattcctttagttacctctctagatgctccaagcattttaagaccccagcatataaaaatagataccatgcagtataaaaacaaagcaccattaaaaccaacaaagtattttctgttttgctagttagaatgcaggtgtccagcataatagtccagtctcacttata

SEQ ID NO: 45062 - DNA, 318 bp, Homo sapiens
  misc_feature (1)...(318): n = a,t,c or g
nnnnnnnnnnnnnnnnnnnnnnnnnnnnnnnnnnnnnnnnnnnnnnnnnnnnnnnnnnnnnnnnnnnnnnnnnnnnnnnnnnnnnnnnnnnnnnnnnnnnnnnnnnnnnnnnnnnnnnnnnnnnnnnnnnnnnnnnnnnnnnnnnnnnnnnnnnnnnnnnnnnnnnnnnnnnnnnnnnnnnnnnnnnnnnnnnnnnnnnnnnnnnnnnnnnnnnnnnnnnnnnnnnnnnnnnnnnnnnnnnnnnnnnnnnnnnnnnnnnnntttagattttttttaaatgaagacataagacagttaatgtctttgataattttttat

SEQ ID NO: 45063 - DNA, 319 bp, Homo sapiens
  misc_feature (1)...(319): n = a,t,c or g
cagcaataaagaaactactgatacaacaacacagatgaatcttaaatacattatgcactgtacacgtataaactaaaaaattaaaatacctatttaaaagtcannnnnnnnnnnnnnnnnnnnnnnnnnnnnnnnnnnnnnnnnnnnnnnnnnnnnnnnnnnnnnnnnnnnnnnnnnnnnnnnnnnnnnnnnnnnnnnnnnnnnnnnnnnnnnnnnnnnnnnnnnnnnnnnnnnnnnnnnnnnnnnnnnnnnnnnnnnnnnnnnnnnnnnnnnnnnnnnnnnnnnnnnnnnnnnnnnnnnnnnnnnnnnnnnnnnnnng

SEQ ID NO: 45064 - DNA, 304 bp, Homo sapiens
tgaatgaataattgattcaaacaatctcttgatccttcatttcagaatttcaaaaattaccaccacccctaatattccgtgaatagcagtcaaatatgagattattcagatgaaacaaaatgaagtaatataaatgtattaatatgaagaattctataaaatcttttaccaaagaaaaagaatcaaaccaagaatctttcaaagaagtggaaatacttttgaggaagaggattatagttgcaagatttcaagaaaggattaagaattcaagatttggctgaccaagcatagtggctcgtgcctg

SEQ ID NO: 45065 - DNA, 298 bp, Homo sapiens
tgcaccatggcttggaccccactcctcttcctcaccctcctcctccactgcacagggtctctctcccagcttgtgctgactcaatcgccctctgcctctgcctccctgggagcctcggtcaagctcacctgcactctgaacagtggccacagccgctacgccattgcatggcatcagcagcagccagagaagggccctcggttcttggtgaaccttggcattgatggcagccacaacaagggggacgggatccctaatcgcttctcagtctccgcctctgggactgagggctacctca

SEQ ID NO: 45066 - DNA, 334 bp, Homo sapiens
caacaactaagcattcctattttttcctaatttcctttttgtattgcttcctaaatattgtattttgcagagctgaaaccagggctttaatttaacaaggttttcttctgggctagagtcaagaggaggaaaagaagaagagagaactgaacttccagtgtttcattccattaggtttttatgtgtggtgcttactggtgtagaagtggcaataaaaaggtagatttccaagattttaatgcaggcttgaatttaaagagtcaattctctgctaatattttttttttccttgagataattaaataatgctgttgactctgcaatgaacattttt

SEQ ID NO: 45067 - DNA, 325 bp, Homo sapiens
gtgtagtggccatggccaggggaacagtgtcaagaggtcctaagaaagtgtgctctaggcagtcacgttaatttgattttatacattttagggagacagaagttataggcagagagacataaatcagtacatgtaaggtataggaaggggtaggtttacagatcataggtggattctgactggcaattgattgaaagagttaagctttgtctaaagacttgaagtcagcaaagagaaatgcttgagttaagctaaaggggctgtggaggccaaggttaagtagatgaagcctcacaggcagcagccttggggagaatagagggta

SEQ ID NO: 45068 - DNA, 334 bp, Homo sapiens
gggacattttctttagataagatgttttatatgaagaaactgtatcaaagggggaagaaaatgtatttaacaggtgaatcaaatcatggatgacctgggaatctcagagaagtaaagaactgactcctaatatggcaacttgtcaggaatattcaaagttttccgttattgtccacagatcctgagactggacataaattttctccaaaagagctagacacaatccctttgtgccgtgttatctgatgccagaacactgtttagctgttcaccccacaggccaaaactgctatttgctacctcatgaatgcagctacaggttatccccacatat

SEQ ID NO: 45069 - DNA, 325 bp, Homo sapiens
  misc_feature (1)...(325): n = a,t,c or g
gcctgccccttcctgtgtgtaaacagctttgtacagaaagacaaaaatcttggtgggatgcggtttgtactctgattcacagaaaagcagtacctggaaacgtagcaaaattgagacttctagttcagcatgaaataaacactctaagagcccaggaaaaacatggccttcaacctgctctgcttgtacattgggcagaatgccttcagaaaacgggcagcggtcttaattctttttatgatcaacgagaatacatagggagaagtgttcattattggaagaaagttttgccattgttgaagataatatnaaagaagaacagtat

SEQ ID NO: 45070 - DNA, 331 bp, Homo sapiens
attttatttcatttttaccttttagaagagattgaaattctctgcttttatcttcgctgacttttccttctagggaggagtaagtgttccttacatcattcacagtcaaagaaatattgtcaatcttcttctgcagaagagtcagtttcattgcctggtagttcacctgatcagtcattttttgcatcacttctgggtcaccacagccttgctgctgctgctgctcagctactcctctgccaacagctgtatgactttcagcctggttggtgtgtatcaaactttgctgttcctgggctcttagttgacatttcggccactgtatccaggg

SEQ ID NO: 45071 - DNA, 332 bp, Homo sapiens
atgcaagtccctcccaatgcccacccaaaaaagactataaggttttttagcctgtgtgaagaatagtactgtttactgataggtaagactgacataagaacagttgtgagggaaaataacgttcagttttagctatgttaggtgtgataggtttcttagaaattaagtaatcaagtaggcagctgaagatcaaaacaggcagggaagctggaactagtgaatcaatttgggaatcatcaggatatcatcaataaatttttaaagccatggaactagacagatgaaataacccagaacagtgctgttcaccggagctttctgagacgatgagc

SEQ ID NO: 45072 - DNA, 332 bp, Homo sapiens
atgttaggctgtctctctaagcacttactttaggacccaacaaaggcttaatcattgctggagagagtcaagtccctcctttcatacatcttaataataataataatatctaatatttgtggaatattattactatttgacaagtaatgaactaaatgctttatatgtatttaatccccacggcagccctatgagagggatactatattagtatcctcattttatgaataggaaactgaggtttaaagacatgtattaacttgttcagaacccacatctgtcctccaccctgagacctgcactccctccttatcctctccagtggtagcacg

SEQ ID NO: 45073 - DNA, 322 bp, Homo sapiens
ttaacacttgagaagtcagggtgaaagatttataaagactacaatttttgcaaattgtaaatttcaaattatttccaataaaaattaaaaatacagactcataccaatttccttatccatttggtctgatgttgactgtaaatcctgctgttctgtcgactgtgttggtgaagaaccttcttcagtggtggtttgacattctgtttcaagctctcctagctctccttcaatcatacttgtgattccacgaacaaggtctagcaaacaatggaatgccacagacatggcgtaaccttcaggtatagttggaggctcaactttg

SEQ ID NO: 45074 - DNA, 331 bp, Homo sapiens
atgatttgacgctcttttatgtatgattgaaagtgaattaggttaaatcatagtttaacctaaataacatctgttagaaatcaccatttctacctggtaatagaatgcaaaaaaagcagtaagttcaagttgagtcttttcagcttattgtggcatcaggttagctttgagctgttttggagctaaagagagagagaaatcctttgatctctttgagaaagggcaggaaatcaaatctgcttcaaaagcagaatttgaaaataacctgtaagagaaatctcaatatgaggaaaaactaatataaattctgaatgagaaaaggaaaaagatt

SEQ ID NO: 45075 - DNA, 324 bp, Homo sapiens
  misc_feature (1)...(324): n = a,t,c or g
gttttaacaaacatttaaggtaattctgatatacagctaagtgtggcaaccactgcagttttaaaaactgttgcctcnnnnnnnnnnnnnnnnnnnnnnnnnnnnnnnnnnnnnnnnnnnnnnnnnnnnnnnnnnnnnnnnnnnnnnnnnnnnnnnnnnnnnnnnnnnnnnnnnnnnnnnnnnnnnnnnnnnnnnnnnnnnnnnnnnnnnnnnnnnnnnnnnnnnnnnnnnnnnnnnnnnnnnnnnnnnnnnnnnnnnnnnnnnnnnnnnnnnnnnnnnnnnnnnnnnnnnnnccccaaantnaatncnaaaanncaaaaaaac

SEQ ID NO: 45076 - DNA, 323 bp, Homo sapiens
tgatgatacgtctcggagaaatctatgtgaagaggctttgttaaaaattaaaggtgttattagctttacttttcaaatggctgttcaaaggtgtgtggtgcgaatccgttcagatttgaaagctgaggctttggcatcagcaatagcatcaaccaaggttatgaaagctcagcaagttgtgaaaagtgaaagtggagaagagatgttggtcccattccaagatactcctgtggaagttgaacagaacacagagctacctgactacctgcctgaggatgagagtcccacaaaggaacaggacaaagcggtgtcccgggtcggct

SEQ ID NO: 45077 - DNA, 333 bp, Homo sapiens
  misc_feature (1)...(333): n = a,t,c or g
cgcggccgcgtcgacaattataacacaatggtggnnnnnnnnnnnnnnnnnnnnnnnnnnnnnnnnnnnnnnnnnnnnnnnnnnnnnnnnaaggtatatttatgnnnnnnnnnnnnnnnnnnnnnnnnnnnnnnnnnnnnnnnnnnnnnnnnnnnnnnnnnnnnnnnnnnnnnnnnnnnnnnnnnnnnnnnnnnnnnnnnnnnnnnnnnnnnnnnnnnnnnnnnnnnnnnnnnnnnnnnnnnnnnatttattaaaaaacaaagtaattgtgctatgacgttacaactgctacagtgttactgggtgataggaatttttcagctccatcataat

SEQ ID NO: 45078 - DNA, 333 bp, Homo sapiens
ctgacccctcacactcacctagccaccatggacatcgccatccaccacccctggatccgccgccccttctttcctttccactcccccagccgcctctttgaccagttcttcggagagcacctgttggagtctgatcttttcccgacgtctacttccctgagtcccttctaccttcggccaccctccttcctgcgggcacccagctggtttgacactggactctcagagatgcgcctggagaaggacaggttctctgtcaacctggatgtgaagcacttctccccagaggaactcaaagttaaggtgttgggagatgtgattgaggtgcatggg

SEQ ID NO: 45079 - DNA, 319 bp, Homo sapiens
  misc_feature (1)...(319): n = a,t,c or g
gcacttcttgttttttttatcctgacagcccactcagtaagtagagacaactgcatttcatacacaggaaacagattcagagggtgaggtggttgggccatgatttcaatccagctctctgtcttcaaagcccattttcangntccctgngancntannatnttanatnacactantttttgtagcnnancacttgttnagcantngannnncatgagatnntcntnngaaaagnncatngttnaatgtttntcngntttgtatnnannttnngnnnagganntncnngttntntnttnanaaaaggncannccngcat

SEQ ID NO: 45080 - DNA, 324 bp, Homo sapiens
cacaaatgagggagcagctgctgccaagtgttgacagtaggtgaattcgggtaaagggcctatgggtgttctgtgtgcttttcttattcttgccaattttcctgagtttgaaatcatttctaaataaaaagttgcctttaaaaagttactactatagcagttacttgagaggtaagccagctgacttttcatacagaaagtgtgtctccctccccgcatcctcccccatccaaagtgaagatcagcctcagactgccaggcgggcacctggccacctgcttcatagcttagtgaaggacagggcttgctccctggcttgcccac

SEQ ID NO: 45081 - DNA, 335 bp, Homo sapiens
gttttcttagctacaacaaagaactatttcttggtttggtagagattaactataaattattttatctctaaactgtaacaaatgaagaatcttcaagttattaaaacatcagaccctacagaggcaacagaaaatttatttataacccataatttcttcctacctgatgggatccctcattagggatcagcaaacttgttctgtaaagggtcagataataaatatttttgtctttgcagccacacagtctctatgaaaactactcagctccaatgttgtagcacaaaagcagccagagaaaatacataaatgaggatggctgtgttccaataaaa

SEQ ID NO: 45082 - DNA, 323 bp, Homo sapiens
aagagaagtattgaggcctgagcgactccacttgataagcctgcatagttcacattaaattactcagcagtagtttgcttttctgggtgtagtgcttttaaaacaaggaaacaacttgaaaaccaaaataccttagctcacctagcgaggatcactgtcaatcctgtcgtcctggtcatgtgtggtgtgcctttctcggaatgggtgtaatgtgaaccgaaatttttggtcatggtagtttcactcatctggtaatgctatgcattggcttatgttgggggtaattgtgagacacaatagaagaaaatattttatgaactatc

SEQ ID NO: 45083 - DNA, 324 bp, Homo sapiens
  misc_feature (1)...(324): n = a,t,c or g
nnnnnnnnnnnnnnnnnnnnnnnnnnnnnnnnnnnnnnnnnnnnnnnnnnnnnnnnnnnnnnnnnnnnnnnnnnnnnnnnnnnnnnnnnnnnnnnnnnnnnnnnnnnnnnnnnnnnnnnnnnnnnnnnnnnnnnnnnnnnnnnnnnnnnnnnnnnnnnnnnnnnnnnnnnnnnnnnnnnnnnnnnnnnnnnnnnnnnnnnnnnnnnnnnnnnnnnnnnnnnnnnnnnnnnnnnnnnnnnnnnnnnnnnnnnnnnnnnnnnnnnnnnnnactctgtctcaaagaaaaaaataaaaaaatacaggctgggcgcagtggctcaggcc

SEQ ID NO: 45084 - DNA, 332 bp, Homo sapiens
ctccctacagttctattttcagtttactttattacttttatttcagtttacttttattttattatagttctttcagtttattataaagaattcaaacaagtgtagaaaattgtacagttaacagatactcaccacctaaattccacatttaacattttagaatatttgctttatcacttatctatccatgtatcaaccctcttctcccctccatccacttacaccttctacattttgatgcattttaaagttagtgatatcagattactttcccaattctcacacttcacacataacgatggcccaagatcaatatccaggaagtaatgagt

SEQ ID NO: 45085 - DNA, 330 bp, Homo sapiens
  misc_feature (1)...(330): n = a,t,c or g
cacaattctcccaccactggtatcttactgactggaagtctggtgacacctaccaatccctgtccagctccagcactgccactggcaccacagtcattgagtgcacccaagttcagggcagctcagagtctcttgcctcaccttccacctccagagccactacnccttcctaactntgnattgaagggncgnctanganatnnngtanctntnaantnnntnntnngatncnncgnttntanntagctnntgtaaatnnnnatatnannattcctttntnnnnnttnntccnnggtngctncnnnntctttngtactnntnnttnttgtg

SEQ ID NO: 45086 - DNA, 322 bp, Homo sapiens
ctttgctctcccttctaaagggaatcaggggaactgaggacagcctggtctctacacgaggagccaagcatcctctcatcacagagctcagactccctctctggtgcacagctggtccctccgttggcagctaccctggagacagtcactgacagggctggcctacatcctgcttgactggagtgctaagcctggacagtccagcacaggggtctcctgtctcccggcatccatctacaggaaaagtagatattttgtgaacaagtcctgctgtggtcctccaaagaaaacatttcattgggtttacctggagatgttttct

SEQ ID NO: 45087 - DNA, 321 bp, Homo sapiens
gcatttttcaaaagataaccccattgttcagcaacacgtgacttactttgggcagtgcaatgaaaaaagctgaaggataattatttatttcatgattgcatcatccttcactgtaggtgattccatcatttttcttttttgggttatagtctttttgaaagcacagttggatataattgatgagtagtggtaaactatctggatgatgaaatgttaacatgtttcaagatataggaaaaataagatcgctaaacttccataatgtgtcttatatttataaagtgagtctattggaccaatatggtaattgcaagatagagc

SEQ ID NO: 45088 - DNA, 333 bp, Homo sapiens
ttttttacacccaagagtgtctataaacaacaacaaaaactgcaaaccaaaaactagtttacaatactgaagttataggaaacaagcacaaaaggccattgggtggggctggatggagcatgatctggtccttaaagtatgcagatcgcctgggaggcccagcctatggagattgggaggagagggagatgctggtgactggagatggtgagagcctgggctggggtagtttttagtcatgggcttatggaccctcccctcttctccagctagctcaggcctttaagaggcaggcccaagaagggaaccccaggaagccctagaagctcccca

SEQ ID NO: 45089 - DNA, 322 bp, Homo sapiens
cccgaagctaaagtggattcaggagtacctggagaaagctttaaacaagaggttcaagatgtgagagggtcagacgcctgaggaacccttacagtaggagcccagctctgaaaccagtgttagggaagggcctgccacagcctcccctgccagggcagggccccaggcattgccaagggctttgttttgcacactttgccatattttcaccatttgattatgtagcaaaatacatgacatttatttttcatttagtttgattattcagtgtcactggcgacacgtagcagcttagactaaggccattattgtacttgcctta

SEQ ID NO: 45090 - DNA, 322 bp, Homo sapiens
gcaatattagtcattgacatagtgctcaaatcccacgcagcatgaaccatgttagctaaactaacaaaatgaataatttaactctctgccagcaggaattcactatgccaccttcattatttacttcacaatatccatttctatcatttttgaaagaacggctgtaggtgttcaagatgagcccactggctgcctatatagtttttgatccacatatcacaggaagattaatctgtcctccattccaaaaaaatctatgtaatcaaggatgttttaaaatcaaactacctccccctcattaagttctaatccattgtgtcaa

SEQ ID NO: 45091 - DNA, 319 bp, Homo sapiens
cgtcgatcctctgtgagtcctccctatccgtggggactttgctggtgatggtgtcttgctcggtctcatagccggtgtccagggctggcttggggtgctccttaaacgctttgatgctcttactatctcctgttggctctgtgtgtgtttgcgtagtctcccctgatgtccgtgtgagcttgctgactgctaggggctcttctttcatgtccactttcaccaggggtatcttgagcctttgcttggagcttcttgaggttttgaatgactctggctgtggagatttacaggatacttctgtgattttgtcatcagtcat

SEQ ID NO: 45092 - DNA, 318 bp, Homo sapiens
tgcatggattgggcttcctcctaaaattctgtcctgtatgtgattttactgtcagagtacctaagtagaagatatgccaagcctttgaaactcataacagatagaaacaaacacaagtaaaagtatgtccaaatattggctgtggaattctgtctcttcaaaaggttatctcagtggattggctgatatcatcagatattttggcagccacaggtgagaaaattgatacaaataaataaaagaaaatttaaaacttgttacacaggaaggtttaaaagtgttttcacttttggtagtggaaactttggtagtcaggaa

SEQ ID NO: 45093 - DNA, 318 bp, Homo sapiens
  misc_feature (1)...(318): n = a,t,c or g
aattgatttaactactatgtggtatttcacatgtatgaatatactacagtttacacattcatctcactgtgttnnnnnnnnnnnnnnnnnnnnnnnnnnnnnnnnnnnnnnnnnnnnnnnnnnnnnnnnnnnnnnnnnnnnnnnnnnnnnnnnnnnnnnnnnnnnnnnnnnntccnnnnnnnnnnnnnnnnnnnnnnnnnnnnnnnnnnnnnnnnnnnnnnnnnnnnnnnnnnnnnnnnnnnnnnnnnnnnnnnnnnnnnnnnnnnnnnnnnnnnnnnnnnnnnnnnnnnnnnnnnnnnnnnnnnnnntgctgtgtat

SEQ ID NO: 45094 - DNA, 321 bp, Homo sapiens
atttcctttgactcctggcatcttctgctgcatgttcactattcaaagtagcccaaagggaaccaagacagtccacagctattgttttgccatttaatcaaacctgaataaagagcttgtacacataaggaaagtaaaaactcactagaggttacatgaaagaggctgccatggagaggactcgtctgttcacgtaacatgaataatttccccatcgagttgagaaagttctgaacacatttctttctctttttttttaaagactgaaaaatggatataagcccatagcacttgttagctagtcaagcaaagagtgtactc

SEQ ID NO: 45095 - DNA, 321 bp, Homo sapiens
aatgaatcaaaatgaagagaagccattttatctgcctcctggatgaagagtttcattgatgaacctgaaatgttttggttaacatgagaaaggagggtgagaagatgcctgagatgtgagctccttgaggacaggagctgctttctctctccagcctggcacaagacaaggaacttagttgaatgaatgagcaaataagtggttctctgctttgaaggaacttggactgtcattaccttgcaaatcaggtttaccagttatttgctttatataagttccagaaagaaactatttcctctcataatattactaccctaaact

SEQ ID NO: 45096 - DNA, 418 bp, Homo sapiens
  misc_feature (1)...(418): n = a,t,c or g
gcttggaangcnnnnnnnnnnnnnnnnnnnnnnnnnnnnnnnnnnnnnnnnnnnnnnnnnnnnnnnnnnnnnntctcgaggatccgaattccnnnnnnnnnnnnnnnnnnnnnnnnnnnnnnnnnnnnnnnnnnnnnnnnnnnnnnnnnnnnnnnnnnnnnnnnnnnnnnnnnnnnnnnnnnnnnnnnnnnnnnnnnnnnnnnnnnnnnnnnnnnnnnnnnnnnnnnnnnnnnnnnnnnnnnnnnnnnnnnnnnnnnnnnnnnnnnnnnnnnnnnnnnnnnnnnnnnnnnnnnnnnnnnnnnnnnnnnnnnnnnnnnnnnnnnnnnnnnnnnnnnnnnnnnnnnnnnnnnnnnnnnnaagnttgagnanccccntggagnntaactgnngactagtganactatnacnggganactga

SEQ ID NO: 45097 - DNA, 318 bp, Homo sapiens
  misc_feature (1)...(318): n = a,t,c or g
ccgggattcaacatcttcaagatctcaaaaatcaatgaaaatctaaaatagctaacatttcaaaaataaaaatgccaaaatgcannnnnnnnnnnnnnnnnnnnnnnnnnnnnnnnnnnnnnnnnnnnnnnnnnnnnnnnnnnnnnnnnnnnnnnnnnnnnnnntagctgggcgtggtggcatggtgannnnnnnnnnnnnnnnnnnnnnnnnnnnnnnnnnnnnnnnnnnnnnnnnnnnnnnnnnnnnnnnnnnnnnnnnnnnnnnnnnnnngtactccagcccaggtgacacaacaaaaccctgttgtatcttgaa

SEQ ID NO: 45098 - DNA, 226 bp, Homo sapiens
  misc_feature (1)...(226): n = a,t,c or g
agaacttagagaagactcatgtagttgggttgattaaaaaggagaaagtctaaagaaaaatgttgggtgagctgcagtcacgtagggtggtataaagggcaaggctttggagttaagacagtcttttattcaaacagtgactccacattcaattgtgatacaacttctctggatcatcagtttcctcatctgtgaaataaggattataatacttgccnnnanaaag

SEQ ID NO: 45099 - DNA, 466 bp, Homo sapiens
  misc_feature (1)...(466): n = a,t,c or g
nnnnnnnnnnnnnnnnnnnnnnnnnnnnnnnnnnnnnnnnnnnnnnnnnnnnnnnnnnnnnnntctcgaggatccgaattcgcggcccgtgacctgatttttattgtacaggaggagtatattctgtgatatcagtatacaattcnnnnnnnnnnnnnnnnnnnnnnnnnnnnnnnnnnnnnnnnnnnnnnnnnnnnnnnnnnnnnnnnnnnnnnnnnnnnnnnnnnnnnnnnnnnnnnnnnnnnnnnnnnnnnnnnnnnnnnnnnnnnnnnnnnnnnnnnnnnnnnnnnnnnnnnnnnnnnnnnnnnnnnnnnnnttacttaaatngggtatnaggngcctgcntactaaaaangttnttttgagttacaaatctgtctntttgaccntanagagtaattattnaatcttgngagtttgagttttatntcaaaccntttcctaaagcttacttgtaattactttt

SEQ ID NO: 45100 - DNA, 364 bp, Homo sapiens
ctgcaggacgagttcaccgtgcaaatgcaagcggcgtgggacaagttcctgactggtgtggccgtggtgctgaccgaaaaataccgctgagccctgtgctgcgcaggccttggtctgtgcctgtcaataaacagaagcccgtattcatctaggcattcaagatctcgtagcaggcacagattgtctagatccagaagtcgtcattctagtatttctcctagcacactaactctgaagagtagcctggcagctgaattgaacaagaataaaaaagcacgagcagcagaggcagcaagagccgcagaagcagcgaaagctgcagaagcaactaaggctgctgaggctgctgcaaggctgcaaaagc

SEQ ID NO: 45101 - DNA, 368 bp, Homo sapiens
atttaaagcaatacacaaggaatccggtcaagttgtcgcaattaaacaagtacctgttgaatcagatcttcaggaaataatcaaagaaatttccataatgcagcaatgtgacagcccatatgttgtaaagtactatggcagttattttaagaatacagacctctggattgttatggagtactgtggcgctggctctgtctcagacataattagattacgaaacaagacattaatagaagatgaaattgcaaccattcttaaatctacattgaaaggactagaatatttgcactttatgagaaaaatacacagagatataaaagctggaaatattctcctcaatacagaaggacatgcaaaattggcag

SEQ ID NO: 45102 - DNA, 360 bp, Homo sapiens
cttacatgaataaacactattcctgaagtctgacctttacatgctacttgaagattccacctgccatgttttcttgtctttttgcatatgcatggggtattgtcttcctccagcattactgggtttttcctatatgttatttgtagtaaatttcttttactagggtgataggttctgtctcctctagcaaaattagtgatttatttaaaacaggtgtcattgggcttgtacatagaaccactctattggaagttgaattattgtgaactaaagttataaaacaatttttaaggagcttcagacagagtatttgtagttgtacttgagaacaaattctgaacaagtaagtagtgtaatgta

SEQ ID NO: 45103 - DNA, 365 bp, Homo sapiens
  misc_feature (1)...(365): n = a,t,c or g
gcttgggggtgaagtttggttggggtgaagtttaggagaggcgttgcttaggcccttaccttgggatagggtttgggtgagttgggagctggttgaagacctcgagctcagatgacagaaagttaggtcgacgcggccgcgaattccnnnnnnnnnnnnnnnnnnnnnnnnnnnnnnnnnnnnnnnnnnnnnnnnnnnnnnnnnnnnnnnnnnnnnnnnnnnnnnnnnnnnnnnnnnnnnnnnnnnnnnnnnnnnnnnnnnnnnnnnnnnnnnnnnnnnnnnnnnnnnnnnnnnnnnnnnnnnnnnnnnnnnnnnnnnnnnnnnnnnnnnnnnnnnnnnnnnnnnnnnnnnnnnnnnnnnnnnnn

SEQ ID NO: 45104 - DNA, 446 bp, Homo sapiens
  misc_feature (1)...(446): n = a,t,c or g
ggtttgncgagccnnnnnnnnnnnnnnnnnnnnnnnnnnnnnnnnnnnnnnnnnnnnnnnnnnnnnnnnntctcgaggatccgaattccnnnnnnnnnnnnnnnnnnnnnnnnnnnnnnnnnnnnnnnnnnnnnnnnnnnnnnnnnnnnnnnnnnnnnnnnnnnnnnnnnnnnnnnnnnnnnnnnnnnnnnnnnnnnnnnnnnnnnnnnnnnnnnnnnnnnnnnnnnnnnnnnnnnnnnnnnnnnnnnnnnnnnnnnnnnnnnnnnnnnnnnnnnnnnnnnnnnnnnnnnnnnnnnnnnnnnnnnnnnnnnnnnnnnnnnnnnnnnnnnnnnnnnnnnnnnnnnnnnnnnnnnaaagtgtgngcannncacttncactgtgncntngncnccatctnaattnctttatttatacatcggatgncttcttttatgnactatactcct

SEQ ID NO: 45105 - DNA, 363 bp, Homo sapiens
  misc_feature (1)...(363): n = a,t,c or g
nnnnnnnnnnnnnnnnnnnnnnnnnnnnnnnnnnnnnnnnnnnnnnnnnnnnnnnnnnnnnnnnnnnnnnnnnnnnnnnnnnnnnnnnnnnnnnnnnnnnnnnnnnnnnnnnnnnnnnnnnnnnnnnnnnnnncanggtaaggccaggcatgggggntnatgcttgnaatcccagcantttganaggccaaggnnnnnnnnnnnnnnnnnnnnnnnnnnnnnnnnnnnnnnnnnnnnnnnnnnnnnnnnnnnnnnnnnnnnnnnnnnnnnnnnnnnnnnnnnnnnnnnnnnnnnnnnnnnnnnnnnnnnnnnnnnnnnnnnnnnnnnnnnnnnnnnnnnnnnnnnnnnnnnnnnnnnnnnnnn

SEQ ID NO: 45106 - DNA, 360 bp, Homo sapiens
atttcctgtggtgtgttaccaagcaggtgattaatggcatagaaagttgcctttaccgcctgggctcagccaccatctcatacttcatggccattggggaagagttggtgagcattccctggaaggtgctcaaggtcgtggccaaagtcatcagggctctcctccggatcctttgttgtctgctgaaggccatttgccgagttctgagcatccctgtccgtgtccttgtggatgtggccactttccctgtgtacaccatgggcgctattccaattgtttgcaaggacattgcactgggccttggtggcactgtctcactgctctttgacactgcttttggtaccctgggtggctatttca

SEQ ID NO: 45107 - DNA, 363 bp, Homo sapiens
  misc_feature (1)...(363): n = a,t,c or g
tatatatatcatgcataatgaacgttctatcaagtggttaaataaaactgtcaccatatgttttacagaactgtcatacagttgggtggctactaaactctaccttctttcccatttttaacttgcannnnnnnnnnnnnnnnnnnnnnnnnnnnnnnnnnnnnnnnnnnnnnnnnnnnnnnnnnnnnnnnnnnnnnnnnnnnnnnnnnnnnnnnnnnnnnnnnnnnnnngnnnnnnnnnnnnnnnnnnnnnnnnnnnnnnnnnnnnnnnnnnnnnnnnnnnnnnnnnnnnnnnnnnnnnnnnnnnnnnnnnnnnnnnnnnnnnnnnnnnnnnnnnnnnnnnntccacctcccagagtactgg

SEQ ID NO: 45108 - DNA, 369 bp, Homo sapiens
  misc_feature (1)...(369): n = a,t,c or g
gtaaaatctactttcaagactttggtgctttatacaatattatgaagtaccacaaacacttcagccaaatgggctgggtctactttattcctgtcttgctgtttgtgaggtttcccacataggcaccaactaaaaatctaaactcgatcttcaatttaataagcaagaatcaacatacagggtcttaaacacagcaaggacatacaagagtcttagctttgttataataaaggtaccctgagtcaatattccaggatccaagttcttcatttttatcanctttggccatgtactgagttgctggnttccaatcacactgaaacagtattttggccangtgctgtggctccancctgtaatcccagcact

SEQ ID NO: 45109 - DNA, 364 bp, Homo sapiens
gcccactgaaggtatatttaatagcatatttttaagtactgttttacatggtttgtttgacaccagtgctccatacaaacccagaactacattgccaatgaatccaaaaatatttcttgaaaacgttggtgtttgctgtgagttgattaaaatagtattcaattgagacattgattgagaaattctctctttcttggtgggatgtgtgttttatgaatgaaatgcagtatctacattccaaatataatgacccagcacttgagcatttagaacttttaaatatctgaggcagaaagtaaaatttgaaatatactggaaagaaagcagataaacaatatcaaaatctgcatacttattgctactt

SEQ ID NO: 45110 - DNA, 366 bp, Homo sapiens
gttttgtctgtttttaaatgctggtgtcttatataaatcaggctacttgctttaaagtaccagaagaatcctataatactgaaaaaattgaaatataaaaaagtgaagtaagaattctgagtcacatgttttagatacggtgttaaacaacataacacattatcttgaatggaagatgttattaccttggtgctctcatcagttcagcttgcccagaagcaatgccaacctttcactgagaatcttttaaactgacacaaatgtccctattcttctcaatgatttaaaatgtcctgtgctaacttttctatcagtcaatatgtatttttcagtgttcttactgagttttgttatttgcttttagtt

SEQ ID NO: 45111 - DNA, 372 bp, Homo sapiens
tagacacttaggtattctttctcagatgccatcaaaataattgttccaaagtagcattttcctaaaatccctaatggtaacagtgacactttttgtatgtgtatgtgacgaatgacaccagttttcatgattaaatgtacttgcaaaggtcatttttatgagaaaatataagtctttctaatatggctccatgtttcacaaaggaaatgccctttaatcactgccaacatatggcaacacactgagaaattttctttacagtttgctatgaagagagcttcactacgaaatgttcctatttcctgctctacggaataatcaaaataaatttagtgaaatttaacacacacacagttcctcttcttattactc

SEQ ID NO: 45112 - DNA, 379 bp, Homo sapiens
aagtcattgacacagagcatttggaagaacttcttcataaagatgatgatggagatggctctaagaccaaagaaatgtccaatagcatgacacctagccagaaggtctggtacagagacttcatgcagctcatcaaccaccccaatctcaacacgatggatgagttctgtgaacaagtttggaaaagggaccgaaaacaacgtcggcaaaggccaggacataccccagggaacagtaacaaatggaagcacttacaagaaaataagaaaggtagaaacaggaggacccacgaatttgagagggcacccaggagtgtctgagctgcattacctctagaaacctcaaacaagtagaaacttgcctagacaataactggaaa

SEQ ID NO: 45113 - DNA, 329 bp, Homo sapiens
ctccatctgtatcaatgacaacttaatttaattgtgaataaaagagttgctctcccaagcctgaatcctgattgtgacaaccagagtaagaaataaaatagactactctgctttagaatgcagctatgtctaacagttagctagaattctgatcatttggactccaaagtttcttgcctcttctcattcattaattcatcaggagactgtagagcaactaacttctgcattaaataataagagaaatacgaagcaaaaagactaaaaaagtcacgtagcttaactgctcaatttataaatggggcaataaaatgcaaaaaaaaaaaaaa

SEQ ID NO: 45114 - DNA, 377 bp, Homo sapiens
  misc_feature (1)...(377): n = a,t,c or g
aaaaatgataaaaataagagaaaatttgttttactttactaaagtaaaatttattaaatttaaaagcctatcctttattttaggacataatataccctagtttttatgttaaaatatgggaaatgatggtgataatttatataggttgctttgctgttaatcttgtttttaatataaagcatgtttaataaaatactaaaacatccttatgtgacaaaataaaaatttaagtacccaccccccctcttatattggagaggaagaggcagagcgtgagtcgacgcggccgcgaattccnnnnnnnnnnnnnnnnnnnnnnnnnnnnnnnnnnnnnnnnnnnnnnnnnnnnnnnnnnnnnnnnnnnnnnnnnnnnnnnn

SEQ ID NO: 45115 - DNA, 369 bp, Homo sapiens
tgaattacctatacaaaaagtctatgtgggcctatgagtttaaaaggcatttggcattactaacaaagaccgatttttaaaagctgatgttcctaactagtaaactggaacttggcagtaggtttccagttcttactgacagatctccaagatggttactaaaatgatacgcccctaagattttcttcccaccaagaagagatgaaaatagcaggttcatcctctttccaaccagagacttaacagcacatttctgcactctatcatgtacatatacctggatttcaaaactcgggtaagtgacaggtagctctttcttccccagaggttggcaagccttgtaataaaaattattttactgaatccatt

SEQ ID NO: 45116 - DNA, 334 bp, Homo sapiens
  misc_feature (1)...(334): n = a,t,c or g
nnnnnnnnnnnnnnnnnnnnnnnnnnnnnnnnnnnnnnnnnnnnnnnnnnnnnctttaannnnnnnnnnnnnnnnnnnnnnnnnnnnnnnnnnnnnnnnnnnnnnnnnnnnnnnnnnnnnnnnnnnnnnnnnnnnnnnnnnnnnnnnnnnnnnnnnnnnnnnnnnnnnnnnnnnnnnnnntntgcntgcanctaaaacnactgagctcccagttttngaatctgaactntaanttctgggggcttttnttgantatgaaggancaaattaggantcantattttgaatnttgtaaaaatggagngccanaattatactgatttttttttttttt

SEQ ID NO: 45117 - DNA, 106 bp, Homo sapiens
aatctttcctcgtctgctttatgcatatgcataaatgtgtttggttgggggtgttaggaaatatgtgatatgtatcacatcatctttctttctttttttttttttt

SEQ ID NO: 45118 - DNA, 396 bp, Homo sapiens
  misc_feature (1)...(396): n = a,t,c or g
cctggatgaattacatagatttcagagaagaatattcccaagtgagagctaaaagaagatgggataaatacctaacttctaagagatgtgaatgagtgttagagtaacacggacttccaaaaataggcagtcagcacataactcaaagctggtattgatgaatactgctttacacacattttttaaaagactaccagtatttagaaacaatatggatttggcatatgtgtgtgaaagacacaaagagggaaaggcatctattaatctctgtactttaatgaatactgcctgctgactgactctatattaggggtccccggcccctgggcctctgagtagtggtctaacagtctgtggctgttaggaacangtccacatagcaggagatgagtgggg

SEQ ID NO: 45119 - DNA, 392 bp, Homo sapiens
  misc_feature (1)...(392): n = a,t,c or g
gcgagctggagagaggactgtcctgagggcagcaggcctggttgcagctggcgtgggggtctcagaatggagccctcagccctgaggaaagctggctcggagcaggaggagggctttgaggggctgcccagaagggtcactgacctggggatggtctccaatctccggcgcagcaacagcagcctcttcaagagctggaggctacagtgccccttcggcaacaatgacaagcaagaaagcctcagttcgtggattcctgaaaacatcaagaagaaagaatgcgtgtattttgtggaaagttccaaactgtctgatgctgnaatgnggggtnncanantgnctnnccncnttncatcaanaancagtttggtcgacgcggncgngaantcaag

SEQ ID NO: 45120 - DNA, 372 bp, Homo sapiens
  misc_feature (1)...(372): n = a,t,c or g
gttaagaacagactgcccnnnnnnnnnnnnnnnnnnnnnnnnnnnnnnnnnnnnnnnnnnnnnnnnnnnnnnnnnnnnnnnnnnnnntcaaactatgtttttttgtcaatgattatggtcttataccttgaaaactctaaagactttttgaaagtcgacgcggccgcgaattccnnnnnnnnnnnnnnnnnnnnnnnnnnnnnnnnnnnnnnnnnnnnnnnnnnnnnnnnnnnnnnnnnnnnnnnnnnnnnnnnnnnnnnnnnnnnnnnnnnnnnnnnnnnnnnnnnnnnnnnnnnnnnnnnnnnnnnnnnnnnnnnnnnnnnnnnnnnnnnnnnnnnnnnnnnnnnnnnnnnnnnnnnnnnnnnnnnnnnn

SEQ ID NO: 45121 - DNA, 376 bp, Homo sapiens
  misc_feature (1)...(376): n = a,t,c or g
cctaatcaaaggtgtttgggaaggcctggttaattacagttgtacgggtttccttccagaagattttctcagccttaactatactcatggattgtgagtctccagatgaggctgtggtatcactgccaaacatatttgatatgaacagaaccccttttctctttctggtgtggacnantgnnanggnnngttttangnnatgcctntnttngntntgnganttgganntagnctaggnnagntngattntnnggnaacntnnngangangtnngannctncntnntgccnanaggggntgttgatangngngnggagtttttncctttggncnnanagcnaantcnaangcacctttgnnnntggnaaanggtttt

SEQ ID NO: 45122 - DNA, 385 bp, Homo sapiens
  misc_feature (1)...(385): n = a,t,c or g
ggaatttgaattctccctgggagggagttctggagttcctgcccagtgggagtccttccaactggggcctgggggagaggatggggccagctttggagagtcccaaatgactgggggtggaggggatcccccagcacatcacagctgctctaccaaatagtggccaggcaggttctttacacagatccctgattctttcctcctctctgggtgggacctcccacctggggcctccaccaccccaccggtggtcgacgcggccgcgaattccnnnnnnnnnnnnnnnnnnnnnnnnnnnnnnnnnnnnnnnnnnnnnnnnnnnnnnnnnnnnnnnnnnnnnnnnnnnnnnnnnnnnnnnnnnnnnnnnnnnnnnnnnnnnnnnnnn

SEQ ID NO: 45123 - DNA, 368 bp, Homo sapiens
  misc_feature (1)...(368): n = a,t,c or g
attttaagttacacactgaacgtaccctcgaaggctcaaaagctggnctcttatcaagaatacctgcccgcccaaggatgacccccaggttatggaagacaaatccgaccgccctgtctgccgacattttgccaaaaagggccactgtcgatatgaggacctctgtgccttctaccacccaggcgtcaatggacctcctctgtgagactgtgccttcccatccaggctggaaggagctctctgtgacctagcggccatttatttctctgtagccctatgatggctactgtgaggctcttctaacaccctcagtcagtgacacacccatcccatccaccacttcccccgtgtggggtccagagtggtgt

SEQ ID NO: 45124 - DNA, 246 bp, Homo sapiens
gaataacttaatgttgagtcagataaaagtctcagctaagtaatgttccttttgtgtaacattttttaaaaccacaaaatggcaccttaaattatctttggacatatatatgattttatatatgattttataattgtgggcatgtgtgtatagatatacaaaacatgtatatttacatataaacattcatgtatacatacaagcacacccacagttatgaaatcatgcctgtgaagacatctagaa

SEQ ID NO: 45125 - DNA, 384 bp, Homo sapiens
caaacataggataggttctgcagaaaaagtgctgggccagacagtctggaagaagtgctgctgtggtatgtgaggtcccagctccgcacctgggctccccttccggatctttgccctgacaatactgaggcttcgcaattgaacagaacgttaaattttgcaatgtgttcttagaagctgggctttgtagcaggtgaggtggtcttttttaattgggaagatgagattataatttaaaatgttaaattcccataatcctaccaccatataactttttagtatccagaccatttttccaagttattacaggcttcataattttaaaagactacttaagagtccatccacattatgccatagtttgttaagtcagtaccctaatgg

SEQ ID NO: 45126 - DNA, 379 bp, Homo sapiens
  misc_feature (1)...(379): n = a,t,c or g
ctttaaagttatttacttgttttttaaattgatgtataacattggatgcatttattatatatcacatggtaaaagaatccctctaaataatacttctctcttgtcgacgcggccgcgaattccnnnnnnnnnnnnnnnnnnnnnnnnnnnnnnnnnnnnnnnnnnnnnnnnnnnnnnnnnnnnnnnnnnnnnnnnnnnnnnnnnnnnnnnnnnnnnnnnnnnnnnnnnnnnnnnnnnnnnnnnnnnnnnnnnnnnnnnnnnnnnnnnnnnnnnnnnnnnnnnnnnnnnnnnnnnnnnnnnnnnnnnnnnnnnnnnnnnnnnnnnnnnnnnnnnnnnnnnnnnnnnnnnnnnnnnnnnnnnnnnncaagctttggacttc

SEQ ID NO: 45127 - DNA, 390 bp, Homo sapiens
caggttttcttttcatggcatgcttcttcttatgaacaataaaggctgacctataggcaaagtccttcccacaatcgctacactggtaaggtttctcacctgtgtgaattctctggtggtcaacgagagttttctttctagtaaaagttttcccacactgctgacacagaaatgttttctccacagcgggagcaccctggggctgactgcagtcaggagattgcctgaagccttcacgacattcatcttgtttgtagaatttttcctcctcatgcaacctcatatgacgagtaaagtttgatctccatctaaaggttttcctacatttggtacatttatagggcttctcctgggtgtgaatcctttgatgttcaagaacatatgacttac

SEQ ID NO: 45128 - DNA, 385 bp, Homo sapiens
  misc_feature (1)...(385): n = a,t,c or g
nnnnnnnnnnnnnnnnnnnnnnnnnnnnnnnnnnnnnnnnnnnnnnnnnnnnnnnnnnnnnnnnnnnnnnnnnnnnnnnnnnnnnnnnnnnnnnnnnnnnnnnnnnnnnnnnnnnnnnnnnnnnnnnnnnnnnnnnnnnnnnnnnnnnnnnnnntgtggctccatgacagttgggttgaggatggaaaactgtcaaggaaaagaggacttaggaaaagctgctgtgcgtgtccatgaagacgtcattgacgacccttttcatagacacattggaggcttanaaaggacaggcagtgaatacaaatgatttgttcaagaaattcancaatgaaaaggagaaaagacacgaggggagagatggagtggcatgggatcacataaaggg

SEQ ID NO: 45129 - DNA, 389 bp, Homo sapiens
  misc_feature (1)...(389): n = a,t,c or g
gttttatatttggaaaacagcactacgcttagttttcctgtagttcctgagtgatgtctgtgtgttccttgcctgcccttttttgtgagcacagattagtctgttatccatggctggcacttcacttatgatcctttctctgctagatttttatgcagctctctatgaagtttcatggcccatagatattcaaaagcaagatattctatacatatgtgtatatgtatatatactccttatgttaatactaaagtgtttatgctgagttgctgcctttccccgtcatgtatccatgtgcatgctcttagagaccttgaatggttgagggtaaagtgatttattagtaattctacttgccttgngtatgtctgagctgaaaacaatcgtga

SEQ ID NO: 45130 - DNA, 366 bp, Homo sapiens
  misc_feature (1)...(366): n = a,t,c or g
gtaaaaccctgtctcaagaaaatcaaaaacaacattttgagatttgtgttcttctttctatttttaagatttctacctcctaatgatgattgtataataaataatatttataaaatattttgagttattgcatttaagannnnnnnnnnnnnnnnnnnnnnnnnnnnnnnnnnnnnnnnnnnnnnnnnnnnnnnnnnnnnnnnnnnnnnnnnnnnnnnnnnnnnnnnnnnnnnnnnnnnnnnnnnnnnnnnnnnnnnnnnnnnnnnnnnnnnnnnnnnnnnnnnnnnnnnnnnnnnnnnnnnnnnnnnnnnnnnnnnnnnnnnnnnnnnnnnaggaagatcccttgagcccagaagttcaaggttg

SEQ ID NO: 45131 - DNA, 367 bp, Homo sapiens
  misc_feature (1)...(367): n = a,t,c or g
gcacagtctcagctcgctgnnnnnnnnnnnnnnnnnnnnnnnnnnnnnnnnnnnnnnnnnnntaataaaataaaagactctcagagcaggaagagactctgagatcatccagcccaacctcctcaggcagatgagaaaactgaggtccccaaagaggagggactggcccagagctgccgtgctcccagccaagcgggttttccactgcccgtgcatttgaggagcacccacatctactctgaggctctnacagctagcggaagaacagggccccggcatcgaattactactctccatagagcagaaacccacaatttgggtttctccttccctgccatccgctacttgctggctcggagagagaggg

SEQ ID NO: 45132 - DNA, 366 bp, Homo sapiens
cttttgtccaacccttttcccttactgttccacaggacttccctaaatactcttaattatgcctatgacttctcaaacctatattttcagtgtaattttatctcctgatctccagacttgtatatcaaactgcctactgggtgtttctaccaagctgtccctaatacacatagcttaaacttagcatggctgaaacataatcatttttagaacctaccaaacccattcctcctgcactgtctaccaaagacaaggatactactatccttttggttgctcacgctaaagactgaagaattatctttaactcctatttcttcctcactctccacattcaatggattatctatttaatatcatttccta

SEQ ID NO: 45133 - DNA, 367 bp, Homo sapiens
  misc_feature (1)...(367): n = a,t,c or g
nnnnnnnnnnnnnnnnnnnnnnnnnnnnnnnnnnnnnnnnnnnnnnnnnnnnnnnnnnnnnnnnnnnnnnnnnnnnnnctgagattatagaagtgagctaccgtgcctggctggataccattttataaacaaggcaaatgagatgagggagaggaaatgactcagccaaggtcaaacagctagtggctggcagggctggacgccaggctgctgaccccaggcccagcccttactttactgtcattcagtgctgccttccttttggaggcgatttcagtttgattttttaacacacagccaacccggggtcaggatatatatagatataccatagtcaggatatactagaactgggattaaacgcaca

SEQ ID NO: 45134 - DNA, 374 bp, Homo sapiens
  misc_feature (1)...(374): n = a,t,c or g
gtaaactggaaactttgcaggttaaaaaaagaaaaattagaaaagaatgccaggaagaacaaactttaattatggaaatttcgctgactttctttaatataaataatgaaattcaacttgtgtcactttaaacctaaatcaatatttaacttgacatgtgaaaagcgtcccgattaaatttatagttttgaaataactgtgaatttcacaaacgtggtttcccactatatatcatctggctaaaagacaaatcatgtttattttaagtgatgaacaaatattagaaatatttggatagttaatcaatatttcttaatctaaaattcacatatttagnaaaagaaattaaaatctaattcattaaatgtatgaat

SEQ ID NO: 45135 - DNA, 368 bp, Homo sapiens
gcaagatcctgtctcaaaaattaaaaaaaaagaaattgtaaccaactgggttcagatcatcttttttcattagaatattgataagaataatgtcttgctgtttgaaaatgtcctatgcctctctcttcatgattcacatcagcatttctcaactttctggtatcccgaaatctttcttccattctccacaaccgctattccaaacattttcaactctcagttccctgatccccatgatgctctcttaaagttcaggcaatcaggtctgtttgccttctatttctcctctacacaaagatttataaaaatccattctcaccttctttcctcaagtttcaaaggaaaaagtatgccttctgctcaaggct

SEQ ID NO: 45136 - DNA, 368 bp, Homo sapiens
  misc_feature (1)...(368): n = a,t,c or g
cacttggcaaaggtcaggagtctgaacatttgggtaatgagtaccttgtcctaggaagataaactgagcacagtgtccctaggacttgcacgatcgaagaatccccttggttggggcttggacctttgccagctcatctgcaaaatcttttaagttgtcctgatcagccaaagctgctatcacctgaatcttggttgtttttactattaataatatagaaatattttgccaagaaaatcttttgtctttttgtgggacaggtttcanaaatggtccacagtctctgtagatacctctagtaattggtctcagaactcattgcctttaatcagccctggggatcantgggtgacagatcaantgccttt

SEQ ID NO: 45137 - DNA, 376 bp, Homo sapiens
  misc_feature (1)...(376): n = a,t,c or g
nnnnnnnnnnnnnnnnnnnnnnnnnnnnnnnnnnnnnnnnnnnnnnnnnnnnnnnnnnnnnnnnnnnnnnnnnnnnnnnnnnnnnnnnnnnnnnnnnnnnnnnnnnnnnnnnnnnnnnnnnnnnnnnnnnnnnnnnnnnnnnnnnaagaggagggattggttttactgtctcaggggttgcagaagcagaggaaggggaagcaggagagcaagcacactcaatatagcctttagagannnnnnnnnnnnnnnnnnnnnnnnnnnnnnnnnnnnnnnnnnnnnnnnnnnnnnnnnnnnnntagcttcaaaagtcaggaaactaatgtaaataagtcagatataaggcantanagaattttaaagtctgcataacccg

SEQ ID NO: 45138 - DNA, 368 bp, Homo sapiens
gtttatttaagtatccaaatgcactacaattatttgtagtttttaatctaaaatgagccttttagaaaacctcaatcatacaactacacacacacacacacaccctacatatatacttgttctaacaaagctaatttcttctggaacttggtaaaattctggaatttgtgaatactaatagagaaataaaaagggtattaactagagtttttgttctaatcctgttactacctacctgtatgtacttgagaaaattaaacctttctaagcctgcattctcactgacaaaaatggggataatgacagaaaatttatagagttttggtcgacgcggccgcgaattccagatctatgaatcgtagatactg

SEQ ID NO: 45139 - DNA, 367 bp, Homo sapiens
  misc_feature (1)...(367): n = a,t,c or g
nnnnnnnnnnnnnnnnnnnnnnnnnnnnnnnnnnnnnnnnnnnnnnnnnnnnnnnnnnnnnnnnnnnnnnnnnnnnnnnnnnnnnnnnnnnnnnnnnnnnnnnnnnnnnnnnnnnnnnnnnnnnnnnnnnnnnnnnnnnnnnnnnnnnnnnnnnnnnnnnnnnnnnnnnnnnnnnnnnnnnnnnnnnnnnnnnnnnnnnnnnnnnnnnnnnnnnnnnnnnnnnnnnnnnnnnnnnnnntccggtcgacgcggccggnaattccaganctatgaatngtanatnctgaaaaaccccgnantgttcacttcanctgnnnnnnnnnnnnnnnnnnnnnnnnnnnnnnnnnnnnnnngntnnggcttcttt

SEQ ID NO: 45140 - DNA, 382 bp, Homo sapiens
  misc_feature (1)...(382): n = a,t,c or g
ctctaagtaggttgggagggtttggggaggaacgattaaaagatttgtagagataaagacaaaaaaggtagaatgcgatacatgctaaatgggtggtacaaagtagtatagaagtttacaggagaaagtgggcagtttcatctggtaattaagaaagacttgatggaagaggtaacttatattgggcttgaagatgaaaggtcgacgcggccgcgaattccnnnnnnnnnnnnnnnnnnnnnnnnnnnnnnnnnnnnnnnnnnnnnnnnnnnnnnnnnnnnnnnnnnnnnnnnnnnnnnnnnnnnnnnnnnnnnnnnnnnnnnnnnnnnnnnnnnnnnnnnnnnnnnnnnnnnnnnnnnnnnnnnnnnnnnnnnnnnnnnnn

SEQ ID NO: 45141 - DNA, 379 bp, Homo sapiens
  misc_feature (1)...(379): n = a,t,c or g
nnnnnnnnnnnnnnnnnnnnnnnnnnnnnnnnnnnnnnnnnnnnnnnnnnnnnnnnnnnnnnnnnnnnnnnnnnnnnnnnnnnnnnnnnnnnnnnnnnnnntgannnnnnnnnnnnnnnnnnnnnnnnnnnnnnnnnnnnnnnnnnnnnnnnnnnnnnnnnnnnnnnnnnnnnnnnnnnnnnnnnnnnnnnnnnnnnnnnnnnnnnnnnnnnnnnnnnnnnnnnnnnnnnnnnnnnnnnnnnnnnnnnnnnnnnnnnnnnntgtgcctttttattctagtgttttcttctctatgacatatttccacttctttgttttgccatttcacacattatctattgactttgtaagaaggtttcactgtcttacattctcttcc

SEQ ID NO: 45142 - DNA, 381 bp, Homo sapiens
ctgacactgtacaagcaacaaaaacttcttcactcccagttatttccaatggaaagatcattaagtatttcatcccaaatccaggtatggacatacacaagttacaatattatataaggcttaagaataacaacattatctttgaattatgtaatttttgtaactaatttttaccatggataatttcatggataatttcatgaatactagagcctagtctaaaaatcataggatgttgtgaaaaagacacatattatgtttatctacaatcattagaaagttaaaaggcatcttctttcattagcagtgttaacagtagttttttttttcccatgggtaatgctaaaagttgctattctaagtcttctatccaccactaat

SEQ ID NO: 45143 - DNA, 385 bp, Homo sapiens
ggcattttaaactggataattctttgttgtgatgggctttcctgtggactgtactatgttggtacacaagaaaaacagtgtactatgtgaatactcactcaaagccagtagcactccctgattgtaacaccaaaaaagtctctcagcattgccaaatgtcccctgtggcagcagaatcactccctgatgagaaccactaccctggagtaaaatctataactatgtcttagaaaataacacagaaaattaatatttctttcactctactccttccattagtgatcaaataaagaaggcatttggcgctacttgccaaattgttggctcaaacttgtgctgaaccttttttggttttctacacttaagtttttttgcctataaccca

SEQ ID NO: 45144 - DNA, 380 bp, Homo sapiens
  misc_feature (1)...(380): n = a,t,c or g
tcttaaagtagtggtgtggcaataatgaggtcttatgctgctccttcagtgttaattttaattttgtagattttttaaaaactcaagttttgtaaaaacaaaaaatgctatatttcaccctactataaccagcagatggctttcttattanntntgctgtggagattcatgngtggatggaattaatggctannatnttannaantgatggnctatggaaanncnttntttatanccttacnngancngtctttnancantatatnntgcntctttcnnnccngtttatcatnagctcttntgtnncnaancnttnnncatagannttnnctnnatngntnaangnnctnnnnnnnnactntnctcncntttttnntccc

SEQ ID NO: 45145 - DNA, 379 bp, Homo sapiens
  misc_feature (1)...(379): n = a,t,c or g
tctccatgagggcttaaatggcagtgatggttcaggcggtagagtttggagaagaagggatttgaaacaaaccaaaggaaagaaaagtaagtagccagaaatcacaaaatggcatttttctaaaaacaaaggaaaaggaataaaaggtcgacgcggccgcgaattccnnnnnnnnnnnnnnnnnnnnnnnnnnnnnnnnnnnnnnnnnnnnnnnnnnnnnnnnnnnnnnnnnnnnnnnnnnnnnnnnnnnnnnnnnnnnnnnnnnnnnnnnnnnnnnnnnnnnnnnnnnnnnnnnnnnnnnnnnnnnnnnnnnnnnnnnnnnnnnnnnnnnnnnnnnnnnnnnnnnnnnnnnnnnnnnnnnnnnnnnnnnnnnnnnnnn

SEQ ID NO: 45146 - DNA, 386 bp, Homo sapiens
aacaaatgatgccatatttcaatccctaatgtaactttaaaatcctgctaactatatttccataaaagaaaagtgatcattcctagaaagtatttgaccacagaaacatggtcaaatttggtaggacaaaaaagaaaaagagcaccaagacagtgttctattccattgcaaggggttggagggaggcttctggtagctcagaaaataaaaaagagcaggcaaggtggtaaagggaggcatctcaaaataaaacaaggtccgaaagtagattttgtatttgtcagtagttttaaagatctaaagagttaaaagcagtggtgagaagtaaagagaaaggcaaatcagataacacttttttttgtatattattttgtaatttacagaaa

SEQ ID NO: 45147 - DNA, 385 bp, Homo sapiens
cggaacagtgtcttttctccaaaacttctacctccttccaggttgattaatctggtttcttccttcctgggtaggccagacacagggctgagctgggtgactctgcataggccagcagaggtcacaggcccttgctctcctcagggagatgttgtcctaaccaggagcagggcaggggctgcccatggctagactctgcccacaaaggaattagtggtagatggataatgggggtggggattctgtgcagagcttggggatacagatgggtagtcacccctggctacaaatctaatctaacaccaggtgttcctggcctaccccgctctgccatgatggtacagaggaaaaatgcaaggtctgtgcgccttgggactctcctcgt

SEQ ID NO: 45148 - DNA, 84 bp, Homo sapiens
tgtgtatgttggggatatagaattcccagatgtaatataggacaccacctaaagttttttttcttttctctttttttttttttt

SEQ ID NO: 45149 - DNA, 306 bp, Homo sapiens
  misc_feature (1)...(306): n = a,t,c or g
cttatctgtgtaatatgtannnnnnnnnnnnnnnnnnnnnnnnnnnnnnnnnnnnnnnnnnnnnnnnnnnnnnnnnnnnnnnnnnnnnnnnnnnnnnnnnnnnnnnnnnnnnnnnnnnnnnnnnnnnnnnnnnnnnnnnnnnnnnnnnnnnnnnnnnnnnnnnnnnnnnnnnnnnnnnnnnnnnnnnnnnnnnnnnnnnnnnnnnnnnnnnnnnnnnnnnnnnnnnnnnnnnnnnnnnnnnnnnnnnnnnnnnnnnngaanntntnanttcntatnttttnctanatangttnttcncttngtttt

SEQ ID NO: 45150 - DNA, 318 bp, Homo sapiens
  misc_feature (1)...(318): n = a,t,c or g
caaaatacagnnnnnnnnnnnnnnnnnnnnnnnnnnnnnnnnnnnnnnnnnnnnnnnnnnnnnnnnnnnnnnnnnnnnnnnnnnnnnnnnnnnnnnnnnnnnnnnnnnnnnnnnnnnnnnnnnnnnnnnnnnnnnnnnncaacaacaacaacaacaacccagatgctccttgacttatgatggggataagtcataaacccatcaaaactaaagtgtcttaagttgaaaatgcatttaatatacccagtctatcaaacatcatagtttagcctagcctaccttaaacatgctcgaaacgcttaccttagcccacatttg

SEQ ID NO: 45151 - DNA, 336 bp, Homo sapiens
  misc_feature (1)...(336): n = a,t,c or g
cataaacagatgctataggaattgagactaagttggagctgggtgatcagggaaggttttaaggaagagatctgggacaaatagctaaagatggattcagtgttttttttttctttttcttttttttttttgggggggganttttgtnttnttnccnngntngnagnnaatgggggnnntttggtttantnnanntttnnngnccaaaatanancnatttttntngcnnaannttccnngtncttggnttnancggnncccnnnnnccnccttngnaaantttnggtttttttnaaaannngntttnccntttnggccaancttntttnaactcct

SEQ ID NO: 45152 - DNA, 345 bp, Homo sapiens
  misc_feature (1)...(345): n = a,t,c or g
ataaaatcagagaaacaccaaacgcgcctccccttccaagaaaatcaaaaacaataaacacaaaaaacacaccaggtaggttaaagaaactgcacttcactataataaaagaataggatgtttttgaactaagaaaccttgtaatttctctttttacataaactattattgctggttaagaaaaataaaattttcaaacctgatcagaaaacaggcaacaactataaaatgttataaaagaataaaaataaagaaaatgaaaacaagaatgcttcagctgataaatagcatcctcaaaaaaaaaaaaanaaaacccnttgggggananaantttttattcctttt

SEQ ID NO: 45153 - DNA, 319 bp, Homo sapiens
aaaaatcctggcataaagacaaaaacgttgaaaggctggagaagagcaaacacaatctgttttcaaataaggaagaagtctctgggaactatagcctagtgacactgacagcactgatagcatagtgttctagaatatttaaacataaggcgtatggcagttacccagagaaatagtgatctccaggaaccctctggaacaagtaattccagactgacctaatttcctgtttgggtagggtcaccagactggtagagcaggggaaatggtggatacactatgtggaagtaagtgaggcatgtgacaatgcttttcatgg

SEQ ID NO: 45154 - DNA, 344 bp, Homo sapiens
  misc_feature (1)...(344): n = a,t,c or g
nnnnnnnnnnnnnnnnnnnnnnnnnnnnnnnnnnnnnnnnnnnnnnnnnnnnnnnnnnnnnnnnnnnnnnnnnnnnnnnnnnnnnnnnnnnnnnnnnnnnnnnnnnnnnnnnnnnnnnnnnnnnnnnnnnnnnnnnnnnnnnnnnnnnnnnnnnnnnntcacattttcttatataaccacagtatcatgatcagaactcacaaagttatcagtagtgcttcagtatcatccaacacctagtccatgttcaaatttacctgatcatctcaaaaaagtttttttgcaaatttgaatcaggattcagatgagatccacacattccatcttctaaaaacttctcttaa

SEQ ID NO: 45155 - DNA, 376 bp, Homo sapiens
  misc_feature (1)...(376): n = a,t,c or g
ctttgttgtattggcataatcagtgacttgtacattcagcaatagcatttgagcaagttttatcagcaagcaatattttcagttaataaggtttcaaaaatcatgtaaggatttaaacttgctgaatgtaaagattgaacctcaagtcactgtagctttagtaattgcttattgtattagtttagatgctagcactgcatgtgctgtgcatattctgattttattaaaataaaaagttgaactgcagtcgacgcggccgcgaattccnnnnnnnnnnnnnnnnnnnnnnnnnnnnnnnnnnnnnnnnnnnnnnnnnnnnnnnnnnnnnnnnnnnnnnnnnnnnnnnnnnnnnnnnnnnnnnnnnnnnnnnnnnnnn

SEQ ID NO: 45156 - DNA, 369 bp, Homo sapiens
atacctgctcctcagagatgaccacgtatttcataaaccttagccttcttcttcgttgctttcatagagttactgtgaggattaaatcagaaaaggcaaaaatgtcaggagcacctcgtgcactcttgaggtgtgatccaagtcctggggtggttcctgtgtgtcctgattgtggccctgactttggctctgcccctttcccagcatgtaagccctgtggctttctttggtttggggtctgggcctgggcaggggttttcttccccaggtgatgttcactggtggtagtcagctccccggcagagcagacccccagcttggaaaaggagcatgtgttcttcccaagtctgggtgtgctagaactggcct

SEQ ID NO: 45157 - DNA, 67 bp, Homo sapiens
ctgcatcttatcaacttaaaactttcagcaaaaactcttgtaatatttgtttctttttttttttttt

SEQ ID NO: 45158 - DNA, 197 bp, Homo sapiens
ttcatctcatcatcatggtcttggtcccaggtggggtttgcatccttactggtaagaatggaatcttcctaatcctaaaatctttctatagtttgggagtgttaacatttccttcagtagtttcatggggaaggatatgggcagtaacttccccatttctttcttctagtagatcattatatctttttttttttttt

SEQ ID NO: 45159 - DNA, 424 bp, Homo sapiens
  misc_feature (1)...(424): n = a,t,c or g
gcnnnnnnnnnnnnnnnnnnnnnnnnnnnnnnnnnnnnnnnnnnnnnnnnnnnnnnnnnnnnntctcgaggatccgaattcgcggccgcgaattccnnnnnnnnnnnnnnnnnnnnnnnnnnnnnnnnnnnnnnnnnnnnnnnnnnnnnnnnnnnnnnnnnnnnnnnnnnnnnnnnnnnnnnnnnnnnnnnnnnnnnnnnnnnnnnnnnnnnnnnnnnnnnnnnnnnnnnnnnnnnnnnnnnnnnnnnnnnnnnnnnnnnnnnnnnnnnnnnnnnnnnnnnnnnnnnnnnnnnnnnnnnnnnnnnnnnnnnnnnnnnnnnnnnnnnnnnnnnnnnnnnnnnnnnnnnnnnnnnnnnnnnnnnnnnnggannctcgcnntatgnagnnnntagatgtcgcaaangcgaagcgaccgntannacca

SEQ ID NO: 45160 - DNA, 382 bp, Homo sapiens
  misc_feature (1)...(382): n = a,t,c or g
ttcacacccactaggacggctgtagtaaaaaagataatgactggnnnnnnnnnnnnnnnnnnnnnnnnnnnnnnnnnnnnnnnnnnnnnnnnnnnnnnnnnnnnnnnnnnnnnnnnnnnnnnnnnnnnnnnnnnnnnnnnnnnngatcagacagcctagtgatgtctgctgtgatatggtaattggnnnnnnnnnnnnnnnnnnnnnnnnnnnnnnnnnnnnnnnnnnnnnnnnnnnnnnnnnnnnnnnnnncacggcagacatgagtgtcattacatcagtgtcattagtcataatagtcagacagtgaaaataacctgaacgttccttctgctgatgaatggataaatgaaatgtggtatatccatacggtggactactt

SEQ ID NO: 45161 - DNA, 382 bp, Homo sapiens
attggaattcaatgtcaaacaaaactcttctgaaggaggttttacaatctaacgggaaaaataaaaatatgaaaaaccactgaggggtattaatgaagtgtcaaatatacatagagaagaagcaaagcgcttcattggagaagaggtgaaaagatttcatggagatagtgtctacatttgagtttataaaaagatactatttggtcacttggagctggcaaggagcagagaccacctcacatttaggagacagtggaagcaatgctaaagaagctcattagcatgaggccctagagaagagggacttagctgaacttgtggttctagaatatgacatctcagctcagacttggaaaaagaaaaagcatcacgtcaagagggg

SEQ ID NO: 45162 - DNA, 376 bp, Homo sapiens
  misc_feature (1)...(376): n = a,t,c or g
aaagaatnnnnnnnnnnnnnnnnnnnnnnnnnnnnnnnnnnnnnnnnnnnnnnnnnnnnnnnnnnnnnnnnnnnnnnnnnnnnnnnnnnnnnnnnnnnnnnnnnnnnnnnnnnnnnnnnnnnnnnnnnnnnnnnnnnnnnnnnnnnnnatcgcgcatggtgatatgcgactgtnnnnnnnnnnnnnnnnnnnnnnnnnnnnnnnnnnnnnnnnnnnnnnnnnnnnnnnnnnnnnnnnnnnnnnnnnnnnnnnnnnnnnnnnnnnnnnnnnnnnnnnnnnnnnnnnnnnnnnnnnnnnggacaataananangaantnannttnctntaaaaggggaagggtccctggtttnggaatntncccnanggttttnactt

SEQ ID NO: 45163 - DNA, 384 bp, Homo sapiens
cccatggtcagccctagggtggagagccaccaagagggacgcctgggggtgccaggaccagtcaacctgggcaaagcctagtgaaggcttctctctgtgggatgggatggtggagggccacatgggaggctcacccccttctccatccacatgggagccgggtctgcctcttctgggagggcagcagggctaccctgagctgaggcagcagtgtgaggccagggcagagtgagacccagccctcatcccgagcacctccacatcctccacgttctgctcatcattctctgtctcatccatcatcatgtgtgtccacgactgtctccatggccccgcaaaaggactctcaggaccaaagctttcatgtaaactgtgcaccaagca

SEQ ID NO: 45164 - DNA, 388 bp, Homo sapiens
ctcggtttttgttttctgtctccctatatgaccacccttccaggttattttgaagcaaatctcaggcatttgtatgatttcatcttttaaaatatcaatatctaaaagataagaaatttttaaaaataacaacaatactattatcaaagccagaaagcttaatagtaatcctttttgtcatcaattatctaggcaatatttatattatactttttttcagtttgagttacagttcgatatattgctattggttgatgtgtttttaaatttaatatatagatttctgctctccctggtagtttttcctatagttttccacagtctggattttactgcatccccatggaattgtgtaagatgttcctctatcccctttattcctctaaat

SEQ ID NO: 45165 - DNA, 382 bp, Homo sapiens
tagggggataggcatttctcagtaatgcaagcatgacagcagtgacaaaaatgtctcaggccttcaatctcctgctgtctgtccaggattgtaaagaacaaagttccttaccatgaactaataacaaagagctctgaaatctgtggagatgagcccaaaagagcataatatgcattttaaaaaagaatgaaacaaaaagttgcctgaggcagagactggaaagtgtatgcatcagactcctcagtcttgggggctggcccagctgctctctggctctgagaggtgggctcaggtggttggatgggtggggccctgcctgaatggagatgggccttttgggagatttatgcaaatggagtctcattgtgggggcacatgttta

SEQ ID NO: 45166 - DNA, 333 bp, Homo sapiens
  misc_feature (1)...(333): n = a,t,c or g
tggttatttaacacctgttaattacttgacactgcaaggggaaaaaaggaaatagtgtatgccttcaagggtcttatttttgacaagcatttatattgcactacagtacagcatatacttaaatattaatattgagtgtaaaatgtcgacgcggccgcgaattccnnnnnnnnnnnnnnnnnnnnnnnnnnnnnnnnnnnnnnnnnnnnnnnnnnnnnnnnnnnnnnnnnnnnnnnnnnnnnnnnnnnnnnnnnnnnnnnnnnnnnnnnnnnnnnnnnnnnnnnnnnnnnnnnnnnnnnnnnnnnnnnnnnnnnnnnnnnnnnnnnnnnnnnn

SEQ ID NO: 45167 - DNA, 335 bp, Homo sapiens
tgtgtcttcatttttcttgaaattcatttttattttataaacgtgtccatttgaaacagattggaaaaaagttatttataaactggtcctccctcacagacagtttgagaagcactgtcctaaaaccctgatccaatcatatcactctcttaagaacttttagtcatcgctcactacctacccaattaataaattgcaaattattggatcttaaagttcaaaaactttcattttgtcaaaatcagtttgatcttacattgtcccacattatgcacctttggctgtagtaatcaaagtgagctacttgctatttcctaaatatgccctaaggcttt

SEQ ID NO: 45168 - DNA, 327 bp, Homo sapiens
ttttggtctgcttccatgttttgagtgtcatttgatacacatcatccaagataatcagtctggattttatgactgttgaatatagtacaagaaaagttatgtccttttgcctgtttacgtaaggaccactctcttaattcctgtttctagaatgaaagaaatgccttttctcaagttgattgttaccaggaatgacttcatattgtttgcgagattccactctatccatatgcttgtggccttttcccatacagagtcaatagtatagtaacttaatacaacctactatcatggaattcatttagtaggaattatcagtttgtaata

SEQ ID NO: 45169 - DNA, 377 bp, Homo sapiens
ctgaaatgttgctagtgtagtcaagaatctgaatgtttaattttaatttttatttaaatacctggctggtgactagtgactagtatattataaactacatttttagatattagtatgtttatacttattatcatcattgtaacccagaaattaagatttcttaattcaggtcatggaaaaacattttcacttgcaaaatctttttttcatttttaagtgaagagtattagatgtcaaacaaaccaaaaaaaaaatcttattttctatcagaaactaaaatcagtaagaaacacatggtacgtaaagtccataatttagaatactacatttgctgaagtttaatttgtagtcgacgcggccgcgaattccagatctat

SEQ ID NO: 45170 - DNA, 367 bp, Homo sapiens
  misc_feature (1)...(367): n = a,t,c or g
gtcctcctcagtttttttctttcaaagtttttcataggtgtagttgcacatttatttttctatgtgaatttaggaatcaccttcattagttctagagaagttagcatttttatgtgggtcacactaaatgtattcattcacgcaaacacatatacatacataagcaaatacatacgcatgcacttttatggatgtgtttccatctagtcagatctgcttttgtgtttttcaggagtgttttnnnnnnnnnnnnnnnnnnnnnnnnnnnnnnnnnnnnnnnnnnnnnnnnnnnnnnnnnnnnnnnnnnnnnnnnnnnnnnnnnnnnnnnnnnnnnnnnnnnnnnnnnnnnnnnnnnnccaggagtctc

SEQ ID NO: 45171 - DNA, 380 bp, Homo sapiens
cagcacataacaggaaagaaaacatgttcccaacaatacaaataaatattcccatgatgtgctgctgagatacactgacaactaaacatgagctttccctttaaccccaacttggatatttcaaactttaaacattgaaagaagtttattaactgatttggaagtatttccagttgattagggaatagatcattagggattgccattgcaaaatgattggtctcctgtggataacaacaccaaaaacacgtgagacatatgaattctgatttccatgtaaaaatagaaagttattttatttcatataaaaatgaaacaacgatgtcccatgaggcatatttactttataactttttatgcataataaaaattactatatt

SEQ ID NO: 45172 - DNA, 369 bp, Homo sapiens
cagagcctaaaatctaaaacattgaattaaaacaaagaattaaagtccttacatttgtatacatgctttttgaagcttataaaatgcctacacatactttatttcacattagtttcataacaaacttgagagatgttattcttcttaaattatcaacaaggaaactaagactgagagactaagtgctttgcccaagctcacctggtgtgccatgcagctgccacttgctctcggctcccttcctcatgattctccagctctgctcaacatcccagggacctgcacactacaggatctcttaccctgtttcttcaaggcaggtttggctgatgggagtcaatgataaaagaccgaaggaggggaggggag

SEQ ID NO: 45173 - DNA, 210 bp, Homo sapiens
tggaatcagtagttttcaacaattttaatagtgcaaatttatttgtagtatttgatggggagatatggtgttttgtgactatatttacaactggatgtatctgggaatatctcaaagtttctcccaaaaggaaaacatttctattacaaatatgtgacttgtgaaaataatttgtaattcttttcaatatatctcatttttttttttttt

SEQ ID NO: 45174 - DNA, 371 bp, Homo sapiens
  misc_feature (1)...(371): n = a,t,c or g
cgtnnnnnnnnnnnnnnnnnnnnnnnnnnnnnnnnnnnnnnnnnnnnnnnnnnnnnnnnnnnnnnnnnnnnnnnnnnnnnnnnnnnnnnnnnnnnnnnnnnnnnnnnnnnatcatcgcctttaaggccctactccatagagtccctacctactcactccaacgtactcttctcagtactctccttggctaccttgactgcttctccagcaagacaagttcttttcctctctagatctctgcactggcccttcgtttttttccttcctctcagtatttgcatggctgcctccctcttggcacaggtctcagcttatcttctcagaaagggctctcctaaccactccaaatcccttctccccttctagttagt

SEQ ID NO: 45175 - DNA, 338 bp, Homo sapiens
aatcaatgtttggattgagtccatggggcagattgaaaggtaggccactagtgcaaatactgtgggttctttttctagaaaagaagggttagttgagaagatattttatgcagcagactgtcatatatttaaaaatcatttcaaggtataaaatcataaaaaataaatttgggatcagtggttaatgtgtaacacacggagatttgccacccagatcctcctattagttaagacttctacaagtcccagctgtgggagtatgaacaggaagtcatctccttcaaggttggcctggacttcagatagtgacctgtcccagggtcccacttttgctcagc

SEQ ID NO: 45176 - DNA, 335 bp, Homo sapiens
gggatttgtgcaatcggtggtacttcagagcagtctagcgttggcacccaacactcctattcagaggaagaaaagtatgcctttgtcaactggataaacaaagccctggaaaatgatcctgattgtcggcatgtcatcccaatgaacccaaacacgaatgatctctttaatgctgttggagatggcattgtcctttgtaaaatgatcaacctgtcagtgccagacacaattgatgaaagaacaatcaacaaaaagaagctaacccctttcaccattcaggaaaatctgaacttggctctgaactctgcctcagccatcgggtgccatgtggtcaa

SEQ ID NO: 45177 - DNA, 345 bp, Homo sapiens
  misc_feature (1)...(345): n = a,t,c or g
tggtgtttctgggagcaggttaggggttagaggtggtagcaatgatgcttttgtctcactctacttcatagtatggcttttcttcatacaagcatattaacaatgctattacttacgtttatcaatgatgaatagtgcccactgttgagccaagtgaactctagaggtttattatttttattttctaagggaaacaggtcagatttagaagagatagaggaatgtgagggttgttatagcctaaggagagggcaattattattattattcttttggagctgagcagcctaaatcttcaattccaaccaaggaagttgangagganaggagatgaaggttggctgg

SEQ ID NO: 45178 - DNA, 335 bp, Homo sapiens
  misc_feature (1)...(335): n = a,t,c or g
ggaagatacatcactagctggtttctagggaaaacaggtcatggctttgcattgttttatcnnnnnnnnnnnnnnnnnnnnnnnnnnnnnnnnnnnnnnnnnnnnnnnnnnnnnnnnnnnnnnnnnnnnnnnnnnnnnnnnnnnnnnnnnnnnnnnnnnnnnnnnnnnnnnnnnnnnnnnnnnnnnnnnnnacctcagctttgcatttttaatacaatttcagtctattctatcaacccaaatacataatattttccaaataagaaaaatctaaaatatgtttttaaactcaacttgaaatcagagaatttaaagttttgaataaaattgacaaa

SEQ ID NO: 45179 - DNA, 335 bp, Homo sapiens
gaaaaaagcatgtacccatggatagagatttaataaaattaactttgactgcttcctccaggtattcatagtttaaaattttaaactacagttttatccatgtgacaaatgcagtggttactagtaaaaattgggcccaagtctcttggcttgtgctatagtgctgggacttttcctagccattacttttgcaccattaaatgtagtgaatgttgatacagagaaaagtctgatgatagtactataactaactgtatcttagtgctgggaaaacatgaaatagttgtgactgtgcacttcctgagtcttggggactcttagtgtactccatgacc

SEQ ID NO: 45180 - DNA, 334 bp, Homo sapiens
  misc_feature (1)...(334): n = a,t,c or g
aaacaatttaattaaacaactaagcaaacaaaagaagaagatgattaagaagtcgacgcggtcgcgaattccnnnnnnnnnnnnnnnnnnnnnnnnnnnnnnnnnnnnnnnnnnnnnnnnnnnnnnnnnnnnnnnnnnnnnnnnnnnnnnnnnnnnnnnnnnnnnnnnnnnnnnnnnnnnnnnnnnnnnnnnnnnnnnnnnnnnnnnnnnnnnnnnnnnnnnnnnnnnnnnnnnnnnnnnnnnnnnnnnnnnnnnnnnnnnnnnnnnnnnnnnnnnnnnnnnnnnnnnnnnnnnnnnnnnnnnnnnnnnnnnnnnnnnnnnnnnnnnnnnnnnn

SEQ ID NO: 45181 - DNA, 344 bp, Homo sapiens
cagctatgttcagcttttcttggaggaccagggcttcgctttgtcttctgagatttagttaaatattcctattctagggttcactattcctagtcagggacgtctaggtatatgaggatctctccccaaatcatcatggaatgttggaaaatggcagcccttggcagttgttctgctgggatcctgctggtggtacatacggactttcaattgggaaggtttgtatgactttttatctgtctgcctactcccccatttgtttccctccaaatctgaagtattgatgagaattctcaagatctatcactataccctctttccccaacactgcttagggatgggaa

SEQ ID NO: 45182 - DNA, 335 bp, Homo sapiens
gctgtctcctgccgacaagaccaacgtcaaggccgcctggggtaaggtcggcgcgcacgctggcgagtatggtgcggaggccctggagaggatgttcctgtccttccccaccaccaagacctacttcccgcacttcgacctgagccacggctctgcccaggttaagggccacggcaagaaggtggccgacgcgctgaccaacgccgtggcgcacgtggacgacatgcccaacgcgctgtccgccctgagcgacctgcacgcgcacaagcttcgggtggacccggtcaacttcaagctcctaagccactgcctgctggtgaccctggccgccacct

SEQ ID NO: 45183 - DNA, 336 bp, Homo sapiens
  misc_feature (1)...(336): n = a,t,c or g
cacagactctctgtgctgcaggtctgccacgagggaatgggagagaggtggcataggtgattcaagactgtctcttttgcccttctcagtgtctttgcaggtgatatgaagttgaaaccaggtactgtgagtgctcacctgatgtttgcttcttgtgcttttctgtgtgcagacagctgttaaaatttcatgtttcagtgagggttggggggaatgacaaattttagtcgacgcggccgcgaattccnnnnnnnnnnnnnnnnnnnnnnnnnnnnnnnnnnnnnnnnnnnnnnnnnnnnnnnnnnnnnnnnnnnnnnnnnnnnnnnnnnnnnnnng

SEQ ID NO: 45184 - DNA, 337 bp, Homo sapiens
cttatatagcaaaatgttaaacaatgcacttctagtagtggtactagcaacaaaccacaaatagattatattgatctcatcttgtacaacaccaataaaaaactttctcctgcataacacaactactgcctttaaaaaaaaattccactggtaggaaaaaaaaatgccccaaatcaacctaggaaaataattccaagaggaaaccttttttcagagaatgcaattcacaaactaagggactttagggattatgagagtgactagaaacctttatctcctgaaaggtgagcgacaaaatatagtgactcagaagggggaaaatgagggttctggttct

SEQ ID NO: 45185 - DNA, 348 bp, Homo sapiens
gacaagtcccagccatgctccctctggagagaatagaggagagtcaggagattaaatcacgttatcatggatgatttcttcagattttctgtgcttagccttactttggtcttctttttgttggccaaaatatgagagaactagagattcaaattcatttattcaaattcagacttgatgatagcaccatgattctgccctttttatcacaaacttgggttgctgaggtgtagaaggtagtaaaattagctgaagtaaatagtctcctctctttgctgtttcctgctgtgctagctgagttcttcaaccccatatgagtatgttctttctgttttgaaatctctattt

SEQ ID NO: 45186 - DNA, 322 bp, Homo sapiens
ctcccctatcccctctggaatgaaagctctatgggaacaaggactttgttttgttcattattgtattcccaacacatagaacactggctggcagataatgggtgctcagtatacattcaagtgaatgcgtggaagaattaccaaaaggaaattatttttaagggatagttttaaattcaacttttaagtcagcttgtatataaagccaagctgatttgtatataaagtcaagctgacttaaaagttgaatttaaagttatcttttaaaaataatttcaattataatcaaagtaaatcatattatagtatacatattttaatt

SEQ ID NO: 45187 - DNA, 323 bp, Homo sapiens
cttgggcctcctctcacctacttaaataagattcaatccatgattggcaataatacccatacagcacatagaagaatattgtgaaaacgctaaggaagagctagttgagtcagttttgtaaagcacttggaactcagtaagccgttagtaaatgtcagttgcctgtgttaaccatcattatcatttaagtatttaagtggaagagaaggggggaaggacattctaggccaagagaataacttatttgggaacatgaaagtgaatgtcattttccaaaatgactcagtatagttgggaagtagagtataatgcagagaacagtg

SEQ ID NO: 45188 - DNA, 330 bp, Homo sapiens
gttcaaaagctttgcaaatatttatttaattaatgaaagacttatttcaaattaattctgattttctaaaacaaaaaaatttttaagctgagtaaactgatatattccaacatatttaacaaaatacacttaaagctttgtctaattctcaaggaatttagttacatattaaactacaagaatcttatcagtttagtttccttcttgttcttggcttgactgaaggcataaacatcgcattcctgataggccagcttgttaaagaagacacctggatttaaatatgtataaaacaagtttgatatgggaattcagttattaagaaactca

SEQ ID NO: 45189 - DNA, 321 bp, Homo sapiens
  misc_feature (1)...(321): n = a,t,c or g
cttgggagtcaagggaggtctccagtggggcaccagccacagtagcaggacagaagcagatcggatgtaatggtttttaatgataaaaagttaccatctgatgtcttctggttcctctgagacctgctggctgctgggggtggaggggaaaagaagttgaggagnnnnnnnnnnnnnnnnnnnnnnnnnnnnnnnnnnnnnnnnnnnnnnnnnnnnnnnnnnnnccagaaannataanaanggannaanattaaagnttanangntacantaaatgnttnnnnttaantgngccccacntcnntgnggancaaaaaaaaaa

SEQ ID NO: 45190 - DNA, 319 bp, Homo sapiens
  misc_feature (1)...(319): n = a,t,c or g
catacttccagaactctttttattcatttacgtttaaaaaattttaaaaaataccttatagagnnnnnnnnnnnnnnnnnnnnnnnnnnnnnnnnnnnnnnnnnnnnnnnnnnnnnnnnnnnnnnnnnnnnnnnnnnnnnnnnnnnnnnnnnnnnnnnnnnnnnnnnnnnnnnnnnnnnnnnncatttaagtactgatttattgaagctttgctagaatgtgtcagtcaccactgggtctttttttggagggggaatattagaacattttgactactaaaatttcttctactcagtatttctttatttttttttttttt

SEQ ID NO: 45191 - DNA, 328 bp, Homo sapiens
ggaacagttccaatgaggccggtcaaccactccctgccacgcccaactgcagatctgtatcagagttgagcactctcagtggctggactcctaagcagtttgtttctgtcaggctgactgatggcacttaggagatactatgttgatttgccaagaaaatccgtgatctaagtagaaggggctgctttcttagcataaataagctaatacatttactatttaaggtgttacttttattcataattaaaaagtttaatcagagagtgggctaccttctcggtaactctctagagcccaccgtaagtagcttgtgaaatgaatggcacag

SEQ ID NO: 45192 - DNA, 319 bp, Homo sapiens
ggttagaaaaggttgactcttagtgtatttcaactgtgcagtcataaaccaaatgaatatgtctttttttttaatttattttttaggactcagtaatgttgaacggctttggcacagtggttaatgctcttggcaaacgagtcaaaccatacttgcctcagatctgtggtacagttttgtggcgtttaaataacaaatctgctaaagttaggcaacaggcagctgacttgatttctcgaactgctgttgtcatgaagacttgtcaagaggtaaacttttgcatcaaattcttacttcttccccaaatagtttaatgtaa

SEQ ID NO: 45193 - DNA, 328 bp, Homo sapiens
ccagtgtctgcctcttgcttgctcctccatcattgttctgccattcgagatcctcatacttaccctttaagatctagcccaaatttccatgaaactaattctaataattaaaaacttcctgtagaacttaactttgtctagtacaagttagctttcttattcagtagtagcttactataaattacaagaataaaaagattaccattttccctcacactgttttgtggagaatgcctaaagttactttttctttttacaggtcagtattcctatttggcatcctaatcccctttcccaaatctgaattttgggatttgaagcttgcatt

SEQ ID NO: 45194 - DNA, 328 bp, Homo sapiens
  misc_feature (1)...(328): n = a,t,c or g
gttaactacaatcggttaagacctctgtctctttcctctccagcttaccctctgttacccttgctcttctgtagggtggtcnnnnnnnnnnnnnnnnnnnnnnnnnnnnnnnnnnnnnnnnnnnnnnnnnnnnnnnnnnnnnnnnnnnnnnnnnnnnnnnnnnnnnnnnnnnnnnnnnnnnnnnnnnnnnnnnnnnnnnnnnnnnnnnnnnnnnnnnnnnnnnnnnnnnnnnnnnnnnnnnnnnnnnnnnnnnnnnnnnnnnnnnnnnnnnnnnnnnnnnnnnnnnnnnnnnnnnnnnnnnnnnnnnnnnnnnnnnnnnnnnnnnnnn

SEQ ID NO: 45195 - DNA, 327 bp, Homo sapiens
aaaaaacttcgtagatatttctggttttggtttaaacttgagccagaaaaataatttgtaaattgaggtacttcatcagtaaattgaaaaacattttcataaatttggaaatttagaattgggcgtttttttctagacatggtgtctaccattgttcttttattctagctaaccctttttgtgtttgtggagttaatgcttggtttttcttcctatcatcttattttcatttaagtcttttgaattctgcctagcacatacctacatttgttctttggattgtatgagtttctttctgaattctcctattttttttcttccttgagc

SEQ ID NO: 45196 - DNA, 319 bp, Homo sapiens
ctcaacctgaaaaatgactccctgaggaagcgctacgacggattgaaatatgacgtgaagaaagtagaggaagtggtctatgatctctccatccggggctttaataaggagacggcagcagcttgtgttgaaaaataggaggctctccttgctcctggccttgctgacctcagcggttgccaggaaggggtgagcacagagtgcctcttacggtagttaggatgctcagttgctaaacactgcgctttattttcttaaccagttgtggtgtgagtatcataattgaaacacttttttgggggtaaaaaatatagccttt

SEQ ID NO: 45197 - DNA, 15 bp, Homo sapiens
  misc_feature (1)...(15): n = a,t,c or g
cctttttntttttgg

SEQ ID NO: 45198 - DNA, 15 bp, Homo sapiens
  misc_feature (1)...(15): n = a,t,c or g
ccaaaaanaaaaagg

SEQ ID NO: 45199 - DNA, 12 bp, Homo sapiens
aaaaaatttttt

SEQ ID NO: 45200 - DNA, 12 bp, Homo sapiens
aaaaatttttta

SEQ ID NO: 45201 - DNA, 11 bp, Homo sapiens
aaaaatttttt

SEQ ID NO: 45202 - DNA, 12 bp, Homo sapiens
aaaaattttttc

SEQ ID NO: 45203 - DNA, 12 bp, Homo sapiens
aaaaattttttg

SEQ ID NO: 45204 - DNA, 12 bp, Homo sapiens
taaaaatttttt

SEQ ID NO: 45205 - DNA, 12 bp, Homo sapiens
caaaaatttttt

SEQ ID NO: 45206 - DNA, 12 bp, Homo sapiens
gaaaaatttttt

SEQ ID NO: 45207 - DNA, 11 bp, Homo sapiens
aaaaaattttt

SEQ ID NO: 45208 - DNA, 2087 bp, Homo sapiens
gcggtgttccgcattctgcaagcctccggagcgcacgtcggcagtcggctccctcgttgaccgaatcaccgacctctctccccagctgtatttccaaaatgtcgctttctaacaaggctgacgctggacaagctggacgttaaagggaagcgggtcgttatgagagtcgacttcaatgttcctatgaagaacaaccagataacaaacaaccagaggattaaggctgctgtcccaagcatcaaattctgcttggacaatgggagccaagtcggtagtccttatgagccacctaggcccggcctgatggtgtgcccatgcctgacaagtactccttagagccagttgctgtagaactcaaatctcttgctggggcaagggatgttctgttcttgaaggactgtgttagggcccagaagtgggagaaagcctgtgccaacccagctgctgggtctgtcatcctgctggagaacctccgctttcatgtggaggaagaagggaagggaaaagatgcttctgggaacaaggttaaagccgagccagccaaaatagaagctttccgagcttcactttccaagctaggggatgtctatgtcaatgatgcttttggcactgctcacagagcccacagctccatggtaggagtcaatctgccacagaaggctggtgggtttttgatgaagaaggagctgaactactttgcaaaggccttggagagcccagagcgacccttcctggccatcctgggcggagctaaagttgcagacaagatccagctcatcaataatatgctggacaaagtcaatgagatgattattggtggtggaatggcttttaccttccttaaggtgctcaacaacatggagattggcacttctctgtttgatgaagagggagccaagattgtcaaagacctaatgtccaaagctgagaagaatggtgtgaagattaccttgcctgttgactttgtcactgctgacaagtttgatgagaatgccaagactggccaagccactgtggcttctggcatacctgctgggctggatgggcttgggactgtggtcctgaaagcagcaagaagtatgctgaggctgtcactcgggctaagcagattgtgtggaatggtcctgtgggggtatttgaatgggaagcttttgcccggggaaccaaagctctcatggatgaggtggtgaaagccacttctaggggctgcatcaccatcataggtggtggagacactgccacttgctgtgccaaatggaacacggaggataaagtcagccatgtgagcactgggggtggtgccagtttggagctcctggaaggtaaagtccttcctggggtggatgctctcagcaatatttagtactttcctgccttttagttcctgtgcacagcccctaagtcaacttagcattttctgcatctccacttgggcattagctaaaaccttccatgtcaagattcagcttagtggccaagagatgcagtgccaggaacccttaaacagttgcacagcatctcagctcatcttcactgcaccctggatttgcatacattcttcaagatcccatttgaattttttagtgactaaaccattgtgcattctagagtgcatatatttatattttgcctgttaaaaagaaagtgagcagtgttagcttagttctcttttgatgtaggttattatgattagctttgtcactgtttcactactcagcatggaaacaagatgaaattccatttgtaggtagtgagacaaaattgatgatccattaagtaaacaataaaagtgtccattgaaaccgtgatttttttttttttcctgtcatactttgttaggaagggtgagaatagaatcttgaggaacggatcagatgtctatattgctgaatgcaagaagtggggcagcagcagtggagagatgggacaattagataaatgtccattctttatcaagggcctactttatggcagacattgtgctagtgcttttattctaacttttatttttatcagttacacatgatcataatttaaaaagtcaaggcttataacaaaaaagccccagcccattcctcccattcaag

SEQ ID NO: 45209 - DNA, 1061 bp, Homo sapiens
cgcacgacgtgcgcgcaccctctcccctcgtccaccgctgccgcctccttcttctgccgctcctggtgctgcttgtgtgctcgtttggtgcggacctggtacctcttttgtgaagcggcagctgaggagactccggcgctcgccatggcccgacgaaaagcccaaggaaggagtcaagactgagaacaacgatcatattaatttgaaggtggccggggcaggatggttctgtggtgcagtttaagattaagaggcatacaccacttagtaaactaatgaaagcctattgtgaacgacagggattgtcaatgaggcagatcagattccgatttgacgggcaaccaatcaatgaaacagacacacctgcacagttggaaatggaggatgaagatacaattgatgtgttccaacagcagacgggaggtgtctactgaaaagggaacctgcttctttactcccagaactctgttctttaaagaccaagattacattctcaattagaaaactgcaatttggttccaccacatcctgactactaccgtatagttttctctattctttcatttcccccttccccattcctttattgtacataaagtaactgggtatatgtgcacaagcatattgcatttttttttttttttaactaaacagccaatggtatgttttgattgacatccaagtggagacgggatgggggaaaaatactgattctgtgaaaataccccctttctccattagtggcatgctcattcagctcttatctttatattccagtaagttattttgctctcactgttttaacaaaaaaaaaaaacaacaacataaaaatccttgcataccttgttcaattggagaattttaatgtttttcatttatcattgtaaaaccaaggacaattttataacttttttgtacgtagctgttacatgtagggcaatctgtctttaagtagggataaattactctaaaacaaaaaagaatcctagatagttttcccttcaagtcaagcgtcttgttgtttaaataaacttcttgtttaaaatgaaaaaaaaaaaaaa

SEQ ID NO: 45210 - DNA, 2460 bp, Homo sapiens
catgaaagcaagatgttgctcaaatgccaaggtgtgtctgaccaagctgtggccgaggcctgtgctctataatgctcttagaagagagttctcctcgccaagccctcacagacttcctgctggccagaaaggcaactattcagaaacttctcaaccagccacaccatggtgctggtatcaaggctcagatttgctcattagttgagttgctggccaccactctgaagcaagctcatgcccttttctacactttgccagaaggactgctgccagatccagccctgccatgtggcttgctcttctctactctggagaccatcacaggccagcatcctgccggaaagggcactggtgtcctgcaggaagagatgaaactctgcagctggtttaaacacctgccagcatccatcgtcgagttccagccaacactccgaacccttgcacatcccatcagtcaggaatacctgaaagacacgctgcagaaatggatccacatgtgtaatgaagacattaaaaatgggatcaccaacctgctcatgtacgtgaagagcatgaagggtctcgcgggaatccgggacgccatgtgggagttacttaccagtgagtccaccaatcacagctgggatgtgctatgtacccgcttctggagaagccgctcttgttctgggaagatatgatgcagcaactgttccttgaccgattacagactctgacaaaagaaggctttgactccatctccagtagctccaaggagctcttggtttcagctttgcaggaacttgaaagcagcaccagcaactccccttcaaataagcacatccactttgagtacaacatgtcgctcttcctctggtctgagagtcctaatgacctgccttccgatgcggcctgggtcagcgtggcaaaccggggtcagtttgccagtagcggcctctccatgaaagcacaagccatcagcccttgtgtacagaacttctgttctgccctggattctaagctgaaggttaaactagatgacctcctggcttacctcccctctgatgactcatcactgcccaaggacgtttctcccacacaggccaagagttctgcctttgacagatacgcagatgcggggaccgtgcaggagatgctgcggactcagtccgtggcatgcatcaagcacatcgtggactgcatccgggcagagctacagagcattgaagagggtgtgcaagggcaacaggatgccctcaacagtgccaagctgcactcagttcttttcatggccagactctgccagtccctgggagagctgtgcccccatctgaagcagtgcatcctgggaaaatcagagagctcagagaaaccagcaagggagtttagggctctgagaaaacagggaaaggtgaaaactcaggaaatcattcctacacaggccaagtggcaagaggttaaagaagtactcctccagcagagcgtgatgggctaccaggtctggagcagtgcagttgtgaaagttttgattcatggattcacccagtcattacttctagatgatgctggctcagttctggccacagccaccagctgggatgagctagaaattcaggaggaggcagagtctggcagcagtgtcacatccaagatccgactccctgcacagccgtcctggtatgtacagtccttcctgtttagtttatgccaggaaattaatcgggttggaggccatgccttgccaaaggtgacattacaggagatgctgaaaagctgtatggttcaagtagtagctgcctatgagaaactctccgaagaaaaacagattaagaaagaaggtgcatttccagtcacccagaaccgggcgctgcagctgctttatgatctgcgttacctcaacattgttctgacagccaagggtgacgaggtgaagagtggccggagcaagccagactccagaattgagaaagtgactgaccacctggaagccctcattgatccatttgacctggacgttttcacgccacacctcaacagcaaccttcatcgcctggtgcagcgaacttctgttctgtttggattggtgactggtacagagaatcagctcgccccccggagcagtacgttcaactcccaagaaccccataacatcctgccactggcatccagtcagatcaggtttggacttctcccactgagcatgacaagcactcgaaaggctaaatcaaccagaaacatcgaaacaaaagctcagtacgatgccaactgttaagcctgcaggaatcctcctgggtatttctgaattgtgctgtgtgcatgtgtgtttgaaagctcaaacagcttgtcttcttacagcatcgagttgtttgctttattgttagacacaatattagcagtgtatcctttccgtattccctaccatcgaacccattaagatctaaaatccttgtcaagtatctggctttaaaagttgggagatggtag

SEQ ID NO: 45211 - DNA, 4706 bp, Homo sapiens
gattaccaatattgtgcgacctactgtatcaataaacaaaaaggaaactggtctctatgagaatctctacctggtgctttcagacaacacttcaccaggtttaaagagaaaactcctgactctacacgtccattcccagggcgagctcactgtctggcatcaagttccccatggtgagtttccctgtacaagagtccaaggggagaggtaagtgtcctttattttgctggatgtagtttaatattacctgaggtaaggtaaggcaaagagtgggaggcagggagtccagttcagggacggggattccaggaggagaagtgaaggggaaggggctgggcgcagcctgggggtctctccctggtttccacagacagatccttgtccaggactcaggcagacagtgtgacaaagatgcttggtgtaggagaagagggatcaggacgaagtcccaggtcccgggcggggctctcagggtctcaggctccaagggccgtgtctgcactggggaggcgccgcgttgaggattctccactcccctgagtttcacttcttctcccaacctgcgtcgggtccttcttcctgaatactcatgacgcgtccccaattcccactcccattgggtgtcgggtgtctagagaagccaatcagtgtcgccggggtcccagttctaaagtccccacgcacccacccggactcaagaagttctcaggactcagaggctgggatcatggtagatggaaccctcatcctgctgctctcgggagccctggccctgaccgagacctgggcctgtgagtgcggggtcaggcagggaaatggcctctgtggggaggagcgaggggcccgcccggcggagggcgcaggaacccggggagcccgcgccgggaggagggtcgggcggctctctgcccctcctcgcccccaggctcccactccatgaggtatttctacacctccgtgtcccggcccggccgcggggagccccgcttcatctcagtgggctacgtggacgacacgcagttcgtgaggttcgacagcgacgccgcgagtccgagagaggagccgcgggcgccgctggatagagcaggaggggccggagtattgggaccggaacacacagatctacaagaccaacacacagactgaccgagagagcctgcggaacctgcgcggctactacaaccagagcgaggccggtgagtgaccccggcccggggcgcaggtcacgacccctcctcatcccccacgtacggcccggggtcgccccgagtctccgggtccgagatccgcctccctgaggccgcgggacccgcccagaccctcgaccggcgagagccccaggcgcgtttacccggtttcattttcagttgaggccaaaatccccgcgggttggtcggggctggggcggggctcggggggacggggctgaccgcggggggacggggccagggtctcacaccctccagaatatgtatggctgcgacgtggggccggacgggcgcctcctccgcgggtaccaccaggacgcctacgacggcaaggattacatcgccctgaacgaggacctgagctcctggaccgccgcggacacggcggctcagatcacccagcgcaagtgggaggcggcccgtgtggcggagcagctgagagcctacctggagggcgagtgcgtggagtggctccgcagataccttgagaacgggaaggagacgctgcagcgcgcgggtaccaggggcagtggggagccttccccatctccttcttgggctaggactgtgcccgggatggcctcccacgaggaggggaggaaacagggatcagcgctagaataccactcctcccttggatcaggagagggagctgtcacctgaggtacaggagatcctataccacagagtgactctctgagggccccctcttctctctaggacaattaagggatgacgtctctgaggaaatggaggggaagacagtccctagaatactgatcaggggtcccctttgaccactttgaccactgcagcagctgtggtcaggctgctgacctttctctcaggccttgttctctgcctcacactcagtgtgtttggggctctgattccagcacttctgagtcactttacctccactcaggtcaggaccagaaatcccttttcaccttctaccctgggctagctcagagactcgaactttccaatgaataggagattatcccaggtgcctgtgtccaggctggcgtctgggttctgtgcccccttccccaccccaggtgtcctgtccattctcaggctggtcacatgggtggtcctagggtgtcccatgagagatgcaaagcgcctgaattttctgactcttcccatcagaccccccaaagacacatgtgacccaccaccccatctctgaccatgaggccaccctgaggtgctgggccctgggcttctaccctgcggagatcacactgacctggcagcgggatggcgaggaccaaactcaggacaccgagcttgtggagaccagaccagcaggagacagaaccttccagaagtgggcagctgtggtggtgccttctggagaagagcagagatacacatgccatgtacagcatgaggggctgccgaagcccctcaccctgagatggggtaaggagggggatgggtaaagaggggaacgaggggtcatatctcttctcagggaaagcaggagcccttctggagcccttcagcagggtcagggctgaggcctgggggtcagggccccttacgttcccctcttttcccagagccatcttcccagtccaccatccccatcgtgggcattgttgctggcctggctgtcctggctgtcctagctgtcctaggagctgtggtggctgttgtgatgtgtaggaggaagagctcaggtagggaaggggtgaggagtggggtctgggttttcttgttccactgggagtttcaagccccaggtagaagtgtgccccacctcgttactgggaagcaccatccacactcatgggtctacccagcctgggaccctgtgtgccagcacttactcttttgtgcagcacatgtgacaatgaaggacggatgtatcaccttgatgattatggtggtgatgggacctgatcccagcagtcacaaatcacaggggaaggtccctgctgatgacagacctcaggagggcagttggtccaggacccacatctgctttcttcatatttcttgatcctgccctggatctacagttacacttttctggaaacttctctgggatcaaagactaggggtttgctctaggaccttatggccctgcctcctccctgtcccctcacagggaaattttcttcccacaggtggaaaaggagggagctactctcaggctgcgtgtaagtgatggcggcaggcgtgtggaggagctgctctcaggctgcgtgtaagtgatggcggtgggcgtgtggaggagctcacccaccccataattcctcttgtcccacatctcctgcgggctctgaccaggtctttttttttgttctaccccagccagcaacagtgcccagggctctgatgagtctctcatcgcttgtaaaggtgagattcttggggtctagagtgggtggggtggcaggtctgggggtgggtggggcagtggggaaaggcctgggtaatggagattctttgattgggatgtttcgcgtgtgtggtgggctgtttagactgtcatcacttaccatgactaaccagaatttgttcatgactgttgttttctgtagcctgagacagctgccttgtgtgcgactgagatgcacagctgccttgtgtgcgactgagatgcaggatttcctcacgcctcccctttgtgacttcaagagcctctggcatctctttctgcaaaggcacctgaatgtgtctgcgtccctgttagcataatgtgaggaggtggagagacagcccacccttgtgtccactgtgacccctgttcccatgctgacctgtgtttcctccccagtcatctttcttgttccagagaggtggggctggatgtctccatctctgtctcaactttacgtgcactgagctgcaacttcttacttccctactgaaaataagaatctgaatataaatttgttttctcaaatatttgctatgagaggttgatggattaattaaataagtcaattcctggaatttgagagagcaaataaagacctgagaaccttccagaatctgcatgttcgctgtggctgagtctgttgcaggtggggtgtggagaaggctgtggggggccgagtgtggacgggggcctgtgcccatttggtgttgagtccatcatgggctttatgtggttagtcctcagctgggtcaccttcactgctccattgtccttgtcccttcagtggaaacgttgtccagcgggagctgtgaccacagaggctcacacatacgccctgggcggcccctgcacacgggggtctctgtgcattctgttttcagagccgaattcacctcttgccctgcttctagagctccttttctgctctgctctcctgccctctctccctgccctggttctagtgatcttggtgctgaatccaatcccaactcatgaatctgtaaagcagagtctaatttagacttacatttgtctgtgaaattggacccgtcatcaaggactgttctttcctgaagagagaacctgattgtgtgctgcag

SEQ ID NO: 45212 - DNA, 3252 bp, Homo sapiens
gcggccgcctactactactactactactaaattcgcggccgctcgacttattttttttttttttggtgccaattttaaatagttttatttaagacattgcattttccacttacaatacagtgtttataaagtgcaatgttatttccttcccctgtgcatatgttccatattcaagtattgagaatgcccagtaacttactatagcagcttaactttttaaaactgccacagaatttgctacgaatttaggtccttcaaatgttttaaatgtgtggaacaatgctacatctacacttggttggcttaatcaacctcttcaatggtgggccctgaggaagcaccaccagagggaggagctccaccaccaggaaatcccccaggcattcctcctggcatgcctcctgcactctggtacagcttggtgatgatggggttgcaaactttctccagctctttctgttgatgttcaaattcttccttctcagcagtctgaggaagagaaaaaggaattactgcaagttcttttaatgttaataacccttctttctccctgacgcaatctgatactaaaagtctggagcaaactcttacaagagggcccataccaacattaaaatagggccttattcttccttaacatcttgggtcactcagacatccaaggaaggtagttgccaacaccttgaattctggtggaaaccgcgaatgttttggaccattcatcattgtgaccctacactgaaatccagctcaagcttggtttaccatccccttcccctccattgcgtgggggaggaaaaaaaaaaaaaaaaacacaaacctgattcttatcaagccagttgataatttcattacacttgtccagaatcttctgtttgtcctcatcgttaatcttgccttgaagtttctcatcttcaacagttgctttcatgttgaaggcataggactcaagtgaattcttggatgacaccttgtccctctgcttctcatcttcagctttgtacttctcagcttcctggaccatacgttcaatgtcttccttgctcaaacggcctaggaaagaaattaactctaagtaaaagccttaaattacctgtgtatgtgtaactctagtttctcttagctagacgcccttattcaccagtaactcaattgaaataccattatccctgtcaagaccagatgacagtgcctccttacccttgtcattagtgatagtaatcttgttctcttttcccgtactcttgtccacagcagagacattgagtataccattggcatcaatgtcaaaagtgacttcaatctgaggaacacctcggggtgcaggaggtatgcctgtgagttcaaacttgccaagcaggttgttatcctttgtcatggcacgctcgccttcataaaccttggtaggaaataaaacaaattactacaatggactccaggtctgtgacagtgctagggtcctgctaaggaagaatggtcgctcaaacatccaaggaaggaactggccaacataagactttctggtggaaactacgaatggttttggaatccatcatcatagcgagtcagtcaagacttccctttatctgttatcagtaagccaaacaagagaagtacagaaacatacctgaataagcacaccaggctggttgtcagaataggtagtgaaggtctgtgtctgcttggtaggaatggtggtattacgcttgatgaggacagtcatgactccaccagcagtttcaataccaagggaaagaggagtgacatccaagagcagcaaatcttgaacattctcagacttgtctccagacaagatggctgcctggacagctagcaaacaaaaagttaacgttaaaagaagttaaaagaaaacccagtacatagctcctgttttaactatcactcgctcagacatccaaggaaggtgttgccatcattagccaagcttttggtggaaactacgaatgtttaacaatcactcatcacagcgagtcaccttgggcctgcctgcctttagggttaattgagataccattgttacctgcaccataagcaacagcttcatcagggttgatgctcttattcagttcttttccattgaagaagtcttggagaagcttctgaatcttggggatacgagtagaaccaccaaccaggacaatatcatgaatctgtgacttgtctagtttggcatctcgaagggctttctctactgggtcccagggtgccacggaacaggtcagcattcagttcttcaaatcgggcacgggtaatggaggtatagaagtcgattccttcatagagagaatcgatctcaatactggcctgggtgctggaagagagggtacgcttagcacgttcacaagcagtacggaggcgtcttacagctctcttgttctcactgatgtccttcttatgcttgcgcttaaactcagcaataaaatggttgaccattcggttgtcaaaatcttctccacccaagtgggtgtctccagctgtagacttgacctcaaagattccatcctcaatagtgaggattgacacatcaaaagtgccacctcccaggtcaaagatgagcacgtttctttctgctccaacctttttgtctaagccgtaaggcaatagcagcagcagttggctcattaataattctaagtacattgagaccagcaatagttccagcatctttggtagcctgacgctgagagtcattaaagtaagctggcactgtgaccacagcattggtaacagtcttcccaaggtaggcttctgcaatttccttcatctttgtcagaaccatagaagacacctcctctggatagaagcttttggtctctcccttgtattctacttggaccttgggcctgccagcatcattcaccaccataaagggccaatgtttcatatcagactggacaacagcatcatcaaatctgcgtccaatcagacgtttggcatcaaaaactgtgttggtggggttcattgcaacttgattctttgcggcatcaccgatcaaccgttcagtgtccgtaaaggcgacatagcttggagtggttcggtttccctgatcattggcaattatctcggacttttccgtgctggaaaacacccacacaagagtaggtggtgccaagatcaataccaactgcaggtcccttggaccatggttgctggggtgtaggcctggctccaataacgaaggaagccacaaaaaacccaagagctgcaggcgagttcaatgagaccggtttc

SEQ ID NO: 45213 - DNA, 787 bp, Homo sapiens
  misc_feature (1)...(787): n = a,t,c or g
ggattgcaaaaatttattaaaattggagacactgttttaatcttcttgtgccatgagactccatcaggcagtctacaaagaccactgggaggctnnnnnnnnnnnnnnnnnnnnnnnnnnnnnnnnnnnnnnnnntcaaaggccactgcactctagcttgggtgaggcaagaccctgtctcaaaaaataagacaagacttttagccacatttacagacttcaattaaaatgctacatgggaatgcagaatatcagatattttattgtcatcaagtaatcagtgagagagttcaagttggattgagatcatcatgtattctgcaattataatagtcccaacatttccaatcctcacctttcaagcagtaaagctgcatgcttgcttgttgtggtcattaaaaaccctagtttaggataacaggtctgccctgcatttctttcaatcatgaattctgagtcctttgcttctttaaaacttgcttccacacagtgtagtcaagccgactctccatacccaagcaagtcatccatggataaaaacgttaccaggagcagaaccattaagctgggtccaggcaagttggactccaccatttcaacttccagctttctgtctaatgcctgtgtgccaatggcttgagttaggcttgctctttaggacctgggaagaaacaattcagtagctattctcatccttccttggggacacaactgtccataaggtgctatccagagccacactgcatctgcacccagcaccatacctcacaggagtcgacgtcgacgc

SEQ ID NO: 45214 - DNA, 487 bp, Homo sapiens; identical to SEQ ID NO: 16491
  misc_feature (1)...(487): n = a,t,c or g

SEQ ID NO: 45215 - DNA, 446 bp, Homo sapiens
  misc_feature (1)...(446): n = a,t,c or g
aacngctttgacatgattacgaatttaatacgactcactatagggaatttggccctcgaggccaagaattcggcacgagccctcccttgaccagctgtctgggaccggaaaccagctttgtctccaggtagagacaacatcctgtgactgccaggcagaaaggacagggcccaggtcagcctcagtctgctgtgcctccagactgcagagctctcagaacccagaacagagacgaaaaggctacctctcctacccaagttaagtgttcaaaggggatgtgagggcctccactgaagcagggaggcagctgtgtaatcctatgtcagctctcttaggaagccccagtacttatattgggcatgcacttgcccttaaaaacaatgatttgtgagtccaggaacaatttactatttttaaaatattttgctgcttctgttctgggtctg

SEQ ID NO: 45216 - DNA, 2113 bp, Homo sapiens
ccgagacggagccgctgtcaactctccaactcagctcagctgatcggttgccgccgccgccgccgccagattctggaggcgaagaacgcaaagctgagaacatggacgttaatatcgccccactccgcgcctgggacgatttcttcccgggttccgatcgctttgcccgggccggacttcagggacatttccaaatggaacaaccgcgtagtggggcaacctgctctattaccagaccaactacctggtggtggctgccatgatgatttccattgtggggtttctgagtcccttcaacatgatcctggggaggaatcgtggtggtgctggtgtttcacagggtttgtgtgggcagcccacaattaaagacgtcctttcgccggatgaagaagcgctaccccacgacgttcgttatggtggtcatgttggcgagctatttccttatctccatgtttggaggagtcatggtctttgtgtttggcattacttttcctttgctgttgatgtttatccatgcatcgttgagacttcggaacctcaagaacaaactggagaataaaatggaaggaataggtttgaagaggacaccgatgggcattgtcctggatgccctagaacagcaggaagaaggcatcaacagactcactgactatatcagcaaagtgaaggaataaacataacttacctgagctagggttgcagcagaaattgagttgcagcttgcccttgtccagacctatgttctgcttgcgtttttgaaacaggaggtgcacgtaccacccaattatctatggcagcatgcatgtataggccgaactattatcagctctgatgtttcagagagaagacctcagaaaccgaaagaaaaccaccaccctcctattgtgtctgaagtttcacgtgtgtttatgaaatctaatgggaaatggatcacacgatttctttaagggaattaaaaaaaataaaagaattacggcttttacagcaacaatacgattatcttataggaaaaaaaaaatcattgtaaagtatcaagacaatacgagtaaatgaaaaggctgttaaagtagatgacatcatgtgttagcctgttcctaatcccctagaattgtaatgtgtgggatataaattagtttttattattctcttaaaaatcaaagatgatctctatcactttgccacctgtttgatgtgcagtggaaactggttaagccagttgttcatacttcgtttacaaatataaagatagctgtttaggatattttgttacatttttgtaaatttttgaaatgctagtaatgtgttttcaccagcaagtatttgttgcaaacttaatgtcattttccttaagatggttacagctatgtaacctgtattattctggacggacttattaaaatacaaacagacaaaaaataaaacaaaacttgagttctatttaccttgcacattttttgttgttacagtgaaaaaaatggtccaagaaaatgtttgccatttttgcattgtttcgtttttaactggaacatttagaaagaaggaaatgaatgtgcattttattaattccttaggggcacaaggaggacaataatagctgatcttttgaaatttgaaaaacgtctttagatgaccaagcaaaaagactttaaaaaatggtaatgaaaatggaatgcagctactgcagctaataaaaaattttagatagcaattgttacaaccatatgcctttatagctagacattagaattatgatagcatgagtttatacattctattatttttcctccctttctcatgtttttataaataggtaataaaaaatgttttgcctgccaattgaatgatttcgtagctgaagtagaaacatttaggtttctgtagcattaaattgtgaagacaactggagtggtacttactgaagaaactctctgtatgtcctagaataagaagcaatgatgtgctgcttctgatttttcttgcattttaaattctcagccaacctacagccatgatctttagcacagtgatatcaccatgacttcacagacatggtctagaatctgtacccttacccacatatgaagaataaaattgattaaaggttaaaaaaaaa

SEQ ID NO: 45217 - DNA, 3522 bp, Homo sapiens
ccccaccgtcctcttccggaaggcggctccctccctgcgcagcccggagcccctgagatcagcctcgagcaggcgcccgagcgagactatccctaaacgggaacggcggtggccgactcgcgagtgaggaaaagaaggaaagggcagactggtcgcgaagagaagatccaggcctcagaggaggagaaaggccggagccagccgagctgtcacgaccggaggggtggactcgcagccttaccaggcacttaagtattcatcgaagagtcaccccagtagcggtgatcacagacatgaaaagatggcgagacgccggagatccttcaccaccaaataaaatgttgcggagatctgatagtcctgaaaacaaatacagtgacagcacaggtcacagtaaggccaaaaatgtgcatactcacagagttagagagagggatggtgggaccagttactctccacaagaaaattcacacaaccacagtgctcttcatagttcaaattcacattcttctaatccaagcaataacccaagcaaaacttcagatgcaccttatgattctgcagatgactggtctgagcatattagctcttctgggaaaaagtactactacaattgtcgaacagaagtttcacaatgggaaaaaccaaaagagtggcttgaaagagaacagagacaaaaagaagcaaacaagatggcagtcaacagcttcccaaaagatagggattacagaagagaggtgatgcaagcaacagccactagtgggtttgccagtggaatggaagacaagcattccagtgatgccagtagtttgctcccacagaatattttgtctcaaacaagcagacacaatgacagagactacagactgccaagagcagagactcacagtagttctacgccagtacagcaccccatcaaaccagtggttcatccaactgctaccccaagcactgttccttctagtccatttacgctacagtctgatcaccagccaaagaaatcatttgatgctaatggagcatctactttatcaaaactgcctacacccacatcttctgtccctgcacagaaaacagaaagaaaagaatctacatcaggagacaaacccgtatcacattcttgcacaactccttccacgtcttctgcctctggactgaaccccacatctgcacctccaacatctgcttcagcggtccctgtttctccgtgttccacagtcgccaatacctcccttacttcaggacccaaatcttcttagacaattgcttcctgctttgcaaggccacgctgcagcttaataattctaatgtggacatatctaaaataaatgaagttcttacagcagctgtgacacaagcctcactgcagtctataattcataagtgtcttactgctggaccatctgctttcaacataacgtctctgatttctcaagctgctcagctctctacacaagcccagccatctaatcagtctccgatgtctttaacatctgatgcgtcatccccaagatcatatgtttctccaaggaataaggcacacctcaaactaacacagtccctatcaaacctttgatcagtactcctcctgtttcatcacagccaaaggttagtactccagtagttaagcaaggcaccagtgtcacagtcagccacacagcagcctgtaactgctgacaagcgccaaggtcatgaacctgtctctcctcgaagtcttcagcgctcaagtagccagagaagtccatcacctgggtcccaatcatacttctaatagtagtaatgcatcaaatgcaacagttgtaccacagaattcttctgcccgatccacgtgttcattaacgcctggcactagcagcacacttcagtgaaaatctcataaaacacgttcaaggatggcctgcagatcatgcagagaagcagggcatcaagattacgcgaagaagcgcataacatgggaactattcacatgtccgaaatttgtactgaattaaaaaatttaagatctttagtccgagtatgtgaaattcaagcaactttgcgagagcaaaggatactatttttgagacaacaaattaaggaacttgaaaagctaaaaaatcagaattccttcatggtgtgaagatgtgaataattgcacatggttttgagaacaggaactgtaaatctgttgcccaatcttaacatttttgagctgcatttaagtagactttggacccgttaagctgggcaaaggaaatgacaaggggacggggtctgtgagagtcaattcaggggaaagatacaagattgatttgtaaaacccttgaaatgtagatttcttgtagatgtatccttcacgttgtaaatatgttttgtagagtgaagccatgggaagccatgtgtaacagagcttagacatccaaaactaatcaatgctgaggtggctaaatacctagccttttacatgtaaacctgtctgcaaaattagcttttttaaaaaaaaaaaaaaaaaaattgggggggttaatttatcattcagaaatcttgcattttcaaaaattcagtgcaagcgccaggcgatttgtgtctaaggatacgattttgaaccatatgggcagtgtacaaaatatgaaacaactgtttccacacttgcacctgatcaagagcagtgcttctccatttgttttgcagagaaatgtttttcatttcccgtgtgtttccatttccttctgaaattctgattttatccatttttttaaggctcctctttatctcctttcttaaggcactgttgctatggcacttttctataaccttttcattcctgtgtacagtagcttaaaattgcagtgattgagcataacctacttgtttgtataaattattgaaatccatttgcaccctgtaagaatggacttaaaagtactgctggacaggcatgtgtgctcaaagtacattgattgctcaaatataaggaaatggcccaatgaacgtggttgtgggaggggaaagaggaaacagagctagtcagatgtgaattgtatctgttgtaataaacatgttaaaacaaacaaaaattgttatttttcttttccttcggtcagtgcacattagcatttgaactacctggggattctttatcagaactgttcttgttgaatatttatacttaattgaaataattccttaagggaggttttgtttaaaacgtattaacaggaaattgtgtatgagatatttaatgaaataagaaattcaacaagaatgattaagtcacttcccaagtggttgtcatttgttaaaccctggtttacctgtcttgctattatgacatttcatttggaaggatgtttgtgttgtagctaactgttcaagtctggtgctgactgctgttcttagccatcacaaaacgctaaatttgtgtaattggagcttcctgctgttatctggaaatagcaggaaagcgcagctttgtatattgtttcctaaagtatattaaaataaaaaaagaaactattgctactaaaaaaaaaaaaaaaaaaa

SEQ ID NO: 45218 - DNA, 858 bp, Homo sapiens
agctatgacatgattacgaatttaatacgactcactatagggaatttggccctcgaggccaagaattcggcacgagggtgtacgagggccgagagggccatgacgaaagacaacaatctgttggggcgcttcgagctgagcggcatccctccggcccccaggggcgtgccccagatcgaggtgaccttcgacatcgatgccaacggcatcctgaacgtcacggccacggacaagagcaccggcaaggccaacaagatcaccatcaccaacgacaagggccgcctgagcaaggaggagatcgagcgcatggtgcaggaggcggagaagtacaaagcggaggacgaggtgcagcgcgagagggtgtcagccaagaacgccctggagtcctacgccttcaacatgaagagcgccgtggaggatgaggggctcaagggcaagatcagcgaggcggacaagaagaaggttctggacaagtgtcaagaggtcatctcgtggctggacgccaacaccttggcccgagaaggacgagtttgagcacaagaggaaggagctggagcaggtgtgtaaccccatcatcagcggactgtaccagggtgccggtggtcccgggcctgggggcttcggggctcagggtcccaagggagggtctgggtcaggccccaccattgaggaggtagattaggggcctttccaagattgctgtttttgttttggagcttcaagactttgcatttcctagtatttctgtttgtcagttctcaatttcctgtgtttgcaatgttgaaattttttggtgaagtactgaacttgctttttttccggtttctacatgcagagatgaatttatactgccatctt

SEQ ID NO: 45219 - DNA, 507 bp, Homo sapiens
  misc_feature (1)...(507): n = a,t,c or g
antcnaacanctatgacatgattacgaatttaatacgactcactatagggaatttggccctcgaggccaagaattcggcacgagcctagctcccgccttcctccaggaattatcgggggtgaatatgaccaaagaccaacacttccctatgttggagacccaatcagttcactcattcctggtcctggggagacgcccagccagtttcctccactgagaccacgctttgatccagttggcccacttccaggacctaaccccatcttgccagggcgaggcggccccaatgacagatttccctttagacccagcaggggtcggccaactgatggccggctgtcattcatgtgattgatttgtaatttcatttctggagctccatttgtttttgtttctaaactacagatgtcaactccttggggtgctgatctcgagtgttattttctgattgtggtgttgagagttgcactcccagaaaccttttaagagatcatttatagccctagg

SEQ ID NO: 45220 - DNA, 1486 bp, Homo sapiens
ctggtctaacagacccgcgagaacgaaggacgcttgcctttttccggtcggggaagggggaagaaggtaacttccggtgacggggttgcatcacttcctctcaagcttggcgtttgtttggtggggttacacgcgggttcaacatgcgtatcgaaaagtgttatttctgttcggggcccatctatcctggacacggcatgatgttcgtccgcaacgattgcaaggtgttcagattttgcaaatctaaatgtcataaaaactttaaaaagaagcgcaatcctcgcaaagttaggtggaccaaagcattccggaaagcagctggtaagagcttacagtggataattcatttgaatttgaaaaacgtaggaaatgaacctatcaaataccagcgagagctatggaataaaactattgatgcgatgaagagagttgaagaaatcaaacagaagcgccaagctaaatttataatgaacagattgaagaaaaataaagagctacagaaagttcaggatatcaaagaagtcaagcaaaacatccatcttatccgagcccctcttgcaggcaaagggaaacagttggaagagaaaatggtacagcagttacaagaggatgtggacatggaagatgctccttaaaaatctctgtaaccatttcttttatgtacatttgaaaatgccctttggatacttggaactgctaaattattttattttttacataaggtcacttaaatgaaaagcgattaaaagacatctttcctgcattgccatctacataatatcagatattacggatgttagattgcatctcagtgttaaatctttactgatagatgtacttaagtaaatcatgaaaattctacttgtaactatagaagtgaattgtggacgtaaaatggttgtgctatttggataatggcactaggcagcatttgtatagtaactaatggcaaaaattcatggctagtgatgtataaaataaaatattctttgcagtaaaatattccctttgttaatgttatagaaggggggatacaaaaaggaactaacaatttgtatggcagtgtcagatatttttattttagtatttcctgttttggtttatttgcatcttagaagagcataatgacattgtttggatgaagcctaattatgctggactgttttgacctggtttaacccttctgataggtagttgtggatgctggggatgagaactgaataatctttgcctggagtgacactacactctagaatttccactttggagaatactcagttccaacttgtgattcctgatagaacagactttacttttctagcccagcattgatctagaagcagaggaatcccagcgccttttaaaagttgttatgtggttttcttttaaaaagctcctgtttttggaaagtagaatttatgggtacaacgtatgttcattatttgtacataaaataaaaccatttaaaaagtaaaaaaaaaaaaaa

SEQ ID NO: 45221 - DNA, 1985 bp, Homo sapiens
acgcgtccggggaaacggtgcaaacggcgtggccgccatcttgcttgtgcccccgcttcggcgcgcgctccgtgacgcacacttcccccctcccctccgccgcgcctgggcctctgcattgcccgactccgtaggagcgcgggggcggctcctgctcttcctggactcctgagcagagttgtcgagatgtccacagaaggaggatttggtggtactagcagcagtgatgcccagcaaagtctacagtcgttctggcctcgggtcatggaagaaatccggaatttaacagtgaaagacttccgagtgcaggaactcccactggctcgtattaagaagattatgaaactggatgaagatgtgaagatgatcagtgcagaagcgcctgtactctttgccaaggcagcccagatttttatcacagagttgactcttcgagcctggattcacacagaagataacaagcgccggactctacagagaaatgatatcgccatggcaattacaaaatttgatcagtttgattttctcatcgatattgttccaagagatgaactgaaacctccaaagcgtcaggaggaggtgcgccagtctgtaactcctgccgagccagtccagtactatttcacgctggctcagcaacccaccgctgtccaagtccagggccagcagcaaggccagcagaccaccagctccacgaccaccatccagcctgggcagatcatcatcgcacagcctcagcagggccagaccacacctgtgacaatgcaggttggagaaggtcagcaggtgcagattgtccaggctcagccacagggtcaagcccaacaggcccagagtggcactggacagaccatgcaggtgatgcagcagatcatcactaacacaggagagatccagcagatcccggtgcagctgaatgccggccagctgcagtatatccgcttagcccagcctgtatcaggcactcaagttgtgcagggacagatccagacacttgccaccaatgctcaacagattacacagacagaggtccagcaaggacagcagcagttcagccagttcacagatggacagcagctctaccagatccagcaagtcaccatgcctgcgggccaggacctcgcccagcccatgttcatccagtcagccaaccagccctccgacgggcaggccccccaggtgaccggcgactgagggcctgagctggcaaggccaaggacacccaacacaatttttgccatacagccccaggcaatgggcacagccttcctccccagaggacccggccgacctcagcgcctcctgcaggctaggacactggtgcactacaccccatgcctgggggccgagattctccagcagaaagatgcaatattttttgtttcctttttttccatttttttctctaaggaatcaatatttcaatatgttgagtgtgtgtccaatgctatgaaattaaaatattaaataacatatttatggcattttcttgaagagtgtggttgaagaaatatttctccttttgtttttcttttttttttgtttgttactgccacttctttttaggagcaaatctccccaggggtgtacggtatttcttgactctgggaacagctgctacccccaagacttgccacgttgttctgccctcagatggaattaggtgaatgtgtgtagctgctttttcactcgtggtcctctccccatcccttgctctgaccccagagctctgtgtatttgcatccagaggccatggaaacattctttgcatttaagagacagatttattccctgtggagagtgggtggattcattgccacactcttttctcccagggacccaggaaactaggactttgtgtgtttgctgcccacctcccttttattttttaaatgcattaaaaactgtgctagtctcctttgcatggacttcaagctgcatgaaatgcaataaatctcattttagataaaaaaaaaaaaaaaaaa

SEQ ID NO: 45222 - DNA, 462 bp, Homo sapiens
  misc_feature (1)...(462): n = a,t,c or g
gaatncctctaatttgaatccctaatttaatacgactcactatagggaatttggccctcgaggccaagaattcggcncnagcatgnacaaaagnattctttatgtcctagggnncttacaatttgggattacctgggagtgaaaagaaatattacagccatgcctaactgacttcttgaggtaagantgttctgtcagaaaaccctntcccagttcccctgcagctcttcaggaatccacatctctccanagctctttgttctcatgggtggcacctccanagtgaagaagatcctttgtcaanaagggaaacagaggggaaatganagggtcctgcaggcanagctggaancaacttccactctggctcttgcaagctgtgtgaccctgggcacaatttctccttnctctggaaacctctgttttcttagatttggancagggtggncacactgaccttgc

SEQ ID NO: 45223 - DNA, 5155 bp, Homo sapiens
ccatcttagatgcgatggtctagaggaaaacgattgtgaggcgggaacggctttctgctgccttttttgggccccgaaaagggtcagctggccgggctttggggcgcgtgcctgcaggccgagtttgctacgatgcgggggctgctcggggctccgtcccctgggctggggacgcgccgaatgtgaccgcctcccgctccctcacccgccgcggggaggaggagcgggcgagaagctgccgccgaacgacaggacgttggggcggcctggctccctcaggtttaagaattgtttaagctgcatcaatggagcacatacagggagcttggaagacgatcagcaatggttttggattcaaagatgccgtgtttgatggctccagctgcatctctcctacaatagttcagcagtttggctatcagcgccgggcatcagatgatggcaaactcacagatccttctaagacaagcaacactatccgtgttttcttgccgaacaagcaaagaacagtggtcaatgtgcgaaatggaatgagcttgcatgactgccttatgaaagcactcaaggtgaggggcctgcaaccagagtgctgtgcagtgttcagacttctccacgaacacaaaggtaaaaaagcacgcttagattggaatactgatgctgcgtctttgattggagaagaacttcaagtagatttcctggatcatgttcccctcacaacacacaactttgctcggaagacgttcctgaagcttgccttctgtgacatctgtcagaaattcctgctcaatggatttcgatgtcagacttgtggctacaaatttcatgagcactgtagcaccaaagtacctactatgtgtgtggactggagtaacatcagacaactcttattgtttccaaattccactattggtgatagtggagtcccagcactaccttctttgactatgcgtcgtatgcgagagtctgtttccaggatgcctgttagttctcagcacagatattctacacctcacgccttcacctttaacacctccagtccctcatctgaaggttccctctcccagaggcagaggtcgacatccacacctaatgtccacatggtcagcaccaccctgcctgtggacagcaggatgattgaggatgcaattcgaagtcacagcgaatcagcctcaccttcagccctgtccagtagccccaacaatctgagcccaacaggctggtcacagccgaaaacccccgtgccagcacaaagagagcgggcaccagtatctgggacccaggagaaaaacaaaattaggcctcgtggacagagagattcaagctattattgggaaatagaagccagtgaagtgatgctgttccactcggattgggtcaggctcttttggaactgtttataagggtaaatggcacggagatgttgcagtaaagatcctaaaggttgtcgacccaaccccagagcaattccaggccttcaggaatgaggtggctgttctgcgcaaaacacggcatgtgaacattctgcttttcatggggtacatgacaaaggacaacctggcaattgtgacccagtggtgcgagggcagcagcctctacaaacacctgcatgtccaggagaccaagtttcagatgttccagctaattgacattgcccggcagacggctcagggaatggactatttgcatgcaaagaacatcatccatagagacatgaaatccaacaatatatttctccatgaaggcttaacagtgaaaattggagattttggtttggcaacagtaaagtcacgctggagtggttctcagcaggttgaacaacctactggctctgtcctctggatggccccagaggtgatccgaatgcaggataacaacccattcagtttccagtcggatgtctactcctatggcatcgtattgtatgaactgatgacgggggagcttccttattctcacatcaacaaccgagatcagatcatcttcatggtgggccgaggatatgcctccccagatcttagtaagctatataagaactgccccaaagcaatgaagaggctggtagctgactgtgtgaagaaagtaaaggaagagaggcctctttttccccagatcctggccttccattgagctgctccaacactctctaccgaagatcaaccggagcgcttccgagccatccttgcatcgggcagcccacactgaggatatcaatgcttgcacgctgaccacgtccccgaggctgcctgtcttctagttgactttgcacctgtcttcaggctgccaggggaggaggagaagccagcaggcaccacttttctgctccctttctccagaggcagaacacatgttttcagagaagctgctgctaaggaccttctagactgctcacagggccttaacttcatgttgccttcttttctatccctttgggccctgggagaaggaagccatttgcagtgctggtgtgtcctgctccctccccacattccccatgctcaaggcccagccttctgtagatgcgcaagtggatgttgatggtagtacaaaaagcaggggcccagccccagctgttggctacatgagtatttagaggaagtaaggtagcaggcagtccagccctgatgtggagacacatgggattttggaaatcagcttctggaggaatgcatgtcacaggcgggactttcttcagagagtggtgcagcgccagacattttgcacataaggcaccaaacagcccaggactgccgagactctggccgcccgaaggagcctgctttggtactatgggaacttttcttaggggacacgtcctcctttcacagcttctaaggtgtccagtgcattgggatggttttccaggcaaggcactcggccaatccgcatctcagccctctcagggagcagtcttccatcatgctgaattttgtcttccaggagctgcccctatggggcggggccgcagggccagccttgtttctctaacaaacaagggccagccttgtttctctaacaaacaaacaaacaaacagccttgtttctctagtcacatcatgtgtatacaaggaagccaggaatacaggttttcttgatgatttgggttttaattttgtttttattgcacctgacaaaatacagttatctgatggtccctcaattatgttattttaataaaataaattaaatttaggtgtaatggctggctgttacctccttttaaagtaattctgagctcacaacttgaatgccccatttgttcaccctcttcaggagcagaattcaagaacaggaaatgtgcccagagcctaggctgggaatgaatttgtaatttaacctttgtactctttgtaaacctctactgaagagttaagtataaaaattaattaagcagaaagtactctaaactcagctaataccttaagtaatacattttataaactatttatttatttggtaggtacagcttttttaaacacaaaaatagattagataaattccagcttggaacaagctagtgctggttcacaaggttatgctcacccttcaattaaaatcaaaatgactacaagacttgccatcagctctcttcaggaccactgctgggtcagaatcagaaaccttgggtgccatgaaatttttacaaaatttcaaatcaaagccaggctttgcagctagataatagatcacttgagtacgaaccacacatgtaagtgcacgtatatttgagttctcaatacaattaccctgatgggcaagaacccacaggtgagagcagaggcttggttcccctagagggccctggctggaggccccaacaccaaccagacgacaggagggccagactgctacccagtactgtacctcctgctccttcaagagcctccctaagggagaagaagatctatacttccactttgtttgctgcacatgtggcaacaagattgctaccctgatttgggacacttgagagaacttgaaaaaaatgaccacccttaaagccctagaaaaaagttgtatgtttgttaacagctatgctgcgctcactttgcattgtgtgttcttgaaagctctgtataaatcaaaattttgacgacacactaaatacactagagaaatacactatagaggaatccttttatagggctgaagactcctttggtaagaaaaatatgctgcattaggggcagctgcaagtttactatttctggggaagaaaagatcaaagataagagccaggtttgttttttaaagcaatcaatccaaacagtttgggtgtttgttagttgttacccctgaggggcttgaggtgtaactatatcagctataaaaatagcaattccatacatttaattaggttactttatatctttcactcttccccatggctgtaataatggagattgaatgagactaaggctaagcccaactccactcaaatccaagtcacacgtcaccttggctgcagtacagggaagctccgcacaccctggcttgggaaagtttcggccgatggagcccaagatgcagggcaaccatctactctttagggttctgatgattccactccagaaaggtgcatgaagaggtccccgagctctgtcatgtcgacatcttcattgttggggacatgccggctttctcggttctcgatgaaatcccagagccgcactgaattaaagaacctcacagtgccttgagaactgagctgtttccgaggtttctcaggctctgctagccgcccatcggggtaagcatggcgataaagacatttgcttccaaatgggcaggtccccttgccttgctcaaagtatttacaggcttttttccccatcccctgtttgaaagcttcaatcaactcgttctttttattctgatcttccacccaatacacacttggaattacaaactctgatatcacacggcattctggacaagacttaatgattgggttttcaaactgtttggcacaccgccactgccggatgcaggacaaacagtacgtgtgattgcaattggagagaatcccaaatctcctctcagaagcagaggccttctccaggatcacttccatgcagatactgcacactttgtcctggcttgctggaaggcaaaggccttttccatctcgtgttcgaacgtcaacatgcagatcttt

SEQ ID NO: 45224 - DNA, 959 bp, Homo sapiens
aattcggcacgaggtggtgcttgtctgcagagtcatgacctctttccgcttggccctcatccagcttcagatttcttccatcaaatcagataacgtcactcgcgcttgtagcttcatccgggaggcagcaacgcaaggagccaaaatagtttctttgccggaatgctttaattctccatatggagcgaaatattttcctgaatatgcagagaaaattcctggtgaatccacacagaagctttctgaagtagcaaaggaatgcagcatatatctcattggaggtaacttcctacccacaaggctctatccctgaagaggatgctgggaaattatataacacctgtgctgtgtttgggcctgatggaactttactagcaaagtatagaaagatccatctgtttgacattgatgttcctggaaaaattacatttcaagaatctaaaacattgagtccgggtgatagtttctccacatttgatactccttactgcagagtgggtctgggcatctgctacgacatgcggtttgcagagcttgcacaaatctacgcacagagaggctgccagctgttggtatatccaggagcttttaatctgaccactggaccagcccattgggagttacttcagcgaagccgggctgttgataatcaggtgtatgtggccacagcctctcctgcccgggatgacaaagcctcctatgttgcctggggacacagcaccgtggtgaacccttggggggaggttctagccaaagctggcacagaagaagcaatcgtgtattcagacatagacctgaagaagctggctgaaatacgccagcaaatccccgtttttagacagaagcgatcagacctctatgctgtggagatgaaaaagccctaaagtttatgtttctaatgtgtcacagaataggacgatatgattctacaacataatcaactccctattaaattcttt

SEQ ID NO: 45225 - DNA, 445 bp, Homo sapiens; identical to SEQ ID NO: 16894
  misc_feature (1)...(445): n = a,t,c or g

SEQ ID NO: 45226 - DNA, 1421 bp, Homo sapiens
gtggcgagctgaggtggaggcaggctgcggcagacggcgacagtggcggcggcgccatggcagggcttgcaggatccctgctgccttggtgatcccgggctgacagccagagagcacagcggctcagctcctggagagtgagggttgaagaaagcggagggcagccgcctgcgcccgctggctcccattaggtcggttcctgcagcggtgcccggcagccttggtgaaggccctgcccggcagagatcatgtattgcctccagtggctgctgcccgtcctcctcatccccaagcccctcaaccccgccctgtggttcagccactccatgttcatgggcttctacctgctcagcttcctcctggaacggaagccttgcacaatttgtgccttggttttcctggcagccctgttccttatctgctatagctgctggggaaactgtttcctgtaccactgctccgattccccgcttccagaatcggcgcatgatcccggcgttgtgggcacctaacggcctgccctgttagctttccaaggaagcagaagacgggaggggaggcattgacataggtcataaagcattggagtttcaaatcccgcagcctcgcggtgtcacattcctgacggcgcctttttggcctgtgatgttttatccttacaatgtgaataatggcactgaccggtgcttttattgtaaagtcctatagtcgtgggtggtcttgtggttgtgtgtgttctgtccccatctaggtcctggctggccgcatgaccacccctctcgcctcattactgtgaggagtctgggtccatcctgggtcagctgccccaatgtgacctgggggcagataaaatgccagtctcattgtcacctctgtgacccctccttgtcagggtctccttccttcccagaatgttactgactcctcagtccctcttctggtttccctttatttctcttctacccttttccttttttggggagtacctgtccaagacagggctcatttttgcacttatctcgaatttgaagagattgctgacgcccgagagcctcgctttttcatccttctttccttgttcagcagggctagacagaaacatgtcttgactgttagttgtccacaaatcttcagtattttctccacttcatttttaagaaaggaagcaacagatagatgttgctctttcacctgggtgtctgggctcaagctttcccgcccagcctcacttcctttgcccttcctcctgcctttctcaactgtcccaaggagggggcctcattgtgtctcccgtgcatgctctgcagcattgaagtatggtgtgttcacgtagttctagcagtccccagctgagtgagtgggagagtacctgtgtgtttcgtaacggccttgatccccttgatagatgtttggatattttt

SEQ ID NO: 45227 - DNA, 2943 bp, Homo sapiens
  misc_feature (1)...(2943): n = a,t,c or g
gaatcttgtttgaagcttttgagggcaggctgccaagtcctggaaaaatagtaaaaggcaagtttgtgggttttttttttttacacgaatttgaggaaaaccaaatgaatttgatagccaaattgagacaatttcagcaaatctgtaagcagtttgtatgtttagttggggtaatgaagtatttcagttttgtgaatagatgacctgtttttacttcctcaccctgaattcgttttgtaaatgtagagtttggatgtgtaactgaggcgggggggagttttcagtatttttttttgtgggggtgggggcaaaatatgttttcagttctttttcccttaggtctgtctagaatcctaaaggcaaatgactcaaggtgtaacagaaaacaagaaaatccaatatcaggataatcagaccaccacaggtttacagtttatagaaactagagcagttctcacgttgaggtctgtggaagagatgtccattggagaaatggctggtagttactcttttttccccccacccccttaatcagactttaaaagtgcttaaccccttaaacttgttattttttacttgaagcattttgggatggtcttaacagggaagagagagggtgggggagaaaatgtttttttctaagattttccacagatgctatagtactattgacaaactgggttagagaaggagtgtaccgctgtgctgttggcacgaacaccttcagggactggagctgcttttatccttggaagagtattcccagttgaagctgaaaagtacagcacagtgcagctttggttcatattcagtcatctcaggagaacttcagaagagcttgagtaggccaaatgttgaagttaagttttccaataatgtgacttcttaaaagttttattaaaggggaggggcaaatattggcaattagttggcagtggcctgttacggttgggattggtggggtgggtttaggtaattgtttagtttatgattgcagataaactcatgccagagaacttaaagtcttagaatggaaaaagtaaagaaatatcaacttccaagttggcaagtaactcccaatgatttagtttttttccccccagtttgaattgggaagctgggggaagttaaatatgagccactgggtgtaccagtgcattaatttgggcaaggaaagtgtcataatttgatactgtatctgttttccttcaaagtatagagcttttggggaaggaaagtattgaactgggggttggtctggcctactgggctgacattaactacaattatgggaaatgcaaaagttgtttggatatggtagtgtgtggttctcttttggaatttttttcaggtgatttaataataatttaaaactactatagaaactgcagagcaaaggaagtggcttaatgatcctgaagggatttcttctgatggtagcttttgtattatcaagtaagattctattttcagttgtgtgtnaagcaagtttttttttagtgtaggagaaatacttttccattgtttaactgcaaaacaagatgttaaggtatgcttcaaaaattttgtaaattgtttattttaaacttatctgtttgtaaattgtaactgattaagaattgtgatagttcagcttgaatgtctcttagagggtgggcttttgttgatgagggaggggaaactttttttttttctatagacttttttcagataacatcttctgagtcataaccagcctggcagtatgatggcctagatgcagagaaaacagctccttggtgaattgataagtaaaggcagaaaagattatatgtcatacctccattggggaataagcataaccctgagattcttactactgatgagaacattatctgcatatgccaaaaaattttaagcaaatgaaagctaccaatttaaagttacggaatctaccattttaaagttaattgcttgtcaagctataaccacaaaaataatgaattgatgagaaatacaatgaagaggcaatgtccatctcaaaatactgcttttacaaaagcagaataaaagcgaaaagaaatgaaaatgttacactacattaatcctggaataaaagaagccgaaataaatgagagatgagttgggatcaagtggattgaggaggctgtgctgtgtgccaatgtttcgtttgcctcagacaggtatctcttcgttatcagaagagttgcttcatttcatctgggagcagaaaacagcaggcagctgttaacagataagtttaacttgcatctgcagtattgccatggttaggggataagtgcttattttttaagagctgtggagttccttaaatatcaaccatggcactttcctccctgaccccttccctaggggatttcaggattgagaaatttttcccatcgagcctttttaaaattgtaggacttgttcctgtgggcttcagtgatgggatagtacacttcactcagaggcatttgcatctttaaataatttcttaaaagcctctaaagtgatcagtgccttgatgccaactaaggaaatttgtttagcattgaatctctgaaggctctatgaaaggaatagcatgatgtgctgttagaatcagatgttactgctaaaatttacatgttgtgatgtaaattgtgtagaaaaccattaaatcattcaaaataataaactatttttattagagaatgtatacttttagaaagctgtctccttatttaaataaaatagtgtttgtctgtagttcagtgttggggcaatcttgggggggattcttctctaatctttcagaaactttgtctgcgaacactctttaatggaccagatcaggatttgagcggaagaacgaatgtaactttaaggcaggaaagacaaattttattcttcataaagtgatgagcatataataattccaggcacatggcaatagaggcc

SEQ ID NO: 45228 - DNA, 6246 bp, Homo sapiens
tggaaacttatgcaggggaaaagagctaggaaagagctgcaaagcagtgtgggctttttcccttttttgctccttttcattacccctcctccgttttcacccttctccggacttcgcgtagaacctgcgaatttcgaagaggaggtggcaaagtgggagaaaagaggtgttagggtttggggtttttttgtttttgtttttgttttttaatttcttgatttcaacattttctcccaccctctcggctgcagccaacgcctcttacctgttctgcgggcggccgcgcaccgctggcagctgagggttagaaagcggggtgtattttagattttaagcaaaaattttaaagataaatccatttttctctcccacccccaacgccatctccactgcatccgatctcattatttcggtggttgcttgggggtgaacaattttgtggctttttttcccctataattctgacccgctcaggcttgagggtttctccggcctccgctgcactgcgtgcacctggcgctgccctgcttcccccaacctgttgcaaggctttaattcttgcaactgggacctgctcgcaggcaccccagccctccacctctctctacatttttgcaagtgtctgggggagggcacctgctctacctgccagaaattttaaaacaaaaacaaaaacaaaaaaatctccgggggccctcttggcccttgtatccctgcactctcgctctcctgccccaccccgaggtaaagggggcgactaagagaagatggtgttgctcaccgcggtcctcctgctgctggccgcctatgcggggccggcccagagcctgggctccttcgtgcactgcgagccctgcgacgagaaagccctctccatgtgcccccccagccccctgggctgcgagctggtcaaggagccgggctgcggctgctgcatgacctgcgccctggccgaggggcagtcgtgcggcgtctacaccgagcgctgcgcccaggggctgcgctgcctcccccggcaggacgaggagaagccgctgcacgccctgctgcacggccgcggggtttgcctcaacgaaaagagctaccgcgagcaagtcaagatcgagagagactcccgtgagcacgaggagcccaccacctctgagatggccgaggagacctactcccccaagatcttccggcccaaacacacccgcatctccgagctgaaggctgaagcagtgaagaaggaccgcagaaagaagctgacccagtccaagtttgtcgggggagccgagaacactgcccacccccggatcatctctgcacctgagatgagacaggagtctgagcagggcccctgccgcagacacatggaggcttccctgcaggagctcaaagccagcccacgcatggtgccccgtgctgtgtacctgcccaattgtgaccgcaaaggattctacaagagaaagcagtgcaaaccttcccgtggccgcaagcgtggcatctgctggtgcgtggacaagtacgggatgaagctgccaggcatggagtacgttgacggggactttcagtgccacaccttcgacagcagcaacgttgagtgatgcgtccccccccaacctttccctcaccccctcccacccccagccccgactccagccagcgcctccctccaccccaggacgccactcatttcatctcatttaagggaaaaatatatatctatctatttgaggaaactgaggacctcggaatctctagcaagggctcaacttcgaaaatggcaacaacagagatgcaaaaagctaaaaagacaccccccccctttaaatggttttctttttgaggcaagttggatgaacagagaagggaagagaggaagaacgagaggaagagaagggaaggaagtgtttgtgtagaagagagagaaagacgaatagagttaggaaaaggaagacaagcaggtgggcaggaaggacatgcaccgagaccaggcaggggcccaactttcacgtccagccctggcctggggtcgggagaggtgggcgctagaagatgcagcccaggatgtggcaatcaatgacactattggggtttcccaggatggattggtcagggggagaaaggaaaaggcaaaacactccaggacctctcccggatctgtctcctcctctagccagcagtatggacagctggacccctgaacttcctctcctcttacctgggcagagtgttgtctctccccaaatttataaaaactaaaatgcattccattcctctgaaagcaaaacaaattcataattgagtgatattaaatagagaggttttcggaagcagatctgtgaatatgaaatacatgtgcatatttcattccccaggcagacattttttagaaatcaatacatgccccaatattggaaagacttgttcttccacggtgactacagtacatgctgaagcgtgccgtttcagccctcatttaattcaatttgtaagtagcgcagcagcctctgtgggggaggataggctgaaaaaaaaaagtgggctcgtatttatctacaggactccatatagtcatatataggcatataaatctattctttttctttgtttttttctttcttcctttctttcaaaggtttgcattaacttttcaaagtagttcctataggggcattgaggagcttcctcattctgggaaaactgagaaaacccatattctcctaatacaacccgtaatagcatttttgcctgcctcgaggcagagtttcccgtgagcaataaactcagcttttttgtggggcacagtactggatttgacagtgattccccacgtgtgttcatctgcacccaccgagccaggcagaggccagccctccgtggtgcacacagcacgcgcctcagtccatcccattttagtctttaaaccctcaggaagtcacagtctccggacaccacaccacatgagcccaacaggtccacgatggatccaccagtcccaccccagccttttcctttcatctgaacagaatgtgcatttttggaagcctccctcactctccatgctggcagagcaggagggagactgaagtaagagatggcagagggagatggtggcaaaaaggtttagatgcaggagaacagtaagatggatggttccggccagagtcgatgtggggaggaacagagggctgaagggagagggggctgactgttccattctagctttggcacaaagcagcagaaaggggggaaaagccaatagaaatttccttagcttccccaccatatgtattttcatggatttgagaggaaagagaggaaaatgggggaatgggttgcaaaatagaaatgagcttaatccaggccgcagagccagggaaggtgagtaaccttaggagggtgctagactttagaagccagataggaagaatcagtctaaactggccatgctttggaagggacaagactatgtgctccgctgcccaccttcagcctgcaatgagggactgaggcccacgagtctttccagctcttcctccattctggccagtccctgcatcctccctggggtggaggatggaaggaaagctgggacaagcagggaacgcatgattcagggatgctgtcactcggcagccagattccgaaactcccattctccaatgacttcctcaaccaatgggtggccttgtgactgttctttaaggctgaagatatccaggaaagggggcttggacactggccaaggagaccccttcgtgctgtggacacagctctcttcactctttgctcatggcatgacacagcggagaccgcctccaacaacgaatttggggctacgaagaggaatagcgaaaaagcaaatctgtttcaactgatgggaaccctatagctatagaacttgggggctatctcctatgcccctggacaggacagttggctggggacaggagaagtgctcaatcttcatgagacaaaggggcccgatcaaggcagccacaaggccttgacctgccgagtcagcatgccccatctctctcgacagctgtcccctaaacccaactcacgtttctgtatgtcttaggccagtatcccaaacctcttccacgtcactgttctttccacccattctccctttgcatcttgagcagttatccaactaggatctgccaagtggatactggggtgccactcccctgagaaaagactgagccaggaactacaagctccccccacattcctcccagcctgggacctaattcttgagaggggctctctcttcacggactgtgtctggactttgaggcaggcttctgccccttgcgttggctctttgctgccagccatcaggtgggggattagagcctggtgtaagtgcgccagactcttccggtttccaaagttcgtgcctgcgaacccaaacctgtgagtctcttctgcatgcaggagtttctcctgggcagctggtcactccccagagaagctgggccttcatggacacatggaactaagcctcccaaatgggagttctggctgagcccagggtggggagatcctgggaagggaggcactggaggaagacggcacctcttcccccatggcagggtgtgagggaggcaggtttggaatggtgcgagtatggcaatctaagcaggggtctggtctctttgactccaggctggcctttggccgactgtctgctcacccagagaccttggactccggactatccatggctccgaatctaagtgctgcccactcccatgctcacacccacagaaggtcttcccatcccctttagattcgtgcctcactccaccagtgaggaagatgcctctgtctttcccacgactgccaggagatagggaagcccagccaggactgaccctccttcctccagcctgccctgacccacctggcaaagcagggcacatggggaggaagagactggaacctttctttgacagccagggcctagacagacaggcctggggacactggccccatgaggggaggaaggcaggcgcacgaggtccagggaggcccttttctgatcatgccccttctctcccaccccatctccccaccaccacctctgtggcctccatggtacccccacagggctggcctcccctagagggtgggcctcaaccacctgctcccgccacgcaccggttagtgagacagggctgccacggcaaccgccaagcccccctcaaggtgggacagtaccccggacccatccactcactcctgagaggctccggcccagaatgggaacctcagagaagagctctaaggagaagaaaccccatagcgtcagagaggatatgtctggcttccaagagaaaggaggctccgttttgcaaagtggaggagggacgagggacaggggtttcaccagccagcaacctgggccttgtactgtctgtgtttttaaaaccactaaagtgcaagaattacattgcactgtttctccactttttattttctcttaggcttttgtttctatttcaaacatactttcttggttttctaatggagtatatagtttagtcatttcacagactctggcctcctctcctgaaatccttttggatggggaaagggaaggtggggagggtccgaggggaaggggaccccagcttccctgtgcccgctcaccccactccaccagtcccccggtcgccagccggagtctcctctctaccgccactgtcacacccgtagcccacatggatagcacagttgtcagacaagattccttcagattccgagttgcctaccggttgttttcgttgttgttgttgttgtttttctttttctttttttttttgaagacagcaataaccacagtacatattactgtagttctctatagttttacatacattcataccataactctgttctctcctcttttttgttttcaactttaaaaacaaaaataaacgatgataatctttactggtgaaaaggatggaaaaataaatcaacaaatgcaaccagtttgtgagaaaaaaaaaaaaagccgaaaaaaaaaaaaaaaacacctgaatgcggaagagctcggctcccgtttagcattttgtacttaaggaaataaaaaaccaacaaaggatctcacattttcttaaaaagtgaagattgctgtatactatttattcaacttataatttatgttactccttgatctttgtcttttgtcatgacaaagcatttatttaataaagttatgcattcagttaaaaaaaaaaaaaa

SEQ ID NO: 45229 - DNA, 3575 bp, Homo sapiens
gcgggtctggctggcggcacggcgggagggagccgagagacccgagtgcacgtgtggagaagcggcggcacaagcgcggcggcgggagacactccccctcgcaccagactcaagccctcactcgactctcgcggccttcgttgctcgcacagctccctgcccaggctaggaggccggcttgcggggttgagtggcccgagctaagggtgcggagacccaagggcggcgactacgacggcgttgatatcggtggtaacgacggcctcagcaggcggggaagatgaaaggtagccggatcgagctgggagatgtgacaccacacaatattaaacagttgaaaagattgaatcaggtcatctttccagtcagctacaatgacaagttctacaaggatgtgctggaggttggcgagctagcaaaacttgcctatttcaatgatattgctgtaggtgcagtatgctgtagggtggatcattcacagaatcagaagagactttacatcatgacactaggatgtctggcaccttaccgaaggctaggaataggaactaaaatgttaaatcatgtcttaaacatctgtgaaaaagatggtacttttgacaacatttatctgcatgtccagatcagcaatgagtcggcaattgacttctacaggaagtttggctttgagattattgagacaaagaagaactactataagaggatagagcccgcagatgctcatgtgctgcagaaaaacctcaaagttccttctggtcagaatgcagatgtgcaaaagacagacaactgaacaaattacaaatgaactttcttgcacttgcttgtcgccaaataaaagagaggcccattgattcctcccccaccccaacacttttcttttaaagcttttctccctccttgttcttgtttttctttcttcctttccttttctctgagagttttaatactttcaaggactttaaaaaaataatcatgtttgaattgttttctcttatttttgtgaggtggtttgaaggaaggacaaggtagatctgtttagttttgcagttgaagttagatggtcctaaacatttaattgtcaaataatttcaaatttaatgtcctgctttcacattgaagggcagagcctacaaaacattgtatatttcaaaagacaaaaagaagcagcagcagtatcttgttctctaattcatagacaagttgagtgtgtttgtggtactttgggtttttaaacactttgggatactaatccctagacattgccttcactccacctttagtccttctgagcactctctcgggagttggaacattgttatccttgtaagaaatactaagcttatgttgatttttaagtaattatatcttctcttcttgctggtgggtggggcagtttggtttagtgttatactttggtctaagtatttgagttaaactgcttttttgctaatgagtgggctggttgttagcaggtttgtttttcctgctgttgattgttactagtggcattaacttttagaatttgggctggtgagattaattttttttaatatcccagctagagatatggcctttaactgacctaaagaggtgtgttgtgatttaattttttcccgttcctttttcttcagtaaacccaacaatagtctaaccttaaaaattgagttgatgtccttataggtcactacccctaaataaacctgaagcaggtgttttctcttggacatactaaaaaatacctaaaaggaagcttagatgggctgtgacacaaaaaattcaattactgtcatctaatgccagctgttaaaagtgtggccactgagcatttgattttataggaaaaaatagtatttttgagaataacatagctgtgctattgcacatctgttggaggacatcccagatttgcttatactcagtgcctgtgatattgagtttaaggatttgaggcaggggtaattattaaacatattgcttctattcttggaaaaatagaagtgtaaaatgttaataatacaaatgtcactgtgacctcctccactgagaggactggtttatgccagatcattttccggcacacacggagtggctttgacagattgataactttgtaagatgggagacatctgaaatattcatgttttccttttgtagtcccatctccactatttagaaatgttctcagactttaaaataatgcacagggcttgagctttctgtcatttgactttaaaaggaagtttcattcatatttatcctcttatgtaaaattgcggtataaagtctcatttccaaatatgttaaatgacaaaattattttataaaatgtttatgcacactttataaccttaagtttttatttgagaatgtgaaagtacaaagtgcagtagacttcaacaatcttgagtgccaagaataatacagaaaaagaagacagttgatgaatgagtttatagggttctaatcttaagatggtaaaaatgtagaaagaccttgctggttttttgggggtattcgtttcttaaacaatccaaatctaagcttagaagaaaagtttagcgttaagcacctttatcttcatgaataagcttcagcttgctcttggcaagagaagagtgcttgagttacagaaggcataagtagtttgaagaatgcagcagcctttttgtaaacttcccagatatcaaaatagactttgatatataaatggttttctgagatgacactgcctctatttctataaccatttcacctggactatctaatcagtcctatgaatgtatccctaaatgtggttattgaaaacctaatagctgcctcatgacaagtacatgttatttaaggaggaaaaaatattaaattttgaattgagtgtgtaggctccctatcattatatatagagtttctttttccacggtagtcagtgacttaacctgaattgtaaatgtttgtaaagggttaattgtcctacatcaaacttagttaaataattccatccacttatggaggaggaggagaatgtggaagaggtaaaaagctggggcacaagttcatatgcctatgagtcagtaaagactgaagtaatgtcctatgttgagctggttattttgatatatgataataattatctttgaagtagaacaattctgttaactggaaaatcacaggatatatccatcatatttttccaggacagatagtttttactgtggggcaaataggttaaaattacactatgttagttgcatttaggttttaaagcaaagaatctgtagagaaatctatgcaatatatagtttgtccagattagctttcatttggggaatgaagttctgaaatatctaaagcagtttactcatcaattgaaaagtcctccaaaaagagaactattgggaaaccatggtgtggtggtggaaaagaaaagctccctcagttttttggagggaataacttaaaaaaatacttaaatggctaagtttacttggtgcagttaagaattaaacttgtcaattttaacattgctgttacatctgaaataaacttatgtgatgttctggtaaaaaaaaaagtcgacc

SEQ ID NO: 45230 - DNA, 455 bp, Homo sapiens; identical to SEQ ID NO: 16940

SEQ ID NO: 45231 - DNA, 545 bp, Homo sapiens
  misc_feature (1)...(545): n = a,t,c or g
tnnnnnnnnnnnaattggannccatcagctatgacatgattacgaatttaatacgactcactatagggaatttggccctcgaggccaagaattcggcacgaggcggatggtggttcctgctgccctcaaggtcgtgcgtctgaagcctacaagaaagtttgcctatctggggcgcctggctcacgaggttggctggaagtaccaggcagtgacagccaccctggaggagaagaggaaagagaaagccaagatccactaccggaagaagaaacagctcatgaggctacggaaacaggccgagaagaacgtggagaagaaaattgacaaatacacagaggtcctcaagacccacggactcctggtctgagcccaataaagactgttaattcctcatgcgttgcctgcccttcctccattgttgccctggaatgtacgggacccaggggcagcagcagtccaggtgccacaggcagccctgggacataggaagctgggagcaaggaaagggcttaatcactgcttccgaagttgcttgaagcctcgga

SEQ ID NO: 45232 - DNA, 1334 bp, Homo sapiens
ggaaagattgaaagtaaaaatatatattacgatataatggcaaatattaacctaatgaaagctgagggaacaatattaacgtcttacaaaattgactttaagtcaaaacagagggtcaacacatattgataaaatgttaaaaactgtactataattgtttgtaagcaaatgtgaaaacacacccaatttagcctttcccaggtggctgccaaagttggcggaggtgcaggtcctggtgcttgatggtcgaggccatctcctgggccgcctggcggccatcgtggctaaacaggtactgctgggccggaaggtggtggtcgtacgctgtgaaggcatcaacatttctggcaatttctacagaaacaagttgaagtacctggctttcctccgcaagcggatgaacaccaacccttcccgaggcccctaccactttccgggcccccagccgcatcttctggcggaccgtgcgaggtatgctgccccacaaaaccaagcgaggccaggccgctctggacccgtcttcaaggtgtttgacggcatcccaccgccctacggacaagaaaaagcggatggtggttcctgctgccctcaaggtcgtgcgtctgaagcctacaagaaagtttgcctatctggggcgcctggctcacgaggttggctggaagtaccaggcagtgacagccaccctggaggagaagaggaaagagaaagccaagatccactaccggaagaagaaacagctcatgaggctacggaaacaggccgagaagaacgtggagaagaaaattgacaaatacacagaggtcctcaagacccacggactcctggtctgagcccaataaagactgttaattcctcatgcgttgcctgcccttcctccattgttgccctggaatgtacgggacccaggggcagcagcagtccaggtgccacaggcagccctgggacataggaagctgggagcaaggaaagggtcttagtcactgcctcccgaagttgcttgaaagcactcggagaattgtgcaggtgtcatttatctatgaccaataggaagagcaaccagttactatgagtgaaagggagccagaagactgattggagggccctatcttgtgagtggggcatctgttggactttccacctggtcatatactctgcagctgttagaatgtgcaagcacttggggacagcatgagcttgctgttgtacacagggtatttctagaagcagaaatagactgggaagatgcacaaccaaggggttacaggcatcgcccatgctcctcacctgtattttgtaatcagaaataaattgcttttaaagaaaaaaaaaaaaaa

SEQ ID NO: 45233 - DNA, 1024 bp, Homo sapiens
aaatgaattaactaatattgaccaaatataaattgactgcaaataataagccgcataaaagttgaagtaggaaaactactccaagtttatatattaggcaccttggggaattctcttagtctttccagctaacaaggattttcagcataataagtagatttaatgatggcataaaattcccagatactttcatatacattttttgccaaagtgtaaatcttctccttttgcagtctttttgttattatcccaacatctagctgctcaggccctaatttagaactcattctgatattttcttcttctgtattaattaatacttatgggtcatgaatccctgctcctttgacctttttaatagctcatgaatccatcccattgcctccccaactctgcccacacctgctgcaacagctaatgccttgattttcctacctcagtctccttttctattaatccctcttttgcgtggctgcctgagtccactttctcaaacacaaacctcactatgcaactttggaatctctgtaggctcacctttgccatttcttaatattgcattctccaaattgctaatctctatccagtctcttgaactagacttggcacatggagattccgctcagaaagtgctcttcacacttctacctgcttgactaaccccagattatctttcaagactttaatctgatcttgtgtcttagagaagcccccatacctggtagagcatgtaccatcttacatgcttaaataactccacatttatttgtgtttattactctgtgttataaatatacatttgttggtctctctcttggattattttgtttctttgtcctgtaactaccactgaaagggtgcaatacagctttcttgaaatgtgtattgaacggatgaatgtataaataaaaattaaattttgtaaatttctgcttattcttagaaaaagaatctaaattgtgacaaatcagaattgaaaaaagtattctaataaagaaaaataagcttttataaaaaaaaaaaa

SEQ ID NO: 45234 - DNA, 1830 bp, Homo sapiens
ttgtttttttttttactgtcagtgtgtttggactagagattttattttagaagtataaaggatggaggcgcgatatttggcatttttaatttaggtttgttttatttaagtttaatgttaattccatgctgtgtttcagtaagaacaatacagattctgtatctgtggctccagtcagatatccagtagtacaaattagcttcaagttacacatactgaacaaaagaggttgagcgagcgaaggaggggaggagtgaggggaaggaggtagggggagggggaaggagaagaaacaaaagaattgaacaggcatgcaggcttttccataccaccttcaacgctaacctgcttcagtgggagagtaaagtaggcaagaatgagcagccacgggattgttgaactgttacccagcacccatgcttttccagcaacatttcagcggagttggaaacatttttttacagcaaaaccattacaacgaagtccctccccaaaccacctttaaccatctcaagctaacaccccaattacttgcaaacactggtataaaacacagtttaaacaattagaaaaatgaaaactgataccacttatgcctctatagtgtgattaacctctctcttagatgcttgcatcacctataagtctaatggctttcaaatgtaatttccatttgctaatggtgatcttgccacatctggcacggagacgacacagtaatgctgaaaaagcctctatgtagtcctgttagtgtcttaaagaacctaaaagctgggaccagtaaaatccacagaaattcactcttgcctttaagaacttttgaaaactgtttaaaaaaaaaaaaaaaaaaaaccaacagggcaggaacctaaattctgagaccaaatgtaaaagtcagatttggtggttctcagtgacaatggggagtttcccaaagggtgggatggggaggagggggtggtcagagatggtttctcttgttggcttatgtctcactgattttcgtcttccacgtcctgcagcgcttctttattctgctcttcaccgtcaccctgcatgtctgaagtccatagtgtcagattatcacgtaacaactgcatgataagtgtagagtccttatagctttcttcactcagcgtatccagttctgcaattgcatcatcaaaagctgcttttgccaacctgcaggcacggtcaggggaattaagaatttcgtagtagaatacggaaaaattgagagcaagacctaagcgaataggatgcgttggtggaagttctgtcattgcaatatcactagcagctttataagccactaggctgttctccgcagcctccttcctgtcgtttcctgtggcaaattctgccagatacctgtggtagtcccctttcattttataatagaaaaccttggactcgccagtgttagctgctggaatgaggtgtttgtccagtacatccagaatgtcacaacagattaactttagctcagtctcaaccatttgccgatattcccgaatcatttttagcttgtcttctcctcccttgttttcttctttctgttcaatgctgctgattattctccaggaggctcttctagctccaatcacattcttatatgcaacagataggaggtttctttcttcaactgtcagctccacatccatccctgctactttcttcattgactccaccatttcgtcgtatcgctcagcctgctcggccaacttcgcctggtacaccagatcctctcgatcatccatagcggcagcggctccgggcagggtctgcgcgacggatggaagcggatagtgtctccgactctctcagcct

SEQ ID NO: 45235 - DNA, 548 bp, Homo sapiens; identical to SEQ ID NO: 17053
  misc_feature (1)...(548): n = a,t,c or g

SEQ ID NO: 45236 - DNA, 1774 bp, Homo sapiens
cccaaaggcatccaagagaccgaggagatgctgaaggtgggggccaccctcacaggggttggcgaactggtcctggacaacaactctgtccgcctgcaagccgcccaaacaaggcatgcagtactatctaagcagccaggacttcgacagcctgctgcagaggcaggagtcgagcgtcaggctctggaaggtgctggcgctggtttttggctttgccacatgtgccaccctcttcttcattctccggaagcagtatctgcagcggcaggagcgcctgcgcctcaagcagatgcaggaggagttccaggagcatgaggcccagctgctgagccgagccaagcctgaggacagggagagtctgaagagcgcctgtgtagtgtgtctgagcagcttcaagtcctgcgtctttctggagtgtgggcacgtttgttcctgcaccgagtgctaccgcgccttgccagagcccaagaagtgccctatctgcagacaggcgatcacccgggtgatacccctgtacaacagctaatagtttggaagccgcacagcttgacctggaagcacccctgcccccttttcagggatttttatctcgaggcctttggaggagcagtggtgggggtagctgtcacctccaggtatgattgagggaggaattgggtagaaactctccagacccatgcctccaatgggcaggatgctgcctttcccacctgagaggggaccctgtccatgtgcagcctcatcagagcctcaccctgggaggatgccgtggcgtctcctcccaggagccagatcagtgcgagtgtgactgaaaatgcctcatcacttaagcaccaaagccagtgatcagcagctcttctgttcctgtgtcttctgtttttttctggtgaatcgtttgcttgctgtggacttggtggaggactcagaggggaggaaaggctgggccccgagtacaacggatgccttgggtgctgcctccgaagagactctgccgcagcttttcttctttttcctcatgccccgggaaacagtctttcttcagaattgtcaggctgggcaggtcaacttgtgttcctttcccctcacctgcttgcctccttaacgcctgcacgtgtgtgtagaggacaaaagaaagtgaagtcagcacatccgcttctgcccagatggtcggggccccgggcaacagattgaagagagatcatgtgaagggcagttggtcaggcaggcctcctggtttcgccactggccctgatttgaactcctgccacttgggagagctcggggtggtccctggttttccctcctggagaatgaggcgcagaggcctcgcctcctgaaggacgcagtgtggatgccactggcctagtgtcctggcctcacagcttccttgcaaggctgtcacaaggaaaagcagccggctggcaccctgagcatatgccctcttggggctccctcatccagcccgtcgcagctttgacatcttggtgtactcatgtcgcttctccttgtgttaccccctcccagtattaccatttgcccctcacctgcccttggtgagccttttagtgcaagacagatggggctgttttcccccacctctgagtagttggaggtcacatacacagctctttttttattgcccttttctgcctctgaatgttcatctctcgtcctcctttgtgcaggcgaggaaggggtgcctcaggggccgacactagtatgatgcagtgtccagtgtgaacagcagaaattaaacatgttgcaaccaaatatt

SEQ ID NO: 45237 - DNA, 789 bp, Homo sapiens; identical to SEQ ID NO: 668

SEQ ID NO: 45238 - DNA, 2540 bp, Homo sapiens
gcatgctagaaaaatagggctggatcttatcactgccctgtctccccttgtttctctgtgccagatcttcagtgcccctttccatacagggattttttttctcatagagtaattatatgaacagtttttatgacctccttttggtctgaaatacttttgaacagaatttcttttttttaaaaaaaaacagagatggggtcttactatgttgcccaggctggtgtcgaactcctgggctcaagcgatccttctgccttggcctcccgaagtgctgggattgcaggcataagctaccatgctgggcctgaacataatttcaagaaaatggttttataaatcctccgagaaatcgcttggacttcggggcggcctcggacggccatggcctttaccctgtactcactgctgcaggcagccctgctctgcgtcaacgccatcgcagtgctgcacgaggagcgattcctcaagaacaggaatgaaggatggcagcatgccgtgcattaaaagctgttttggtagatctcagtggcacacttcacattgaagatgcagctgtgccagggcgcacaggaagctcttaaaaggttacgtggtgcttctgtaatcattaggtttgtgaccaatacaaccaaagagagcaagcaagacctgttagaaaggttgagaaaattggaatttgatatctctgaagatgaaatattcacatctctgactgcagccagaagtttactagagcggaaacaagtcagacccatgctgctagttgatgatcgggcactacctgatttcaaaggaatacaaacaagtgatcctaatgctgtggtcatgggattggcaccagaacattttcattatcaaattctgaatcaagcattccggttactcctggatggagcacctctgatagcaatccacaaagccaggtattacaagaggaaagatgggcttagccctggggcctggaccatttgtgactgctttagagtatgccacagataccaaagccacagtcgtggggaaaccagagaagacgttctttttggaagcattgcggggcactggctgtgaacctgaggaggctgtcatgataggagatgattgcagggatgatgttggtggggctcaagatgtcggcatgctgggcatcttagtaaagactgggaaatatcgagcatcagatgaagaaaaaattaatccacctccttacttaacttgtgagagtttccctcatgctgtggaccacattctgcagcacctattgtgaagcaatgtgtgcatctgaagcaacttgaaatgcagcttcttattgtctggaatgaatcccttaccaactcagtgccagcatcggtagacaccagtcagtgctgatcgctttttaaccctcttttgttgtgcattaattagaaagaaaggtattgaattgcggctagccagtaagccttgctaatctcttttattttgtaactgaagatgagacccaaagaaagggaaagctgagattttgtgccattccttttaaaatattcatcaggttaggtggggctgtgggggaaaagctactacagggaagagtgttctctgctgtctcttcactggaaaacagggaggggggatttcagactgtgaagaaagttgaatggtggtttttaaattataaagtaatgtattaaaaggtgcattaggctgtagttctaatattgagttcaactgtgaaatccatcagatgtgccaaatggagaagacagaaagcaacaaagtgaattgttctttagcccaagtggtacagtgaatttgctttaacagatgttgaaaactaaattttctactgtattcccagcacgggtgacttctttttctcttcattagccagagatgactaatttaaatttagaaccagattttaatttaaattaatatttccattaataacctattcattgcagatacctattatactgtgtaacagttgttttggaaattttatgtaaaattaaaactatcagtattttacagatgttttaattagacattgttattaacaggaacagtgcagaaactagaatcaagccttataatatcttatagaccatgcatttttgaagttagtgtccactagggtcctattaactgtacatttgcaagatttcattatttttgcctctgacactatgggaaaaattttttagaagctattgggacagattcaagcttttatgcacttggttactacagctgtaaaatgaaatctcgtcttgtagcatggattattcttctcatgttaaacccaccaaaataaaggggactaaataggtaatgattttcctagtgcatttgcatactgtgataatcctgggccttgcaatagttctacagggctcttgggcattgaattattaggatgtaattgtacatcattgtagtgttcaccttattgaagctcactctgatgttaatgagcttcgggttttgatgcttgtttagagatcagcagtcttggatgggagggaacaaagctaaataaatgttagtttggtgaaaaa

SEQ ID NO: 45239 - DNA, 2174 bp, Homo sapiens
tttttttttaaaggagaattctgtgaataggtttattaacgaccacctaggagaacctctttggcaactaccacaaattctaggccatttaaaatccaggccaagttcatatttgctctccatgatcaccattacaacaaccacaggtcacacagtattacagaacaaaagcatggtcactttattttacccaaatgcaaatcgtttttcacaaccaagacttttttctttcctacaatgttacaaatgatgtatccaagtccgactgtaatttggagttaaacagggatcatagaaccaaggaattatctctgaagctgctctttgggccactgtgccaccccaacagctctatcctgttgttcttttttttaattaaaaaatcattaaaaaaaaaatggagatggggtcttgctatactgcccagggctgatcttgaactcttggggctcaggacgtaccgatatactgatcctcccgcctcagccttccaaagtgttggggattacaagtgtgagccattgcactcagccatctctacacactgtttttcaaggaaaggcagctacacctattccgtctccaaaccaaccctcacctggtgtccagttttcttggaagtctcaatttttctcatgacagcacattacctaatacctaccacattaggatgttaactcataaaaacatactacaaaagctttaaaaaacatttatttgtattaagtaagtgcaacagtgcaaagaaacttatgcatttgggcccttgcttccctactgttcacattagtttagtttagaagattaagtataataacagaaggagaacagaagaaatgaatataaatatactcagggtagccaaatcctctaattcactaaaggatgaaccaaagttgttggccagattcacatttatgtgggagcctaaacaaattatgttccctttaactgttctaggcctgtggaaaagggaagtggacaacatttatattacaagacagtaattttattgaaacatctttttttgtctaaaactatgcatggagatattaatctcttgtttataaattaggttaagtctaacatcactatttgaaaccagtgttatttacaaaaatgaacctcttctttgctttattgttggtttacaggaataattttaaaccaacctcaatctatctttaaaaatcttcctgccttcaaatgcccagcaacccttataaggtagggggcagccctttgacagcaacattcatcattcaccaggaatgtagaaccacaagtgaacaacaacaacaacaacaacaagattaaatcattcccaacaattcctatttgcttttccaaagcatgctatgtctaattcctgcctttcctatgccagacaggtgggagagggagccccatagagtatattaatgttaattaaattaacttcctttaaaagctaacaggatggcttagtgtggatgaggatgaactgctgtggatgacactagcagataatgaagtaaactttaaacccagattagtaacatgtactccagtaactgaccagctcagatagagacttctcatttactctggatcacatgtacaatattttaccttccaattaaatatagtgccaaaatctttcaaaatagatagagaataggcttcttagaaattcaaataaaaatgttaaataataaaaactggtggcctattatagagtttctgacagactccaatatactgggtaccagaaagtaactctatctcagatgctagtaaaaaggtaaattttgtatatacataaaagacaatattacgagactgtagtgtcatttgtcaaaacaagaatatctagaatggaattttcagtaaacacttgggatgaagggcaatcagaatacaagaggaagcaaaatccacataagttaattcctaatttgagaaatcaatagaatcaataaattgataattactgtctccataggtcacgaattccaaagactagttagtagttagtttctaactaaatgattacaggacgttctgatatatgctgtcttcttgtgatcagtttgttctggcaagacttcaacaagcacttgcccttgaaaacagctcagcgggagaacgatcggaggcaatcacttcgttttataaactagccagataataag

SEQ ID NO: 45240 - DNA, 512 bp, Homo sapiens; identical to SEQ ID NO: 17177
  misc_feature (1)...(512): n = a,t,c or g

SEQ ID NO: 45241 - DNA, 1946 bp, Homo sapiens
tcatcaccaagatcctgaggccttccattggagacaagccatgcaagcaggagaagagcagcctgtttcagatcagcaagagcattggggtcctcacaccactcttgggcctcacttggggttttggtctcaccactgtgttcccagggaccaaccttgtgttccatatcatatttgccatcctcaatgtcttccagggattattcattttactctttggatgcctctgggatctgaaggtacaggaagctttgctgaataagttttcattgtcgagatggtcttcacagcactcaaagtcaacatccctggggttcatccacacctgtgttttctatgagttctccaatatcaaggagatttaacaatttgtttggtaaaacaggaacgtataatgtttccaccccagaagcaaccagctcatccctggaaaactcatccagtgcttcttcgttgctcaactaagaacaggataatccaacctacgtgacctcccggggacagtggctgtgcttttaaaaagagatgcttgcaaagcaatggggaacgtgttctcggggcaggtttccgggagcagatgccaaaaagactttttcatagagaagaggctttcttttgtaaagacagaataaaaataattgttatgtttctgtttgttccctccccctcccccttgtgtgataccacatgtgtatagtatttaagtgaaactcaagccctcaaggcccaacttctctgtctatattgtaatatagaatttcgaagagacattttcactttttacacattgggcacaaagataagctttgattaaagtagtaagtaaaaggctacctaggaaatacttcagtgaattctaagaagggaagggaaggaaggaaggaaggaaagaagggagggaaacagggagaaagggaaaaagaagaaaaagagaaagatgaaaataggaacaaataaagacaaacaacattaagggccatattgtaagatttccatgttaatgatctaatataatcactcagtgcaacattgagaatttttttttaatggctcaaaaatggaaactgaaagcaagtcatggggaatgaatactttgggcagtatcttcctgatgtcttcttagctaagaggaggaaaaaaaggctgaaaaaatagggaggaaattccttcatcagaacgacttcaagtggataacaatatttataagaaatgaatggaaggaaatatgatcctcctgagactaactttgtatgttaaggtttgaactaagtgaatgtatctgcagaggaagtattacaaagatatgtcattagatccaagtgctgattaaatttttatagtttatcagaaaagccttatattttagtttgttccacattttgaaagcaaaaaatatatatttgatatacccttcaattgccaaatttgatatgttgcactgaagacagaccctgtcatatatttaatggcttcaagcaggtacttctctgtgcattatagaatagattttaataatcttatagcattgtatattattattgctgttgtcactgttattattattgtggatactggcccttggtgtgttgcatagctccctatgtattctctgtttccatctttaagttcccagaccaatatacattaagagttttgcatggtctaaattgtgtttattccaaccacgtggaaagctcctggaaagaaattttacattcggttgttctgtgctcctaatgacacttgaccttgttgaacaaatggcagagcctttcccaaggatttgattgtttgtgaattatctgcatgtgtgcttttttttggtgtgtatttcattaaaaaatataaatatttatgaaaattgcacgcatattagagttaaccatgtactattgatacagcaacgctacattgcaaataaaagtccgatcccaaaaaaaacaaaa

SEQ ID NO: 45242 - DNA, 676 bp, Homo sapiens
gggtttatcggaaaatgtgtttattgagatggtttcccactcatcttgactcagagtgcttttagtgctgcttcctcctgaaggaacatccttctgtaagccttgcttttcctccttggctgtctgaagatagatcgccatcatgaacgacaccgtaactatccgcactagaaagttcatgaccaaccgactacttcagaggaaacaaatggtcattgatgtccttcaccccgggaaggcgacagtgccctaagacagaaattcgggaaaaactagccaaaatgtacaagaccacaccggatgtcatctttgtatttggattcagaactcattttggtggtggcaagacaacttggctttggcatgatttatgattccctggattatgcaaagaaaaatgaaccccaaacatagacttgcaagacatggcctgtatgagaagaaaaagacctcaagaaagcaacgaaaggaacgcaagaacagaatgaagaaagtcagggggactgcaaaggccaatgttggtgctggcaaaaagaaatgaagtgtctagcagtgagctggagattggatcacagccgaaggagtaaaggtgctgcaatgatgttagctgtggccactgtggatttttcgcaagaacattaataaactaaaaacttcatgtgaaaaaaaaaaaaaa

SEQ ID NO: 45243 - DNA, 532 bp, Homo sapiens
tttttttttttttcctcagtagtttgaacacttgctggctattttttctgtccaagttctcagtaacttcggcctgtgtagtcagtggttctacacagccgacactacttcttacataacacttggtctctctggcttctggaaagggcgaggggttaccttccggagtccagtgctctttcggcacttctgcaaccaggcagtggtaaaaggggtgctctccaaaaccatcttctagcagatctttttcagttaagattacttgttcttccatgtattcatatttagccagctccttgatcagccgcagtatgtcactgcagtcggcggcagtggctgggcggatcacgaatttagccattttcgtcttttgcttttcttccctttgcggaccaggcccctgtacttgaacagtaggaggaggtggttcctcattcgtctcccgggagcgtcctcttctcagtcaggctggcaccatgacccaaggaacctcggcgagtgacggataaacaccagtcggcccgcgactaag

SEQ ID NO: 45244 - DNA, 1648 bp, Homo sapiens
ttgactgattacgaatttaatacgactcactatagggaatttggccctcgaggccaagaattcggcacgaggaaaggagagaaaggaaagcgcgaggagccgccgccaccaccagcgcagcagtcctggagctgtgaggagattcgggccgtcaccctgcctcccctgcgtcccgccaccggccgcttctgtcctcggacccattccaacaatctcgtaaaacatggtggattactatgaagttctaggcgtgcagagacatgcctcacccgaggatattaaaaaggcatatcggaaactggcactgaagtggcatccagataaaaatcctgagaataaagaagaagcagagagaaaatttcaagcaagtagcggaggcattattgaagtgctgttcggatgctaaggaaacgggacatctattgacaaatatgggcaaagaaggatttaaatggtggaggaggaggtggaagtcatttttgacagtccatttgaatttggcttcacattccgtaacccagatgatgtcttcagggaattttttggtggaagggacccattttcatttgacttctttgaagacccttttgaggacttctttgggaatcgaaggggtccccgagggaagcagaagcccgagggacggggtcgtttttctctgcgttcagtggatttccgtcttttggaagtggattttcttcttttgatacaggatttacttcatttgggtcactaggtcacgggggcctcacttcattctcttccacgtcatttggtggtagtggcatgggcaacttcaaatcgatatcaacttcaactaaaatggttaatggcagaaaaatcactacaaagagaattgtcgagaacggtcaagaaagagtagaagttgaagaagatggccagttaaagtccttaacaataaatggtaaggagcagctgctgcgcttggataacaagtaattcaacgcacgcacttaacagaaatgttaaactataacaagcaccatttgaggattaacaggaacatttttttgaagatttcaaacgaactcgactttcagtataattgtacctaaagtatttataaacagctcatcggagcctctatttgtcatagacttttgagttgattgttgggaccacataataggaccattttttttttgtctttaaaattgttgtaaatctctgtatgcactttgcttttttattaaacgtactccaaggtgagtcttgactctttagtgtaggacaagattgtacactaacaccagcatggacctgcttttcattgtgtctgaaatgtgagccacgtagtgtcggcctgctgtgaagttaacattgccaggacgattcttctacagaaataatttcaatttttttcagtatttagtagtgaaagatattaatacattaatggtaatacatttctggtttaatataaattaaggatgttttctagttgtgcatgaatgctggcaacttagtaagttttgacaattgtttaaatatgtaatgttaagcttaggtttaaaaaagtaaagctggtaaactgggtctttgtcatttgctttaaaaaaaaaaaaaaagaaaataaatgcgaatgtgttggtgcattcttcctgagtgggatctggaaaaaaaaaaa

SEQ ID NO: 45245 - DNA, 1732 bp, Homo sapiens
tttcactaggaaacaaaggatattttattccttttttctgttgttgttgaggatagatcacgatacagagaacagcaatgggtcacagcgcacggtttggttggtttccgcgggaacacagaggacaggaggggcgggatctgggttgagttcccactctcgttatgaccttcaacctctcactgttcccaagggctgcacggagcctgctgagtctccaacccacctcgctcaccgctctgaccaccgacaggcagagcaaaggatgcgggagttgcctctgctgcccatctaaggggacgtaggcagagaagcaaaggcctctgctctccctccatccatcccggtgtgctggccccaacggaacaggagtccttcaactattgcctgccagagacccaattgcagggactgtagtctgcatctggatgagctgggctgtagattgaagtctcagaagcagggaaggttggaaggggtagggtcccagagcccatggagttattgctgagaagatatgcaggggacacattccccaggggcagagtagaagccctgggcctggaatccccgggcgctctgtgaaggggcggggcagatggggactcctcgtggaagcccctgggaagaaattaaccacggaaaggcatagcctgcctgacgtcaaacgctgggctcaccagctccttgctttgtatctccagttgctaagagaccttcagactgggatcaggtgggataaggaagcaaggtttttgttaaaggagtgaaaggagtccatgaagaatgatgacaaagtgctgcaaaccttcccaggtcccaagacgactgaagaccactgcccgtgctcttaccctacgcatccctaaatcaggggagggggctggtctcgggcaacaagcagcctcctaggagcagaaggtgatggagggcccacgggggcagggaggagcagatggccatgtggctcagccccctgccctgggaaagcgagtccacagttcactaacaaacacaataccatcccacaaacaagtagccacaaagaccacagttagcaaacacacacagtcacacacacacacacacacacacatcacgggaggtgggcaggaccgcaggctgcagtggggaggcaagtgttagttgcatcatcaggtggaggaatggtgttagaggggatagggtgggggacacacaagttcttggcttctcctggggaaagggctgttgctgaagtggccggttttcttaagcatcgacatttgcatccaaaggttcaagcagccgcctcaggttccagaggcttccacctgatggctgcacttcagttctctgctttctggggctctgttgcattggcggtgatgaggttctccacctgggcttcctcatctcctggggcccggggcttctgattgaaactgcacttgcacctgcgacttaggataaggaggatcccaaccgagaagaggaccacagcgaacaccagtcccccaatcctcagggtctggtaatcataatgaaaagggtccatttccttctccttttcagctgcactggccaggaccatgggggccagcaggctgcagaggaagaccagcaccaactccatggcgtctgcacaggccggtcccctccgagactcccaggaggacccgccgagtcccgaggagcctgggagtggcggggctgggggcagggcggtgggtgaggcttgagctgctttccc

SEQ ID NO: 45246 - DNA, 541 bp, Homo sapiens
  misc_feature (1)...(541): n = a,t,c or g
gtgnttgtnacnggaactntgtgacacgatnacgaatttaatacgactcactatagggaatttggccctcgaggccaagaattcggcacgagggtgaaggggcccgaagaaggttgagaaggtcgacaaagatgctgaattagtggcccaatggaactattgtactctaagtcaggaaatattaagacgaccaatagttgcctgtgaacttggcagactttataacaaagatgccgtcattgaatttctcttggacaaatctgcagaaaaggctcttgggaaggcagcatctcacattaaaagcattaagaatgtgacagagctgaagctttctgataatcctgcctgggaaggggataaaggaaacactaaaggtgacaagcacgatgacctccagcgggcgcgtttcatctgccccgttgtgggcctggagatgaacggccgacacaggttctgcttcttcggtgctgcggctgtgtgttttctgagcgagccttgaaagagataaaagcggaagtttgcccacgtgtggggctgcctt

SEQ ID NO: 45247 - DNA, 647 bp, Homo sapiens
tttttttttttgtctccactccattgttttattatgtacaaacgctacagaacgagggggacagacacgcgtggggtaagaagggcctggtgggaggagttcacagagcagacggtgcactgggaccaggagagcagaacacaggccataactatagggcaggtggggcaggaacgggttaaaaacgagatccaagccagccagatcgcaggaggtgcgggggcgtcgtcccccttctgttctccccccaaggtcacagtgcatgcaataaaatatatatacaggagctagatccgtcctctgcaggggctctgagggtccagagctcccttcgggtggcgggaagccagtggcgctccctggcggccaggccgggctggagccacatgcgtcgggggagcgggggtcagtcccagccgttgtctttgatcatgtggttgagttcaatgatgtacttcccctctttgtacttctggctgctctcaaaggcctgttcatatttccagcccaaagtggtcttgcagttctcgcagtggatgtcggcaaccgcatgcagcccggtgaagaaggaccctctcctctgcagggccgcagtcatcgttcaccccgggattgtagaagtacgcgcgggcctggctcgccttaaa

SEQ ID NO: 45248 - DNA, 904 bp, Homo sapiens
attcggcacaggcatttagagtattctgataaaatctcttgaaaatactgaaatcaaaaggtttatgattttttgttcattctgatttgtcattttattatctgttatcggtctaaagtgctaatttacccatttgatttttctgctagacagataacttttaatttttcaaatttggcagacactttttttttttttttgaaaatctttccttccagatctgttgcccactgaacagccacccgtccctcactgtcctggtgtccgattgggctggatggtgttggggcatgatgtgtggaggaactggaaggtgctttaggtctggttcagggtcgggcattctttgttgtttgcacatctttttaaattttacaccttttcttaagaattctaatgccgtcttaagtttttataccaataatgctgagctttaagtgtaggatctggtagtacagacagtgtgatggatgatgctgctggttgtaaatttcatcgtgtgtgtctaattttttttcctgttgaatgggtaaaaacaaaacaaaactttttttagaagatgaatttgctgtcatgttttgtggaatgagggaccgttgagctcactaccacctggagtttgagttgaagcatgaaaatggtgcccatgcctgacgctccagcgcctggatctgcacgtgcccttgtagaggatccttaccgtcctagagagcagacgctttctgaaaactacttgctccaaaagaccctctgagttaacgtttcagctgtatcattagacttgtatttagagcgtgtcacttcctctgaactgttactgcctgaatggagtcctggacgacattgggtttttcctctaggagaatacaagccttaataaacaatactatttagcaaaaaaaaa

SEQ ID NO: 45249 - DNA, 725 bp, Homo sapiens
ttctgactgattacgaatttaatacgactcactatagggaatttggccctcgaggccaagaattcggcacgagtcttgacgaggctgcggtgtctgctgctattctccgagcttcgcaatggtaagcttcaggggtgtgaagtcgccggcgttcttgggtttgaggactcagtggggagagccttcggcgggagcgctccttggcctgccggcctcggttgcagggcgggcgcggttattgcttggcccatgtgctctggtggtggagtttgcgggggctgagggcgcagtattaggggactttggcgctatttgaggacctggttgcattcccgctgccctcctacagccgcctaaggacgacaagaagaagaaggacgctggaaagtcggccaagaaagacaaagacccagtgaacaaatccgggggcaaggccaaaaagaaggtagaaataagacctctctgaaagagactaggggtaactctctcgtaaccctctagtaataggtaacttgtatagtaagtggtttttcaggtgtagatttctagagtcaaaatgtgagagtttatcttcccgtcaccactcgttctttttcccattaggatcatgaaaatgggtctgttgtgcgaagtgtctgccgctgtgcctgctgtgttatttttaactgatctagtggggctcggcccctgtttgaaggccaaaaacgtgtcggtgtttttttttg

SEQ ID NO: 45250 - DNA, 1781 bp, Homo sapiens
attcggcatgagggggtcacgtggtggctgggccggggaaatggcggcttcaggagagagcgggacttcaggcggcggaggcagcacccaggaagcatttatgaccttctacagtgaggtgaaacaaatagagaagagagactcggttctaacttcgaaaaatcagattgaaagactgacccgtcctggttcctcttacttcaatttgaacccatttgaggttcttcagatagatcctgaagttacagatgaagaaataaaaaagaggtttcggcagttatccatcttgggtgcatcctgacaaaaatcaagatgatgctgacagagcacaaaaggcttttgaagctgtggacaaagcttacaagttgctactggatcaggagcaaaagaagagggccctggatgtaattcaggcaggaaaagaatacgtggaacacactgtgaaagagcgaaaaaaacaattaaagaaggaaggaaaacctacaattgtaggaggaggatgatcctgagctgttcaaacaagctgtatataaacagacaatgaaactctttgcagagctggaaattaaaaggaaagagagagaagccaaagagatgcatgaaaggaaacgacaaagggaagaagagattgaagctcaagaaaaagccaaacgggaaagagagtggcagaaaaactttgaggaaagtcgagatggtcgtgtggacagctggcgaaacttccaagccaatacgaaggggaagaaagagaagaaaaatcggaccttcctgagaccaccgaaagtaaaaatggagcaacgtgagtgaccgcccaaggtcacaggcacagaaccttttcccctgctatctcccttcctgcttcgaaggactcattctttcctcccacttccaccccaacatagagtagtatttgctttttagtccattttgttttcaatacgatttaatatcgatcagagtaattcttttgtacattgaaatgaggggcttggtttaaaaaaagacctttccctctccctgcccctagaacaaccagtattagaaggtgccaccattggtgctgccttctcttcccacagcctgtaactcagtgttttgtacttcactgaattgtgatggttagaaacttcgtggatagtttgtggaaatcatccaattaaacatactgcttaaaacagtgttgctgtgacttcagagacaagcctggaaggggcaccttaggaagccccttcgcttcagttgctcgcttctgggtgtgctcccttcgaaggcccagataagacagggaacacttgtgagcacacagagcagcatctgatgccctgtggtgtttggcatgtgccccctgtctactgaccaatcagtgtggcatgaggcccacgccacccaaacctttcactttccaaagagctagccgtcctccacccagtaccatgtcctagcctgtctgcatttgttagtggtaatattctttatgtataataaatttttatacccaagccattgatgtacttttccttgtactctcccttgtgggtcccttgtctggcttggctgaaccccaaaatgctttggggttggacagacctggctgaaccttagtttcttcatctatgaaatgggaatatgaattactgcagcagcttttagggcagatttgccatggcatatacaaggtaactaccatagtgctccttgggtattgccaatatcctattatttctgtgtaaaatgaagatactgattgttttgaggattaaatgaagtaatatatgaaaaaaaaa

SEQ ID NO: 45251 - DNA, 2343 bp, Homo sapiens
ttttttttttttttgtgaagtgcttttactttctctctggctcacagtatcgcaaggagctaagtaaggcctgtatggaatctccactgtatccatgggatgggaggtgctgaacacacgcccaaggcaacaaggccactcagggaaggagccaggccatgccactgcgtgccttccatcctaccaagctgcttctgctattctttgctttacacttcagctcatttactcaaggaaatgaaatgaagtggcaaacaggacagaaatgaaaatagaattctttaagtgggtaaatttgggacaataaaggcatcaattaaaatatggttcaggaatagggagaggtgctccttcgtgcctcacagaagcacggacaattctgtgctatttattgtctttgaaagagggttcactcaaacctctgccgcaacacctccagatgcacattcggtgtcttctgtgcctgagctggcagatgcccggggaaggggtgctgtgcccctcacctgcctgccagtcacagtcaagggtctccttcaaggtgctctgggcccatgttctgtagcgacatgggggatggttgtgccactgcccaggcagtgatcaagcctttgtgacggcccatggggctgggcctgccttgtgctgtgcctgctctgaggcagctggggctgtggtggggatccagggcctcattctgtaaacccagtgctggttctctgggagtctgcagccacaggcacgtggcacatattggtccctagttacattaagggcaggggtaggatttgcatctgtttaagattacaaggactggatgagttctgaaaaattcataattctgaaaacctattagtttatttaaaataatggatggcatgtacctatatatgtagataagtctccttttaaatttttttaaagaaccaaagaatcctacaagcccccgtaacacacatacttgagttccagatactcatcaatgccatacttggacccctctcgcccaaggccggactgcttcactccaccaaaagggcactccacagaggaaattaatccttcgttgacgccaaccatgcccacttccagctgctctgccactctccagatctgggctgggtcttgagagtaaaaataacctgctaacccaacatcagctgcgttagcgattgctatagcctcctcctctgtatcgaacttgataactggtgccagaggcccgaaagtctcttcatgagtgcacagcatgtcctgggtgacattgcacagcagggtaggctcaaagaaattttttccaagttggtgtcgttttccacctgtcacaacggtggcacctttagaaacggcatcattcacctgtttctccaccttttctaccgctttttcattaattaatgggccctgagtagttccttcctcaaatccattacctacgcgcaggttcttcttcatggcctcggcgaatgcttttacaaaggcatcatggatgcccctttgcaccaagaattggtttgagcaaacacaagtctgtccagtgttcctaaatttagatgccatggcccctgctacagcctggtccacgttggcactgtcaaatactataaatggagcaaggccgcccagctccatagagacccttttcacagagtttgctgcgtggtgcaacaggatctttcctgtagttgttgaaccagtaaaggaaattttggacaccagaggatcagtacaaattgcctcccctacttccttggcattctttcgagaacagggaataacattgtatacacctgaaggaatcccagcctggcttgcaagctcagccagggccaaggcccgaaaagggcgtgtcttcggcaagcttcaccacgacagtacagccggctgccagggcggccccccaccttccgggtgatcatggcactggggaaattccacggggtgatgactgcagccacgcctatgggctgcttgaggaccagggcccgcctgtcctttgccggggtgtggataatgtctccgtaaacacggcgggcttcctcagagaaccactctaggaaaaaggcggaatagagaatttctccatgtgcctccttcagtggctttccactttcagctgtgattattctggcaaggtcatccttattttgtatcattaaattgtaccacttccgaagtaatgaactcctctccttggcggagacctccctccagcggcagaaagcctcgtaggcagcgcacggcggcgcgggcctctcgcaccccgcagtcggctaccatgcccagagcggccgctggccgggtcttgcacggggaaggtggcgcgccgggaccagcggccgc

SEQ ID NO: 45252 - DNA, 2437 bp, Homo sapiens
tctctccagacgtcgtggtcgttcggtcctatgtcgcgccgggccctccggaggctgaggggggaacagcgcggccaggagcccctcgggccgggcgccttgcatttcgatctccgtgatgacgatgacgcggaagaagaagggcccaagcgggagcttggtgtccggcgtcccgggggcgcagggaaggagggcgtccgagtcaacaaccgcttcgagctgataaacattgacgatcttgaggatgaccctgtggtgaacggggagaggtctggctgtgcgctcacagacgctgtggcaccagggaacaaaggaaggggtcagcgtggaaacacagagagcaagacggatggagatgacaccgagacagtgccctcagagcagtctcatgcaagtggcaaactccggaagaagaaaaaaaaacagaaaaacaagaaaagcagcacgggagaagcatcggaaaacggactagaagatatcgatcgcatcctagagaggattgaggacagcactgggttgaaccgtcccggcccagctcccctgagctccaggaagcacgttctctacgtggagcacaggccacggcagagacaacgtgtgtaccccaagtgcacatggctgaccacccctaaaagcacctggccccgctacagcaaaccaggtctgtccatgcggctgctggaatcaaaaaaaggcctctccttctttgcgtttgagcacagtgaggagtaccagcaggctcagcacaagttcctggtggccgtggagtctatggagccgaacaacatcgtggttctgctccagacgagcccttaccacgttgactcactcctgcagctcagcgatgcctgccgctttcaagaggatcaggagatggctcgagacctcgtagagagagcgctgtacagcatggaatgtgcgttccaccccctgttcagtctcaccagtggggcctgccggctggattaccgcagacccgagaacaggagcttctacctggccctctacaagcagatgagcttcctggagaagcgaggctgcccgcgcacggcgctggagtactgcaagctcatcctgagtctcgagccggatgaggaccccctctgcatgctgctgctcatcgaccacctgggccttgcgggcccggaactacgagtacctgatccgcctcttccaggagtgggaggtgggtgcgagcctggctcatcggaacctgtcccagctccctaattttgccttctctgttccactggcgtatttcctgctgagccagcagacagacctccctgagtgtgagcagagctctgccaggcagaaggcctctctcctgatacagcaggcgctcaccatgttccctggagtcctcctgcccctgctcgagtcttgcagtgtgcggcccgacgccagcgtttccagtcaccgcttctttggacccaatgctgaaataagccagccccctgccctgagccagctggtgaacctgtaccttgggaggtcacactttctctggaaagagcccgccaccatgagctggctggaggagaacgtccacgaggttctgcaagcagtggacgccggggacccagccgtggaagcctgtgagaaccggcggaaggtgctctaccagcgtgcacccaggaatatccaccgccatgtgatcctctctgagatcaaggaagccgtcgctgccctgcccccggacgtgaccacgcagtctgtgatggggtttgatcctctgcctccttcggacacaatctactcctacgtcaggccagagaggctaagtcctatcagccatggaaacaccattgctctcttcttccggtcactgttgccaaactataccatggagggggagaggcccgaggaaggagtggctgggggtctgaaccgcaaccagggcctgaacaggctgatgctggctgtgcgcgacatgatggccaacttccacctcaacgacctggaggcgccgcacgaggacgacgctgagggggagggggagtgggactgagcgtccgcagaggtgaccgaaaagccgtatgatgatgttcccgatttctctgttggtcggagtcggccagttgcctgaagtagggaagctgagtgtgtcgctccctggtccactgtttctcctataaatgtaaatgggtcacgctctgccgtccgcaccttctcctttcgcaggcactgagcgccgtcccatgccctcggattcgaatcacactcagtccattctcctcccagtggcttgtgggtgaggtggggcccagaccccatgcttcctgtgctcccaggatctgggcacgggtggagaaggggcccacgggtgcttcagtgcaggtccctgctgaatgccaaggccctgggtgcacgtcctccttgaacttgctgtggagttcgtcaacagagctgcgtgccttgttggtagagggtctca

SEQ ID NO: 45253 - DNA, 1094 bp, Homo sapiens
  misc_feature (1)...(1094): n = a,t,c or g
gctttggagtgtatcctatttgaggtcaagaaatagcctgctgtccttcccaccttccctgagcagcacctacagaacagcaaccgtgatggtgtgtgaaagcaacagtcagagactgctatacatttctgtgggtgggggtagggaatactggctctgtggccctcctcagagctgggaggccaagggttcactgggcttgaatcctctctaagcacctaccccattatggcctaaacctcctcagtggaccacgggaaatcatgttggaccaagggtttccatgttcaaacagtcaacaaggccctcccctaggttgagatatttttgatactgaaggcccaggccccccagtatggcttgctgccagcaagcagcaaggattctctcgtgggtaacgctgtagccaggcaggaccagcctcttctgggagacccctctccccacgtagggtttgtgtagtgctcccacatcctgcttattgcctgccacccctgcttctcgcctggacctcttggtattccgtgtacaccatccttgctgtttcttgcctctgtgccttcaacctgctgctcctgggcctggggatacnnnnnnnnnnnnnnnnnnnnnnnnnnnnnnnnnnnnnnnnnnnnnnnnnnaacctacaactagctctcagttcaggcactgtctaaagccccaggtgggtttaggtggtctaggataccaactccccctcaacattttaccttaatccaacagtacagtaattagccgaaacttgcctggtttttcctactagactgtaagccctctagggacagggacagtgtcttattcatctctgtgttcttagtgcagagccttggcccgctgttggtgtttaataaagtgtgttgatctgaaatgccccagaccaaccaagattcccagacttggcttcttcccacactgggctggagtcctcccggagctcagggggaggtgagggccccagaaggtgcacttgccatcaggcttctccctgggtcccaggaggactgcagccagggnccgaggcacctttgtgggaggtgggtagagggctgaggcagcttcacaacttttttgcc

SEQ ID NO: 45254 - DNA, 1640 bp, Homo sapiens
  misc_feature (1)...(1640): n = a,t,c or g
aaaactttttttttttttttttttatcatctactcaaagtttattggactgaacaaaggctgaatacagagatccaagccatgaggagtacatgaggtgtggtgcctataagccagggtcggaaactttccagacaaacctagatagctctactaggagggagtcaacgacctattgtatcaattagatcccagcctggacaagggcatgactattgctgtttggggacacgtggctctgtgttgaaggcaatgactgtgtgggctgttgccatgtggcctgttctcccctaagccctgaaccaaaggttcccaggcccagatgagaaggccactgggaatgcatgccataggggttgatgctgggacattccccagccttccattaaatgaaaacattttctataaacttactgctttaaaaaaatgttttaaccaacaaacctaagaactgcaaatgagtttggtatagtataaatattgtcaaatataaaattccaagaaacccatttgagactgatctgatgatctgaagttctaactaatctatcaaactttctaagaaaaggcataggtcaagaaatctttttaaagcaaacattattgcttctgctatagcagagtggagatttggctgagctggtaagaacctcagtgaaaaggtgtcttagcaatgaaagggctgaatccgagattcctctagatgaaaaataaggggaatggtcaagtaaattccctggtactggttctttgctgccctgtaatcaatatggcatctcacccccgacaaccaagccagccacagagagaagtggggttcccagggaaaggggtcggctgacccaccctgacggagctggtgagcacaggtgagctctacctcatttgtctctcattcctcaaagtcttctgtggtttggcttccagtgagggcaaaagaggggagactggagtgaaagtgaaactctgcttttaaaatgttctttttatctaaggtgtgcagggtgtgtggatagcaagtttgagtggtaagaaaaatcccagtccagggtctgagctctacctcttaaaactcttcagcttaacaaagtgacccacaggaacagacatgaacatctctacacagggcagggccaaaggtgttcccaggatcctgctagccaagggacaagtcctgattgagggtctagagctcagcagatttatggaggcagcatgcaccctgggagcctgcccagactcctctctggggtttccgttttatctctcaagcttttaagatgccaaaaggaaaagcctttaggaggacgctaaggataacttcgttattcttcagttcaaaaggatttgcaagaatatttgtggctcaggacctaaggaacttgctacagggaagtgaggtcagaggtcagctcaatcctctgctcctcctccagctcctctttggtcatcatcttcttgtactggtttcccctcagcttcccggggctgtatttgaaggagaagccttctccgtcctcctcctcaggcccttccgatgatggccccttctcaccatccaagtcctgctcctcttncttagaaagtttgatagattagttagaacttcagatcatcagatcagtctcaaatggntnggtg

SEQ ID NO: 45255 - DNA, 911 bp, Homo sapiens
tttttttttttttttttcacaggaataataaatttattataatcacagatggtggggtagtgcacataaaaaggggggacctcttctcaccagagggtgctggccggtgcccagagtggcaggcaacatagggaggcgctccctgcatggcccggcccgctgccaggcccgctgtctctgggtgctcagtgtgtggtgctctgaggacacgggtcctgagggccttgctcttcatccttcacagtggggacacggccctcatgccagcggcacaggggtgccggcagcaggatccctgacgcccctgctccctgggtgccccacggtgctcagcaggaatgccgtgagggctgaggcccagctggtggcggggagccagcagcacctatgggccagccctccctccaaaaggcagcctgtgccctggacttgcaggcttcctcggggggtgctccacctgcccaaagcagcatagcctgaacccaaaactgtgaccagagaatcccatgtgtgttttaagggtttcctatgtcctctgtgttctataggaacgagtaggggtgcgtctagcacacacgagacgctctaacaacaccctgagtgcaccctcacgctgctgagatggacctggaccgtggacaggccacggtgagagcagcctgaggatcgcatctggctcctgggaggaagtcacatggagggccttctctaagaagtcggccaacgccccccaagcaacccgctccactgcgcctatcccagttctgtacaggtgtgggatttcgtttggcaggtccccaaggcagaagataaaagcaggaaagctaacctaaccccaggctctctaaggaagccaacacctagaagtgtctgacaggaggcgtgtgtccttggccccgatgaggctgcgc

SEQ ID NO: 45256 - DNA, 460 bp, Homo sapiens
  misc_feature (1)...(460): n = a,t,c or g
gccattcgaccccctcccnncccccccnttgacccacccgntatgacatgantacgaatttantacgactcactntagggaatttggccctcgaggccaagaattcggcacgagcttaagggtttattaagaactctttattttcttcataccctgttctctgcagagctttctaacagcttctgggtgcagattttcttcggcatccttttgcactcagcttattacaggtaggtagagcttaagaaaagtcatggaggactaaagcctaagtccttttcacttttcctccatctgaaggtaggtgagttcatcctcttcatagtaatgctgnnnnnccaannctttnnagcgatggacccagaaaganttttctgctatagaggcctacaangggatagggacntcacacagnccanaaacccctttcagnnctgatatggggctatnanactnatgc

SEQ ID NO: 45257 - DNA, 539 bp, Homo sapiens; identical to SEQ ID NO: 17900
  misc_feature (1)...(539): n = a,t,c or g

SEQ ID NO: 45258 - DNA, 1582 bp, Homo sapiens
ggtggctcacacctgtaatcccagcactttgggaggccgaggcgggcgcatcatgaggtctggagttcaagagcagcctggccaacacggtgaaaacccatctcaggtgcctgcgtactaagacctgtgttcaacagcggcggcagcagcagcggttgggctcgcggcgagcggacggggtcgagtcagtgcgttcgcgcgagttggaatcgaagcctcttaaaatggcagatgacttggacttcgagacaggagatgcaggggcctcagccaccttcccaatgcagtgctcagcattacgtaagaatggctttgtggtgctcaaaggccggccatgtaagatcgtcgagatgtctacttcgaagactggcaagcacggccacgccaaggtccatctggttggtattgacatctttactgggaagaaatatgaagatatctgcccgtcaactcataatatggatgtccccaacatcaaaaggaatgacttccagctgattggcatccaggatgggtacctatcactgctccaggacagcggggaggtacgagaggaccttcgtctccctgagggagaccttggcaaggagattgagcagaagtacgactgtggagaagagatcctgatcacggtgctgtctgccatgacagaggaggcagctgttgcaatcaaggccatggcaaaataactggctcccagggtggcggtggtggcagcagtgatcctctgaacctgcagaggccccctccccgagcctggcctggctctggcccggtcctaagctggactcctcctacacaatttatttgacgttttattttggttttccccaccccctcaatctgtcggggagcccctgcccttcacctagctcccttggccaggagcgagcgaagctgtggccttggtgaagctgccctcctcttctcccctcacactacagccctggtgggggagaagggggtgggtgctgcttgtggtttagtcttttttttttttttttttttaattcaatctggaatcagaaagcggtggattctggcaaatggtccttgtgccctccccactcatccctggtctggtcccctgttgcctatagccctttaccctgagcaccaccccaacagactggggaccagccccctcgcctgcctgtgtctctccccaaacccctttagatggggagggaagaggaggagaggggaggggacctgccccctcctcaggcatctgggagggccctgcccccatgggctttacccttccctgcgggctctctccccgacacatttgttaaaatcaaacctgaataaaactacaagtttaatatgaaaacaaaagaaaaagaaagaaagacgtgtagactgcccaggactctagggaacagggacaaaacagtttcaggaggagttcatggccttggttctgagcaccccggggacccttcagcaaaagctttctggagtgagcctaagcaagagtgtattcgtcgaagcggccggccgtttcgtagcgactaactcggacccggggacccagaacggcagcctacgacgtcacgaagatgcccttatagaaggg

SEQ ID NO: 45259 - DNA, 1373 bp, Homo sapiens
acagccacctgcaacgtggagcagtccttcttcaacgactggttcagtggacaccttaacttccagattgagcaccacctcttccccaccagtgccccggcacaacttacacaagatcgccccgctggtgaagtctctatgtgccaagcatggcattgaataccaggagaagccgctactgagggccctgctggacatcatcaggtccctgaagaagtctgggaagctgtggctggacgcctaccttcacaaatgaagccacagcccccgggacaccgtggggaaggggtgcaggtggggtgatggccagaggaatgatgggcttttgttctgaggggtgtccgagaggctggtgtatgcactgctcacggaccccatgttggatctttctccctttctcctctcctttttctcttcacatctcccccatagcaccctgccctcatggggacctgccctccctcagccgtcagccatcagccatggccctcccagtgcctcctagccccttcttccaaggagcagagaggtggccaccggcggtggctctgtcctacctccactctctgcccctaaagatgggaggagaccagcggtccatgggtctggcctgtgagtctccccttgcagcctggtcactaggcatcacccccgctttggttcttcagatgctcttggggttcataggggcaggtcctagtcgggcagggcccctgaccctcccggcctggcttcactctccctgacggctgccattggtccaccctttcatagagaggcctgctttgttacaaagctcgggtctccctcctgcagctcggttaagtacccgaggcctctcttaagatgtccagggccccaggcccgcgggcacagccagcccaaaccttgggccctggaagagtcctccaccccatcactagagtgctctgaccctggggctttcacgggccccattccaccgcctccccaacttgagcctgtgaccttgggaccaaagggggagtccctcgtctcttgtgactcagcagagggcagtggccacgttcagggaggggccggctggcctggaggctcagcccaccctccagcttttcctcagggtgtcctgaggtccaagattctggagcaatctgacccttctccaaaggctctgttatcagctgggcagtgccagccaatccctggccatttggccccaggggacgtgggccctgcaggctgcaggagggcactggagctgggaggtctcgtcccagccctccccatctcggggctgctgtgtggacggcgctgcctcaggcactctcctgtctgaacctgcccttactgtgtttaacctgttgctccaggatgcattctgataggagggg

SEQ ID NO: 45260 - DNA, 3190 bp, Homo sapiens
tttttttagaaacaactagtgtattgatttggggaggagagaaggggtgcagatgggaaatggggaggcaagggctctttagcgtttgccaaaaccactgccacacccctccaccccctcttgccttcctcctccacggtgggtgccagcaggctctcccctttccagtgacctccctctccctcctcccagcaccccacttggcttcaacctccagtgactgcacagagcccacccaggggtctaaagctagggaaggcagctcaaactcacctttcttctcccttcttccacctcccacctcattcccatctcttgtctaaataaaatacagaaaagcaagcgcagctggtacctgggagaatggactcaccccggggctgggggcaggggtggggactgggggcggggcaggcagaggaacctcagccaggtgtagtggaatcacagcaggccaagcccaggggcccggctcaagctgtcctctctctctctctctccctctcggaggctggcctggcagtgagcctgccgtccagaggaggctggcggagaagcctctatgcctgcctctcaggcaccatgtcacagggtccccggggtgggggcagcagccagggcagaaaagcagaagctagcctctataaaagcacccctttcccttggcttctagaggaagccctctttggttttaaggcagatgtggagtttcctggaagcagggaaaaggaagggaggagaaattaggattgagatagatgagatagatgctttttttttttttttgcttgtgtttttccttcagtataaaaccactgtagaaaataacttctcttagaaaaaaaaatacagaagaaaaaaaccaaagggttatttttctttggcttcaagccccctcccatgacgtgcagggcagggggtgggcatgaggtgaggaggacgcaggaagcctccacccccacccctgcctggcaggtcccagattacatgatgctgcagttctgggggctctgggttcgggggctggagttgcccaggaggtaggagcgggtgaccagattgtccccgaagctgccacccccactgccccccacactgcggtagctgcgagtgaccgtgacactggaggcagaagagccagaggagatgggtccgcccacctgggctcctgagccgctggcagatgccttgtcggcaggctgcccgcaggtcccgcacagcacggtgcgcgagcgcaggttgtactcagcggggtcccccgagctgctgcagtgggagccgtggtggtgatggagcaggtcatctccatcctcatcctcgtcgtcctcaaccacagtcactgagcgcaccagcttgcgcatggccacttcttccccagtggagttgatgagagccgtacgcaggctgttcccgcagccccaggtgttctgtgccttccacaccaggtcggtaggggggctgtgggtggccccagctcctgcagcccagatcgtcaccacctgcccagccttcagggtgaactttggtgggaaccggtaagtcagcaagggatcatctccattctggcgcttgatctgccaattgcccatggactggtcctcattggacttgttgcgcagccggacaaacttgccctcctcatccacctcctccacggccacgcgcccgctagtgcgtgcgtgctgtgagaagctgctgcggctctcagtggactccagtttgcgctttttggtgacgctgcccccaccctgtgtctgggatgagtgagaggaagcacggccacggctgcgctgcgaggtagggctgggggacaggcgtagcctctcctcctcgccctccaagagcttgcggtaggcgtggatctccatgtccagggccagcttgatgtccagaagctccttggtactcggtccagctgctgctgcatccttgcccgcatctcggccatctcccgctccttttccgccagcagccgccggctggtgtcccgctcacgggccagtgagtcctccaggtctcgaagcttcgcctccttggctgccagctgcttctggagctggctgagctgggcagagaggctgtcgatgcggatgcgcgactgctgcagctcctcgtgggcagcccccaccaggttgctgttcctctcagcagactgcctggcattgtccagcttggcagaataagtcttctccagctccttcttatactgctccacctggtcctcatgctgggcccgcagttcctgcagcgcatccgccagccggctctcaaactcacgctgcttcccattgtcaatctccaccagtcgggtctcatgacggcgcttggtctcacgcagctcctcactgtagatgttcttctggaagtccagttcctccttcatggtctgcagcctgttctcagcatccacccgccgcagcatctcatcctgaagttgcttcttggcctcacctagggctgcctcaagcttggccacctggccccgcagatcatgcagctcgccctccagcgtgcgcttctcactgagagcagtgctcagtgcggcctccttggagttcagcagagcctccaggtccttcagccgagcctgagcagctatcaggtcaccctccttcttggtattgcgcgctttcagctccttaaactcctcacgcactttgctcagctccagctgcaggcgggcgcgctccttggctactgagtcaagggtcttgcgggcatccccgagctcggcctcgtaggcggccttgatgccggacacctcgcggctgaccacctcttcagactcggtgatgcgaaggcgcagccctgcgttctccgtttccagcgagcgcacacggtcgatgtagaccgccaagcgatcattgagctcctgcaggtcctccttctcctgcagccgggtgatgcgggtgggcgacagcggagtggagctggcctgcgccccgctgcgggtggcgcgccgctgggacggggtctccatggccggcaggttggcagcgctgcccgcggggcaggggtcccggaaagggcgcggggctcgggtcgaaggacagagactgctcggagtcggagtgcgccggccggctggctctcggcttgctcctggcaggcgtggggatctgggccgggcgctgtcggacctcgggatctgggttggctggtgtaggtgcggctcccgcgaacactgagt

SEQ ID NO: 45261 - DNA, 1343 bp, Homo sapiens
tttttttttttttttttttctaattactaccttttattctaatgtgaaccatggccctgaaagctgataacaagcttggctgagcagagggaactaggggtcggcagaaaggattatgggtggaaaacattggctcttccttggggagtgatgctggggaaagggaagagagtggctcagcctgcaggtaaataggctagaaaagccaaggccaaaggctggaggggagaggacagtcagcatgtccagcctggggtctgggtgtagggttatcccttctccctgtgccttcccatctcgtccatgagcctaggtcttggagccttgtgttggaggctgctgtgatgtcaggaacggggatctgtctagcttttggccacttcctgggacctcacgcccctgttgacagatggagattgggcagcagggccttgctgcattgttatctgctgttccgacttggtttgtcttgtccaagggtgacgaaagagccaggcaccagggtctcatgggatgaggtacagggtgggagatgggggaggggctgggggctgaagggagcaagaaagctgtagctgtgtggggctggcaggatgttgaagaccgcctctgctgctctcacatggggactgggcccagatcctgcttggtcacacccagcccagaagacgggtcctccagttccagtgactctttcggtggagcgtcagtgggcttttgctccaaggagtgcctgctcatttcaaacaggagccaatggtgcatccagctctcaaagaccttccagtctatggtctccatggtgttcttaaggtgtctcaggttctccgggaagctccccttcagtggcgggtacaccttcagggggtcagcattctggagcaggtgcatcacatggtcctctgtcatgttgccatacttggtggcattctgcatgggcccctggggcagggctcccatgggcaggcgcctgcatcagcagcggggtggccatgcgcatcttgctcacaggcttgggaggcttgggaagcttcatgcgcaggttctccagctgcaggttctgggaggtgactgtcagtttgtccagccggccctgctgctggtacaggaagtaggcggtggtggcctggccagcgaggagcagagtcaccaggatggaaaagcctgtgtagcagggctccgcggctgcacttgctctccggggccccagggcgccggcccagcatgggcagttgctcattgttggagataaggtcgcgctggtcatccatgactggcttctgatcttcccgacagctcctgcttctcctcctgtgcatcactccccaaggaagagccaatgt

SEQ ID NO: 45262 - DNA, 2480 bp, Homo sapiens
ttttttttccaacccggcttccttcctgcaaggaggtgccatgtcatttattcaaagaaaacaaaacgaaaccaaacaaaacagggcaaacacatttcttaataagtgcagtttgttaaaatcatgttaaaacatatgagtcaaggggaagtaaaaataaagggtatcactgtaggaaaagcttttgggtctggcacctgggagaccactggagaggaggcagtgggagaaacttcaagttctgaagggaaggagccccccaacctccccttcttccctctcacccactgaatcccaccagaaactaccaagacgcccggaataaaaggtttcaagttcaatagtcactctctccaaatacaaaaagcagttacaattcaactgaacacagaagcttgtgtgcaaagttatggggaactggggcatcgtataaaaagttgggttaaagatgattctgtggtttggttttgttgtgttttgttttgtggctcttcctcagtcaccctgaactcaggaaagaaatgcttatcttgatgaaatatcaacagcccacccacagtaaaaagacaaattctaaaaattaaaaaaaagcacataattaccaaaaaaaagtcactgcttcctccccctccccattttgctttttaaacttttttttttttaagttttgattttttttttaatcctgaaaagtagacagtaaaacagctcctgggagaatttacaaccaactgcatgagggtctgggaagctgaggggctggagcagggttgggagagtgaacaggaggggattctcccctcagtcactgtagcctcactgtatgatcaagggaggtggggattatttagtcaaaaaggaagaaggtaggaagaacaggaggtggaaggctggggaggtggggacaaacagaaaataaaaggtcattgttgcctgtttgaatccagaaaaaaatgcctggccctatggaggggaaggaagcccctcagaggggaggcagtgggctggagggaggcagccctgggatgaccccatccccagcaccacgggatctggcgggggcagaggaggggccgaggcaggcgctggtggaggaagccggcaggggcctccgggagcctctgggtcacactggctactgtgtacttgtgccaccctgtgtgttcccggagtagctcccgtagtcgtagttcccgtagtatggcggccactggccctggttctgatagtactggttccactgctgggcatactgctgatactggttatagctgggctgagggtaggtctgtgcggtggggggtggcggtggggtatagggggccgggttgtaaccgccgtagctcccatagttgtaggcaggtggtggtggaggtggaggcggtggggctgtgtagccctggctgtaacctccctggttgtagggtggctggctgtaactcggctggaaagtggagggaaaaaagccaaagctctgtggagggctgtagctgctgacggtgggggtgctggtattggcgcttgagccagggatgttgctgttcttattgtaggtgctggcccctggggggttccgagcagggctgtagctgggtggtggcggtggctgctggggtggtggctgtggtggcggaggctgctgtggcggcggctgttgctggggagcccggttgtagctgcctctgttgttggagttgttgttatcccggttgttgttaccccagcggttctggctatagccaccacctccgctgcggttgaaacctcctcggtagttgcctcctccaccgctgcctccccctcggttctggaagccgccacggttgcctccagggggtcctcggttttcatagcgctggaagccaccaccacccccgcggccccggaagccaccaccacctcggttgtcaaagcgcttttcagggggtggccagccttgcggccttcctcgttgtactgcctcactagcttgtccgcttcctcccgctgcagctcaatgaacagaacctcatccaggaagtccccaacatctggcaacgtgaagttggctttcatttctaagaccgcatgatctgggacatccttcccttcctcgtccgttcgctttattgttcggtcttttaggtcctcgtcagtgggacaaattacaatagctttgcgctggaagccttcaaatggtctcatttttcgtctctgggctgacccataaacatttgtctgatctaggatatagttgcgtttcttgcgggcagcaatctggatgaggcggttgaggcactgggtggcctgctggatcaggacatcccagcggccagcatagttaccgctgccggcgtaggcccatcacccgcatcttatccatgatggcattggtacccaggatgttgtacttcttggaagggttggaggctgcatgtttgatggcccatgtggtcttccagcacgcagcaggcccaccatcatcacaatctcacattctg

SEQ ID NO: 45263 - DNA, 2050 bp, Homo sapiens
ttttttttttgcaagacagtaaaaagagtgaagagaatgaaatagaacagtttactcaagctatctttatgtccaggaagaaaaaagattacatgctgctcgcagtaagtacgagctttccctgcaactctggctgcaggcgcgcaagccgttcaccactggagttcctaccacagcaggggattgagaaatgtctccaaacactgaaaagctccatgtcaggactggatgtgtggttgataacctttgttcagtaaaacaaatcatagtaggttttgagaaggaaaaaaagaatgctcacaactgaatcggtagagtgaaggtttatcagacaaagggacatgaggcaaacaaattttaattacagaaaccaccactgcaatgtcatgtagaaaggagaaacaagggactagcttcctggatggaccaaaaatacagtttatagactgtttcaatcctaaaactaagacaatttctagatttacctcagacatgagtagacgtctggaaaatggatggaattcaagttacagaataccatattttcatgagtgcttatgtaagaacagcaaatgataacatgtaaccgtaatttacacgaatacttggcattctggagctactttagttacttttgaatgatcaaagccctgcccaactaaaccacttgtgatttgtcagttattccattgcaaatgcagggctatctggagcagtctttaaatttgagatcacattgtttaaaaaatatatatttttatatcgtccagtactctttagacagatgagagagtcaagttcccacatggattggaacatacttcatgtaagactgattttaattaaatttcagcactttcatagaagggactgtcccagatctgtaactgttcaatgttgtattcacttcacagtgtatcaagcaccagcgttgccatggattggtttcaaataaccctttatatataattttatatttatatatatatagttatatcaaaactgatagtacatagtataactggaagaaagaactaaacttaaaaggatatgctgaaaggatggagtttgtgaacacaataaataaaagttccctccccctcccagccctccccaccggcaacaaaacaaaaacaaaaaaccagttgtaatgtacatggaaaattgtgcacagcagattttttttttttttataaaaagtagattcaggagcacatccaattataaatgattgttaggaaaatcatataaaacaatggaatacataaaagtgtcaagagtaatcgtcagggtgcgaaattccttggtggccagatgcccatggcaagcagaaattatcctggcagcatcactaagaggtcgatgtccacagaagattctccagggatgcaagcagcatgggcaggtggaggttttgaatttcataccctgattcatagttttcacaattccatgtgcaatttcagaaagattcatcattgactgctgacatgtcgccctttgggcctggaggaacgggaggagcccttgtctgtgctctctgaccccgagctgctctggttctgctgttctgaccctgcactggaggtcactgtggatgaggatgtcgatgaggagcgagtcttttccttaaagtctgtgataatgacggtgacgttgcccacagttactgccaactgctgtgcagtgctcctgtccacgtttttcagccggggccttgaggtgtgatttgtttcgctggtctttgttgtagcatttgcagactgtatgctgtttgcttcactaggaggatctttcagaatgtcagactttggtttggttttcttgttggtatttttcttggtaacactaggactaatttccttgtctttctcaggtttctctttgtcctgcttttcaactttctccttcttctcctttttagggggtggtggggtggcatactgttgtgccacttgttgtgccaccagctgagaattgatccgaggttttcctgagtcgcacatctgggaagtgactgggctgagacttgaaccgaggcagcttgggc

SEQ ID NO: 45264 - DNA, 922 bp, Homo sapiens
  misc_feature (1)...(922): n = a,t,c or g
tacatatgtgctctaaaaacaaaccacccagaattgatactgttggtaaccaggagtataaggcagtggctctggggttcttaattcattcctaacttctttgatacttcacaggattaggaaagtggtcatcatacatcccacacagtctgtattacttcaggcttgtgggcaaggttaggaagaatcaatcagccttaactataaatacctgcactgtctctgaggacttactattttatgttctttttaatcaataccgatcagaagtttaggttataaaaacaattctacttcatgctttggtgcttggtaatttttggtgcgtctttaagcattactcttatatatcatatattaaaataccataaaaatgaaattcagacaaaatcactggcaccaaaaatggtttattctgagctgtcttcactttgactatttggggggcttctctcaagtacagatgtgggttggggtcccctggagcaggcaggattggcagtaagagatattggccactcaagtctactgtgtgtgtgtgcctctggaagagtgaagaatggacttcaaaagtaacatcaaaaatctaactgccaccatcctggagacattttgcagggctttcctttcaagtctttcaagtacaggatattaccacaacagcagctgaactgttgtaaccagcatgtttttcctatttccactgtgacctgcagctgactcaaagccttgcgtgacctgacccaggtgcaagagacaggggaagagggatagagggtatagcataaattacatattttcatggctttgggtggttcctccaaaaataattggacctgtaaaaactagtgtatgtgtgtgtgtagcagtttttataaaataaagataaacccttntaaaaaaaaaaaaaaaaaaaaaaaaa

SEQ ID NO: 45265 - DNA, 3489 bp, Homo sapiens
tgaccctgcggcccccaagcctggcagccccctacgccccagtgcagagttggcaacaccagccagagaaactcatcttcgagtcctgtggttatgaagccaattatctgggctccatgctgatcaaagatctgcgagggacagaatccacgcaagacgcctgtgccaagatgcggaaatctacggagcacatgaagaagatccccaccatcatcctgtccatcacattacaaaggtgttcaagtttcattcgatgcctccaacaaggaacgttcatttgcagagcacggagatccggaacatttcctgtgcggcccaggacccggaggacctctgtacctttgcctacatcaccaaggacctgcagaccagccaccactattgccatgtgttcagcaccgtggatgtgaacctgacctacgagatcatcctgacgctggggcaggccttcgaagtggcctatcagttggccctgcaggcccagaagtccagggcgacgggcgcctctgcagctgagatgattgaaacaaaatcttccaaaccggtgcctaagcctcgggtcggcgtgaggaaatccgcactggaaccacctgatatggaccaaagatgcccaaatcccatgccaagtgtctcccctgggttgtggaccccaaaaccagactctaaggggagcctcagcacccaactgagccactgaggaaccacactgtgctgcggaaacatagacgtgggggcataggctcccactgccaccaccgccatcgcctcacctgcagctctgaagacccaggcctcacctccgcctgcaggacctcctcttggccacttggcctgggcctgccaccaccacgtcctgcagaacgagccctgccttggctgtggagaagcactccaggccgctagcagatgggactggcattccagagggtcaagaagtgacttgttcagaacacattgtttttaacagaaaaaaaatctttttataaaatgaacttttaacacttggctcaaacctctaggtcatactgccaatctttagacaaatggccatggggcagaggacaggggagctgaggttggttcagaggccagcctgcatagcctctgtcctcaggacggaacttgggtgcagctcagtgggtcggaagagaaggcggtggcctgtgggtgaggggaacggagcaggctcaggcagaattgagtacggtgcgtctgcttttcaaacccaaccatatcagctgctgctctttatgaactgcccaacttcctgtccctttcaggggctagacacaggcttctcgtaagaacacagccttagaggcacctgagcaactcaaaggtttccggtccatttctggggttcccgatgggaaggttcagtggccaaatgaagataagtgtgcagtttctagtgctgggaagtcttagccagcaccagagcgccaggcctctccctggcctcttacctgtcagtgatcggagcactgccctgggctggccggcgccgtactgcctgcgttgtgtcagagaataggaaaagcagctttgtttggggcattaatgcttggagtggggtcagctaaggttgctacttgccaatttgtgatttgtctaatcagcctgtgtgattggggctcattttgattctctgaattatcggtttgacggttacacttggctgctgggcccatccctggcccccggtgtggaaaaggctaaataaggtgacagtgcatcgatgctcccccgcgtggcctttggggcaggctggcatcccggtgcgcctctgcttcttaagctttcctgctgctcgctttgtttttaaaagtaacttgggttgcattcttccctctggactagagtagaaatgcaggggaaactgctgtggatttgagaggcaaagttggctcagctgtgtgcccagttcctcctgtgggcactttagcaggctccgagctttcctggcataggtcaatcaggtcccaggatgaataatccaggcttcagcaacactcctctttcccagccagcaaaggctgtgaatttgaattctttgttggtatgtatgtgcagggagtactgttaggcacattcttaacccatgtggttggccagaaatcagaagtggggctgtgtctctgactggctagaggccaggccttgtgggtttctatctgctaagcacccagcaggttggggcctgggactcagctctctctgcggtagaggcaggccctcctccacttcttggtactaaacgaagatctcgacaccttgcagttttacttcatttcctgcccctttcagggcctgtgaggatgcccatgagctaccgctgtacagttctcggccccggctttcttccaagagttgaccaggaaccctaaagcatccagagtagactgcgctgccactgcgcacatgctggtgcccgtcttcctcctaaggggccaggccacatccaagtgggcctctgtcgggggcggggcggtaggtccgaaagaaaccgcagacactacgatgcactcctcaagctgtcttttgtgcttagatcatccataggtgtttcttctgcttgaagctgctatatcatctttatttattcagggtattttcatattggaagccttggctagtctgctctagctctgggttctgtttagagattggtttatttctgaatattcaagaaaggaaaatgactgggcctttctttcttttcttctcctctgggatgggtagtctccctttcctagaaaggttattataactttaaggacaggcttcaagtgggaaggcccctacttttgcacttctccaagtgcaggtcacaccaggggcagaccctgtcgctgcgtttctgaactgtgaaggagcccattcgggtgggagacttcagatgggctcagtacctgtcccagccacaggcttcttgtccacctcttctcccctgcccaccagctgctcagcgcataagaccttcccgacaggctctgcgtgtgcagctctctgcgtccctcctgggccctccagcgtcagacactaatgggagttcccgagatgctcgggtttgagcagggagcaggcagagctgcagtcagagacattagaaaaccagtctgaattgggtctgtctttgagatgcccaggccagcagaaagcagctcagaagtattgttgctcatggtgtggcaatggactgaactgtaatgaaaatgttatttaatctttgtctctgtattttgatacttgaatgactttcccttttgttttactgtatataaaattgttaatctgtctgattttgtctgaattataaacactttgaggtaccaaacataaccaatctgtgcaacaacatagactgacctcagtacccaagagagtgtaaatatttctgggcttccagctttggttttgttattttcataactgtacacaacttagaacagactgaattaataaatgagaagcgacatgaacgcaaaa

SEQ ID NO: 45266 - DNA, 2126 bp, Homo sapiens
gtctagtgagggacagaccaagcacgcaaaacaaattgcaatataatgtgataagttctttaaaagaggtaagagcaacgtgctttgggagcagagaagagggagaaagcagcatcttgcctggatgagccaggggacacagaagagaagcccactatctcatttaatctttacaactctcttgcaaggttccctggttgtgaaaatacatgagataaatcatgaaggccactatcatcctccttctgcttgcacaagtttcctgggctggaccgtttcaacagagaggcttatttgactttatgctagaagatgaggcttctgggataggcccagaagttcctgatgaccgcgacttcgagccctccctaggcccagtgttgccccttccgctgttcaatgccatctttcgagtgggtccagtgtttcttgatttggggtctgggacaaagtgccaaaggatctttcccccttgacacaactctgctagacctgcaaaacaacaaaataaccgaaatcaaagatggagactttaagaacctgaagaaccttcacgcattgattcttgtcaacaataaaattaggcaaagttagtcctgggagcatttacacctttggtgaaagttgggaacgactttatctgtccaaggaatcagctgaagggaattgccagaaaaaatgcccaaaactcttcaggagctgcgtgcccatgagaatgagatcaccaaagtgcgaaaagttactttcaatggactgaaccagatgattgtcatagaactgggcaccaatccgctgaagagctcaggaattgaaaatggggctttccagggaatgaagaagctctcctacatccgcattgctgataccaatatcaccagcattcctcaaggtcttcctccttcccttacggaattacatcttgatggcaacaaaatcagcagagttgatgcagctagcctgaaaggactgaataatttggctaagttggggattgagttttcaacagcatctctgctgttgacaatggctctctggccaacacgcctcatctgaggggagcttcacttgggacaacaacaagcttaccagagtacctggtgggctgggcagagcataagtacatccaggttgtctaccttcataacaacaatatctctgtagttggatcaagtgacttctgcccacctggacacaacaccaaaaaggcttcttattcgggtgtgagtctttttcagcaacccggtccagtactggggagatacagccatccaccttcagatgtgtctacgtgcgctctgccattcaactcgggaaactataagtaattctcaagaaagccctcatttttataacctgggcaaaatcttgttaatgtcattgctaaaaaataaataaaagctagatactggaaacctaactgcaatgtggatgttttaccccacatgacttattatgcataaagccaaatttccagtttaagtaattgcctacaataaaaagaaattttgcctgccattttcagaatcatcttttgaagctttctgttgatgttaactgagctactagagatattcttatttcactaaatgtaaaatttggagtaaatatatatgtcaatatttagtaaagcttttcttttttaatttccaggaaaaaataaaaagagtatgagtcttctgtaattcattgagcagttagctcatttgagataaagtcaaatgccaaacactagctctgtattaatccccatcattactggtaaagcctcatttgaatgtgtgaattcaatacaggctatgtaaaatttttactaatgtcattattttgaaaaaataaatttaaaaatacattcaaaattactattgtatacaagcttaattgttaatattccctaaacacaattttatgaagggagaagacattggtttgttgacaataacagtacatcttttcaagttctcagctatttcttctacctctccctatcttacatttgagtatggtaacttatgtcatctatgttgaatgtaagcttataaagcacaaagcatacatttcctgactggtctagagaactgatgtttcaatttacccctctgctaaataaatattaaaactatcatgtg

SEQ ID NO: 45267 - DNA, 2386 bp, Homo sapiens
gtccatcaccatgtgggttttgaagaccctcgactgcctccccgatgctccgaagcctgatcttccagggtggggaggagaaaatcccacctcccctgacctccaccacctccaccaccaccaccaccaccaccaccaccactaccaccaccacccaactggggctagagtggggaagatttcccctttagatcaaactgccccttccatggaaaagctggaaaaaaactctggaacccatatccaggcttggtgaggttgctgccaacagtcctggcctcccccatccctaggctaaagagccatgagtcctggaggaggagaggacccctcccaaaggactggagacaaaaccctctgcttccttgggtccctccaagactccctggggcccaactgtgttgctccacccggacccatctctcccttctagacctgagcttgcccctccagctagcactaagcaacatctcgctgtggacgcctgtaaattactgagaaatgtgaaacgtgcaatcttgaaactgaggtgttagaaaacttgatctgtggtgttttgttttgttttttttcttaaaacaacagcaacgtgatcttggctgtctgtcatgtgttgaagtccatggttgggtcttgtgaagtctgaggtttaacagtttgttgtcctggagggattttcttacagcgaagacttgagttcctccaagtcccagaaccccaagaatgggcaagaaggatcaggtcagccactccctggagacacagccttctggctgggactgacttggccatgttctcagctgagccacgcggctggtagtgcagccttctgtgaccccgctgtggtaagtccagcctgcccagggctgctgagggctgcctcttgacagtgcagtcttatcgagacccaacgcctcagtctgctcatccgtaaagtggggatagtgaagatgacacccctccccaccacctctcataagcactttaggaacacacagagggtagggatagtggccctggccgtctatcctacccctttagtgaccgcccccatcccggctttctgagctgatccttgaagaagaaatcttccatttctgctctcaaaccctactgggatcaaactggaataaattgaagacagccagggggatggtgcagctgtgaagctcgggctgattccccctctgtcccagaaggttggccagagggtgtgacccagttaccctttaacccccacccttccagtcgggtgtgagggcctgaccgggcccagggcaagcagatgtcgcaagccctatttattcagtcttcactataactcttagagttgagacgctaatgttcatgactcctggccttgggatgcccaagggatttctggctcaggctgtaaaagtagctgagccatcctgcccattcctggaggtcctacaggtgaaactggcaggagctcagcatagacccagctctctgggggatggtcacctggtgatttcaatgatggcatccaggaattagctgagccaacagaccatgtggacagctttggccagagctcccgtgtggcatctgggagccacagtgacccagccacctggctcaggctagttccaaattccaaaagattggcttgtaaaccttcgtctccctctcttttacccagagacagcacatacgtgtgcacacgcatgcacacacacattcagtattttaaaagaatgttttcttggtgccattttcattttattttattttttaattcttggagggggaaataagggaataaggccaaggaagatgtatagctttagctttagcctggcaacctggagaatccacataccttgtgtattgaaccccaggaaaaggaagaggtcgaaccaaccctgcggaaggagcatggtttcaggagtttattttaagactgctgggaaggaaacaggccccattttgtatatagttgcaacttaaactttttggcttgcaaaatatttttgtaataaagatttctgggtaataatgagtccttccggtgttcagtattcttgtctttgtgagtgcgtcccggggccgcctcggggcctgcctgccctcctgccaaagcctggaagaggattgaatggaccccagggtttggaaacaacctacagcatttgagcccctcacgtaggttttagagacgtacaatttttgtttgccctggctcagaaggagccggtgtaaggttgagataaaattccatatagacaactgagtttggatctcggctctgctgctttgtagctgtgggagttcaaacagcacctctttgagacttgggccccgcgtcggcacaatggggcaggaatagtccctgccagggtgactgtgtggattcaggagg

SEQ ID NO: 45268 - DNA, 2913 bp, Homo sapiens
  misc_feature (1)...(2913): n = a,t,c or g
tgattatttttattataatgaaattaaacttatgactattacagtatgctcagcttaaaacatttatgagtactgcaaggactaacagaaacaggaaaaatcctactaaaaatatttgttgatgggaaatcattgtgaaagcaaacctccaaatattcatttgtaagccataagaggataagcacaaccatatgggaggagataaccagtctctcccttcatatatattcttttttatttcttgttataccttcccaaaacagagacattcaacagtagttagaatggccatctcccaacattttaaaaaaactgcaccccccaatgggtgaacaaagtaaagagtagtaacctagagttcagctgagtaagccactgtggagccttaagtggtgaggtcttccaatttcagagtgatgtgtcttcaacttgtatcatcattttagcggaaaaacataatttaattttggtgaaatgagattcatctcgtaacaggattagtaacagcattcactgaatttcacactcttcttttgtgaacagtgaagaaaatgaatggtagctagaagatcaatgggattccagctccagctgcagatggaatgacgatataccaggacaaaaaacacctatattttgatttacaaagctaacagcagttttaaatctgcaacttaattacagaccaactacaccacaaccttttcaaatggcaaaaatacaaaaaagtgttacaaaaatatttcagaaaaagtgcatagtctaagtgcatagtaaataaaagcactgaaaaatatcttgctagagggagttcagcttggaagttattaccaaagctaaacatttttattttacacaaactatactcaaaaatagctttatgagactgatttctggctaaaagtatcaaagggtttattagtcaagaaacaaatacctcaaccgacaagggtggatagaaaagaaacaaagaagctgcctaccccagaagttcagacttaataaaatttcttcagtattacggtactaatatcccttaatggcagaatgtgataatcatggaattaattattgctaaagtagttttcaaataaaaaaaagaaaaaagaaaacaaaacaaattaaacttgacacaatctgaccaaacacgtgtcaatttacaatttcaaggttattttacaaaatacctacatttacacaataggctcccggcagcatttccagacaaatgttcttttaatttatcctgacatgctataaatgaataaattacactatttaaaaattatcatcagtaagttttcctttctcatgggtcagagaaaaagaaatgagcgtgcaaagaagattgagaggaagcgcacgcacacagataacttaaagaagcaggaggggctggggagggtcaacaatcactgaacctcacacagtgtgatgctctccaagggtgaaagtcaactgcttatagccatttcaaaagtattttaaagaaaaatgttttgtagggaaaccctttaatgctttcatttttattcaaaatcagtccagctgctagtcagcgggcagcagctacaataccaagttctggcagttgcagtactagatattgtgcctgcaagtcatnnnnnnnnnnnnnnnnnnnnnnnnnnnnnnnnnnntgcctttccccttcagacaaaagaattacttttttcatttttcttaaaaaaagaggaaaagttataacacgaaacctaaattgacttgcaaaggaataccatgtaacaaatggcttgaagtagtctatcaaaaaattggggagatttttatttaatagtgagtcagcaaggcattttttgttgtttaaaaaaaatctcatttccttacagaaacagtttttagtttttaatgaacttgtaaacaaaaaagctcccatttcaaaataaaaacaaaatcccagatcatatagatgtttacagtgattacatttatctaagcaacatacatacatgttcagttgtaagatgttaactaaatttctgtgacaaatatgctttttttttaataccaagaacattatagagttaatgcagagtcctaaggataatctagtagtcactaagtttttcttaagtcttcactttagatgctgttatttctagcacaattaagcaggcagagtctttcatatgctcaaacactggaatctttggttgctaccatatcagctggcttgcagacaagaagccaaccattttaagaatgttttaagtgaacaacttgcaaaccccagggatggaaaaaccctaagaatgcacaattgtgagcatttaacaaccatcacaactgtggctgaagactgttcatgccgttcttctgaaatgagatctcaaagcagtatagttcaaaacaaaaggttttaacaaaaaattggcatatgcacaatttctccaccaatttttgtgtgtcaaccatttagttaacttttccacttgaaaaaatgcaatagaaaaccggacaccatgtttcactatctcagttaatattcacaattacagaggctacaactcaggatacagcatcaccaatgctgcccagagtcagtttatactgaaattaagttctttacaccaagtaaatggttgtccacaaccactggctagtgtacatatgaactaaaatttctagatttggggagaaacaaatgctgctccgatcatctgctctgcttcttctgttcctcaattcatgcttagaaacctgtgggggtttgggcctgctgaccctgcccactggaagaggctgcctgctgtgctgctttctgctttaacattgtccaatcaaatgtgtagtcatattgatggttcagggtcctgaaaagaatgcggaatagctgcctcagatacatgtaatctggggcttcctcaaagcgta

SEQ ID NO: 45269 - DNA, 2797 bp, Homo sapiens
tggctgggctgcgcttgggtccgtcgctgcttcggtgtccctgtcgggcttcccagcagcggcctagcgcgaaaagtaaaagatgtctgaatatattcgggtaaccgaagatgagaacgatgagcccattgaaataccatcggaagacgatgggacggtgctgctctccacggttacagcccagtttccaggggcgtgtgggcttcgctacaggaatccagtgtctcagtgtatgagaggtgtccggctggtagaaggaattctgcatgccccagatgctggctggggaaatctggtgtatgttgtcaactatccaaaagataacaaaagaaaaatggatgagacagatgcttcatcagcagtgaaagtgaaaagagcagtccagaaaacatccgatttaatagtgttgggtctcccatggaaaacaaccgaacaggacctgaaagagtattttagtacctttggagaagttcttatggtgcaggtcaagaaagatcttaagactggtcattcaaaggggtttggctttgttcgttttacggaatatgaaacacaagtgaaagtaatgtcacagcgacatatgatagatggacgatggtgtgactgcaaacttcctaattctaagcaaagccaagatgagcctttgagaagcagaaaaagtgtttgtgggggcgctgtacagaggacatgactgaggatgagctgcgggagttcttctctcagtacgggggatgtgatgggatgtcttcatccccaagccattcagggcctttgcctttgttacatttgccagatgatcagattgcgcagtctctttgtggagaggacttgatcattaaaggaatcagcgttcatatatccaatgccgaacctaagcacaatagcaatagacagttagaaagaagtggaagatttggtggtaatccaggtggctttgggaatcagggtggatttggtaatagcagagggggtggagctggtttgggaaacaatcaaggtagtaatatgggtggtgggatgaactttggtgcgttcagcattaatccagccatgatggctgccgcccaggcagcactacagagcagttggggtatgatgggcatgttagccagccagcagaaccagtcaggcccatcgggtaataaccaaaaccaaggcaacatgcagagggagccaaaccaggccttcggttctggaaataactcttatagtggctctaattctggtgcagcaattggttggggatcagcatccaatgcagggtcgggcagtggttttaatggaggctttggctcaagcatggattctaagtcttctggctggggaatgtagacagtggggttgtggttggttggtatagaatggtgggaattcaaatttttctaaactcatggtaagtatattgtaaaatacatatgtactaagaattttcaaaattggtttgttcagtgtggagtatattcagcagtatttttgacatttttctttagaaaaaggaagagctaaaggaattttataagttttgttacatgaaaggttgaaatattgagtggttgaaagtgaactgctgtttgcctgattggtaaaccaacacactacaattgatatcaaaaggtttctcctgtaatattttatccctggacttgtcaagtgaattctttgcatgttcaaaacgggaaaccattgattaggaactacattctttaccccttgttttaatttgaaccccaccatatggatttttttccttaagaaaatctccttttaggagatcatggtgtcacagtgtttggttcttttgttttgttttttaacacttgtctcccctcatacacaaaagtacaatatgaagccttcatttaatctctgcagttcatctcatttcaaatgtttatggaagaagcacttcattgaaagtagtgctgtaaatattctgccataggaatactgtctacatgctttctcattcaagaattcgtcatcacgcatcacaggccgcgtctttgacggtgggtgtcccatttttatccgctactctttatttcatggagtcgtatcaacgctatgaacgcaaggctgtgatatggaaccagaaggctgtctgaacttttgaaaccttgtgtgggattgatggtggtgccgaggcatgaaaggctagtatgagcgagaaaaggagagagcgcgtgcagagacttggtggtgcataatggatattttttaacttggcgagatgtgtctctcaatcctgtggctttggtgagagagtgtgcagagagcaatgatagcaaataatgtacgaatgttttttgcattcaaaggacatccacatctgttggaagacttttaagtgagtttttgttcttagataacccacattagatgaatgtgttaagtgaaatgatacttgtactcccccctacccctttgtcaactgctgtgaatgctgtatggtgtgtgttctcttctgttactgatatgtaagtgtggcaatgtgaactgaagctgatgggctgagaacatggactgagcttgtggtgtgctttgcaggaggacttgaagcagagttcaccaagtgagctcaggtgtctcaaagaagggtggaagttctaatgtctgttagctacccataagaatgctgtttgctgcagttctgtgtcctgtgcttggatgctttttataagagttgtcattgttggaaattcttaaataaaactgatttaaataatatgtgtctttgttttgcagccctgaatgcaaagaattcatagcagttaattccccttttttgacccttttg

SEQ ID NO: 45270 - DNA, 479 bp, Homo sapiens
  misc_feature (1)...(479): n = a,t,c or g
gnngnnnnntttgnnnnctttgganancgntatgacatgattacgaatttaatacgactcactatagggaatttggccctcgaggccaagaattcggcacgaggttggcgactgtgcttcaagcggtgtctgcttttggggcagagttttcatcggaggcatgcagagagttaggcttttctagcaacttgctttgcagctcttgtgatcttctcggacagttcaacctgcttcagctggatcctgattgcagaggatgctgtcaggaggaagcacaatttgaaaccaaaaagctgtatgcaggagctattcttgaagtttgtggatgaaaattgggaaggttccctcaagtccaagcttttgttaggagtgataaacccaaactgttcagaggactgcaaatcaagtatgtccgtggttcagaccctgtattaaagcttttggacgacaatgggaacattgctgaagaactgagcatt

SEQ ID NO: 45271 - DNA, 1676 bp, Homo sapiens
  misc_feature (1)...(1676): n = a,t,c or g
tcccccttcctggtctcccttctcccgctgggccggtttatcgggaggagattgtcttccagggctagcaattggacttttgatgatgtttgacccagcggcaggaatagcaggcaacgtgatttcaaagctgggctcagctcatgtttcttctctcgtgtaatcgcaaaacccattttgggagcaggaattccaatcatgtctgtgatggtggtgagaaagaaggtgacacggaaatgggagaaactcccaggcaggaacaccttttgctgtgatggccgcgtcatgatggcccggcaaaagggcattttctacctgacccttttcctcatcctggggacatgtacactcttcttcgcctttgagtgccgctacctggctgttcagctgtctcctgccatccctgtatttgctgccatgctcttccttttctccatggctacactgttgaggaccagcttcagtgaccctggagtgattcctcgggcgctaccagatgaagcagctttcatagaaatggagatagaagctaccaatggtgcggtgccccagggccagagaccaccgcctcgtatcaagaatttccagataaacaaccagattgtgaaactgaaatactggtacacatgcaagatcttccggcctccccgggcctcccattgcagcatctgtgacaactgtgtggagcgcttcgaccatcactgcccctgggtggggaattgtgttggaaagaggaactaccgctacttctacctcttcatcctttctctctccctcctcacaatctatgtcttcgccttcaacatcgtctatgtggccctcaaatctttgaaaattggcttcttggagacattgaaagaaactcctggaactgttctagaagtcctcatttgcttctttacactctggtccgtcgtgggactgactggatttcatactttcctcgtggctctcaaccagacaaccaatgaagacatcaaaggatcatggacagggaagaatcgcgtccagaatccctacagccatggcaatattgtgaagaactgctgtgaagtgctgtgtggccccttgccccccagtgtgctggattcgaaggggtattttgccactggaggaaagtggaagtcgacctcccagtactcaagagaccagtagcagcctcttgccacagagcccagcccccacagaacacctgaactcaaatgagatgccggagacagcagcactcccgaagagatgccacctccagagcccccagagccaccacaggaggcagctgaagctgaggaagtagcctatctatgggaaggagacttttgtttgtgtttaattagggctatgagagatttcaggtgagaagttaaacctgagacagagagcaagtaagctgtcccttttaattgtttttctttggtctttagtcacccagttgcacactgggcattttcttggctggcaagctttttttaaaatttgctgaaacttcaagggcagtggccaggaaggatgttcagttcacctctggataaactgggaaaaatggggtctcttggggccngggcactggttctccatgggcntcagccacagggtccccttgggacccctctcttccctccagatcccagccctcctgcttggggtcactggtctcattctggggctaaaagtttttt

SEQ ID NO: 45272 - DNA, 522 bp, Homo sapiens
cacgagccgagtcgcgcggaggcggaggcttgggtgcgttcaagattcagcttcacccgtaacccaccgccatggccgaggaaggcattgctgctggaggtgtaatggacgttaatactgctttacaagaggttctgaagactgcccctcatccacgatggccctagcacgtggaatttcgcgaagctgccaaagcccttagacaagcgcccaagcccatctttgtgtgcttgcatccaactgtgatgagcctatgtatgtcaagttggtggaggccctttgtgctgaacaccaaatcaacctaattaaggttgatgacaacaagaaactaggagaatgggtaggcctttgtaaaattgacagagaggggaaaccccgtaaagtggttggttgcagttgtgtagtagttaaggactatggcaaggagtctcaggccaaggatgtcattgaagagtatttcaaatgcaagaaatgaagaaataaatctttggctcacaaaaaaaaaaaaaaaaaagtcgacgc

SEQ ID NO: 45273 - DNA, 1487 bp, Homo sapiens
ggctgaacgcggagggggcggagggagcccgcggcggcggcagcagctacagcgaaatggcggagaccgtggctgacacccggcggctgatcaccaagccgcagaacctgaatgacgcctacggaccccccagcaacttcctcgagatcgatgtgagcaacccgcaaacggtgggggtcggccggggccgcttcaccacttacgaaatcagggtcaagacaaatcttcctattttcaagctgaaagaatctactgttagaagaagatacagtgactttgaatggctgcgaagtgaattagaaagagagagcaaggtcgtagttcccccgctccctgggggaaagcgtttttgcgtcagcttccttttagaggagatgatggaatatttgatgacaattttattgaggaaagaaaacaagggctggagcagtttataaacaaggtcgctggtcatcctctggcacagaacgaacgttgtcttcacatgtttttacaagatgaaataatagataaaagctatactccatctaaaataagacatgcctgaaatttggcaagaaggggcaaaaacgtgactattaatgattgataagcaccagtgaagaagttctaacttttagcatgctgcacagaaactggtataacatgccttcagtatactaacactcatatgctcagttttgttttgttttggcagttgacaagaagttaatttgctttagtaaaaatccctcattccagcctttctatataaatagctctttcttgctgttttaatgtggtgcacactatagcctcacaaacctgttattccagtgtaatctgcagtgtcgtaactaaagttactggcttggtcttatttgcacagtttttgcgtcttgtttgcttcttgcatctgattaactagaatatttctctttcccccttttaatttgtgatgtcacttgaccccatttatgtgtaggagcactacaccattggtttccaatactgcacacataagatacatacttgtgtgcagaaagtatcttcctccaggcttgtaatacccttcacatggaagattaatgagggaaatctttatattctgtataaaaacaaaagcaaatttatatactaaaatcatttgtctaaaaatttaagttgttttcaaataaaaattaaaatgcatttctgatatgcactgattgtgttgcctccagctttttttgctctctatgagtgactacttaagtcacttgttgagagggattatttactaattatatacttctcattcctgtaactccattccctttaaacagtggtgatatcaaatatacttccatccattgaatggggtatttttaacaacaacaaaagtgatatactaaaaaatgtattgcttaaggcttattgaatcattttgaagcactttgtgtatttgaaaactgctttataatctcatttattaaaaggactttcaaagataaaataccatttctcct

SEQ ID NO: 45274 - DNA, 12220 bp, Homo sapiens
ggggacatgggatctcacctgaaactgcctcctgtcccagagcagtgacccttcagcacaggcacatgaccagacacagacgacacattggaaactgggttttacatgatcaggtctttattgagaagtaaaattgaggagggtgtgggactggtctgagctgaggccaggctggaggctcaggggtatggtggagagttggggaaggggtgactggaagaggaaggaccttccagagagatgactcggggaggctgtaagcctcctcccttgggtgactttcccactgggtgcagaattccctccaccataaattgagaacccagggaaggctaggaattatatgtgagaaaagaaaaaatgagataaaacaagatttctgattgacaatgagaatatttattgagggtttattgagtgcagggagaagggcttgatgccttggggtgggaggagagacccctcccctgggatcctgcagctctagtctcccgtggtggggggtgagggttgagaacctatgaacattctgtaggggccactgtcttctccacggtgctcccttcatgcgtgacctggcagctgtagcttctgtgggacttccactgctcaggcgtcaggctcaggtagctgctggccgcgtacttgttgttgctttgtttggagggtgtggtggtctccactcccgccttgacggggctgctatctgccttccaggccactgtcacggctcccgggtagaagtcacttatgagacacaccagtgtggccttgttggcttgaagctcctcagaggagggcgggaacagagtgaccgagggggcagccttgggctgacctgcggggtggatgaggggcagggggtcagagtcctggtgtccacctggggagcccctgacctcagtatatgatgaggtgttggggtgcccttgttcaggggctctgtgtctgaaggtctatgccaggcagaggggtcagggtgttttccactatgtcctgatctgcacggggagctgttttaccttagacacctgaccacctgtcctgagatctctcggggccttggcccccaacaccgacatctgaccctcagcgccctgaccctgtcccctcctgccatcctgacagataaagagagctctgtgtctcccctgcacagcgaactctggggttacttttctggcctggctcctcagctctgtgggatgctggggccttttggtccctcaggctgttccagccaaatgtgtgttctggagcccgtgtatggggcaagggcctggggggatcggagagcctgcctgctgtcctgggctctctcttattccgtggagtcttttctggcatccaccccacgtcccggctacctggtcatagcagtggggctttcacgcagtggactctgcccctctgatccccctgggcacaggggatatgttctgaagagacccaggagcccgcccttccgtcacatccactccttttgtgacccttcccctggctttctggtgtccagagtctgcttctcccttctccctcctgacggggtttcctgagtctcaggctggctcagggctcagtccctggcagcccccagacgcccagggcagcccctccacctcctacctcattctgggtctggatcctggctctgggtcccagctctgtgattcccgagcatcagccccgagggcactgggtccttctaaagtctcccaggaggtgcctccctcagaccccttgttcccaattccccaggagatggaacccaggtaacccaagggcaaagctgttccgacaagaacccagactgaggaggccagaacagaacaaggcttagagacccagcctgcgcctgtcagacagacagagagacaaacagagagagagagacagacagacagacagacagacgaggctcagtaggtcattctatctagtcccctgcccctgcggtcagaggtgaagtggttgtagtgacctgctgaggcaagcaagggtctgaacagggagggcagaggtccttgctcaggcctgggatgcagggagaaaggctgaccacaagttgagacaagatacagaaacaaacaaaaacagcagaaattgtcccaagagcggggaaggagaggggagaagagactcacctaggacggtcagcttggtccctccgccgaacacccaacactgtgacacaggctcatacaaaaaccctccctgggatgcccctagccccagcccccactgcagctgtgaaggaggaagctggggccagtggtcctggtggcatctgctcatgagggagtccacatggcccccacacttaacccacagagagaggggaccggtgacatcctgtgacccacagcaggatccctggaaatccaggcttctggaggacactgggatcttgaatttgttttttgcaccaaccatcactcaggcccaggattgaatttattagagggcattagtgtcgctaaggagtgaatttccacagatgggataggtggtctcttctctgcaaagttgaaccaacccatggttcaacttttggtaacaccatggggtggtgcagagggtgctcctctcctcccatgcagaggctgattgccctagagtgcagtgttctgggaaccttggtgggtttcagccccaccttctggagtagttctagttggataggcctggtcagtgaggcctggctggtcccaatatgaagtgccagtcacatctgttagggtaaccttgggagcatccctgcacccctgaatctggcctcatgttgggtgggacagctagggtggaggctgccgttgtctttttcaaatgggggacatgagggagcctccagaatgtggtctccaaatatcacctctcactaagggaagggagatcagtgggggatcccaggcctggggcaggaaagacacataagacaaataagaaaggaacatgataagacagaacctcttatcctctgagtaatcaggagccatttaatcccctggggccatgtgaggaagtctgaagccacttggggagactccccctgggaaaatattcatcattggtggccacctgtcatcatcaattaaatataatgacagtggcttcaaaagcattagatggcttgaatcctagagttcaccatgagagaagacatgaattgttcaccctggaaggatggctgggccccggatcttctgtgtgcaaagtggctccttcctagagcatgaagcacactcctgggtgaacagagcccagctgcagacctctgacatcacagacactctgcagcactcatgagaaggaggtgaactgaagcctcaaccctctgccttccttcccttctgagggatgtagctattgaccatcctatgcagctaacattactacaagagtggcagtctgacatgggtgactctgctggtagcagctccctgtccttgcaagctattttgcaatgtccaatctgaatcaagttaatccccttcatgctagaatcattttccaggaaaataaaagctgagggaagccctaggttcctgctccaggaggcgtggctgtatagcagccaggggaagttctccagacagctctcagctcctgcagctcctgccttgccgggaggctctagagcaattgaggaaatattcaccagtgacaaccagcctgatggcacatgcacccatcaccatttgatgtcatattgctcctcatataaacttaaacccccaaataccaacagcaccaacatgtaactaagccaaagcacttctggtgtttctgatgcatttgaggagaccctgcttatttctcgatattagggaattagtgataatttctatttaggtttggtagtgatattatagttattttaaggtccatgtcattccaggacagtaatggagtacttacagctgaacagatctgatgtcttgtatttctttctaaatgttgtgtaagggagaatttattttgctgtgggtgggtcggcatcatctgtgaattgcttattttgagtgctgggtgatgagaacatgggacactgttatttttctgtctccttatttatatgttcagagttcttcataatataaacttatgacacagctcagtctttggacagctgctgggtgtgaagtagaccttggccttgtacccagcaggcctacgtaactggccctccttgggtggtcttagttttctcatttgtgaaatgggcttagacagggactgtggccactagaaccttttagccttcttctaattcagaggctgggatttggatcaggggtggctgtgatcaagcaccaaggggccatttctctgcctcattgtgactgcagagcttcctgtctttgcgggctctgtccctggcctgtcgggaccacccagcagctctggtgaactcagctgccacattcctgatgtgctggaggcagagacagggagtctaagtttgcgtgggcactaagaacgcacagtcatccagggcctccatagaggtttgggtaggaaggctccaccactgtgaccaagggagggcgaaggtcccagtgggcaggagggtctgggggagctgagtgttcatggatgcctgaccttgcctgtagccctctgtctgcattcacacagccctgacccagcctggcccagctccaactcttgtcatgaatttgacacggcctccttcactcctcgagcctgaccctgagcctgtagccatcttatcatacacccgtaacatctttgttcttaaatctcactttatgtttcataaactacttccatgacatactagtatcttgcagaatattatggggcttttagaggtgccagatggataaatgtgactttacataagctaagctttaccacaggaaattatttccctagtagagaacttttcattgcctttacttggctaacgtgcattgtcaagtctaggaaatgcacctgtatgtttcattctccaaggcttctcaggacatcctggtggcagcacaagtatggactcctttcctgctaaacggtcttgtgtggaatggggattttcaactgtgttcctgctgagaccatgacattgactcataggtgctcttcacccttacttctgcctctagcccacatctgggctccccagagaccccttcacttctcctgatttccctctccggactgtcctgcatcctgatgctgggccatggtatttcccagtttggcaagagctacagcccaccagatgcttgcaggacaatatgaaactctggatcatggattctcctgacacagagagctcaccagagtcactggcttgttgcatagggtcagggatgccatggcagggacctggcatctgaccaagagcggacctatcccctgtcccggaccagcaactctttagcccagagactggagcagacacagaaggcatgcgagaagtgccgtgtgatgcgtggttaggtttctgttgaaaggcagaatctaggagagtgtgacacccccctggtcccagccaggcgaggctggtggctcaggggtacagtggagagctgaggaaggggtgtctgggtgaggaaggccttacctgcagagatgcccagggaactgagaaccccttcacataggcaactttcccactgggttcagggttctttccaccacaaattgagaacccaggaaaggctaggaattatatgtgagaaaagaaaaaatgagataaaacaagatttctgattgacaatgagaatatttattgagggtttattgagtgcagggagaagggcttgatgccttggggtgggaggagagacccctcccctgggatcctgcagctctagtctcccgtggtggggggtgagggatgagaacctatgaacattctgtaggggccactgtcttctccacggtgctcccttcatgcgtgacctggcagctgtagcttctgtgggacttccactgctcaggcgtcaggctcagatagctgctggccgcgtacttgttgttgctttgtttggagggtgtggtggtctccactcccgccttgacggggctgctatctgccttccaggccactgtcacggctcccgggtagaagtcacttatgagacacaccagtgtggccttgttggcttgaagctcctcagaggagggcgggaacagagtgaccgagggggcagccttgggctgacctgcggggtggatgaggggcagggggtcagagtcctggtgtccacctggggagcccctgacctcagtatatgatgaggtgttggggtgcccttgttcaggggctctgtgtctgaaggtctatgccaggcagaggggtcagggtgttttccactatgtcctgatctgcacggggagctgttttaccttagacacctgaccacctgtcctgagatctctcggggccttggcccccaacaccgacatctgaccctcagcgccctgaccctgtcccctcctgccatcctgacagataaagagagctctgtgtctcccctgcacagcgaactctggggttacttttctggcctggctcctcagctctgtgggatactggggccttttggtccctcaggctgttccagccaaatgtgtgttctggagcccgtgtatggggcaagggcctggggggatcggagagcctgcctgctgtcctgggctctctcttattccgtggagtcttttctggcatccaccccacgtcccggctacctggtcatagcagtggggctttcacgcagtggactctgcccctctgatccccctgggcacaggggatatgttctgaagagacccaggagcccgcccttccgtcacatccactccttttgtgacccttcccctggctttctggtgtccagagtctgcttctcccttctccctcctgacggggtttcctgagtctcaggctggctcagggctcagtccctggcagcccccagacgcccagggcagcccctccacctcctacctcattctgggtctggatcctggctctgggtcccagctctgtgattcccgagcatcagccccgagggcactgggtccttctaaagtctcccaggaggtgcctccctcagaccccttgttcccaattccccaggagatggaacccaggtaacccaaggacaaagctgttccgacaagaacccagactgaggaggccagaacagaacaaggcttagagacccagcctgcgcctgtcagacagtcagagagacaaacagagagacagagagacaaacagagagacagacagacagacagacagacgaggctcagtaggtcattctatctagtcccctgcccctgtggtcagaggtgaagtggttgtagtgacctgctgaggcaagcaagggtctgaacagggagggcagaggtccttgctcaggcctgggatgcagggagaaaggctgaccacaagttgagacaagatacagaaacaaacaaaaacagcagaaattgtcccaagagcggggaaggagaggggagaagagactcacctaggacggtcagcttggtccctccgccgaataccacacactgtgacacaggctcatacaaaaaccctccctgggatgccccagccccagcccccactgcagctgtgaaggaggaagctggggccagtggccctggtggcatctgctcatgagggagtccacatggcccccacactcaacccacaaagagaaggggaccggtgacgtcctgtgactcacagcaggatccctggaaatccaggcttctggaggacactgggatcttgaatttgttttttgcaccaaccatcactcaggcccaggattgaatttcttagggagcatcagtatcgctaaggagtgaatttccacagatgggttaggtggtctcttctctgcaaagttgaaccaacccatggttcaacttttggtaacaccatggggtggtgcagagggtgcccctctcctcccatgcagaggctgattgccctagagtgcagtgttctgggaaccttggtgggtttcagccccaccttctggagtagttctagttggataggcctggtcagtgaggcctggctggtcccaatatgaagtgccagtcacatctgttagggtaaccttgggagcatccctgcaccccgaatctggcctcatgttgggtgggacagctggggtggtggctgccgttgtctttttcaaatgggggacataagggagcctccagaatgtggtctccaaataccacctctcactaagggaagggagatcagtgggggatcccaggcctggggcaggaaagacacataagacaaataagaaaggaacatgataagacagaacctcttatcctctgagtaatcaggagccatttaatcccctggggccatgtgaggaagtctaaagccacttagggagactccccctgggaaaatattcatcattggtggccacctgtcatcatcaattaaatataatgacagtggcttcaaaaacattagatggcttgaatcctagagttcaccatgagagaagacattaattattcaccctggaaggatggctgggccccggatcatctgtgtgcaaagtggctccttcctagagcatgaagcacactcctgggtgaacagagcccagctgcagacctctgaattcacagatgctctgcagcactcatgagaaggaggtgaactgaagcctcatccctctgccttccttcccttctgagggatgtagctattgaccatcctatgcagctaacattactacaagagtgagaatctgacatgggtgatctcgctgttagcagctccctgtccttggaagctattttgcaatgtctagtctgaatccagttaagtccctccatgctagaaccattttgcagggggaaaaaaaaagaagtagatgatagccctgggttcttgttttgggaggtgtggctgtattccaaccgtgggaaggtccccggacagctctcaactcctgcagctcctgccttgccaggcagcactagagcaattgaggaaatattcaccagtgacaactggcctgacagcacatgcgcccatcaccatttgatgccatattgaattctgaaataaaccacccaaaaccccaaaataaccacagcaccaacacttaactaagtcaatacgcttctggcatttgtgagggatttgaggagcccatgattatttcttgatattagggaattagtgataatttctatttaggtttggtaataatattgcagttacttttaagcccatatctttccagcatagaaatgggatatttacagctgaaaagatgtgatgtctggtattgtgtaatggaggggttattctgctatgggtgggtcagtaatgtctgtgaattgcttattgggggggctgggtgatgggaacttgggggcattattatttctctgtctccttatgtatgtgttcaaagttttccataatggaaacttataacacagtcaaagattaggcagctgctggggatggccttgtgcccagcaggactatggatctggcccttggtcatctcagttttcccctccatgaaatgggctcagacaggtgctgtggcaacagaaccctcaagcctccttctaatgagaggctgggatttggatcaggggtggctgtgatcaagctctaaggggctctttctttgcctcattgtgactgcagagattcctgtctttgcaggctctgtccctggcctgttgggatcacccagcagctctggtggaggcagctgctatgtctctgatgtgctggaggcagagacagggggtctgagagtacccaggcactgaggactctccaagacagctggggtctccacacccaggaggctgacatcatctgctgtcagagacactggaatgagtgtctctgagatgaggcagcaggtgtacatgggatggggtggggaggctgcgccaccatgagctacggagggagagggtgctctgcgggcaggagggtttgtgggatctgactcctagtggaggccaggacttgcctggagccatcagcccacattcactcagctcttattcagtctgacccagccctgaagctcatcctgaattcaactctgattagcctcccccaggcaatcaatagatgcagagtttgagcttggatttgtgacttttctcattttcccaatttccccacatcctcctgctcctgcagactgaccatcatcaagctccagccacaaaccaatcagaaattaactctacctgggcctgacttagtggtccacacccttcatgcttgacatccagccccacgctagtgttaactttgagcctgatccccaacccacagccatgtgatcatatacccgtaacatcatgtgcatcaacctcaccccatattccacaaactagttccaggaaacgctggtatctttcagagtgttttgggtcttctaaaggtgaagaaggagatcaacatgcttttggatatgctgtggctcatcatattaaactggttccctagtgcaggacttgtcagtatgtttacttagccaatgtccattgtacaagtcttagaaagacacttgcatgtttcctttcccaatgtttttacaagttcccagtggcagcacagttatttatccctcacccagtaaacactctcctgactggttcctcgtatgcaatggggaatttcaccttctgttcctgctgagaccgtggccttgagtcaagggtgtcctttttccattatttctgcctctagccctcatctggtctccggggacccccttcatttctcctgaatctccccacagggcgccagcaaacctctcactgggcccctgtcccttcccaggtgggcaaggactgcaggacaattttgtgccttggattgcagttcccactggcacagggagctcacccggttccctggcaggttgggtggggtgtgggatgacggagacatgggatctcacctggaactgccccctgtccctgagcagtgacccttcagcccagacacatgaccagacagagactgcacattagaaatgctgcgttttacatgatcaggtatttattgagaagtaaaatttaggagggtgtgggactggtctgaactgatgccagactggtagctcaggggtacagtggagagttggagaaggggtgactgggagaggaaggaccctctggggagatgactcagggaggctgtgagcctcctcccttgggtgattttcacactgggtgcagaattccctgtaccccacactgagaaccccggggaggctagcaatttatgtgagaaaaaaaatgagataaaacaagatttctggttgtcaatgaggatatttattggggtttcatgagtgcagggagaagggctggatgacttgggatggggagagagacccctcccctgggatcctgcagctccaggctcccgtgggtggggttagagttgggaacctatgaacattctgtaggggccactgtcttctccacggtgctcccttcatgcgtgacctggcagctgtagcttctgtgggacttccactgctcgggcgtcaggctcaggtagctgctggccgcgtacttgttgttgctctgtttggagggtttggtggtctccactcccgccttgacggggctgccatctgccttccaggccactgtcacagctcccgggtagaagtcactgatcagacacactagtgtggccttgttggcttggagctcctcagaggagggcgggaacagagtgacagtggggttggccttgggctgacctaggacggtgaccttggtcccagttccgaagacataccgaccattcaggctgtcatcccatgctgcacagtaataatcagcctcgtcctcagcctggagcccagagatggtcagggaggccgtgttgccagacttggaggcagagaagcgatcagaaacccctgagggccgctgatgacctcataaatcatgagtttgggggctttgcctgggtgttgttggtaccaggagacatagttataaccaccaacgtcactgctggttccagtgcaggagatggtgatcgactgtccaggagacccagacacggaggcaggctgagtcagggcagactgggcccaggaccctgtgccctgagtgaggagggtgaggaggagagggaagccgaacatgctggagattgtcctgaatcctgtcgtcgagc

SEQ ID NO: 45275 - DNA, 1739 bp, Homo sapiens
gaagaaatccaaaaagccgagtagagaagttatcagctgcatgtttgagcctgaagggaatgcctgcagcttgacggacagtaccgcagaggagcacgtgctggcgctggtggagcacgcagctgacgaagctcgggacaggatcaaccggttcctcccaggcggcaagatgggctatctgaagaggaacggggacgggagcctgctctacagcgtggtcaacacggccgagccggacgctgatgaggaggagacccacccggtggacttgagctcgctctccagtaagctactcccaggcttcaccacgctgggcttcaaagacgagagaagaaacaaagtcacctttctctccagtgccactactgcgctttcgatgcagaataattcagtatttggcgacttgaagtcggacgagatggagctgctctactcagcctacggagatgagacaggcgtgcagtgtgcgctgagcctgcaggagtttgtgaaggatgctgggagctacagcaagaaagtggtggacgacctcctggaccagatcacaggcggagaccactctaggacgctcttccagctgaagcagagaagaaatgttcccatgaagcctccagatgaagccaaggttgggacaccctaggagacagcagcagctctgttctggagttcatgtcgatgaagtcctatcccgacgtttctgtggatatctccatgctcagctctctggggaaggtgaagaaggagctggaccctgacgacagccatttgaacttggatgagacgacgaagctcctgcaggacctgcacgaagcacaggcggagcgcggcggctctcggccgtcgtccaacctcagctccctgtccaacgcctccgagagggaccagcaccacctgggaagcccttctcgcctgagtgtcggggagcagccagacgtcacccacgacccctatgagtttcttcagtctccagagcctgcggcctctgccaagacctaactctagaccaccttcagctcttttattttatttttttagttttattttgcacgtgtagagtttttgtcatcagacaaggactttgatcctgtcccctttggcatgcgggaagcagccgcggcggaggtaatgaattgtctgtggtatcatgtcagcagagtctccaagccccacgaaccctgaggagtggagtcatacgcgaaggccatatggcccatcgtgtcagcagagagagtctctgtacacagccccgtgaaccctgaggagtggagtcatacacgaagggcgtgtggccatcgtgtcagcagagagagtctctgtacacagccccgtgaaccctgaggagtggagtcatacgcgaagggtgtgtggccaggctgcagagctgcgtgccgtttgtgtccgagcatcacgtgtggctccagcccttgtttctgccagtgtagacacctctgtctgccccactgtcctggggtcgctcttgggaggcacaggcatgggtgtgtctggcctcattctgtatcagtccagtgtgttcctgtcatagtttgtgtctcccaggcaggccatggtaggggcctcgcaggggccattggggagcacagggccaggctggggtgaggagagctcccctgttttctgtttaattgatgagcctgggaaaggagtgtgttctgcctgcccgttacagtggagcgttccgtgtccataaaacgttttctaactgggaaaaaaaaaaaaaa

SEQ ID NO: 45276 - DNA, 3577 bp, Homo sapiens
  misc_feature (1)...(3577): n = a,t,c or g
tgtccgtccgcccgcgggtgccatcatggcggacgcggccagtcaggtgctcctgggctccggtctcaccatcctgtcccagccgctcatgtacgtgaaagtgctcatccaggtgggatatgagcctcttcctccaacaataggacgaaatatttttgggcggcaagtgtgtcagcttcctggtctctttagttatgctcagcacattgccagtatcgatgggaggcgcgggttgttcacaggcttaactccaagactgtgttcgggagtccttggaactgtggtccatggtaaagttttacagcattaccaggagagtgacaagggtgaggagttaggacctggaaatgtacagaaagaagtctcatcttcctttgaccacgttatcaaggagacaactccgagagatgatcgctcgttctgctgctaccctcatcacacatcccttccatgtgatcactctgagatctatggtacagttcattggcagagaatccaagtactgtggactttgtgattccataataaccatctatcgggaagagggcattctaggatttttcgcgggtcttgttcctcgccttctaggtgacatcctttctttgtggctgtgtaactcactggcctacctcgtcaatacctatgcactggacagtggggtttctaccatgaatgaaatgaagagttattctcaagctgtcacaggattttttgcgagtatgttgacctatccctttgtgcttgtctccaatcttatggctgtcaacaactgtggtcttgctggtggatgccctccttactccccaatatatacgtcttggatagactgttggtgcatgctacaaaaagaggggaatatgagccgaggaaatagcttatttttccggaaggtcccctttgggaagacttattgttgtgacctgaaaatgttaatttgaagatgtggggcagggacagtgacatttctgtagtcccagatgcacagaattatgggagagaatgttgatttctatacagtgtggcgcacttcaaggggcagtgggtaacaaagtttgactccagaaagacttccctcgaggatttctacttggatgaagagaggaccgtgagggtccccatgatgtcggaccctaaggctgttttacgctatggcttggattcagatctcagctgcaaggtctgtggggataggggcagggtggggggtggatggagggagaggatagagaagcaaaacagggtagtgggaataaaatgacctttgagatccgacagctgtctacatgtcgcctgctgtgtgactttgagcaggttaataacatgtctgagctttcctcctcttaagatggggcaggggatcgttaccaacacttaccctcccagggtttgttgtaaggacgaataaggtaataggaaatgggccctcagcactgggcacccacatgtttgttctcttgagactcctatttctagaatttaaagccaaactttgaaaaataatgacaaactccaaatcgttggcannnnnnnnnnnnnnnnnnnnnnnnnnnnnnnnnnnnnnnnnnnnnnnnnnnnnnnnnnnnnnnnnnnnnnnnnnnnnnnnnnnnnnnnnnnnnnnnnnnnnnnnnnnnnnnnnnnnnnnnnnnnnnnnnnnnnnnnnnnnnnnnnnnnnnnnnnnnnnnnnnnnnnnnnnnnnnnnnnnnnnnnnnnnnnnnnnnnnnnnnnnnnnnnnnnnnnnnnnnnnnnnnnnnnnnnnnnnnnnnnnnnnnnnnnacacaggggattccaggcatgagccaccacgcttggccaatcgttggcattctaaggctttcagtgtacctgacttcttttagttctaagtctgtaactgttaacctttcttgggccacggctatcacacggatctctctgggaatctgacgacagtgcctcaaacccgagggagcaccgccaggtgtgcacacacgtttctgtcaacgatttcggaggactcttgggatccctgaacaccatctgttccatgggaccttaggttaagagcctctgttcaaaggaggcttttgctcttggtgggtggatggggtgaagtctccaagccctcttncggncccttcggtattcctatnccccggttctgccctgtcttagtccagtgctctctatttaacaaatgagcagtaaatgtacaccgatggactttgggagacaataaagacctgatattcaattctagctccttaaaccacaggagaacattctttcagcagacaacttcagttggtattaggccaaggtaagaaaggccaacagcatccttttctgaagaaacctcaggagatggctctctgccagaaagctatgacctggaaggggaattgtaaaatagatgaggggctggatgaaggacgagaccagggccccgtcacgggagagggaaggcagctcctggctgtgtctgtcccccggcttttgggctctgaaggactaaccacatgctttctcacttgtctcagattgcccagctgcccttgaccggaagcatgagtatcatcttcttcctgcccctgaaagtgacccagaatttgaccttgatagaggagagcctcacctccgagttcattcatgacatagaccgagaactgaagaccgtgcaggcggtcctcactgtccccaagctgaagctgagttacgaaggcgaagtcaccaagtccctgcaggagatgagtatgtctgaagaccctttcgctcttggtgggtggatggggtggggcagggtctttgggccttccactgtgctaagcagaacgcaagggctccacaggcttgtaggggggcagtggatgagtccttaatcctcatcgtgccagaagggaaggctgaactgccttctctcatcagactcattcctcagcctcacgagcagacctccctgacaggcgctcacaacactgcctctcaagacgagtctgtctgacctgttttctcatcttgacctaacttgctaaatgctcctgggcaagtcactccaccctcggtcagctcagacctcttcaggcctcagagaaagtcaacagtgctgcgccatcccagcttgcttgcaaagggatcccttggttggggtgttggggaaggcagggttttaacggaaatctctctccatctctacagagctgcaatccttgtttgattcaccagactttagcaagatcacaggcaaaccccatcaagctgactcaggtggaacaccgggctgggctttgagtggaacgaggatggggcgggaaccacccccagcccagggctgcagcctgcccaccttcaccttcccgctggactatcaccttaaccagcctttcatcttcgtactgagggacacagacacaggggcccttctcttcattggcaagattctggaccccaggggcccctaatatcccagtttaatattccaataccctagaagaaaacccgagggacagcagattccacaggacacgaaggctgcccctgtaaggtttcaatgcatacaataaaagagctttatccctaaaaaaaaaaaaaaaaaaaagtcgac

SEQ ID NO: 45277 - DNA, 1944 bp, Homo sapiens
tttttttttttttttttacagatcacaggaattttaaattgcagatcagtcatgctacttggggtgatcagaaagacttgaacacttaccaagtgaataattttattaaggtcctgaaggtgagtgtccggaggtgctgggtaaaacacatcacaggtaagaaatgggaaacctacctcagcatttctgaaaggcacaatctatggaagggaaacctagcgtaataaaaccctcactggatgtacatggaaaggagtatggtgagctatttcctttttaaaggatgagaccttcataaattggcccctcggattctgggtgattcccgccgcaagcgcaaatgctccagtgtgttatgaaaatgtttgttaatctgctctgtttcttcactggattcaagattcgggaggtcttctcgaatcttttgggataagctggtttaaaacctgaattgttaccgcatcattttccttttcataaaaatagatatatctgttcagaatttctataaaaagctgcacttgtagagaggggtccatgcactgatttgctatttttagagctttttttaggcactccattaccctcttgcctccgtgaagctcctccccatttttgtccgtgtttctgccagaccagaagagatgtgcacaggtgctcacagctcgggccctgatcaggtttctttagaagtttggatgcagcaagggcacactgagtcctcagaggttcatgattctcttcactgaagcacttcatcctttcaaaagtgcccaatgatcaaggtgatggcagcctagctgtgctttggaatcgctgatttcatcttcatacagagaaaatgccctgggacatgaattcatatgcgactgtctcatgattttcaaaaccaatttccccagcagctagtgcctccttgaagaaaaagtcttaagggcaattctgcccagctctgctttgatcaaagcactgatagtctggtgggcaaatgaaaaaatcttctggcatttcttttcccatttgtcatccactttagaattctctttatatcgaaaagccagctggtaagctgcaaataccaaaggtggcagtgtgaagcgaatccgctgatttccaccagctccaaaatgttttcgtgctgtgttcaaaatcaagtactgctggtcagggtcctcagagcgcagcagatgaatgaagcggcccacaaggctctggctcatcagcaaaatcttctggatcagggtcttctacaggttgatctggctgatcttgaatcaacgtggataccaaattcattatggaatccacctggtcttgagagacaatttctgtgttataatccagaacattactaagcacataacaactcatgctctttctggactcgtagtcaaagtactcaaagagtgggtgaaaatgttttaatttcaagactgttaaaatattgttgtaagtgtcaactggtattttcaaaagtctggtgagttcctttgaaactgcactactggtagcaatatgttcaaggttgagcttattgaatatctccactgttgtttctagaactttatcaacatagtccacacgatcagggtaacatttcatggcaagattaatccagagagacttgtaaagatacaacatcctctgaaggcatgtcttgtctagactgtatcactgtagccacctgctgtgaaaatatatcaaaaagtttaatatccgctgggattccaggtccatcttcacggtgagcaaataaagctaatctatcaattaaagcaatgattatgttcttcacatttacattctggtgtaactcagcacaggcccgaagaaaaggattcaaagtctggaggtgaaattcatcagggaaaacctgaataatacactccatgagatattcttgagccaaagcatccctacagtttacaacttgctccaatatgc

SEQ ID NO: 45278 - DNA, 692 bp, Homo sapiens
gccgagcccccttctccttgcccttttctttccgttcaccctaaacaccaccggcgaggcgccggctttgaccttccgtagcttccctagcaaggcgtttctctgggcgcgctctgtagccaccctcacactcggtgcccggaaatcgagccctttgcccacggctacttcacgggaccaccctcccgggttaggcataggccctcccggatcttccgcggtgcggtaaccagcgtgagctcgcccgccagaagaatatgaaaaagcagagcgactcggttaagggaaagcgccgagatgacgggctttctgctgccgcccgcaagcagagggactcgggagatcatgcagcagaagcagaaaaaggcaaacgagaagaaggaggaacccaagtagctttgtggcttcgtgtccaaccctcttgcccttcgcctgtgtgcctggagccagtcccaccacgctcgcgtttcctcctgtagtgctcacaggtcccagcaccgatggcattccctttgccctgagtctgcaagcgggtcccttttgtgcttccttcccctcaggtagcctctctccccctgggccactcccgggggtgagggggttaccccttcccagtgttttttattcctgtggggctcaccccaaagtattaaaagtagctttgtaattccttgaaaaaaaaaaaaaaaaaa

SEQ ID NO: 45279 - DNA, 492 bp, Homo sapiens
  misc_feature (1)...(492): n = a,t,c or g
ggtcgacacagtcgctgttggcctggtgtccaagcgtggttgtctatcccgtctacctggccatcctctttctcttccggatgtcccggagcaaggtggctgggagcccgagccccacacctgccgggcagcaggtgctggacgtcgacagctgcctggactcatccgtgctggacagctccttcctcacgttctcaggcctccacgctgaggtgagggctctactgggggtcctgccgccttggcgcagcttggactcaagaccctgtgcacctctcagcaggcctttgctggacagatgaagagtgacttgtttctgggtgattctaagaggttatcaatactctggctgaccatcgtcatcgtgggactgactttggtggaatccttggttacttatcattacngtgtttctganaattataaatttgccatctccccngnaaaanttacctttgggnaantaaanaaantttcggtangggaactttt

SEQ ID NO: 45280 - DNA, 445 bp, Homo sapiens; identical to SEQ ID NO: 18622
  misc_feature (1)...(445): n = a,t,c or g

SEQ ID NO: 45281 - DNA, 5065 bp, Homo sapiens
  misc_feature (1)...(5065): n = a,t,c or g
ttctcccgcaaccttcccttcgctccctcccgtcccccccagctcctagcctccgactccctccccccctcacgcccgccctctcgccttcgccgaaccaaagtggattaattacacgctttctgtttctctccgtgctgttctctcccgctgtgcgcctgcccgcctctcgctgtcctctctccccctcgccctctcttcggcccccccctttcacgttcactctgtctctcccactatctctgcccccctctatccttgatacaacagctgacctcatttcccgataccttttcccccccgaaaagtacaacatctggcccgccccagcccgaagacagcccgtcctccctggacaatcagacgaattctccccccccccccaaaaaaaagccatccccccgctctgccccgtcgcacattcggcccccgcgactcggccagagcggcgctggcagaggagtgtccggcaggagggccaacgcccgctgttcggtttgcgacacgcagcagggaggtgggcggcagcgtcgccggcttccagacaccaatgggaatcccaatggggaagtcgatgctggtgcttctcaccttcttggccttcgcctcgtgctgcattgctgcttaccgccccagtgagaccctgtgcggcggggagctggtggacaccctccagttcgtctgtggggaccgcggcttctacttcagcgacttccagaggcccgcaagccgtgtgagccgtcgcagccgtggcatcgttgaggagtgctgtttccgcagctgtgacctggccctcctggagacgtactgtgctacccccgccaagtccgagagggacgtgtcgacccctccgaccgtgcttccggacaacttccccagataccccgtgggcaagttcttccaatatgacacctggaagcagtccacccagcgcctgcgcaggggccctgcctgccctcctgcgtgcccgccggggtcacgtgctcgccaaggagctcgaggcgttcagggaggccaaacgtcaccgtcccctgattgctctacccacccaagaccccgcccacgggggcgcccccccagagatggccagcaatcggaagtgagcaaaactgccgcaagtctgcagcccggcgccaccatcctgcagcctcctcctgaccacggacgtttccatcaggttccatcccgaaaatctctcggttccacgtccccctggggcttctcctgacccagtccccgtgccccgcctccccgaaacaggctactctcctcggccccctccatcgggctgaggaagcacagcagcatcttcaaacatgtacaaaatcgattggctttaaacacccttcacataccctccccccaaattatccccaattatccccacacataaaaaatcaaaacattaaactaacccccttcccccccccccacaacaaccctcttaaaactaattggctttttagaaacaccccacaaaagctcagaaattggctttaaaaaaaacaaccaccaaaaaaaatcaattggctaaaaaaaaaaagtattaaaaacgaattggctgagaaacaattggcaaaataaaggaatttggcactccccacccccctctttctcttctcccttggactttgagtcaaattggcctgggacttgagtccctgaaccagcaaagagaaaagaagggccccagaaatcacaggtgggcacgtcgctgctaccgccatctcccttctcacgggaattttcagggtaaactggccatccgaaaatagcaacaacccagactgggctcctcactcccttttccatcactaaaaatcacagagcagtcagaggggacccagtaagaccataggaggggaggacagaggcatggaaaaccaaaatccatgcaaatgaaatgtaattggcacgaccctcacccccaaatcttacatctcaattcccatcctaaaaagcactcatactttatgcatccccgcagctacacacacacaacacacagcacacgcatgaacacagcacacacacgagcacagcacacacacgagcatacagcacacacacaaacgcacagcacacacagcacacagatgagcacacagcacacacacaaacgcacagcacacacacgcacacacatgcacacacagcacacaaacgcacggcacacacacgcacacacagtgcgcacacagcacacacgcaaacgcacagnacacacagggcgcacagcagacacgcagacacnngcgcacacacgagcacacagcacacaaacgcacagcacacgcacacacatgcacacacagcacactagcacacagcacacacacaaagacacagcacacacatgcacacacagcacacacacgcgaacacagcacacacgaacacagcacacacagcacacacacaaacacagcacacacatgcacacagcacatgcacacacagcacacacatgaacacagcacacagcacacacatgcacacagcacacacgcatgcacagcacacatgaacacagcacacacaaacacacagcacacacatgcacacacagcacacacactcatgcgcagcacatacatgaacacagctcacagcacacaaacacgcagcacacacgttgcacacgcaagcacccacctgcacacacacatgcgcacacacacgcacacccccacaaaattagatgaaaacaataagcatatctaagcaactacgatatctgtatggatcaggccaaagtcccgctaagattctccaatgttttcatggtctgagcccccctcctgttcccatctccactgcccctcggccctgtctgtgccctgcctctcagaggagggggctcagatggtgcggcctgagtgtgcggccggcggcatttgggatacacccgtaggtgggcggggtgtgtcccaggcctaattccatctttccaccatgacagagatgcccttgtgaggctggcctccttggcgcctgtccccacggcccccgcagcgtgagccacgatgctccccataccccacccattcccgatacaccttacttactgtgtgttggcccagccagagtgaggaaggagtttggccacattggagatggccggtagctgagcagacatgcccccacgagtagcctgactccctggtgagccctgaaaggaagatcttggggacccccccaccggagcacacctagggatcatctttgcccgtctcctggggaccccccaagaaatgtggagtcctcgggggccgtgcactgatgcggggagtgtgggaagtctggcggttggaggggtgggtggggggcagtgggggctgggcggggggagttctggggtaggaagtggtcccgggagattttggatggaaaagtcaggaggattgacagcagacttgcagaattacatagagaaattaggaacccccaaatttcatgtcaattgatctattccccctctttgtttcttggggcatttttcctttttttttttttttgttttttttttacccctccttagctttatgcgctcagaaaccaaattaaaccccccccccatgtaacaggggggcagtgacaaaagcaagaacgcacgaagccagcctggagaccaccacgtcctgccccccgccatttatcgccctgattggattttgtttttcatctgtccctgttgcttgggttgagttgagggtggagcctcctggggggcactggccactgagcccccttggagaagtcagaggggagtggagaaggccactgtccggcctggcttctggggacagtggctggtccccagaagtcctgagggcggaggggggggttgggcagggtctcctcaggtgtcaggagggtgctcggaggccacaggagggggctcctggctggcctgaggctggccggaggggaaggggctagcaggtgtgtaaacagagggttccatcaggctggggcagggtggccgccttccgcacacttgaggaaccctcccctctccctcggtgacatcttgcccgcccctcagcaccctgccttgtctccaggaggtccgaagctctgtgggacctcttgggggcaaggtggggtgaggccggggagtagggaggtcaggcgggtctgagcccacagagcaggagagctgccaggtctgcccatcgaccaggttgcttgggccccggagcccacgggtctggtgatgccatagcagccaccaccgcggcgcctagggctgcggcagggactcggcctctgggaggtttacctcgcccccacttgtgcccccagctcagcccccctgcacgcagcccgactagcagtctagaggcctgaggcttctgggtcctggtgacggggctggcatgaccccgggggtcgtccatgccagtccgcctcagtcgcagagggtccctcggcaagcgccctgtgagtgggccattcggaacattggacagaagcccaaagagccaaattgtcacaattgtggaacccacattggcctgagatccaaaacgcttcgaggcaccccaaattacctgcccattcgtcaggacacccacccacccagtgttatattctgcctcgccggagtgggtgttcccggggggcacttgccgaccaagccccttgcgtccccaggtttgcaagctctcccctgggccactaaccatcctggcccgggctgcctgtctgacctccgtgcctagtcgtggctctccatcttgtctcctccccgtgtccccaatgtcttcagtggggggccccctcttgggtcccctcctctgccatcacctgaagacccccacgccaaacactgaatgtcacctgtgcctgccgcctcggtccaccttgcggcccgtgtttgactcaactcagctcctttaacgctaatatttccggcaaaatcccatgcttgggttttgtctttaaccttgtaacgcttgcaatcccaataaagcattaaaagtcatgctcgtgccgaattcttggcctcgagggccaaattccctatagtgagtcgtattaaattcgtaagcagtcataa

SEQ ID NO: 45282 - DNA, 499 bp, Homo sapiens
  misc_feature (1)...(499): n = a,t,c or g
ttttgaanncngntgnccattacatgattaccgaatttaatacgactcactatagggaatttggccctcgaggccaagaattcggcacgagaaaaaacaaccaccaaaaaaaatcaattggctaaaaaaaaaaagtattaaaaacgaattggctggcctgaggctggccggaggggaaggggctagcaggtgtgtaaacagagggttccatcaggctggggcagggtggccgccttccgcacacttgaggaaccctcccctttccctcggtgacatcttgcccgcccctcagcaccctgccttgtctccaggaggtccgaagctctgtgggacctcttgggggcaaggtggggtgaggccggggagtagggaggtcaggcgggtctgagcccacagagcagganagctgccaggtctgcccatcgaccaggttgcttgggccccggacccacgggtctggtgatgccatagcagccaccaccgcggngcctagggctgg

SEQ ID NO: 45283 - DNA, 1666 bp, Homo sapiens
aggataactaaaaggggtgtttagccaacaagatgtggttcctttcagatttgaaaatattatttccaaattctaaattaatgaaacaatttttcatctttaatgaacaaaagccacaagccttattttatttcagcctctaaaattaaattgattgtggctgctgtcaaacacagacgacttcactttggtatccttggatgagtgtagttgtggaatgaaaaactattggttcatttctttaatattaatataagtttttgctattatgtcaaaagtactttccaatcttaatttcttagtgtctggggtcctgggcattgatttccaagttattttatcttagaatagctcatatgagctgaaaaacaatttattctcttattaagcttctttcttcagaaaagtacccaatttagggtctgcattttaagaattattaacaaatatcttcataaaaatttgggaaaaggagtgtggatagatttaaacataaaaatatggagaatagttctaacagggtttgaattatagcaacaatggattgtgtaagaagtgaatcttatttttatttttaaatgttctaaataggacaatcagagatgacttggttgtagtgtgggaaaccagtagggaccttggggaagctgccaaaccctttctagctctggggctcagctgttaaggaactgctgattcctacaggaacacttggacaatccaatacctaaatgttaaccatcaattaacccagtaaacctgcaagatggaaacgaagatttgttctcacgagtttcacgtgattatttaaagtaagggaaatttcagctgtttatagttctgtcttaactttttcctctcttcattcttttcctctcattttttgtagcacttctggggcccagtagccaactggggtcttcccattgctgccatcaatgatatgaaaaagtctccagagattatcagtgggcggatgacatttgccctctgttgctattctttgacattcatgagatttgcctacaaggtacagcctcggaactggcttctgtttgcatgccacgcaacaaatgaagtagcccagctcatccagggagggcggcttatcaaacacgagatgactaaaacggcatctgcataacaatggaaaaggaagaacaaggtcttgaagggacagcattgccagctgctgctgagtcacagatttcattataaatagcctccctaaggaaaatacactgaatgctatttttactaaccattctatttttatagaaatagctgagagtttctaaaccaactctctgctgccttacaagtattaaatattttacttctttccataaagagtagctcaaaatatgcaattaatttaatactttctgatgatggttttatctgcagtaatatgtatatcatctattagaatttacttaatgaaaaactgaagagaacaaaatttgtaaccactagcacttaagtactcctgattcttaacattgtctttaatgaccacaagacaaccaacagctggccacgtacttaaaattttgtccccactgtttaaaaatgttacctgtgtatttccatgcagtgtatatattgagatgctgtaacttaatggcaataaatgatttaaatatttgttaaaaaaaaaaaaaaa

SEQ ID NO: 45284 - DNA, 458 bp, Homo sapiens
  misc_feature (1)...(458): n = a,t,c or g
gnngntnnnnnngnnnnntttganaaccgttatgacttggatnacagntatgacatgattacgaatttaatacgactcactatagggaatttggccctcgaggccaagaattcggcacgaggcctcctagaggaatcctgctttacggacctcctggaacaggaaagaccctgattgctcgagctgtagcaaatgatactggagccttcttcttcttgatcaatggtcctgagatcatgagcaaattggctggtgagtctgagagcaaccttcgtaaagcctttgaggaggctgtgaacaatgctcctgccatcatcttcattgatgagctagatgccatngctcccanangagagaanactcntggcgaggtggagcggcgcattgtntcacagttgttgaccctcatggatggcctaaagcagagggcacatgtgattgttatggcagcaaccaac

SEQ ID NO: 45285 - DNA, 4998 bp, Homo sapiens
gcggccgcagcgcggtggcgcgtttccccgcggcggccgttggcgtcgcagcgcgccgggcgtaggacgaggagtgcggccgggtccgggacttcgtcgccaagctggccaacaacacgcaccagcatgtgtttgatgatctcagaggctcagtatccttgtcctgggttggagatagcactggggtcattctagtcttgactaccttccatgtaccactggtaattatgacttttggacagtccaagctatatcgaagtgaggattatgggaagaactttaaggatattacagatctcatcaataacacctttattcggactgaatttggcatggctattggtcctgagaactctggaaaggtggtgttaacagcagaggtgtctggaggaagtcgtggaggaagaatcttcagatcatcagattttgcgaagaattttgtgcaaacagatctcccttttcatcctctcactcagatgatgtatagccctcagaattctgattatcttttagctctcagcactgaaaatggcctgtgggtgtccaagaattttgggggaaaatgggaagaaatccacaaagcagtatgtttggccaaatggggatcagacaacaccatcttctttacaacctatgcaaatggctcctgcaaagctgaccttggggctctggaattatggagaacttcagacttgggaaaaagcttcaaaactattggtgtgaaaatctactcatttggtcttgggggacgtttcctttttgcctctgtgatggctgataaggataccacaagaaggatccacgtttcaacagatcaaggggacacatggagcatggcccagctcccctccgtgggacaggaacagttctattctattctggcagcaaatgatgacatggtattcatgcatgtagatgaacctggagacactgggtttggcacaatctttacctcagatgatcgaggcattgtctattccaagtctttggaccgacatctctacactaccacaggcggagagacggactttaccaacgtgacctccctccgcggcgtctacataacaagcgtgctctccgaagataattctatccagaccatgatcacttttgaccaaggaggaaggtggacgcacctgaggaagcctgaaaacagtgaatgtgatgctacagcaaaaaacaagaatgagtgcagccttcatattcatgcttcctacagcatctcccagaaactgaatgttccaatggccccactctcagagccgaaatcgtaggcattgtcattgctcatggtagcgtgggggatgccatctcagtgatggttccagatgtgtacatctcagatgatgggggttactcctggacaaagatgctggaaggaccccactattacaccatcctggattctggaggcatcattgtggccattgagcacagcagccgtcctatcaatgtgattaagttctccacagacgaaggtcaatgctggcaaacctacacgttcaccagggaccccatctatttcactggcctagcttcagaacctggagctaggtccatgaatatcagcatttggggcttcacagaatctttcctgaccagccagtgggtctcctacaccattgattttaaagatatccttgaaaggaactgtgaagagaaggactataccatatggctggcacactccacagaccctgaagattatgaagatggctgcattttgggctacaaagaacagtttctgcggctacgagtcatccgtgtgtcagaatggtcgagactatgttgtgaccaagcagccctccatctgcctctgttccctggaggactttctctgtgattttggctactaccgtccagaaaatgactccaagtgtgtggaacagccagaactgaagggccacgacctggagttttgtctgtacggaagagaagaacacctaacaacaaatgggtaccggaaaattccaggggacaaatgccagggtggggtaaatccagttcgagaagtaaaagacttgaaaaagaaatgcacaagcaactttttgagtccggaaaaacagaattccaagtcaaattctgttccaattatcctggccatcgtgggattgatgctggtcacagtcgtagcaggagtgctcattgtgaagaaatatgtctgtgggggaaggttcctggtgcatcgatactctgtgctgcagcagcatgcagaggccaatggtgtggatggtgtggatgctttggacacagcctcccacactaataaaagtggttatcatgatgactcagatgaggacctcttggaatagctcttcagaggagctggacccagcatggatggtggaaccacagtacctcttacactccctgtggctccaacttcaggaaataaatttcccattgcgagggacccagctctgtttctgctgcttccatcaaagccaaaaggacctacactaaagaaatgcagggtgggggtggggaaccctgagcacttttttacaattggctctgagaaaaagggagacattttaaattctttaacttcttatttctcgtcctgtctctttgcaaagtatgggcttttgtttttgttttttaagggaaacgaaatggaattcgaagggaccttttcactaaccccacttctgtgtgttctgcatggtgcctgccccagggcatctgccaactccagtatcagctctcacagtgtacttggtaccatccctgggctctgctggcgagacgaaacagctgtagagatgaaaacaggctgcagaggctggcacagctggccggcttttctccatctggggacagtcctactccaagaacactgcacaccagctcctcacacagatcccacttacggcgcgcaacgggttctaggctgcaggcagctcgaggacccgcgggccccgccccggctcggcctggcagcatagcagaggcagcaggccgtgccgtgggggcatgttgctgtaaccagtggcccaggggatgttacggtggacagtgcacctggagggcgggccccgcaggtggaaccatgctgcagtggctgtcgggcatcgggtatactccttcgggggttactgctctggtgaagactatgagacactgcgtcagatagatgtgcacattttcaatgcagtgtccttgcgttggacaaagctgcccccggtgaagtctgccatccgtgggcaagctcctgtggtaccctacatgcgctatggacactcaaccgtcctcatcgacgacacagtcctcctttggggcgggcggaatgacaccgaaggggcctgcaatgtgctctatgcctttgacgtcaatacgcacaagtggttcacaccccgagtgtcagggacagttcctggggcccgggatggacattcagcctgtgtcctaggcaagatcatgtacatttttgggggctacgagcagcaggcggactgtttttccaatgacattcacaagctagataccagcaccatgacatggactcttatctgtacaaagggcagccctgcacgctggagggacttccactcagccacaatgctgggaagtcacatgtatgtctttgggggccgtgccgaccgctttgggccattccattccaacaatgagatttactgcaaccgcattcgagtctttgacaccagaactgaggcttggctggactgtccccccgactccagtgctgcctgaggggcgccggagccactcggcctttggctacaatggggagctgtacatctttggtggttataatgcaaggctgaaccggcacttccatgacctctggaagtttaatcctgtgtcctttacctggaaaaagattgaaccgaaggggaaggggccatgtccccgccggcgccagtgctgctgtattgttggtgacaagattgtcctctttgggggtaccagtccatctcctgaggaaggcctgggagatgaatttgaccttatagatcattctgacttacacattttggactttagccctagtctgaagactctgtgcaaactggccgtgattcagtataacctagaccagtcctgtttgcctcatgatatcaggtgggagctgaatgccatgaccaccaacagcaatatcagtcgccccatcgtctcctcccatgggtaggaggaagtttctgccacctcccctcctgagcctgctgtcatcttcactgctcctgtccaccgcccacccaccagtctcaacacatcaccatcaccaccagcaacagcaacagcagcagcagcagcagcagcagcagcagcagcagcagcagcagcatcacggaaactctgggccccctcctcctggagcatttccccacccactggagggcggtagctcccaccacgcacacccttacgccatgtctccctccctggggtctctgaggccctacccaccagggacagcacacctgcccccacctcacagccaggtgtcctacagccaagcaggccccaatggccctccagtctcctcctcttccaactcttcctcttccacttctcaagggtcctacccatgttcacacccctccccttcccagggccctcaaggggcgccctaccctttcccaccggtgcctacggtcaccacctcttcggctaccctttccacggtcattgccaccgtggcttcctcgccagcaggctacaaaacggcctccccacctgggcccccaccgtacggaaagagagccccgtccccgggggcctacaagacagccaccccacccggatacaaacccgggtcgcctccctccttccgaacggggaccccaccgggctatcgaggaacctcgccacctgcaggcccagggaccttcaagccgggctcgcccaccgtgggacctgggcccctgccacctgcggggccctcaggcctgccatcgctgccaccaccacctgcggcccctgcctcagggccgcccctgagcgccacgcagatcaaacaggagcctggaattc

SEQ ID NO: 45286 - DNA, 975 bp, Homo sapiens
accacatgattacgaatttaatacgactcactatagggaatttggccctcgaggccaagaattcggcacgagtggagggtggcccgtaagtttgagggctcaaaggctcttcccactgcttgttactgtgttgcttcccactcccccttgaccccaggcccctgcttctccctctaggagcctaaagaaccctcctggcctccagctcagccttctctcacctactatgtctgtccaacaggtctgcatgggtccctgataatgagaacagctgcctggtcttctctcccagtctgcctagcccagccctgggactggaatttgagtaggggatgaggggaaattgtaatttcattccttaacttccttttccccacccctgctcttcaacctctttatcagttctgaggctggagggtttgggcaaggcaacatccccattccaattccattttctgatgcagattttagctgagggatttggaagccatttggggaggcaggctgggccaaagggtagagctgggtaataaatgtctattctcctggggaggagggattctaaactttccttccgtcctcaatttctacctccatagaccggccagaatttagcttcacttgagagagatctggaatggtcgccatgattgaaaccacgcaccattacatcatcattacattaattacatcaacataaattatttcttcccccttcccttttccagcactcaaccaaggagcaaagctcatcccaccccacacccctcccaggtctgctcactgccaggctcctctcccctttgttcagtggagctggcttttctcccagcccctttccatgcctttcactccatttggcaagctctgagggggagcctggggacgggtttgggtccccaggaggagagccttgggtataatctatttttctaggagcctcttgccttgtcacttgcagctttcgccctctgc

SEQ ID NO: 45287 - DNA, 1277 bp, Homo sapiens
gaattccgcggcggcgcctcaatgcctaaaggaggaagaaagggaggccacaaaggccgggcgaggcagtatacaagccctgaggagatcgacgcgcagctgcaggctgagaagcagaaggccagggcaagaagaggagcaaaaagaaggtggagatggggctgcaggtgaccccaaaaaggagaagaaatctctagactcagatgagagtgaggatgaagaagatgactaccagcaaaagcgcaaaggcgttgaagggctcatcgacatcgagaaccccaaccgggtggcacagacaaccaaaaaggtcacacaactggatctggacgggccaaaggagctttcgaggagagaacgagaagagattgagaagcagaaggcaaaagagcgttacatgaaaatgcacttggccgggaagacagagcaagccaaggctgacctggcccggctggccatcatccggaaacagcgggaggaggctgcccggaagaaggaagaggaaaggaaagcaaaagacgatgccacattgtcaggaaaacgaatgcagtcactctccctgaataagtaactgcgacccgtgggaggagatgccggggacctgggccgcgctgccaggacctctgctgtgtctcgcccaccctgtgccctggcgccgctgcaacagcccctcatggccaggagccccccatggcctggggcctcctcttcatcttggcacagaaattgtttgggggatgggggggggactgggggaggggtagctgctatctttgagacagaaagatgcaggacagcatttcatatgtaaccatttgaatgtttttgctgtttttagaattcagagcccttgctggggggtgcctgggagatggggtaagaagagctttcatttgtctggtagatagatagcatgtaagggggtggttgtcccaggaggcagctgctgacaggtttgctacacacagccccggactgtgttgcctgggtgctcattcagagaggggctatcatctgggagcctgtgcccctgggtcctcgagggtcatggcttgtccctggtcagtcctgtctgactgacctcagggcctcacctctctgcccttccctgcccggttcctactcaccctggctagggccagtgcccattttcagccctacccattgatcatttcaagaaacctctgtttactgtgtggcacccaggcaaaacatgctccacaaattcaacttgtatatttggcagattaaacttgacattatcgtaaaaaaaaaaaaaa

SEQ ID NO: 45288 - DNA, 3093 bp, Homo sapiens
aaatcgacagttttattcttagactcatgtgcatccaagctgtatataccatatataaacattttacatgaatcatttagttttttaattcatttactaatgctataaaatttcctatattaccccagtaatttgcatcagctggtttatatactaaagcaacatgttttgatgagtttcttacatccttatcgaggaattgggttaggaaaaaatacataattgtaaaactgagtttgctgtattatactttttttcttgagtattagttgtattactaatcatatgttgattaactgtctacttaaagtcaaggtacctgtatttttaatccactaatttttttttagttgggaaatagatttcaggtcttttattagactaacattttttgagaagtaaaattgacttcatatacaaagcctgtaattttaggcgaaatggaagcagaaatctaggaagttgtgcttgcttgtatgttgagtttggtctcagactaagtaatgcatcagaattcatctgtttgaagcctggaaataatttaggactctgattcactgaccaaaagtcagtgttgcagagatttctctaccccgtatgggtattttgttaggattgttcaacaggaagcacatgattgagaacatcttgggacagaccaaaaccactgacagatggcaaggctcggcgattctgatttcccttctcaaatctgctcaactccaagagtcttgagaaactgctaaaattttgcctctgtcactcaagtcttacaaatgttatcttgtaaacctttgaggtgaactattccactgtcttgtacataggcatcttattcactgcaccctgtcacacccagcaccccccgccccgcacattatttgaaagactgggaatttaatggttagggacagtaaatctacttctttttccagggacgactgtccccctctaaagttaaagtcaatacaagaaaactgtctattttttagcctaaagtaaaggctgtgaagaaaattcattttacattgggtagacagtaaaaaacaagtaaaataacttgacatgagcacctttagatcccttcccctccatgggctttgggccacagaatgaacctttgaggcctgtaaagtggattgtaatttcctataagctgtaatagtggaggtattgtgggttcatttgagtaagccctccaaagataccattcaaataacctgggagaatgtcataaattattcagataattaacactgcatgaatctgattcagaggcatgcatttacatatgttgccctaattaccatttgatgatcataaatacaagtgaatgacattggacttttagtaacaaacttaatttttaaaaaggtgtagacaatggtggttaaaaaaaaaaaaaaaacaggtaccaggttctgtgtgtttgcaccaagtaattgacatgttttttgtttaatacatgtggaccatgaacagtattcattctcctttttcaaatgatatgctgtagaaaatattccttgaagatgtgagatttaaaaatttttccctttcaatgttgttttaattgtatttcttacttggtttttttgattgatagcacagtgataaatcataatactagacaaaattgtcttctctttcaaaccagagccatatatatgtctgtatatatgggacctactgcttctctgaggaaatgcataatctgttaatatcagacaaaatgagcaattggcagtgctcataatatattccaatttttattggaattttcgatggaatgttatttcaataaagccatgtaaggtgaaactttgataactttttactcttcaagttagggtaaattctgatccaatattcaattcatttgtgtactcccacatgcaaaatgctaaattacaatgcagacattaagaaaaagtattgactggaggggttgaattccttgagaatttattttatagtctaaatcacaaatactttactcaatttagtttttaaaatagtaaactgaatatttttgttgtaagcctatcagagtcaatccttcgtttggaattgttttcctgtttttccttactataaatcatttaaaaactgaattcattttcttagatggcataagtctgtctcttgagaaataagtaaaatactcctattttcagtatctgtagcacctgaaataggtctttgtatagccagaaacaagttatgttgaagttagcttttctttgtcaacagttttggacaataaaaatctgaaagtattaacacttgattttctactggggcccttcaaacttggttggaagaaattcaaccagaatatctacattagagtataatcatgtgtggtagggaagatggactagttaatcaagatttgttgtcacttaaattttttgtgatttttttccaagccagtttttttaaattctaaatgtgttttgaggtatgggtacattaattgtaatgtaaactattatacaactgtttttgcgactttataggcaggtaaattttgctattactattgaatacaaatgacaattcatttatgaccactcaaacagcgttagtaaccatttagtgacaaaggattaaaacatccatctggatgttaattttgaagatgtaaattatatgttgtttaaatttttccaggcatctgaaaaccttatctgctagacaatgtaagattcacacagagttatctgggattctgattttttaaatagtacatatcattaaaccattttctctaaatgtaagaagagcagaaaaaatcttataagattatcagatttttctaatgacacagaaatgtaagaaaaaaatccctttatattgaaaaaagatgcagtcaaagtcttttcagacatgcccaaactttgagaatttcttcaaccatctaatgctataaagatttttgttcttcctgttcacaaccagttgtataacagaaatactagctactgttttccttcctgtgtgtgaagtaatgaatcattgattatgtgacttgttatgtattcaattaaacactaaagaataaaacattcactcctttaaaaaaaaaaa

SEQ ID NO: 45289 - DNA, 1908 bp, Homo sapiens; identical to SEQ ID NO: 1986

SEQ ID NO: 45290 - DNA, 661 bp, Homo sapiens
gcggaggcgcgggtgccgtgctgagagcgcctgcctgtgcgccccgagcggggctgggactcttccaagatgcccacgttcgcacagagaccccggatcgcggaagctcgcgtctcgaaaggcctgcggtctcacgccctgcccgtcctgggttcacggtttttcatcacctgcggctgtcctgcgatcgaccacagctgtgcaggaggggcaggaggtatctgttgctgcagttaccggaacctttgccaggactagtacaggaccacgggctggtagctcagggatgtctcgtctgtgagttacagctgcacgctctccaggaaagaaggaatttcctcttctctggaaaccccaccacacagctggtttctcattggtgctgcttgcccattccctgagctgtgactgccagaggagtgggaggttggtggtgcctccagcccatcaggggcagggccctgggaccgcctgggaacaggaggactatggcacaaaccgagtgagtgatgggagcaacccgcagggctctgccacatccctgtcttcccttcactgacatgaaacgcagaaaaggcagctttgccacaacacaggagcacgcaccgaatgtggccgccagggctctgtccttgaccctgttgccaggactgtttaccaa

SEQ ID NO: 45291 - DNA, 2613 bp, Homo sapiens
cgacttttttttttttttttttagaaaatgtcctacaatgtgcattttattccatatcattatacaatgtttacatatagttaaaactctcaagaaaacgtcctttaccagttgtatgtggtgtctaaatctttaacatgaaggactgaaaagagtggaaatccacactgattgttatcctacagattgtcatgagctgcacgtgtgccaatcagaaaggaatggaagtctcagaagagcagcgtggcttacagacccttgggctttagtgaattcaggcatgcggggatccatagtctcatcttgtagtaaaactcaagacaaaataaattagtgttggacagagttcctacattgtacaatgttgaacaaaagaccacagggggaccttttgttcaaagtagcaccaatccacacctgattgtgtttccaacattaaccttcctgttgactctatcattggcactttgaatggaacttctcctgctttagtgaggattcctacgctgactaagcacactgtgttgctaaactctctacaaagtgtggcagcatcaacccgggaaatggcacatttgaaccaggatcgccctgacatgggcttgcctttttgtatgtgttttccccaccccctgacctagctggtatcttgtggatgtttctgtgacagtggtaaaagtaaataaattgcatttaaggggtaagcaggtgtttaaaaacaaaacaaaacaaaacaaaatgaaagaatgtggtcgcagctaaggaggttttcacatgttgtttaactccagtaaagtctgatccagcatctgatgcatactaaggttttcttctttggcatgagccactttctcttctaagtcatcaatgcttttctccaatttagttactgacctctccgcaaactcagcccgagtctcagcctccttcagcttgtcggaaaggaccttgatctcttcctcatatctgtcttccttctgcgagtacttatcctctgcagccattaatgctttcaaggtctgatccattattcttaattgttcttccagctgtcggacttggccttctgagagctcagcccgctcctctgcacgttccaggtcgctctcaatgatgaccagcttacgggccacctcttcatatttgcggtcggcatcttcagcaatgtgcttggccctctttcagttggatctcctgaatttccattttttcttcatctttttgggctcgactctcaatgactttcatgcctctctcactctcatctgctgccttctcagcttcctccagcttctgcaaagctgttgccagacgctcctgggcacgatccaactcttcctcaaccagctggatgcgtctgttcagagaagctacgtcggcttcagcatcggtggcctttttctctgccagctccagcttctcctgggcatctttgagagcctcagagtatttgtccagttcatcttcggtgcccttgagtttcttttgcagtgacaccagctcatcttccagctgcttgctcctgtcttccgccgccttcttgtcggcctccgcctgctcagctcgatccaaggcgttctccttgtcgagcttcagcatctgcatcttcttcttgatggcgtccatggtggcggcggcgaggggccctggggctgcagcaggagcggcggggcgagcgcgcggtcggcggaggccggagtaagaagactgttagaatgccctcggtaacacagaggctgagagatcctgacataaatccttgtttgtcgatcctgttctaccttttaaatgatgcctctcttatatctgtaaggaatctgatgcttccaccagatgtctggatgaaaataactatgacagggaaaggtgttccacttacttcttgaggtacaaaaactgccggagattctggaattctatcgtgatgcagagaagaaagaacggagtgaagccatttatgcctacggcagcagaaagagatgaaatcttgagagcagtgggaaatatgccctattgaatgtttgcattaaaagtgtttatataacttagaagcagatgaatatttctaataaatgattgctgtaatatttaagactgtacacccctcacccagacagaccttaagttcttcaagtggagacagtgaagtcaccccgtgtcctttttgcttgctctcagtgccatgccgatggtatgttgctgttggctgtgttgtggcatgagtttgcatgactttctggaggcatggagttaggtaaggctacatgagaaattgagcttttccactgggttttgaaagaagagtatgatgtgaacaagtaaagactgaatggggctgagatgaaggcaatgtttccaaggaaaggaaatgttatgagcaagagtgtgaggcaagagaagctggaaccacattcagagagtatcctgtagattgctccacctagaatctcaggtgggtggagcagtggtgggagaagactggaaaggtaagttgaaggtaaggaatgtgtggtgggcctcagatcccaggctcattcctcaaatcacttcttacttccctcacttatctttgtttaaataaggttagtacattcactaggggcaaatgtacta

SEQ ID NO: 45292 - DNA, 1525 bp, Homo sapiens
  misc_feature (1)...(1525): n = a,t,c or g
cttgctcaggaaaattaaactattcacgtttcagatcaagtgttgacagtcaccagtcaagaggagttcttaaagagttttatgttgactgaatattgcacattgagtccccattgagtccctggtgggaaaagtccacaatttcccattgatagctttttactgttgtgaaaaagggaagcgtcagccacacaaaagcctgcatgaccgctgcttcggagaagctctccgaccctaactgcagtcactgttacttgggatcagatcaagcgcagtgaactttttggggattcagtggttattctccacacttcgtaggccatttcaaccaactttgaggcacaaaatgcaggccatcctctatggcaggcaaggccctgcccagttcaggtggaccctactgggacaggattccaagggccagccctgggttccctggctgcaggccaccgtcctgacggttcatcggagcagggccggggctgggcctttcccggcacaagtggctgttctgacagggcccccagtttgtcccatctgaactgctgggaggtttccgggtggccagaggagcaaagctgccttccaagtgcctgtctgtgcctgggagaacagagcaggagcgtcgtgcgggtccaccggcaagttgcatggcgattccaggcgctgaacaactcccctggacccttggggcctgcatctgacttcccagctgcagagtcagaagctgaagtccaggcaactgctttgggcactcccgatcgctcctccctggacacccnggttaccaaagtcagcaaagaagatgcggtaatcgccgcctgatctccacatggtgaacacaacactcccaccaacacctccttgactggtcggtcttcagcaccgggggtgggcaggcaggtgttctgtgttgacgagaattgcacaggctaaacacaaacacggaaccagagtgagaacacctcactcaacggggagcccaggctgctccctaccaggtgacggagcgcgccggggctgtgggtgccaggggctgagtgctagggactcgtcatgagtggggatccccacgttcctgtcactgctgtcaaacagaaggtaaacagtcttatgaatgtatttccttaggaaaacttgtaaaaacttttattaggatatctatttaatactgaactttggcctactttgtgatagactataaacaaattgaggaaatcactatttctcacttctgtattttctcaaaaataattttgttacagagttcaatatactgtgtaccattgatcttctattgtgaaagcaaagaatttcatcaaaatattttaaattatgagtgaaaattgtgtatgttaattttgcagctataatattaatcaaattttgtgtaattctaatcacaaaatgacgtgccttaagtgcccctccagctgtgggttggcagtgtccagacagggagggcccatcaccgaaatcctgaatgattactagaccaattctattaaaaacatttcaaggcaaa

SEQ ID NO: 45293 - DNA, 466 bp, Homo sapiens; identical to SEQ ID NO: 19234
  misc_feature (1)...(466): n = a,t,c or g

SEQ ID NO: 45294 - DNA, 1468 bp, Homo sapiens
  misc_feature (1)...(1468): n = a,t,c or g
gaaaattagaatttaatttgatgttcaaaaacagttccatttttaagggttaaggtggtattttcaagaaaaggcagaacaaataatgcaaaattctcagtaatagtgatacatggatatacttccttttaaattctcagctgcaaaataattgtagacaaaataatggcatttaactaaagatggagcatgatctgtgtacatagcacatgtgaataaaagaaaagctgacagtatattctggtttcaataaaatgacctatcagaaagtagaatttcatccccaagagtatttcagtttatccaatattgagtaagttctgaaacagttttagaaaaaattttctttttgttaaatgtgatgcactgatcaatttttgtcacagcattttcataccttcatggtggactactagtcactgcttccataaatattgtttacagggtgagatttggtttattcatcttaagtgctgtagcaaactgtggttcgagcaacctgtgggaaatctgtgagagggaatggggtgggagatgtgggggaatggtggtcagactgatgacagatcctagaccaatgtaaagaatgtgtatctgtatataaataatttatcaaatagttttctctttgtgtctgtgttagtgtttttaaagctgctcatttcattttgtccaaccaaaaagaaaagggagataactaatgagcttctagtgatgttcaaaattgctgttaatagggcattataccctgcaagttcactgcatgtctgatgcttgggtaaaactagtcttccctgtaaaatgcagattacaggtattaaagcaatctagtgggtatacccgccccttgccttagtaagaggagcagtgaaatgtatatagttgatgttcagtatttccaagtaccatttttatatagtagcttatttgaccataagttcacacatcaaaaaaagattacccttagtgtatgtgttttaatattagaaaattggcatatgtactttatttttgaaaagggaagagatgggtgtggggtggcaatagcattgtgccattttgtcatagaatgtaaaaattggttaactttacaaatgtcagctagttttgactactaattgggggaaattttagataatttttaaattcaaagttatttataaaatgctagaatttgttttaattttttgtattttgagccacttcacatgaagactcagttgcatttttatcgaatacatttttatcaacagttaaagactatggtggttttttcagagtttggctaagaatgttgttaccatcttctttgtttgtggtacaatattttcagtgcaaaagagatgtcattcagttaaaaagacaaacctctagatgtgtaattacatggaaaatactancaatgtgaatgcttttgtagtaaccatcttgtagtacctgtgaaatctataactcagaaatggtcagg

SEQ ID NO: 45295 - DNA, 1709 bp, Homo sapiens
ccatctcatcttcccctttgatgcctcctgtaaatggaattcaatagaaggcatcactatcatttaattcctcattacaagtcagttcttctctgtttggtacgggttgatacttgtttagagccatcagtggagtggaggtggttctgttaacgatggattctgtgattgattggatgtttctgatgaagaggccaaattttagatgtcttggactccaagtgccagttccttcctggtgttcagccactgtgttaatcctccacagggaactgctacctgcttctctggtgagggattccaccggggcaatttcctacccgggagtgctctttggattgcgtcactcgggctggccggagtccgcctcagggatgctccacaggggaggcctaagccgcctaaggggctgcctcggctgtccatcagttacctcgtttcctggtcagggaaccaagaaatgtagcaggacaagccacagacaaaacttctcagacaccgagttgtagaaggaagggctttattcagctgggagcatcagcaagctgctgccttaaaatccaagctccttgaatgcacaatttctgtcccttttaagggctcacaacactaaagatttcacatgaaagggtcatgattgatttgagcaaacaggcggtacatgacaggggctgcatgcactggtggtcagagagaaacagaacagggcagggagtttcacaatgttcttctatagaatgtctggaatctatgaataacatcggtttctaagtcatgagttgatttttaactactaggtttaggccaggcaggcccaggcctggtttcgggcctggcgctgggctgcttgtctttggttctacttccttgttgtttttttcttaaaagaggtactgagtataaaacaatataaaacaatatgagagggtctctctcttccctcatttcccctctttgagactctcactttttatcagtgggagttctcactcttatttttgctacttatgtattttcgtgcaatagattgatagtgatttatatagtatgcttgtgctgaagcattttggtgaactaaggttaagcgacgaagttttttatcatttggagaaatacaggtatcagacaagggagcagtaagcaggttcctattactattattactcttattataagagttttaaatccacctattgctgggaaccattttctaaacatggccccaggatcaaatccatgccacacttgcacgggcacatgtgccagttttgttatatctctaactatgtcttcaactacttgcccttgattatctatgtgtaggcagcaattagtaaggttaaatttcctacagacctctccttcagctgctagcaagtagtcgagagctaatctattttgatagatagcatttctcatctgagtttcttgctgggctaaaacagttaaagctctgccggttttattagtgattatttttaagacagcttgtaactgtatgattcggttgagcatataaatggggggtttgggatccccactagccgtcttgtgcctaagtggcaggcccatagtactgcatgatttttttcagggggccactcatcatctttccagctgcccatagctatgcttctcttttctcgggaagcacagactgggaaagctagaagtgtgcctgttttaagggcactaggaaaaaaggatgg

SEQ ID NO: 45296 - DNA, 1837 bp, Homo sapiens
acatgccccggagcgatgaagatggtcgcgccctggacgcggcttctactccaacagctgctgcttgtgctgccatgtccgcaccggcaccatcctgctcggcgtctggtatctgatcatcaatgctgtggtactgttgattttattgagtgccctggctgatccggatcagtataacttttcaagttctgaactgggaggtgactttgagttcatggatgatgccaacatgtgcattgccattgcgatttctcttctcatgatcctgatatgtgctatggctacttacggagcgtacaagcaacgcgcagcctgggatcatcccattcttctgttaccagatctttgactttgccctgaacatgttggttgcaatcactgtgcttatttatccaaactccattcaggaatacatacggcaactgcctcctaattttccctacagagatgatgtcatgtcagtgaatcctacctgtttggtccttattattcttctgtttattagcattatcttgacttttaagggttacttgattagctgtgtttggaactgctaccgatacatcaatggtaggaactcctctgatgtcctggtttatgttaccagcaatgacactacggtgctgctacccccgtatgatgatgccactgtgaatggtgctgccaaggagccaccgccaccttacgtgtctgcctaagccttcaagtgggcggagctgagggcagcagcttgactttgcagacatctgagcaatagttctgttatttcacttttgccatgagcctctctgagcttgtttgttgctgaaatgctactttttaaaatttagatgttagattgaaaactgtagttttcaacatatgctttgctagaacactgtgatagattaactgtagaattcttcctgtacgattggggatataacgggcttcactaaccttccctaggcattgaaacttcccccaaatctgatggacctagaagtctgcttttgtacctgctgggccccaaagttgggcatttttctctctgttccctctcttttgaaaatgtaaaataaaaccaaaaatagacaactttttcttcagccattccagcatagagaacaaaaccttatggaaacaggaatgtcaattgtgtaatcattgttctaattaggtaaatagaagtccttatgtatgtgttacaagaatttcccccacaacatcctttatgactgaagttcaatgacagtttgtgtttggtggtaaaggattttctccatggcctgaattaagaccattagaaagcaccaggccgtgggagcagtgaccatctactgactgttcttgtggatcttgtgtccagggacatggggtgacatgcctcgtatgtgttagagggtggaatggatgtgtttgggcgctgcatgggatctggtgcccctcttctcctggattcacatccccacccagggcccgcttttactaagtgttctgccctagattggttcaaggaggtcatccaactgacttttatcaagtggaattgggatatatttgatatacttctgcctaacaacatggaaaagggttttcttttccctgcaagctacatcctactgctttgaacttcccaagtatgtctagtcaccttttaaaatgtaaacattttcagaaaaatgaggattgccttccttgtatgcgctttttaccttgactacctgaattgcaagggatttttatatattcatatgttacaaagtcagcaactctcctgttggttcattattgaatgtgctgtaaattaagtcgtttgcaattaaaacaaggtttgcccacatccaaaaaaaaaaaa

SEQ ID NO: 45297 - DNA, 1282 bp, Homo sapiens
ggcagatggagaatggagccgacttgatggaatgaaggcaagtggagggatgtcggaacaggctgctttggctggattagcaccgggtgtaggcgggacacttagtcattctcccttggcccagacgatgccgccgtggagacagctgaggaagcaaaggagcctgctgaagctgacatcactgagctcctgccgggacatgttctccaaaatggccacttacctgactggggaactgacggccaccagtgaagactataagctcctggaaaatatgaataaactcaccagcttgaagtatcttgaaatgaaagatattgctataaacattagtaggaacttaaaggacttaaaccagaaatatgctggactgcagccttatctggatcagatcaatgtcattgaagagcaggtagcagctcttgagcaggcagcttacaagttggatgcatattcaaaaaaactggaagccaagtacaagaagctggagaagcgatgagaaacttatttctatgggacagagtcttttttttttaatgtggaagaatgtcttataaaacctgaatcctgaggctgatgaattgtgaaaattcctcaaaaggaaattatgctggtcatcacaggaacatctcaacgttcgagtaaactggaggactgtggctattcctgaaccttctttgagacagaatccctcagaatctcacacttataacttcctaccttttacttgaatgctttgccatattcaggacagagactctcacaaagttcagaaaacagctggacttaccagtaaaatccaaatgagaggacctattttctctggtagtggttgattactacattaattttccttaagtggctggttttttagttactatgtaaatggtcgtttttctgttaatgatgctaatgtgttgtaaacaagattctaaatttaaaaaggaaaacaaaacaaacttgttctttgcagcttatcaccttgtgaatgtcggtaacttacttttccataatattgccaaataacataaaatcttaaaataattccaagctgagtcttctagattgagcagaaatggtgaaaggagtattgataacttggcgtatgtgatgggcccctcttgtttattttctatgtgagtcacattgacatgcgatcagtttgggaaatgtgatgaaaacaaagactagatgggtatgtgtgtttatgtgttgggtagggaggtgacgattgccactcataaaataaaggattttataaaataccaaaaagaaaaaaaaa

SEQ ID NO: 45298 - DNA, 702 bp, Homo sapiens
gacgaatctaatacgactcactatagggaatttggccctcgaggccaagaattcggcacgagccactgcgcagaccagacttcgctcgtactcgtgcgcctcgcttcgcttttcctccgcaaccatgtctgacaaacccgatatggctgagatcgagaaattcgataagtcgaaactgaagaagacagagacgcaagagaaaaatccactgccttccaaagaaacgattgaacaggagaagcaagcaggcgaatccgtaatgaggcgtgcgccgccaatatgcactgtacattccacaagcattgccttcttattttacttcttttagctgtttaactttgtaagatgcaaagaggttgggatcaagtttaaaatgactgtgctgcccctttcacatcaaagaactactgacaaccgaaggcccgcgcctgcctttccccatctgtctatctatctggctggcagggaaggaaagaactttgcatgttggtgaaggaagaagtggggtggaagaagtggggtgggacgacagtgaaatctagagtaaaaccaagctggcccaaggtgtcctgcaggctgtaatgcagtttaatcagagtgccatttttttttttttgttcaaatgattttaattattggaatgcacaatttttttaatatgcaaataaaaagtttaaaaacttaaaaaaaaaaaaaaaaaaa

SEQ ID NO: 45299 - DNA, 413 bp, Homo sapiens; identical to SEQ ID NO: 19420

SEQ ID NO: 45300 - DNA, 470 bp, Homo sapiens; identical to SEQ ID NO: 19427
  misc_feature (1)...(470): n = a,t,c or g

SEQ ID NO: 45301 - DNA, 438 bp, Homo sapiens
  misc_feature (1)...(438): n = a,t,c or g
tttgaaccttttgacangattacgaatttaatacgactcactatagggaatttggccctcgaggccaagaattcggcacgaggaagaattaattagccatggatgtattcatgaaaggactttcaaaggccaaggagggagttgtggctgctgctgagaaaaccaaacagggtgtggcagaagcagcaggaaagacaaaagagggtgttctctatgtaggtaggtaaaccccaaatgtcagtttggtgcttgttcatgagtgatgggttaggataatcaatactctaaatgctggtagttctctctcttgattcatttttgcatcattgcttgtcaaaaaggtggactgagtcagaggtatgtgtangtaggngaatgngaacntntgnnttnnnctacntnnnttnanngtnnngttgntnnnnngacgntnttcat

SEQ ID NO: 45302 - DNA, 669 bp, Homo sapiens
cggacgcgtgggcggctggtggctgcttccggtaggagagcggtgtagagcgagcaggtctcagctcctcgtcatgtcatacggtcccttagacatgtaccggaacccggggccctcggggccccagctccgggacttcagcagcatcatccagacgtgcagcggcaacatccagcggatcagccaagccactgctcagataaagaatttgatgagccagctaggaactaagcaggactcaagcaagctacaggaaaatctgcaacagttacaacactccacaaatcagctcgccaaggaaacaaatgaattgctgaaagaattagggtccttgccccttcccttatctacttcagaacagcgccagcagagacttcagaaggaacgcctcatgaatgacttctctgcagccttaaacaatttccaggctgtgcagagaagggtatctgaaaaggaaaaggagagtattgccagagcaagagctggatctcgtctttctgcagaagagaggcaaagagaggagcagctggtctcatttgacagccatgaggagtggaaccagatgcagagccaggaggatgaggtggccatcactgagcaggatttggaacttattaaagaaagagaaacggcaattcggcagctggaggctgacattttggatgtcaa

SEQ ID NO: 45303 - DNA, 419 bp, Homo sapiens; identical to SEQ ID NO: 2295

SEQ ID NO: 45304 - DNA, 347 bp, Homo sapiens; identical to SEQ ID NO: 2308
  misc_feature (1)...(347): n = a,t,c or g

SEQ ID NO: 45305 - DNA, 992 bp, Homo sapiens; identical to SEQ ID NO: 2316

SEQ ID NO: 45306 - DNA, 3139 bp, Homo sapiens
cggcctcagaaagccgagtgaggagttggccgtagtgagagggaccgatcccttggggccgccggcggcgagagccgagccgctcctcccaatggcgaagaagacgtacgacctgcttttcaagctgctcctgatcggggattccggagtggggaagacctgcgtcctttttcgtttttcggatgatgccttcaatactacctttatttccaccataggaatagacttcaagatcaaaacagttgaattacaaggaaagaagatcaagctacagatatgggatacagcaggccaggagcgatttcacaccatcacaacctcctactacagaggcgcaatgggtatcatgctagtatatgacatcaccaatggtaaaagttttgaaaacatcagcaaatggcttagaaacatagatgagcatgccaatgaagatgtggaaagaatgttactaggaaacaagtgtgatatggacgacaaaagagttgtacctaaaggaaaaggagaacagattgcaagggagcatggtattaggttttttgagactagtgcaaaagcaaatataaacatcgaaaaggcgttcctcacgttagctgaagatatccttcgaaagacccctgtaaaagagcccaacagtgaaaatgtagatatcagcagtggaggaggcgtgacaggctggaagagcaaatgctgctgagcattctcctgttccatcagttgccatccactaccccgttttctcttcttgctgcaaaataaaccactctgtccatttttaactctaaacagatatttttgtttctcatcttaactatccaagccacctattttatttgttctttcatctgtgactgcttgctgactttatcataattttcttcaaacaaaaaaatgtatagaaaaatcatgtctgtgacttcatttttaaatgtacttgctcagctcaactgcatttcagttgtattatagtccagttcttatcaacattaaaacctatagcaatcatttcaaatctattctgcaaattgtataagaataaagttagaattaacaattttattttgtacaacagtggaattttctgtcatggataatgtgcttgagtccctataatctatagacatgtgatagcaaaagaaacaaacaaaagccaggaaaacactcattttcgccttgaatatgtaaatgggattaattttgtcctgtgccttatgtggaaaggaacttctttggttttccttttttgttctggtggaagcatgtgcaggagacatatcatccaaacataaaccattaaaatgtttgtggtttgcttggctgtaattttcaaagtagttaattgaggacaaagggtaatgcagaagtgatagctttggtttgctgagtcttgttttaagtggccttgatatttaaaactattcctgccaccatttcttctccttggccacttcttccttgcgtctccctgcatgctgctttatttgcttctccctccccaaccacctcatggtatatttaagagtgaaagggacaaactagtaggtttgtcaagtttaatataaagcactgatgtaacttgctaggtaaacggaaagataagttctaactgcctactatccaatgtcagttaattggtgtcttcccccctcatttgctctcttccctaaaatgtgtcccagatgccttcatttgctgttttacttctatgttctgcttttcctcctctctttgttcccttcctgtctatccattgagtttatgaaatggaagagttaactgcatgcactagtgtttggagggtgttgtggtttgtctttctaattaggtgtatagcctattcactttcctagaataaatctcttaacctaaatttgagtagtctgcattttggcaactcctctagcagcttggtagcctagtacaggttgtttttttaaaaaaggaaaagcaggaaggaggagtgaatttaattaacatgtttgccaaatgtattgagatttggcctctgaagaacactttttcagtgttaagtttctttaccttaagattcagaaatactttagaatattattaattttaagtcctgtctttacatccttttggaaaacttgtattaccatgagtttggaaaaaggacaacgaaaggcttttcatgtaaagataagatctttagctatctctaaccctgtccttttttcactgcattttttctagttttgcttcattgcttatcattaggatagggtaagtgaagtttgctatgctgctagcatcctaagatgatacctttgttgaaagaattgtgaatagcatgattcatttctagcagaggctgagtttaggacagcagcttccattgagaagtctttctgtgtcgtgaatagcattttaatgacctcttggctcacataagcaaacaacatagggacgtatctgctatgaaaatccacaaatttttcagatagtgccctaaaaacaattttatatgcctcactggttgttattcttaggttattcccacacttgactttatcattgtttactactagtaaaaagcagcattgccaaataatccctaattttccactaaaaatataatgaaatgatgttaagctttttgaaaagtttaggttaaacctactgttgttagattaatgtatttgttgcttccctttatctggaatgtggcattagcttttttattttaaccctctttaattcttattcaattccatgacttaaggttggagagctaaacactgggatttttggataacagactgacagttttgcataattataatcggcattgtacatagaaaggatatggctaccttttgttaaatctgcactttctaaatatcaaaaaagggaaatgaagtataaatcaatttttgtataatctgtttgaaacatgagttttatttgcttaatattagggctttgccccttttctgtaagtctcttgggatcctgtgtagaagctgttctcattaaacaccaaacagttaagtccattctctggtactagctacaaattcggtttcatattctacttaacaatttaaataaactgaaatatttctagatggtctacttctgttcatataaaaacaaaacttgatttccaaaaaaaaaaaaa

SEQ ID NO: 45307 - DNA, 530 bp, Homo sapiens
  misc_feature (1)...(530): n = a,t,c or g
annaccagctatgacntnattaccaatttaatacgactcactatagggaatttggccctcgaggccaagaattcggcacgagggctgggctggggccccactgcccttcgagatgtgcccttctcagccctgtactggttcaactatgagctggtgaagagctggctcaatgggttcaggccgaaggaccagacttctgtgggcatgagctttgtggctggtggcatctcagggacggtggctgcagtgctgactctaccctttgacgtggtaaagacccaacgccaggtcgctctgggagcgatggaggctgtgagagtgaaccccctgcatgtggactccacctggctgctgctgcggaggatccgggccgagtcggcaccaagggactctttgcaggcttcttcctcggatcatcaaggctgcccctcctgtgccatcatgatcagcacctatganttcggcaaaagctttttcagaggctgaaccangaccggcttctgggcggctgaaaggggcaaggaggcaag

SEQ ID NO: 45308 - DNA, 1935 bp, Homo sapiens
gtgagtacatgtggattttgctgtccacaaatacttgtttcagagttttcatggatacagaggcatggttgaaatgaagctgtgagccttctgctttaaatctgatgtaagaaactcctgttaacaaatagtaagtatgggttaattagccctttgatcaaagcctagctttacattgtttaggatctttggaaaacaattggtttggttgcccactttccgtaggatcaagagcagaacctttcacatggcacagaagaacccaggttgcgcttcatacctgcatattccagccttagcctgccatttctctccttggcactttgtgtcccagcaacactggtctcagttggtcatcctcaaacttgggttccatatccagcctcaggacctctgttcctgttactatggttccttgcatgtcgcctgctcttactaaagagctcgtgtgttttccagcacacttcggtttatctcttgatgatgatgctagtctctccctccgcaagggcgaaaggctgcctgttggtttgtaccagtgtttcctaacgtgtagctgcagtcagtatttggctaagctgttcccaggggctcaacagatgctttcggatgagccttaactgacccaatcctttgtgatgcgggagagattgctaggcctcgctcacctggccagaaccagggaaagaggccgcggttgcagcgcgattccagggatgtggcctggttacctgccttctctgatacgtcaagacaccttcaacaatggcttgcagctgtaccctgttggctgcacccaggacgcccttttcactgctaagcagtcctacctgaggcccaggggctgccagattgacccataaataatctccggcgcctcagatccagaagctgctgagcctgatcttagtgccttctcctttctctgtgtggccccccagcccctttccccactgccttgtgtccaaggccctttccttcatgtatccatggaggagagacaaaaatacacatcaataaaataagatagggaatccataaatagacattcagaagtatggccaacggatttatcttaaaaccaatggaggaagaagagtttcaataaatgttgtggacttccatttgtcaaagaccaaaacaaaggaaccccaaccttacatgtaatacaaacttaactcaaaatggatcatatatctaaatgtaaaatggaaagctataaaactgaaaacagactatctttacaacctaggcgtaggtatagtttttagacattacaccaaaagcacatgccgtaaaagaaaaaatagataaattggtggatttcattaaaattaaaaaactttttctctctgaaaaatcctgttaagctggggcgctgtggttcatgcctgtaatcccagcactttgggaggctgagttgggaagaaattaatagcttgaggccaggagttcaagatcatcctgggcagcaaagtcatacactcttgagggaagagagagaccttctcatattgttttatattgttttatactcagtacctgttttaagaaaaaaacaaggaagtgaaatcaaagacaggcagcccggcaccaggcctgaaaccagccctgggcctgcctggcctaaacctagtagttaaaaatcaacttacgacttagaacctgatgttatccgtagattccaagcattgtataaaaaaattgtgaaactccctgttgtgttctgtaccagtgcatgaaacccctgtcacatatcccctagattgctcaatcaatcacgaccctttcatgtgaaatctttagtgttgtgagcccttaaaagggacagaaattgtgcacttgaggagctcagattttaaggctgtagcttgccgatgctcccagctgaataaagcccttccttctacaaaaaaaaaaaaaaaaagtcgacgc

SEQ ID NO: 45309 - DNA, 472 bp, Homo sapiens
  misc_feature (1)...(472): n = a,t,c or g
ttnnnaaccnttatgacatgattacgaatttaataccgactcactatagggaatttggccctcgaggccaagaattcggcacgagtggttttcaggactgaagcttcaagatggctgaccaggaccctgcgggcatcagccccctccagcaaatggtggcctcaggcaccggggctgtggttacctctctcttcatgacacccctggacgtggtgaaggttcgcctgcagtctcagcggccctccatggccagcggatgccttcgtgaagatcgtgaggcacgagggcaccaggaccctctggagcggcctccccgccaccctggtgatgactgtgccagctaccgccatctacttcactgcctatgaccaactgaaggccttcctgtgtggtcgagccctgacctctgacctctacgcacccatggtggctggcgcgctggcccgncgtgagcatagacttgggcctttga

SEQ ID NO: 45310 - DNA, 4223 bp, Homo sapiens
cagcggcagtggagttcgctgcgcgctgttgggggccacctgtcttttcgcttgtgtccctctttctagtgtcgcgctcgagtcccgacgggccgctccaagcctcgacatgtcgtacaactacgtggtaacggcccagaagcccaccgccgtgaacggctgcgtgaccggacactttacttcggccgaagacttaaacctgttgattgccaaaaacacgagattagagatctatgtggtcaccgccgaggggcttcggcccgtcaaagaggtgggcatgtatgggaagattgcggtcatggagcttttcaggcccaagggggagagcaaggacctgctgtttatcttgacagcgaagtacaatgcctgcatcctggagtataaacagagtggcgagagcattgacatcattacgcgagcccatggcaatgtccaggaccgcattggccgcccctcagagaccggcattattggcatcattgaccctgagtgccggatgattggcctgcgtctctatgatggccttttcaaggttattccactagatcgcgataataaagaactcaaggccttcaacatccgcctggaggagctgcatgtcattgatgtcaagttcctatatggttgccaagcacctactatttgctttgtctaccaggaccctcaggggcggcacgtaaaaacctatgaggtgtctctccgagaaaaggaattcaataagggcccttggaaacaggaaaatgtcgaagctgaagcttccatggtgatcgcagtcccagagccctttgggggggccatcatcattggacaggagtcaatcacctatcacaatggtgacaaatacctggctattgcccctcctatcatcaagcaaagcacgattgtgtgccacaatcgagtggaccctaatggctcaagatacctgctgggagacatggaaggccggctcttcatgctgcttttggagaaggaggaacagatggatggcaccgtcactctcaaggatctccgtgtagaactccttggagagacctctattgctgagtgcttgacataccttgataatggtgttgtgtttgtcgggtctcgcctgggtgactcccagcttgtgaagctcaacgttgacagtaatgaacaaggctcctatgtagtggccatggaaacctttaccaacttaggacccattgtcgatatgtgcgtggtggacctggagaggcaggggcaggggcagctggtcacttgctctggggctttcaaggaaggttctttgcggatcatccggaatggaattggaatccacgagcatgccagcattgacttaccaggcatcaaaggattatggccactgcggtctgaccctaatcgtgagactgatgacactttggtgctctcttttgtgggccagacaagagttctcatgttaaatggagaggaggtagaagaaaccgaactgatgggtttcgtggatgatcagcagactttcttctgtggcaacgtggctcatcagcagcttatccagatcacttcagcatcggtgaggttggtctctcaagaacccaaagctctggtcagtgaatggaaggagcctcaggccaagaacatcagtgtggcctcctgcaatagcagccaggtggtggtggctgtaggcagggccctctactatctgcagatccatcctcaggagctccggcagatcagccacacagagatggaacatgaagtggcttgcttggacatcaccccattaggagacagcaatggactgtcccctctttgtgccattggcctctggacggacatctcggctcgtatcttgaagttgccctcttttgaactactgcacaaggagatgctgggtggagagatcattcctcgctccatcctgatgaccacctttgagagtagccattacctcctttgtgccttgggagatggagcgcttttctactttgggctcaacattgagacaggtctgttgagcgaccgtaagaaggtgactttgggcacccagcccaccgtattgaggacttttcgttctctttctaccaccaacgtctttgcttgttctgaccgccccactgtcatctatagcagcaaccacaaattggtcttctcaaatgtcaacctcaaggaagtgaactacatgtgtcccctcaattcagatggctatcctgacagcctggcgctggccaacaatagcaccctcaccattggcaccatcgatgagatccagaagctgcacattcgcacagttcccctctatgagtctccaaggaagatctgctaccaggaagtgtcccagtgtttcggggtcctctccagccgcattgaagtccaagacacgagtgggggcacgacagccttgaggcccagcgctagcacccaggctctgtccagcagtgtaagctccagcaagctgttctccagcagcactgctcctcatgagacctcctttggagaagaggtggaggtgcacaacctacttatcattgaccaacacacctttgaagtgcttcatgcccaccagtttctgcagaatgaatatgccctcagtctggtttcctgcaagctgggcaaagaccccaacacttacttcattgtgggcacagcaatggtgtatcctgaagaggcagagcccaagcagggtcgcattgtggtctttcagtattcggatggaaaactacagactgtggctgaaaaggaagtgaaaggggccgtgtactctatggtggaatttaacgggaagctgttagccagcatcaatagcacggtgcggctctatgagtggacaacagagaaggagctgcgcactgagtgcaaccactacaacaacatcatggccctctacctgaagaccaagggcgacttcatcctggtgggcgaccttatgcgctcagtgctgctgcttgcctacaagcccatgggaaggaaactttgaagagattgctcgagactttaatcccaactggatgagtgctgtggaaatcttggatgatgacaattttctgggggctgaaaatgcctttaacttgtttgtgtgtcaaaaggatagcgctgccaccactgacgaggagcggcagcacctccaggaggttggtcttttccacctgggcgagtttgtcaatgtcttttgccacggctctctggtaatgcagaatctgggtgagacttccacccccacacaaggctcggtgctcttcggcacggtcaacggcatgatagggctggtgacctcactgtcagagagctggtacaacctcctgctggacatgcagaatcgactcaataaagtcatcaaaagtgtggggaagatcgagcactccttctggagatcctttcacaccgagcggaagacagaaccagccacaggtttcatcgacggtgacttgattgagagtttcctggatattagccgccccaagatgcaggaggtggtggcaaacctacagtatgacgatggcagcggtatgaagcgagaggccactgcagacgacctcatcaaggttgtggaggagctaactccggatccattagccaagggcagggggcccctttgctgaccctccccaaagggctttgccctgctgccctccccctcctctccaccatcgtcttcttggccatgggaggcctttccctaagccagctgcccccagagccacagttcccctatgtggaagtggggcgggcttcatagagacttgggaatgagctgaaggtgaaacattttctcccctggatttttaccagtctcacatgattccagccatcaccttagaccaccaagccttgattggtgttgccagttgtcctccttccggggaaggattttgcagttctttggctgaaaggaagctgtgcgtgtgtgtgtgtgtatgtgtgtgtgtgtatgtgtatctcacactcatgcattgtcctctttttatttagattggcagtgtagggagttgtgggtagtggggaagagggttaggagggtttcattgtctgtgaagtgagaccttccttttacttttcttctattgcctctgagagcatcagcctagaggcctgactgccaagccatgggtagcctgggtgtaaaacctggagatggtggatgatccccacgccacagcccttttgtctctgcaaactgccttcttcggaaagaagaaggtgggaggatgtgaattgttagtttctgagttttaccaaataaagtagaatataagaagaaaggt

SEQ ID NO: 45311 - DNA, 977 bp, Homo sapiens
atttcggcaccaggcaggaaggagcggcggcgacggaggaggaggatggaggcggtggtgttcgtcttctctctcctcgattgttgcgcgctcatcttcctctcggtctacttcataattacattgtctgatttagaatgtgattacattaatgctagatcatgttgctcaaaattaaacaagtgggtaattccagaattgattggccataccattgtcactgtattactgctcatgtcattgcactggttcatcttccttctcaacttacctgttgccacttggaatatatatcgatacattatggtgccgagtggtaacatgggagtgtttgatccaacagaaatacacaatcgagggcagctgaagtcacacatgaaagaagccatgatcaagcttggtttccacttgctctgcttcttcatgtatctttatagtatgatcttagctttgataaatgactgaagctggagaagccgtggttgaagtcagcctacactacagtgcacagttgaggagccagagacttcttaaatcatccttagaaccgtgaccatagcagtatatattttcctcttggaacaaaaaactatttttgctgtatttttaccatataaagtatttaaaaaacatgaattgagtttctgtagatttctagttctcaactttagcctgaacgccaacacttgaaggtgtttttcatcctctgtatgttgaaggtggttatttgtatgtaggaacaggactgccatcccagctttgcatgccaaagaaataaagaacacactttaaagggcaaactgaagagatgagcgagcaaaggtgcccttcaggtctactgaaaagttagagtacaaaacaacactgttgatctggacaaaagaagaaaaattaccctttttgcttgtgttgtgacaacttcatttaatatggtttaaagatttatgagactgtcagctaaaagtcttttcacaaga

SEQ ID NO: 45312 - DNA, 515 bp, Homo sapiens
  misc_feature (1)...(515): n = a,t,c or g
ttntngttnnatnntacgngaantctcgttnccacntgactacgaatttaatacgactcactatagggaatttggccctcgaggccaagaattcggcacgagaacataatgaagcctgactcagctaatgtcacaacatggtgctacttcttcttctttttgttaacagcaacgaaccctagaaatatatcctgtgtacctcactgtccaatatgaaaaccgtaaagtgccttataggaatttgcgtaactaacacaccctgcttcattgacctctacttgctgaaggagaaaaagacagcgataagctttcaatagtggcataccaaatggcacctttgatgaaataaaatatcaatattttctgcaatccaatgcactgatgtgtgaagtgagaactccatcagaaaaccaaagggtgctaggaggtgtgggtgccttccatactgtttgcccattttcattcttgtattataattaattttctacccccagagataaatgtttgtttatatc

SEQ ID NO: 45313 - DNA, 2882 bp, Homo sapiens
gaattcggggcgctacggcggacccggctgggcagttccttccccagaaggagagattcctctgccatggagtcctacgatgtgatcgccaaccagcctggtcgtgatcgacaacggatccggtgtgattaaagctggttttgctggtgatcagatccccaaatactgctttccaaactatgtgggccgacccaagcacgttcgtgtcatggcaggagcccttgaaggcgacatcttcattggccccaaagctgaggagcaccgagggctgctttcaatccgctatcccatggaggcatggcatcgtcaaggattggaacgacatggaacgcatttgggcaatatgtctattctaaggaccaagctgcagactttctcagaggagcatcctgtgctcctgactgaggcgcctttaaacccacgaaaaaaccgggaacgagctgcccgaagttttcttcggagaccttcaatgtggcccgctcttttcatctccatgccaagctgtactcagcctttacgctacaggcaggaccacaggggtggtgctggattctggggatggagtcacccatgctgtgcccatctatgagggctttgccatgccccactccatcatgcgcatcgacatcgcgggccgggacgtctctcgcttcctgcgcctctacctgcgtaaggagggctacgacttccactcatcctctgagtttgagattgtcaaggccataaaagaaagagcctgttacctatccataaacccccaaaaggatgagacgctagagacagagaaagctcagtactacctgcctgatggcagcaccattgagattggtcccttcccgattccgggcccctgagttgctcttcaggcccagatttgattggagaggagagtgaaggcatccacgaggtcctggtgttcgccattcagaagtcagacatggacctgcggcgcacgcttttctctaacattgtcctctcaggaggctctaccctgttcaaaggttttggtgacaggctcctgagtgaagtgaagaaactagctccaaaagatgtgaagatcaggatatctgcacctcaggagagactgtattccacgtggattgggggctccatccttgcctccctggacacctttaagaagatgtgggtctccaaaaaggaatatgaggaagacggtgcccgatccatccacagaaaaaccttctaatgtcgggacatcatcttcacctctctctgaagttaactccactttaaaactcgctttcttgagtcggagtgtttgcgaggaactgcctgtgtgtgagtgcgtgtgtggatatgagtgtgtgcgcacatgcgagtgccgtgtggccctggggaccctggggcccagaaaggacgatgaactacccgcagtggtgatgggcctgaggcctggggttgaccactaactggctcctgacagggaagagcgctggcagaggctgtgctccctcctcaggtggcctctggctggctgtgggggactggctgtgggggactccgtttactaccacagggagacagagggaggtaagccatcccccgggagaccttgctgctgaccatcctaggctgggctgggccccaccctcacccccacccccaggggtgccctgaggccccaggcagctgctgcctccactatcgatgcctcctgactgcacactgaggactgggactggggttgagttctgtctggttttgttgccattttggtttgggaggctggaaaagcaccccaagagctattacagagactggagtcaggagagagcaggaggccctcatgttcaccagggaacaggaccacaccggccactgaaggagggcaggagcagtcctccctctgaatggctgcagagttaatgttcccagcccagtcccctttcgggggccttgggagagtttaaggcacctgctggttccaggacctcgctttccatctgttcttgttgcaatgccatcttcaaaccgttttatttattgaagtgtttgttcagttaggggctggagagagggagcttgctgcctcctgccttgctacactaatgtttacagcacctaagcttagcctccagggccccacctctcccagctgatggtgagctgacagtgtccacaggttccaggaccatttgagattggaagctacactcaaagacactcccaccaggctctttctcccttttcctcttgctcactgccctggaatcaacaggctggttgctggttagattttctgaaacaggaggtaaaatttttgctttggcagaggcccctaagcaagggaggggtgttggagagccagtgcccttaagactggagaaagctgcaatttaccaagttgccttttgccactgtagctgaccaggggactaggttgtagaggtgggaaggccccctctgggcttgatcttgtgccattcttgaccttggacctgcttggttaaggagggagtgggccagaccagagtgccaggagctaatggagccaggcctgactcctaggagtggtccaaaggccttcagcctagatggtgcaaagctggggccagcctgtcttcaccggcaccctcacctgtgacaccaagacccaccccaatcccagacttcacacagtattctcccccacgccgtcctatgaccaaaggcccctgccaggtgtgggccacagcagcaggtatgtgtgaaagcaacgtagcgccccgcggactgcagtgcgcttaaccaactcacctcccttctcttagcccaagcctgtccctcgcacagcctcgcacaaaccacattgcctggtggggcccagtgtactgaaataaagtcgttccgatagacacgtcaaaaaaaaaaaacccgaattc

SEQ ID NO: 45314 - DNA, 465 bp, Homo sapiens; identical to SEQ ID NO: 19846
  misc_feature (1)...(465): n = a,t,c or g

SEQ ID NO: 45315 - DNA, 5409 bp, Homo sapiens
  misc_feature (1)...(5409): n = a,t,c or g
tttttttttagaagtacaactcatgtcgagacatgtatttattattatgctttgatatgcaatcccaggtattctgatctggagtaaaaagcaaactaaatgaagacaacttttagaaactgatgtttattttccatcaaccatttttccatgctgcttaagagcctatgcaagaacagcttaagaccagtcagtggttgctcctacccattcagtggcctgagcagtgggagctgcagaccagtcttccgtggcaggctgagcgctccagtcttcagtagggaattgctgaataggcacagagggcacctgtacaccttcagaccagtctgcaacctcaggctgagtagcagtgaactcaggagcgggagcagtccattcaccctgaaattcctccttggtcactgccttctcagcagcagcctgctcttctttttcaatctcttcaggatctctgtagaagtacagatcaggcatgacctcccatgggtgttcacgggaaatggtgccacgcatgcgcagaacttcccgagccagcatccaccacatcaaacccactgagtgagctcccttgttgttgcatgggatggcaatgtccacatagcgcagaggagaatctgtgttacacagcgcaatggtaggtaggttaacataagatgcctccgtgagaggctggtggtcagccctggggtcagtaaccacaagaaagccgtggctcccggaaggctgcctggatctggttagtgaaggttccaggagtgaagcggccagcaattggagtggctccagtggcagcagcaaacttcaagcacagccctctttgaagaatttaaaagttagtggtactcgatattccacagcaacaatcctggcacccagtaagcacttctgggcactggccaacttaatcactactactccatgtaaagcaggcacatacccagctttccttaacccctcttacttctccagagatttccttgcatacattaaaaaagacaggcttgtttttctactatatatcccgagcacctagcaacactacctggcccaatctagatgctcagtatatttttctcaagcaagcaagaactgtcactcagttcattctacagcaataactaactgccttttttctactgtgtaccaaactatgtggtcctagtaacaagtcagtttcaggaataaccctctgcaaaaacacacatgggaaccgtcctgtcaacattgaaataaagtcttactacataatttttaaatctgtcaaaatagttaagatgaataaaatccctgttagaactcttagaattcaagaaatctactagttttctcaacagaaaaaattattaaaatagagctgtggcaaaaaagattcaagttttactaactagtcatttcttaaaaatacaaattaaggtatttttcattcaagttggcagaggttctctttgagacaaggcctcactctgtcactcaggctgggatgccagtggnnnnnnnnnnnnnnnnnnnnnnnnnnnnnnnnnnnnnnnnnnnnnnnnnnnnnnnnnnnnnnagcgtgagactacaggcacgccaannnnnnnnnnnnnnnnnnnnnnnnnnnnnnnnnnnnnnnnnnnnnnnnnnnnnnnnnnnnnnnnnnnnnnnnnnnnnnnnnnnnnnncaagccaccagccctcagcctcacaaagtaccccatattacaaaagcatgagccacccatgactggctttttttttttaagaaacaggatctcactctgtgccccaggcttggagtgcagtggcaaaatcataacttactgcagcccccagctcctggacttgagggatctcctggctcagactcccaattaacggggaaactatggggtgcatgccatcatgactggcctaagattcttaaaaaatttctgtcccaggtatttcattgttttaaggtaaaaactttgaccatgggaaaatgtgataagccactttaatagaatttctagatatttagtggccaccaagtctacacaaaatgaaattataaagttcaacatattgcccagatgcccagcatgtatgttgaaaaggtcttacannnnnnnnnnnnnnnnnnnnnnnnnnnnnnnnnnnnnnnnnnnnnnnnnnnnnnnnnnnnnnnnnnnnnnnnnnnnnnnnnnnnnnnnnnnnnnnnnnnnnnnnnnnnnnnnnnnnnnnnnnnnnnnnnnnnnnnnnnnnnnnnnnnnnnnnnnnnnnnnnnnnnnnnnnnnnnnnnnnnnnnnnnnnnnnnnnnnnnttgagcttaggaggcaaaggctgcaatgagccgantatcacaccactgcagtccaggatgggccaacaggcaacagagcgagagactgtctttgaaggaaaaaaaaaaaaaaaaaaggaaggtcataggtcataagggcgatttctatggctcagtccaacttaagatctctaacagtggagtttgagttttactatttctttttttttttttttttgagacagagctctggcctcctgccaccccaggcctggagtaaccagtggccggcatctcagctcactgcaagctcccgcccaccgggttcaccgccattctccaccttggcctccccgagtagnnnnnnnnnnnnnnnnnnnnnnnnnnnnnnnnnnnnnnnnnnnnnnnnnnnnnnnnnnnnnnnnnnnnnnnnnnnnnnnnnnnnnnnnnnnnnnnnnnnnnnnnnnnnnnnnnnnnnnnnnnnnnnnngattacaggcgtnagccacgcgccccgggcctgagttatttctgttttcttatgtctttctatatgtctcacaatgtctgtaaggctttatttctataatataaaaactaaccactgttccacaaacctggccagtattcctggaggatataacactgacatcagcagggttttcaatggcaacaattgcacgagctgccagcagaagcttctcccaggtcctcttgagatttatgatatagatgcctaagtgagggcagaaggatttgtaacacttaacctggctgtgcaaacattcttctcaagtttactctatgtggcagcgagtactaccaaactccagtcatagaggcaagctctactggtgttagcgaaaatcctgccattgatatagcacacttccgacactcagaagttcatgagccaagactggcctccaccctgagctttaatagtgtgcagcctagattcagttggctaatccatctttcctttctctttccctgtacttattccatcattggttcttaagatcacttctggctttctgccactctttcccttttatcatctgcactgatgcaagattcatcctaaaactcctttacagcatgtcactcccaagtccttggtagctttatctctaaaataagtaagtgccttagccaacttaatgccttccatcctctggttcttccaaaccatattgttcattcccacctcttaccccactttccactcaaaattcagttcaatagcctgtgtaagtacctatgaagttgaaggcactatgcgagctattagaaactcagccaatgaactttctcatgttcatgacccaacccaagtcccgtaactcagacaactgacatattctcccctggagcagaaatcttctctctcaataacaagaacatttatttaaagtatgttttcaacgtaggggtctggcttcatttaaggaagatagaaagaaattacccagaactaaccacgagaatagcaagctcaaaatttgtacttacagctggagtaacaaaaaattaaagcaatgactaaccatcacttttccttttatagatgtactgttccatctggaagtcaagattggtgccacctaagtgggttcctgctgcaaggaacttaaggacatcctcctccttcatttgcaggacatcaagggctccggacattgtgaaagtttccctttaagttacgacgggaatctgaaataagagagcaacctatttcttttcattccattgagttaagtagggcacacccttaaaagcaaccaaaaactccatctgctatagtgtcaggcattgagcttacagtgtagtgaagggtaaacagaaagttaacccatacatgtcgtgtattacggaacagcgcacatcttactgaggaaatagtgtggacggcagagtaaccgagtaataaaactacacgaaattagcgaatggaaattcaacacttctcaagataggaattaaggaaaagttgtggatgcgccaagttaacaactagatataaaagagcagccatgtttggaatatgcaaactaaaggcaaaaaaggcatgaattgttttcagacattttcaagcagattggtaggcggatgctttggaattacttcgctgtgctgtcaccacttgtttgtctaaaaacccgagaaccttaactcctgacccgcacggcgcgaagggaaaacccgaccagcccaagtagctggtgtaaatcagcgcctgggcctcgactcaccgccgtgtgggactccgaagatagcaacacaggatgttagcccgctttctgcactcccgcccacccgcggcctggtccgaaccccagctcggagcctccgctggagggcggcctccacccgctcccggggcactctgggaacccgccgcccgagcctgccacgtgcccggcaggcctaaggtggggcgcgccgggcgggagacagatccagtctgaccggctttcatcactagtcttctcacccttcatttgagcaggaaaagctcatttttctagccctggaaggcgccagggacgctacacggaactcacccagaacaacgccgtatggacccctctgcaggtagcacggaaaagacaggcagcaggaaatgacgtccttatgtactccgttgtcagccaatggcaaagaaagtcgagcggaagaagggcggagccggagaagaacgctgccgggactgggctttttcttcaggaaggcgggcttgcgcgcaggagcgggcttctgggctgtcacgggtagcggcatcctggtcggatctggggcgcttgtgactttggggtttctagtgccacagcgacgccctgtgcataattcctgtccagagcgcggaactcaagttagtcagccaggcggggcgttcttacccagcccttgtacctgcgaatatgagcgctttctagcctaagctgccattttgttacctgaaaagtaggaaggtttgttcgacacaacaaattgttaggtaaacaaaaacttgaagatttattttattttattttcctggagaacagtttaacaggacgtaattcagatttaaatgttcacttaagggaagttttctctgaaaaagttaaaaaagacaagattgaactgatcgtatgcgtta

SEQ ID NO: 45316 - DNA, 1771 bp, Homo sapiens
tctggaactacttcaagtgagaaaataaaaaaaaatggtgacaaagctgtacagatagagataatagaagacaaagagattaaaaggaaataaaaatgcatgattaaaaactaagaataaaaaacctatttttatgtttcctaaaggaaattgtttattctacagactcagtaggtagacacaaacataaagatttccctagaagacatagagtgggatttgataacactgtctgttattttctgtacattgtggtaggtccaggaaatatgacattttcccccttgatgtgttattgttgttgttgggtggggtgggcattttgtttatttgtttggtggcaatcagtggtagtagggagtgggagggcttatattggtttttccagctattaaggggacatattgtgtcgttgtgcttttcacgttataaaatgtttatatttaccagtacagcactgggctttataaagactgcactcagaaccacactgcacagtccagttttttaaaaagctgctacatgacagacaggtaatcccactgagtgagttttgagaaacaaatcaaacgaagtaaacaagaaacataaaaaccaaatagcaaatgaataaaagcctgttcttgtaacttattcaacttttgccaaattcctaccaatcacttgctttttaaaagaaatgtataatagccaaaagagaaattatgtccctgttgtacagaagttagaatttttgactccaggcagcagtttgcttcagtgatcttggaacaagttatccaattgcctctacatttgcatcagtttctctagctgcaaaatgggggataatactatatacctacctcacagtgggagggcaggagattttgaggccctgaggttttaggtggggctgtgaggggccaacgcttgacacaaagtccatgggttattattcaagaatggcacaggcccatcgggcttttttagaaagacaagacaggggagtgcttgtttgatatttcaaggaataaaggccggagctcctgaattgtagtccaccttaaaagagagacctgtattggagaatattttatttttttggcaaatttgatcttaccctttaccagttctataatttggttaaaagctgattacgtcctacaatgtcaaagtcagctaactgtcgtctacttaagacttctggtcatttccaacttatagaggaagggagtctctaaaatctcctcctccagaaggcacctcacttctcagacttaaaattcccacatcaagtgttccattaaaagaagataaggcattctgagtgcaaacaaatgggggcttcttaaactacacaccagcagtcagtgaggaaaactttgaacaattattgagttgctttcttgggtctctataatcaataacctgtctgcagatatctatctatataaagatattatatataaatataaatttacatatatatggcacatgtatatatagttgtacatatatgtgtgtatatatatacttaaatgtaatatttacaaaataaaactgtgatctcgtctagagaaaatgtattcatattacaaactgctcttccatatttatgtaccatattatacctttttattgttgttataattattatgggtatttctaattaatatgatgttgaaacctgtttggcaccttctggaagctaccaaaaaaatgacactccattgaagtgcttaaaagctgttctcataagaattctactggcctattgtaaaaaagaaaa

SEQ ID NO: 45317 - DNA, 1800 bp, Homo sapiens
ttttttattttaagtctataagctttattgatactttgcttttacagttcacaatgcattccacagatttagttcagtacagcttaaaccacaatggtataaatcttcattttgtaattaataatttcttgcataacaatgtttgatatttgcaaacaaacaacatttttggaagcattagattcagtccatagattctgtgacaaaattaactacagtcagtcagtctgtgcaatgaaattgatgttgttggagttctatgtgtgtggcatttcatgttgaaaacagatggtagtgctcctagaaatatttcttcttctagcttatgtgctttggaactacacatgtataaccaatgactgactctgaaatatcaagcactgtggggtggctggaaggtaaaggtctaagctttgtgaaacactatacatatataatctatatttacttatattggcaattaatataacagtaaaagtcacaatacacctagaacataccagaaaagcaagctttgtcattcctgctttaccggtatgatctcgtctaaacaaacatttcatttcagaaaatctgcatcaatctacacggaccatacacagtgcacaaactgaaaagggcttttttttttttttttctagctccaccatctctgcaacttgccaagatgcggcaagactatctgcaacaaagtaaaatatacaggttttttattccaccagtgcctcagatagataggaaaaagatatgattacggtttaaatccatacatagcagcttacaatacttaagatgatgaacacatggcagtcaagacaggtaatttttcctcacaacagtgcatggctaaaaataaagatctaacaacgatctgtgaaactgcactgcaacgtcaagggttcgttcttccctgaccctcccccgtataatcaaatgaatatcccctttaaagatgaactcctactaattattttggggcgttttcattccagctttgcgcttcaatcccagggatttttgcttggattttagccatagcatctttaacattcttatttgcaagtcctagataatgatctatctgtgcctgatgccgttcataaataacaggaacactgaagagtgaaatgagagccaaaatcagtagtgtcagaccattaaaccaaggcaccaacataggtaaatacccacatcaacactgcaaacttcagagaatcaactaaatcatcaactaagaagaggcgcctgagttcctttatcgtgcagttcacatgaccaagagcagaattactgtacttctgaaccaactcctcagatatagcaacttcagattccagatatgccctgaatgggtggccttcatctgatttctggatagcttggatcacacccttgtatatcctaaagctgatggtcacagagagcagggccaaggcaatgtaggctgttacgctcacaatgctgaatactgtcaatgaaagcagcaggaataggctggcaccaaacaccactccagtcttcttaatgtctctccagtacaggaggtcaacaaccttgtccttccaatttttcttctgaccgtccatctcttgtcacgatctgctttgcagctccaattattaattatgcataccaacagaaaagctgtaactgcacaaacctactccctgagacatgaaatacccgtttcctcaaccgaagtctgcagtctcctctgctgcacaactgcagcaggactgaagtcacctgacgtcttctgggtgtggaacagtctgacgcagtgcaatctgtaactaggct

SEQ ID NO: 45318 - DNA, 5501 bp, Homo sapiens
cgggcccggtgctgaagggcagggaacaacttgatggtgctactttgaactgcttttcttttctcctttttgcacaaagagtctcatgtctgatatttagacatgatgagctttgtgcaaaaggggagctggctacttctcgctctgcttcatcccactattattttggcacaacaggaagctgttgaaggaggatgttcccatcttggtcagtcctatgcggatagagatgtctggaagccagaaccatgccaaatatgtgtctgtgactcaggatccgttctctgcgatgacataatatgtgacgatcaagaattagactgccccaacccagaaattccatttggagaatgttgtgcagtttgcccacagcctccaactgctcctactcgccctcctaatggtcaaggacctcaaggccccaagggagatccaggccctcctggtattcctgggagaaatggtgaccctggtattccaggacaaccagggtcccctggttctcctggcccccctggaatctgtgaatcatgccctactggtcctcagaactattctccccagtatgattcatatgatgtcaagtctggagtagcagtaggaggactcgcaggctatcctggaccagctggccccccaggccctcccggtccccctggtacatctggtcatcctggttcccctggatctccaggataccaaggaccccctggtgaacctgggcaagctggtccttcaggccctccaggacctcctggtgctataggtccatctggtcctgctggaaaagatggagaatcaggtagacccggacgacctggagagcgaggattgcctggacctccaggtatcaaaggtccagctgggatacctggattccctggtatgaaaggacacagaggcttcgatggacgaaatggagaaaagggtgaaacaggtgctcctggattaaagggtgaaaatggtcttccaggcgaaaatggagctcctggacccatgggtccaagaggggctcctggtgagcgaggacggccaggacttcctggggctgcaggtgctcggggtaatgacggtgctcgaggcagtgatggtcaaccaggccctcctggtcctcctggaactgccggattccctggatcccctggtgctaagggtgaagttggacctgcagggtctcctggttcaaatggtgcccctggacaaagaggagaacctggacctcagggacacgctggtgctcaaggtcctcctggccctcctgggattaatggtagtcctggtggtaaaggcgaaatgggtcccgctggcattcctggagctcctggactgatgggagcccggggtcctccaggaccagccggtgctaatggtgctcctggactgcgaggtggtgcaggtgagcctggtaagaatggtgccaaaggagagcccggaccacgtggtgaacgcggtgaggctggtattccaggtgttccaggagctaaaggcgaagatggcaaggatggatcacctggagaacctggtgcaaatgggcttccaggagctgcaggagaaaggggtgcccctgggttccgaggacctgctggaccaaatggcatcccaggagaaaagggtcctgctggagagcgtggtgctccaggccctgcagggcccagaggagctgctggagaacctggcagagatggcgtccctggaggtccaggaatgaggggcatgcccggaagtccaggaggaccaggaagtgatgggaaaccagggcctcccggaagtcaaggagaaagtggtcgaccaggtcctcctgggccatctggtccccgaggtcagcctggtgtcatgggcttccccggtcctaaaggaaatgatggtgctcctggtaagaatggagaacgaggtggccctggaggacctggccctcagggtcctcctggaaagaatggtgaaactggacctcaaggacccccagggcctactgggcctggtggtgacaaaggagacacaggaccccctggtccacaaggattacaaggcttgcctggtacaggtggtcctccaggagaaaatggaaaacctggggaaccaggtccaaagggtgatgccggtgcacctggagctccaggaggcaagggtgatgctggtgcccctggtgaacgtggacctcctggattggcaggggccccaggacttagaggtggagctggtccccctggtcccgaaggaggaaagggtgctgctggtcctcctgggccacctggtgctgctggtactcctggtctgcaaggaatgcctggagaaagaggaggtcttggaagtcctggtccaaagggtgacaagggtgaaccaggcggcccaggtgctgatggtgtcccagggaaagatggcccaaggggtcctactggtcctattggtcctcctggcccagctggccagcctggagataagggtgaaggtggtgcccccggacttccaggtatagctggacctcgtggtagccctggtgagagaggtgaaactggccctccaggacctgctggtttccctggtgctcctggacagaatggtgaacctggtggtaaaggagaaagaggggctccgggtgagaaaggtgaaggaggccctcctggagttgcaggaccccctggaggttctggacctgctggtcctcctggtccccaaggtgtcaaaggtgaacgtggcagtcctggtggacctggtgctgctggcttccctggtgctcgtggtcttcctggtcctcctggtagtaatggtaacccaggacccccaggtcccagcggttctccaggcaaggatgggcccccaggtcctgcgggtaacactggtgctcctggcagccctggagtgtctggaccaaaaggtgatgctggccaaccaggagagaagggatcgcctggtgcccagggcccaccaggagctccaggcccacttgggattgctgggatcactggagcacggggtcttgcaggaccaccaggcatgccaggtcctaggggaagccctggccctcagggtgtcaagggtgaaagtgggaaaccaggagctaacggtctcagtggagaacgtggtccccctggaccccagggtcttcctggtctggctggtacagctggtgaacctggaagagatggaaaccctggatcagatggtcttccaggccgagatggatctcctggtggcaagggtgatcgtggtgaaaatggctctcctggtgcccctggcgctccctggtcatcccaggcccacctggtcctgtcggtccagctggaaagagtggtgacagaggagaaagtggccctgctggccctgctggtgctcccggtcctgctggttcccgaggtgctcctggtcctcaaggcccacgtggtgacaaaggtgaaacaggtgaacgtggagctgctggcatcaaaggacatcgaggattccctggtaatccaggtgccccaggttctccaggccctgctggtcagcagggtgcaatcggcagtccaggacctgcaggccccagaggacctgttggacccagtggacctcctggcaaagatggaaccagtggacatccaggtcccattggaccaccagggcctcgaggtaacagaggtgaaagaggatctgagggctccccaggccacccagggcaaccaggccctcctggacctcctggtgcccctggtccttgctgtggtggtgttggagccgctgccattgctgggattggaggtgaaaaagctggcggttttgccccgtattatggagatgaaccaatggatttcaaaatcaacaccgatgagattatgacttcactcaagtctgttaatggacaaatagaaagcctcattagtcctgatggttctcgtaaaaaccccgctagaaactgcagagacctgaaattctgccatcctgaactcaagagtggagaatactgggttgaccctaaccaaggatgcaaattggatgctatcaaggtattctgtaatatggaactggggaaacatgcataagtgccaatcctttgaatgttccacggaaacactggtggacagattctagtgctgagaagaaacacgtttggtttggagagtccatggatggtggttttcagtttagctacggcaatcctgaacttcctgaagatgtccttgatgtgcagctggcattccttcgacttctctccagccgagcttcccagaacatcacatatcactgcaaaaatagcattgcatacatggatcaggccagtggaaatgtaaagaaggccctgaagctgatgggggtcaaatgaaggtgaattcaaggctgaaggaaatagcaaattcacctacacagttctggaggatggttgcacgaaacacactggggaatggagcaaaacagtctttgaatatccgaacacggcaagggctgtgagactacctattgtagatattgcaccctatgacattggtggtcctgatcaagaatttgggtgtggacgttggccctgtttgctttttataaaccaaactctatctgaaatcccaacaaaaaaaatttaactccatatgtgttcctcttgttctaatcttgtcaaccagtggcaagtgaccgacaaaattccagttatttatttccaaaatgtttggaaacagtataatttgacaaagaaaaatgatacttctcttttttttgctgttccaccaaatacaattcaaatgctttttgttttatttttttaccaattccaatttcaaaatgtctcaatggtgctataataaataaacttcaacactctttatgataacaacactgtgttatattctttgaatcctagcccatctgcagagcaatgactgtgctcaccagtaaaagataacctttctttctgaaatagtcaaatacgaaattagaaaagccctccctattttaactacctcaactggtcagaaacacagattgtattctatgagtcccagaagatgaaaaaaattttatacgttgataaaacttataaatttcattgattaatctcctggaagattggtttaaaaagaaaagtgtaatgcaagaatttaaagaaatatttttaaagccacaattattttaatattggatatcaactgcttgtaaaggtgctcctcttttttcttgtcattgctggtcaagattactaatatttgggaaggctttaaagacgcatgttatggtgctaatgtactttcacttttaaactctagatcagaattgttgacttgcattcagaacataaatgcacaaaatctgtacatgtctcccatcagaaagattcattggcatgccacaggggattctcctccttcatcctgtaaaggtcaacaataaaaaccaaattatggggctgcttttgtcacactagcatagagaatgtgttgaaatttaactttgtaagcttgtatgtggttgttgatcttttttttccttacagacacccataataaaatatcatattaaaattcaaaaaaaaaaaaaaaaaa

SEQ ID NO: 45319 - DNA, 2647 bp, Homo sapiens
agaagagtatattggtgacatgtacagccatgatgggaatactgatgagccagaatgggtaaagacagagcgagacagttttgttgagtttcgggataagaaccgtgatgggaagatggacaaggaagagaccaaagactggatccttccctcagactatgatcatgcagaggcaagccaggcacctggtctatgaatcagaccaaaacaaggatggcaagcttaccaaggaggagatcgttgacaagtatgacttatttgttggcagccagggcccacagattttggggaggccttagtacggcatgatgagttctgagctgcggaggaaccctcatttcctcaaaagtaatttatttttacagcttctggtttcacatgaaattgtttgcgctactgagactgttactacaaactttttaagacatgaaaaggcgtaatgaaaaccatcccgtccccattcctcctcctctctgagggactggagggaagccgtgcttctgaggaacaactctaattagtacacttgtgtttgtagatttacactttgtattatgtattaacatggcgtgtttatttttgtatttttctctggttgggagtatgatatgaaggatcaagatcctcaactcacacatgtagacaaacattagctctttactctttctcaaccccttatatgattttaataattctcacttaactaattttgtaagcctgagatcaataagaaatgttcaggagagaggaaagaaaaaaaatatatgctccacaatttatatttagagagagaacacttagtcttgcctgtcaaaaagtccaacatttcataggtagtaggggccacatattacattcagttgctataggtccagcaactgaacctgccattacctgggcaaggaaagatccctttgctctaggaaagcttggccccaaattgattttcttctttttccccctgtaggactgactgttggctaattttgtcaagcacagctgtggtgggaagagttagggccagtgtcttgaaaatcaatcaagtagtgaatgtgatctctttgcagagctatagatagaaacagctggaaaactaaaggaaaaatacaagtgttttcggggcatacattttttttctgggtgtgcatctgttgaaatgctcaagacttaattatttgccttttgaaatcactgtaaatgcccccatccggttcctcttcttcccaggtgtgccaaggaattaatcttggtttcactacaattaaaattcactcctttccaatcatgtcattgaaagtgcctttaacgaaagaaatggtcactgaatgggaattctcttaagaaaccctgagattaaaaaaagactatttggataacttataggaaagcctagaacctcccagtagagtggggatttttttcttcttccctttctcttttggacaatagttaaattagcagtattagttatgagtttggttgcagtgttcttatcttgtgggctgatttccaaaaaccacatgctgctgaatttaccagggatcctcatacctcacaatgcaaaccacttactaccaggcctttttctgtgtccactggagagcttgagctcacactcaaagatcagaggacctacagagagggctctttggtttgaggaccatggcttacctttcctgcctttgacccatcacaccccatttcctcctctttccctctccccgctgccaaaaaaaaaaaaaaaggaaacgtttatcatgaatcaacagggtttcagtccttatcaaagagagatgtggaaagagctaaagaaaccaccctttgttcccaactccactttacccatattttatgcaacacaaacactgtccttttgggtccctttcttacagatggacctcttgaggaagaattatcgtattccacgtttttagccctcaggttaccaagataaatatatgtatatataacctttattattgctatatctttgtggataatacattcaggtggtgctgggtgatttattataatctgaacctaggtatatcctttggtcttccacagtcatgttgaggtgggctccctgggtatggtaaaaagccaggtataatgtaacttcaccccagcctttgtactaagctcttgatagtggatatactcttttaagtttagccccaatatagggtaatggaaatttcctgccctctgggttccccatttttactattaagaagaccagtgataatttaataatgccaccaactctggcttagttaagtgagagtgtgaactgtgtggcaagagagcctcacacctcactaggtgcagagagcccaggccttatgttaaaatcatgcacttgaaaagcaaaccttaatctgcaaagacagcagcaagcattatacggtcatcttgaatgatccctttgaaattttttttttgtttgtttgtttaaatcaagcctgaggctggtgaacagtagctacacacccatattgtgtgttctgtgaatgctagctctcttgaatttggatattggttattttttatagagtgtaaaccaagttttatattctgcaatgcgaacaggtacctatctgtttctaaataaaactgtttacattcaaaaaaaaaaaaaaaaaaa

SEQ ID NO: 45320 - DNA, 818 bp, Homo sapiens
cccccttgacaccgctatgacatgattacgaatttaatacgactcactatagggaatttggccctcgaggccaagaattcggcacgagtttttatattcaagtttccagacatagcattaatgcctttacttttgtgtttttatttctgtacactgtcttgctgggtctctagagatgacttggctcatctttaaccagaggtgctgcgtgagggtttttatcagagactgcaacacaaagtcaggtgcatggcttgggtgtcttgtttggggatgtttctctttttagatcactgtttcccatcataacgtgtttttgctactaaagcatcgacaggttttgcttgaaattttttccaaaaattaccgggtacgccgaaacatgatccagtctcggttgactcaagagtgtggagaagatctcagtaaacaggaggtggataaagtactaaaggactgctgtgtaagctatggtggcatgtggtaccttaaagggacagtacagtcttgacaatagtagcaaactactaacccagcaaatctaagcccaaggaagaagggcggaaccagaagtagggcctcgacttgcttcagacgacacagagcaagaggaactgaccatctcatgacctgtggcattgcacggtgcagtggacagaagggattatcctcagccagtcgcagggtcagcttaagttagttagatcactcccagaagagaccagctgggaccttctttgcagtacaatttgaaattcctgatgtattttgcttattatttggtttcattctcataataaagagagtgtatactgaca

SEQ ID NO: 45321 - DNA, 4616 bp, Homo sapiens
tttgacacaataacaaacacctatttattatattaaatacaagcctgaaatattaagtacaaattacagattccaagaaattacatttcacatcccaaaatgtcctgttggtgctttgacaactaaaacaatgttttagaaagattttgtttcagatcctaaaaaatagcaacaatttggggataaaaataagtaaaatccaaaacttcaaagtttattccaaattcttttgaatccctatggtggctgtaaacagtttttaaatgctcatagcttcaaggaatgtgagtatcacagtttatatgaatttctgcctaggaagcccagcaatgttacacagtagtttcgtgtttccataatccagtcctaacattgccagtgctatcggtaccgagcaagggtccctcctgcccattgcttttaattggtccattctgaatggccaagttgaggccataagatttttgctgattttcaagttcaaccacagctggcttccttaacgcatcttttttactagtggttgaaactggcttttcaaaatttctgctacttttgggaagtgtgctacaagcatcgctgctgtcttgctggggtgggttgtactgtctctctctgtaggctaaataagctcttcggctcctcgagtgtccttcgttattgcccagccgggcttttaggtaagccgttctgcacgcttccttccacgctcgttgggacatcgtaggcatattctctcaggactgtgagtcggcttgccccggtgtcctttacttctgtttttatggtggcggcttgagtgcacatttgttcgaaactgaacttctaaaggcgccacgtgcattttaatatcattgtccattgaatgttctgtcagactattatcaagctgaggggtggagttcaaaggtaaagaattggcatggcactgagctgcagccgcctgcaagtttgttaatttgcagccctgggaggaatttttgaagcttgaagcacttttgtttgtgcatgaagactccgcactgctattggggcatttgggtgcctctccattcgtcccattagagttggggggctggacgttgacttgcactgaatacgagctccgtcctgggcagcaagtcatgatccacgcaagtctaacatcctccctattaacacaatggtggaccatgaagaacgcactgaagcttaaacttgtggctccaaaaacgaagctaaaaaccaagtccaaagggtaatacaaagaaacagccaaagccccaaacatccacagtgcaacatataagagcaaagtaaggctggcccccaagagctgagaatgaaaagtgtgctcattttccaaggctgatgtagaaatcagagacaaagacattgaatcctgatgatttatttcgccattttcattggctgccaatctctgttgctcctccgtgggctccttaagctcatatttgcgctcagggtgtcttttcaactgaataaatatgctcagaaagtacatgcagtttacaaaagtgctgaagctggctggcccatagaaggcctcccaaggagggttcccatgccatccagcaatagggtgcgtttggccgactgccgtaattcttaatgttcgctgcctgcagttatgccgcaaacaatgatggggatacccaccaccaatcaggtaaaatctgagcattggtcttggtggaggtggtggttcatcaggatcctggcatcttttagcttttttagtgacttgtttgtagatatttcgagctgtcactcctacccatagtactgtggcaagggtggaatagtgaagaattatcccaactgcttggcagatgctggcattcctagtctgggttattcctcccacaaagagcacacaggttaggaaaatatgaaagcacaagttcacaagcatgtgccagctcttgaggctgaggctaatcaaactgtgatggtcccgaattcgggtttacaaggaaaatgatttaattctacaaatttacaaaccaaaatacaaaaacaaaacatggagcacaaagtaagacgaggagttccgagtctcatcgcagctccagccgcagtagccacgcctgtggtcccggctgagttctccccatgacggggtccactctgaccttcagaacttgaggctgaagccggggcccgcggcagaggccccctggttcgtggtggtaaggtggaagcccgtctccttcaggtcgtcgtcacccagctggctgtagcccaggcctccctcagggggcctcgggctggtgccccgcttcacacgctgctgctcgctcttggcgggccacgtggggaacatggaggggtcgatggggaggggggtctcgcggaaatactcatgcttgaggccgtcctcagcgctgatcctcctcccggggaagtaggtcaggaacttgttcatgaggtcgaagccctggtctgagagcagagccccgaagcgcttgcggaggttgttgtaggggtgtctgctgaaggtcatcttcttgactgctgggagctcgctgtagccgggccagattttctcactaggggtccccagatccttgaacaccttgttgatctgatcgatttctgacttcccggggaacagaggcttctgagtcagcagctccccgaagatgcaacccactgaccacatgtccacggccgtggagtattccttggcaccaagcagcagctctggggcgcggtaccacagggtcaccacgaccggggtgtaggccttcagaggggatccgtactcccgcgccagcccgaagtcacccaccttgaggatgccggcgtggctcagcagcaggttggacgtcttgaggtcacggtgcaggatccagttgtcgtgcaggtgtttcaccccacgcagcagctggatcatcagggtcttcacctcccctggcaggaagggctgtttcatggtctccatcaggctcttgaggtcgtgctccacatagttcatcacgatgtagatcttgtccatgttgctgcccaccacaatctctcctaacggtgacgatgttgggatgctgggccttgaggatggtgttgatctccctcagcgacgtgatcgggaagccctccttctccttctccatcttcagccgctttagagccacaatttcatctgttttcttgtcttttgctctgtagaccactccataggtgccctcctcgatcctgttcaggcactggaactcctcgacgctccggcagccctgcagggccggcaggtacttgggcagctcctgcttgagctcgatgggcgacagggcaggggagtcgggcacatagtcgccctctgtcagggcgctgctctgcggcgttccctcacccacttcttcctctgcttcttcactctccccggaatctcggtcgaaccgtgactctggaacaaccaagaggtggttttcattttctcgttcttcatcttcactcatttcttcctcacttacttcttcggcagactgctctgatgcctcctcagagttgctgccggtctcctcctcctcctcttcctcttcctcctctgattcttcactggtgctcccttcctcctcctcctcttcctcctcctcctcttcttcctcagaacctgagcctgattctgctgacgaggactcggccgagctggtcttcctctcgctgtcgctgatgtcctgtaagtcggacagcaggtccctttcttccattttctcttcttttactggcttccggccgtctcccaactcgaaccgctcccgcggcggccgaggcgggctgcgactccagtggctggctttcactttgtcgctgtagtcctctctcatcgttcggtgatgtgcagacacttccctgcgggcctcccgctccttgcgccgctcctccgcccgccgctcgcgctccttctgctcccgctgctccttctgctgctcccgcatcttgcgctcccgctcccgcttcctttctaactgctccaagcggtccctgaagaggcacacgccatcattccccctttctctcctggaatgctcccttgccatttcccttctcttctgtctttcccattcccggcgagctttatcctgttcttctcgatgtcgtttccgacgttcgtgctctctttctttcttcttcactctagcatgcttccccccttctgctgaatggctacgatgcctacgtttctcttttctcttttcatcttttctgtgatgaactttttctttccgagacatttgctggggtggtttgatggccaaagaatcatcttcttctcctctgtcttccatagagtcttctcttctatacggggagttccttattgtgatctccatgcagtgatctctcagctccccctcctcaagggaatcccgcttggaatcccggtcatcagaattttttaagcgttttatctctgctttctcctcttgttccttccttcgtttcttttcctgaagaatttcatctaaagttttcactttccaagagtccttttcatcacccatttgagttaaaacaccctacgccgccgcccgtgccgccgccgccgccgccggtcccggagccagagaagaaacagcaaccgcgcgcgccaaaagtatcgtcacttcctgtat

SEQ ID NO: 45322 - DNA, 1356 bp, Homo sapiens
tatgacatgattacgaatttaatacgactcactatagggaatttggccctcgaggccaagaattcggcacgagcgcatcttcttttgcgtcgccagccgagccacatcgctcagacaccatggggaaggtgaaggtcggagtcaacggatttggtcgtattgggcgcctggtcaccagggctgcttttaactctggtaaagtggatattgttgccatcaatgaccccttcattgacctcaactacatggtttacatgttccaatatgattccacccatggcaaattccatggcaccgtcaaggctgagaacgggaagcttgtcatcaatggaaatcccatcaccatcttccaggagcgagatccctccaaaatcaagtggggcgatgctggcgctgagtacgtcgtggagtccactggcgtcttcaccaccatggagaaggctggggctcatttgcaggggggagccaaaagggtcatcatctctgccccctctgctgatgcccccatgttcgtcatgggtgtgaaccatgagaagtatgacaacagcctcaagatcatcagcaatgcctcctgcaccaccaacttgcttaggcacccctggccaaaggtcatccatgacaactttggtatcgtggaaggactcatgaccacagtccatgccatcactgccacccagaagactgtggatgcccctccgggaaactgtggcgtgatggccgcggggctctccagaacatcatccctgcctctactgggcgctgcaaggctgtgggcaaggtcatccctgagctgaacgggaagctcactggcatggccttccgtgtccccactgccaacgtgtcagtggtggacctgacctgccgtctagaaaaacctgccaaatatgatgacatcaagaaggtggtgaagcaggcgtcggagggccccctcaagggcatcctgggctacactgagcaccaggtggtctcctctgacttcaacagcgacacccactcctccaccttcgacgctggggctggcattgccctcaacgaccactttgtcaagctcatttcctggtatgacaacgaatttggctacagcaacagggtggtggacctcatggcccacatggcctccaaggagtaagacccctggaccaccagccccagcaagagcacaagaggaagagagagaccctcactgctggggagtccctgccacactcagtcccccaccacactgaatctcccctcctcacagttgccatgtagaccccttgaagaggggaggggcctagggagccgcaccttgtcatgtaccatcaataaagtaccctgtgctcaaccaaaaaaaaaaaaaaaaaaaaaaaaccc

SEQ ID NO: 45323 - DNA, 2732 bp, Homo sapiens
ccccatgacggggtccactctgaccttcagaacttgaggctgaagccggggcccgcggcagaggccccctggttcgtggtggtaaggtggaagcccgtctccttcaggtcgtcgtcacccagctggctgtagcccaggcctccctcagggggcctcgggctggtgccccgcttcacacgctgctgctcgctcttggcgggccacgtggggaacatggaggggtcgatggggaggggggtctcgcggaaatactcatgcttgaggccgtcctcagcgctgatcctcctcccggggaagtaggtcaggaacttgttcatgaggtcgaagccctggtctgagagcagagccccgaagcgcttgcggaggttgttgtaggggtgtctgctgaaggtcatcttcttgactgctgggagctcgctgtagccgggccagattttctcactaggggtccccagatccttgaacaccttgttgatctgatcgatttctgacttcccggggaacagaggcttctgagtcagcagctccccgaagatgcaacccactgaccacatgtccacggccgtggagtattccttggcaccaagaaggagctctggggcgcggtaccacagggtcaccacgaccggggtgtaggccttcagaggggatccgtactcccgcgccagcccgaagtcacccaccttgaggatgccggcgtggctcagcaggaggttggacgtcttgaggtcacggtgcaggatccagttgtcgtgcaggtgtttcaccccacgcagcagctggatcatcagggtcttcacctcccctggcaggaagggctgtttcatggtctccatcaggctcttgaggtcgtgctccacatagttcatcacgatgtagatcttgtccatgttgctgcccaccacaatctctctaacggtgacgatgttgggatgctgggccttgaggatggtgttgatctccctcagcgacgtgatcgggaagccctccttctccttctccatcttcagccgctttagagccacaatttcatctgttttcttgtcttttgctctgtagaccactccataggtgccctcctcgatcctgttcaggcactggaactcctcgacgctccggcagccctgcagggccggcaggtacttgggcagctcctgcttgagctcgatgggcgacagggcaggggagtcgggcacatagtcgccctctgtcagggcgctgctctgcggcgttccctcacccacttcttcctctgcttcttcactctccccggaatctcggtcgaaccgtgactctggaacaaccaagaggtggttttcattttctcgttcttcatcttcactcatttcttcctcacttacttcttcggcagactgctctgatgcctcctcagagttgctgccggtctccatctctccaaatgaggaccagtaactgagaagtagctgaggagaagcaatgccaaagtgacatgggtccttggtgatgagggagcacagagccacttgcagagaggattgcctgggagggggaaggggaagaatccagggttgtcatcaccactgagtatggatttcacattctaacacattagaagctgcaggatgctgaaattgcaaggctgatggaagacttggaccggaacaaggaccaggaggtgaacttccaggagtatgtcaccttcctgggggccttggctttgatctacaatgaagccctcaagggctgaaaataaatagggaagatggagacaccctctgggggtcctctctgagtcaaatccagtggtgggtaattgtacaataaattttttttggtcaaatttacccttgcgtcttggcttccgaatgatttctgttcctccttggcttagtgggacaccagccattggaagatttgctcacggtcaacctctgaaaatgactcattgactcgccaggccagaggacccaccctgacaaggctgcctctagcgcgtaaggtgcctttatgtgaatgaggagagatgcccctcttggcaacgccatcctaaggaaaggctcaagtggtttccagtagagagagtcctgggatgagcttggagatggaaatggtcctttgggccgggatgtgatggggtttgggggcctggaagtgaggcagagatagttccagaggctcccagatgtgttttgctctgggtgtggcaagaggggccttggggtggggcaagtccctttctcatcacagcgcaggggttagatagggcacatctgagatgcctgaggcttggctcagggagtttcctacaccagtgaggacgctgtgtgactgagtctactgcggctgcccaggtcccaggtggagtgggggaggcacactcttggagtgtgtcccgtcattcagggtgagggctttttgttggaacggtggtctgaggagctggcagctgcaccaacacgtgaaccacggggtgttcagtaatggggcggggtatccctgcagcctcagcgtaatgactcacccggcacttccacgggatccagcctggatctcagcccccatcagagaagatgactaattgaatcattgtccatcatctggattagtgttttaaggcagaagggaagaggataaggagggtaaacgctgtttccgggtgatgccacatcattaagcctctctaggcctagtccgagctgggcaagtttacctctagcttctggggaagagatcttgactttagatggaga

SEQ ID NO: 45324 - DNA, 3690 bp, Homo sapiens
ctatcgcagagtggagcggggctgggagcaaagcgctgagggagctcggtacgccgccgcctcgcacccgcagcctcgcgcccgccgccgcccgtccccagagaaccatggagtctggcagtaccgccgccagtgaggaggcacgcagccttcgagaatgtgagctctacgtccagaagcataacattcaagcgctgctcaaagattctattgtgcagttgtgcactgctcgacctgagagacccatggcattcctcaagggaatactttgagaggttggagaaggaggaggcaaaacagattcagaatctgcagaaagcagggcactcgtacagactcaagggaggatgagatttctcctcctccacccaacccagtggttaaaggtaggaggcgacgaggtgctatcagcgctgaggtctacacggaggaagatgcggcatcctatgttagaaaggttataccaaaagattacaagacaatggccgctttagccaaagccattgaaaagaatgtgctgttttcacatcttgatgataatgagagaagtgatatttttgatgccatgttttcggtctcctttatcgcaggagagactgtgattcagcaaggtgatgaaggggataacttctatgtgattgatcaaggagagacggatgtctatgttaacaatgaatgggcaaccagtgttggggaaggagggagctttggagaacttgctttgatttatggaacaccgagagcagccactgtcaaagcaaagacaaatgtgaaattgtggggcatcgaccgagacagctatagaagaatcctcatgggaagcacactgagaaagcggaagatgtatgaggaattccttagtaaagtctctattttagagtctctggacaagtgggaacgtcttacggtagctgatgcattggaaccagtgcagtttgaagatgggcagaagattgtggtgcagggagaaccaggggatgagttcttcattattttagaggggtcagctgctgtgctacaacgtcggtcagaaaatgaagagtttgttgaagtgggaagattggggccttctgattattttggtgaaattgcactactgatgaatcgtcctcgtgctgccacagttgttgctcgtggccccttgaagtgcgttaagctggaccgacctagatttgaacgtgttcttggcccatgctcagacatcctcaaacgaaacatccagcagtacaacagttttgtgtcactgtctgtctgaaatctgcctcctgtgcctcccttttctcctctccccaatccatgcttcactcatgcaaactgctttattttccctacttgcagcgccaagtggccactggcatcgcagcttcctgtctgtttatatattgaaagttgcttttattgcaccattttcaatttggagcattaactaaatgctcatacacagttaaataaatagaaagagttctatggagactttgctgttactgcttctctttgtgcagtgttagtattcaccctgggcagtgagtgccatgctttttggtgagggcagatccagcacctattgaattaccatagagtaatgatgtaacagtgcaagattttttttttaagtgacataattgtccagttataagcgtatttagactgtggccatatatgctgtatttctttgtagaataaatggtttctcattaaactctaaagattagggaaaatggatatagaaaatcttagtatagtagaaagacatctgcctgtaattaaactagtttaagggtggaaaaatgcccatttttgctaattatcaatgggatatgattggttcagttttttttttttccagagttgttgtttgccaagctaatctgcctggttttatttatatcttgttattaatgtttcttctccaattctgaaatacttttgagtatggctatctatacctgccttttaagtttgaaactaactccatagattgcaaatattggttagtatttaactacatctgcctcggctcacaaattccgattagacctttatccagctagtgccaaataattgatcagatgctgaattgagaataagaatttgaggtctacattcttggttgttaatttagagcgtttggttaaagtatgtccttcagctgactccagtataatctcctctgctcattaaactgattccaggagattggatttgctgtgactagatacagatggagcaaatgtcctaacagagaaatagaggtgatgctgctaaagggagaaatgccaggcggacaaagttcagtgtcgggaattttccccgtgacattcactggggcatgagattttggaagaagttttttactttggtttagtctttttttccttcctttttattcagctagaatttctggtgggttgatggtagggtataatgtgtctgtgttgcttcaaattggtctgaaaggctatccctgcggaaagtcctgctttcctatctagcatttatttctctggcaaacttttctttcttttcttttttaaagtaaacttgtgtattgagtcttaactgtatttcagtattttccagccttatgtgttacattattccaatgatacccaacagtttatttttattatttttttaaaccaaaatttcacagttctgtaatgtaggcacttttattttcattgtgatttatatataaggtaatgtagggttatatttgggagtgactgcaagcatttttccatctgtgtgcaactaactgactctgttattgatcccttctcctgccctttcccaggtaatttaaattggtcatggtagatttttttcatagatttgaaaaacttttaggttgttaccaagtatgaagtataaatctggggaagaggttttatttacattttagggtgggtaagaaagccaccttgttacaaattttttaatttccaaaataatctatattaaatgagggtttctgatctgtactttgtgtttagctacctttttatatttaaaaaattaaaaatgaaaattatgttcttacaagcttaaagcttgatttgatctttgtttaaatgccaaaatgtacttaaatgagttacttagaatgccataaaattgcagtttcatgtatgtatataatcatgctcatgtatatttagttacgtataatgctttctgagtgagttttactcttaaatcatttggttaaatcatttggcttgctgtttactcccttctgtagtttttaattaaaaactttaaagataagtcctacattaaacaatgatcacatctaaagctttatctttgtgtaatctaagtatatgtgagaaatcagaattggcataatttgtcttagttgatattcaaggctttaaaagtcattattcctgggcttggtaagtgaatttatgagatttactgctctagaaagtatagatggccaaaggaccgttttgtattgcttcctgattaccagtctgattataccatgtgtgctaatatactttttttgttatagattgtcttaatggtaggtcaagtaataaaaagagatgaaataatttaaattcttaaatgaatcagtttttcttccctttctcctttccgtctttcctctctctgtccttccccgaaagtctactcgggtgggcaaaaatgaaaagggggaaagggaattatgggatc

SEQ ID NO: 45325 - DNA, 1872 bp, Homo sapiens
gcaaaactgactacattttttggtgtcttctcttctcccctttccgtctgaataatgggttttagcgggtcctagtctgctggcattgagctggggctgggtcaccaaacccttcccaaaaggacccttatctctttcttgcacacatgcctctctcccacttttcccaacccccacatttgcaactagaagaggttgcccataaaattgctctgcccttgacaggttctgttatttattgacttttgccaaggcttggtcacaacaatcatattcacgtaattttccccctttggtggcagaactgtagcaatagggggagaagacaagcagcggatgaagcgttttctcagcttttggaattgcttcgacctgacatccgttgtaaccgtttgccacttcttcagatatttttataaaaaagtaccactgagtcagtgagggccacagattggtattaatgagatacgagggttgttgctgggtgtttgtttcctgagctaagtgatcaagactgtagtggagttgcagctaacatgggttaggtttaaaccatgggggatgcaacccctttgcgtttcatatgtaggcctactggctttgtgtagctggagtagttgggttgctttgtgttaggaggatccagatcatgttggctacagggagatgctctctttgagaggctcctgggcattgattccatttcaatctcattctggatatgtgttcattgagtaaaggaggagagaccctcatacgctatttaaatgtcacttttttgcctatcccccgttttttggtcatgtttcaattaattgtgaggaaggcgcagctcctctctgcacgtagatcattttttaaagctaatgtaagcacatctaagggaataacatgatttaaggttgaaatggctttagaatcatttgggtttgagggtgtgttattttgagtcatgaatgtacaagctctgtgaatcagaccagcttaaatacccacacctttttttcgtaggtgggcttttcctatcagagcttggctcataaccaaataaagttttttgaaggccatggcttttcacacagttattttattttatgacgttatctgaaagcagactgttaggagcagtattgagtggctgtcacactttgaggcaactaaaaaggcttcaaacgttttgatcagtttcttttcaggaaacattgtgctctaacagtatgactattctttcccccactcttaaacagtgtgatgtgtgttatcctaggaaatgagagttggcaaacaacttctcattttgaatagagtttgtgtgtacctctccatatttaatttatatgataaaataggtggggagagtctgaaccttaactgtcatgttttgttgttcatctgtggccacaataaagtttacttgtaaaattttagaggccattactccaattatgttgcacgtacactcattgtacaggcgtggagactcattgtatgtataagaatattctgacagtgagtgacccggagtctctggtgtaccctcttaccagtcagctgcctgcgagcagtcattttttcctaaaggtttacaagtatttagaactcttcagttcagggcaaaatgttcatgaagttattcctcttaaacatggttaggaagctgatgacgttattgattttgtctggattatgtttctggaataattttaccaaaacaagctatttgagttttgacttgacaaggcaaaacatgacagtggattctctttacaaatggaaaaaaaaaatccttattttgtataaaggacttccctttttgtaaactaatcctttttattggtaaaaattgtaaattaaaatgtgcaacttgaaaaa

SEQ ID NO: 45326 - DNA, 1155 bp, Homo sapiens
  misc_feature (1)...(1155): n = a,t,c or g
tcactttttccagattttttttttattcagtacagatgcaaagtagtagctcagaggctctgggtaatagcattcctgagattgatgacatccattacctcactagtccaacttctccagactaacgcagacttttctcttcccttggcctttcctctcctcgccattgggccaattccttcgatttctcatttcccttgaagttagggccattcacagtttcatggtcaaagccagttccaggttcaatagtctgtgatttatccaggctctgaggtatgcaccgcttctgttttgctcgttcctccaagagctagtttggccagaaaggggatgctttataccatagaacacatccaccttctagaacctgctctagaaggccaggccctcagattccacatggttggagttctggccaagtctggagctttcttcacactcggctctcagagctctgggttcagaaaaaactgagcatggtgagagaagacagtgtcagaccgaggccccctggaggacctttggaacctctgatagtctgtcataccagagcatgattttctctaatgttcagacctggcttcactgaggaatagttcaggggatcagggcctagagacaagactcccaactgccttatttccctcctgttttcctggcaaccccactacttcctccaaaggtttctgtatgcgaagttgctaggcctgctggctgagctccggagcattaatgaggctacgggtaccaaatccagcacatccagggcctgtctgcgatgatgctgctgctctaagagatctgcagctgaggctatgctacttcgttcaccagcttacatgaataccgtgatacactgagtgcgacactgctggaccaagatgngctgggtctatggagccagtggttgcatgatagctaacgacaaagaagtattaaagcttgtattagggcgaactatccttaggaggtattacgttgcttccgcgtttcactcgaaggaactgttcgcctaatcgttgggaacccctgttgtggcgttgtgaggtgctatcaaagagcgccctacgcgttgtggcgtataccagcttctttgaaggnataactgcattcccaatggtccacgtgggttatcaactccggcgcattcct

SEQ ID NO: 45327 - DNA, 895 bp, Homo sapiens
cctttgctcagcaatctttattcagttcttcttgggggtgggatgcctcccttcccatgctcccacccctcccatcccagaactccgttgggctcagtgtcctctgttgagggaaggtcttggtgcccagatgcctactctgcaggagagggaggaaccttgtccctttgcgggagtcgctggtctcttctgttgtggggaagaaggaaggtgggaggggcactgtccaccagcactcagagctccattatgtccccagctggggttgcagggtaggggggactgggggtgtcccccagcctcagcagacggagggcctcagggatgaggcttgccaggatagcgccagagaagcagctcagagcaagggctcctgagtgggggcagggctggggagaaggtcatgggggggctgcagtaggggtggtcattgtgcaggctgagttgagagaagtgggtggccatgttctcctcagacagaaactgcttgcgcagaggctcctgctcctcctccaggcgccgcttggtgctcatgggcacagctcctcggagaggggagctggcgtccaggccccaagtcacccccaaggcggcccgcgggaggcgctgggcccctccctgggggcctcgctgcaagggctgctgcaggatcattgggttttggggtcctgcgggtgggatctgggcgacaggggaggagtctctgagggcgtggccaagagaggatgggcgtggctttacgcggcacagccgcgaggttgctggcgggcgcggaagacgggcggcgcgtggcggaaggcaggcttgctcctcggggtgggggagggtatccggcattagagggggctgcggtggacaccacttcttaatgtcgggggtcttcgcggcgctcacg

SEQ ID NO: 45328 - DNA, 863 bp, Homo sapiens
ggattacaggcatgcaccaccatgcctggctaattttgtatttttagtagagacggggtttctccatgttggtaaggctgatctcaaactcccaacctcaggtgatctgcctgcctcggcctcccaaagtgctgggattagaggcgtgagccactgcacctggcctgtagcaaataatttttaagcattctcaagatgtatgatgttgggtttaacatcatatgttcacagtgttttaaataagaaataatctgtctttagtatacaggatggttctttgtttgcctgaaaagtataagaatacaatttacttttcccaaactctttttccttatttttttctttcaaataactttaattatttaatcccatactgattaaaatatgtctgtctaaagggatctactactatttgcttttaaaaaagtgttccctatttatttaggaaaaagtgaagcaagcaactgaatttatatgtaaaaataacatttagacctgtggatcaaagattattttcaaaaatgagatatcaatttggtatcagtaaaaagtgtcttttctcttagtatataaataaataaaatgcaaattaagagtgtaagcagttgtgaatcattacaagcagtctgggataactaactcctagggataaccatttctatcctgttccaaagtcgtactttatagtttgaaaagcactttgcacacagttcttgtatataaaagtaaagatgtaattataggatatagtgttcctgctttgtttaataagaacctcatttaaccttgacagctatggtatttttttaatgataacttcttttctgtatattgtaaaactaagttaaaaataaaaggttaat

SEQ ID NO: 45329 - DNA, 1625 bp, Homo sapiens
gtcagaatcaccatggccagctatccttaccggcagggctgcccaggagctgcaggacaagcaccaggagcccctccgggtagctactaccctggaccccccaatagtggagggcagtatggtagtgggctaccccctggtggtggttatgggggtcctgcccctggagggccttatggaccaccagctggtggagggccctatggacaccccaatcctgggatgttcccctctggaactccaggaggaccatatggcggtgcagctcccgggggcccctatggtcagccacctccaagttcctacggtgcccagcagcctgggctttatggacagggtggcgcccctcccaatgtggatcctgaggcctactcctggttccagtcggtggactcagatcacagtggctatatctccatgaaggagctaaagcaggccctggtcaactgcaattggtcttcattcaatgatgagacctgcctcatgatgataaacatgtttgacaagaccaagtcaggccgcatcgatgtctacggcttctcagccctgtggaaattcatccagcagtggaacgaacctcttccagcagtatgaccgggaccgctcgggctccattagctacacagagctgcagcaagctctgtcccaaatgggctacaacctgagcccccagttcacccagcttctggtctcccgctactgcccacgctctgccaatcctgccatgcagcttgaccgcttcatccaggtgtgcacccagctgcaggtgctgacagaggccttccgggagaaggacacagctgtacaaggcaacatccggctcagcttcgaggacttcgtcaccatgacagcttctcggatgctatgacccaaccatctgtggagagtggagtgcaccagggacctttcctggcttcttagagtgagagaagtatgtggacatctcttcttttcctgtccctctagaagaacattctcccttgcttgatgcaacactgttccaaaagagggtggagagtcctgcatcatagccaccaaatagtgaggaccggggctgaggccacacagataggggcctgatggaggagaggatagaagttgaatgtcctgatggccatgagcagttgagtggcacagcctggcaccaggagcaggtccttgtaatggagttagtgtccagtcagctgagctccaccctgatgccagtggtgagtgttcatcggcctgttaccgttagtacctgtgttccctcaccaggccatcctgtcaaacgagcccattttctccaaagtggaatctgaccaagcatgagagagatctgtctatgggaccagtggcttggattctgccacacccataaatccttgtgtgttaacttctagctgcctggggctggccctgctcagacaaatctgctccctgggcatctttggccaggcttctgccctctgcagctgggacccctcacttgcctgccatgctctgctcggcttcagtctccaggagacagtggtcacctctccctgccaatactttttttaatttgcatttttttttcatttggggccaaaagtccagtgaaattgtaagcttcaataaaaggatgaaactctgaaaaaaaaaaa

SEQ ID NO: 45330 - DNA, 1980 bp, Homo sapiens; identical to SEQ ID NO: 2839

SEQ ID NO: 45331 - DNA, 1350 bp, Homo sapiens
gcgatcatcaccagttacctccagttattaagaacatggcctttcaaaagtactcaaacatggagcagtctctcttcactcgctttgttcgcgttggagttccgactgttgaccttgatgctcaagggagagccagagcaagcttgtgcaacctctacaactggcgatacaagaatctaggaaacttaccccatgtgcagctcttgccagagtttagtacagcaaatgctggcttactgtatgacttccagctcattaatgttgaagattttcaaggagtgggagaatctgaacctaatccttacttctatcagaatcttggagaggcagaatatgtagtagcactttttatgtacatgtgtttacttggttaccctgctgacaaaatcagtattctaacaacatataatggcaaaagcatcttattcgcgacatcatcaatagacgatgtggaaacaatccattgattggaagaccaaacaaggtgacaactgttgatagatttcaaggtcaacagaatgactatattcttctttctctggtacgaaccagggcagtgggccatctgagggatgtccgtcgcttggtagtggccatgtctagagccagacttggactttatatcttcgccagagtatccctcttccaaaactgttttgaactgactccagctttcagtcagctcacagctcgcccccttcatttgcatataattccaacagaacctttcccaactacttagaagagaattggagagagaccatctcatgaagtacaaataataaaaaatatgccccagatggcaaactttgtatacaacatgtacatgcatttgatacagactacacatcattatcatcagactttattacaactaccacctgctatggtagaagagggtgaggaagttcaaaatcaagaaacagaattggaaacagaagaagaggccatgactgttcaagctgacatcatacccagtccaacagacaccagctgccgtcaagaaactccagcctttcaaactgacaccacccccagtgagacaggagccacttccactccagaagccatccctgctttatctgagaccacccctactgtggtaggagctgtatctgcaccggcagaagctaacacacctcaggatgccacatctgccccagaagagaccaagtagccaaactgtagtccttctaaaggaggacatggcagtcaaaaagtctgagtaaagctgttttttgtattttatatttgcttctgccattttactgtcactaattaatgtttagttcttatatttgttaactgatttcggtgtcttgaatatatttttttaaattatgtgtatga

SEQ ID NO: 45332 - DNA, 2339 bp, Homo sapiens
  misc_feature (1)...(2339): n = a,t,c or g
tttttttgattgtaaatgttttaatagaaatacacaatctttcactttctcagacagcaataaaggggtttgtaacaatcactaagaatacagaattttgccacgaggatgcagcataatctactgcaaagctgatctgcccaattacacgtagtcagctgcaagaatatcagaaatcaatacaaacaagtattgacaggtgttacagacatgcaaaatatccttcaatgcaacgaatttttaagaaatcagctagcctatattaatcagatgttttaggtcaaaccaagtttcccatcttgggctcagtgaaatagtattaactcattgagtctcctttcccccaggaatgttgggaatggcagaacagaaagagctatcactccttaaattcttttatgcaagtgttactccaacacttattttacttggtttacttggaatgtatgagaggaaactgatgttttttacaatggccaactgtatgtctaaattttcagttctcctttttgtgagtttcctgccagaaatccttgttaaaggatcagcggggtgttcacccccgaagttcttgctgttttcagtgtcctactgcagacaggtttaaaaagccaactgaacagcagcagaatgaagtatttttgaggtctattcaaaaatgtacagtcccaccactcactagaacaagtacacaagtaaatggactcagccagtgcaggagatggaaggctgccattttttatgtttgtgcacagccttacagtttggaggtgtgtttggcctactctaatatttctagtttgtcaaaggctgtacactgttactgccagtttgacctacatactgtgttccctttggatccctgctaccatttggacctcnnnnnnnnnnnnnnnnnnnnnnnnnnnnnnnnnnnnnnnnnnnnnnnnnnnnnnnnnnnnnnnnnnnnnnnnnnnnnnnnnnnnnnnnnnnnnnnnnnnnnnnnnnnnnnnnnnnnnnnnnnnnnnnnnnnnnggatcctcccatctcagcttcttgagtagctggncaacaggtgtgtgccatcacacccagctaatttttttattttttgtagagataggggtctcactacgttgcccaagctgggtcttgaactcctggcttcaagcgatgctcccacctaggtgtcccaaagtgctgggattacaggtgtgagccacattcctggctgagtttggaacttgtaatctcattgttttctaaataatgtttcatttttcttcagtgttgaaaatagttgatttacttaagaatggcatgatcatgatgttccaagattctgattagtttctttcaaagcattctgcgcctcttcaatgcccacactgctgagcactataataatagatgttgttaggccaaaggatgtcagatgtaaagtatgttctctagccccactcttagaaatgttttatcaatgactcagtccacttgattttcaaaaagtcaatgccatcccattaaacaagtaaccccttaggtacagaataattaattcctgcctgagtcactttaacagccttctatagagtgacatagtcttgctttttttcacaagcaatagctgaaaagaacaaatctcaactgtaagaactgtcagtacattgtagggataaagcactttttgaaaaaaaaatctctggcatgtattagacagactgaacatgagatagggttggggtgggctgagccttttggtgtcattaactgaatacacaagaatgaacctctcatcagatatcaggaatccatgtcatgcaagtactacaataagataacagtaaattcaggaatgttactggggaaaaggaagatagcctcactgagaatttaatcatttaacattaaaaaaacttttacattggttcaagaaggtaaaactgtaagaatcagattaggctcaaactggcaagaagccatctaaatctttctttttagtggatctttttctttttttgtccatagcgccgtctgcgctgtttataaaggtgacgaaaatttatgtataaaccttgcgtggtcttcctctcactgtctggggtagcaagccgtgacaatgatcccaacaacctctatctcctgttatttcatacctttgtgtagtcccctcccatgttatactgggttggtctgtgtgatgatttgtcacttctgagattaggcactgtggcttcgggctctctctctctaaccaattgctttgggggaagccatgccatgagtagccatatggagacgggctatggcaagaaactgaagcttcctgtcaacagccacaagagtgagcttggagcaga

SEQ ID NO: 45333 - DNA, 325 bp, Homo sapiens; identical to SEQ ID NO: 20440

SEQ ID NO: 45334 - DNA, 1867 bp, Homo sapiens
tgagttcctgtgtgcctgtcacccagcccggccacaagaggtgctgggggcagtgtccacacccccctttcttaggacgcctgagtctcagatgtgacttatagggtatttcttatggcaagacagttaaaacaaacttcagcgtctcgtctgtccttctatggctgtggcttctgatgttctaatggcgttctcgtcagccggggctgaggaacaaaataacatagactgtggggcttaaacagcagaaacttacttcccatggttctggaggttgggagtcttggatcaccgtgtagcatggtcaggttcctgggtgagggtgggattcctgggctaacgtaacgaaggctccctctcctgataccgtgtcactggggggtgaggctttcaacacaggaattttggggggacacatcagcattcactccatcacaggtggttagccctttaatccacgggaattttgtttggggttgtgtgagatacgggtctaacgttttctttttcaaatacgtagccagttgtcacatcatttattgaaaaaggaatcttttctccaccgactgacatgaaatgctaccatcatcgtaaataaaattcccgtaaatacttgctgtctctgctgtctcagtcctgactcacgggctgagttctctttctgcacagtagcactggcattaactgtgacagctttacagcaggctccctccccgaggccgttcagaagcattcctcagcgggtcctacacgtttcctctcccatgtcaagtttagaagcagtgtcaagacccacagcagtcctgcgggagttttaagggatgcacggagtttatggggacagtttggaaaattgacattcatgtgacttagaagtcctactacttgaaaatggattccagctctcaacgaatttagagctttggcaaaatttttaagaattctttgatgtccgatgtgctcatttcttggtttgttcttggagtattttgtggatttttatgaaatccacaaagtttttgttataatgaatgggacactttcccataaaatgttgtaattctgtattgctgttttagtaaacactgttgattgatgtatattgatgttacacttggtcacttgtaatagtttgtccgttcattattttgaactttttaggtaaacagtcatataattatgcaaataattatagttgtgtctctgcctttctaatatttatactttgtgtatattatcatgttggccaggactcaagcgtctttctcttgtttctgactaatgcgaatgattctaatgcaggggtttccaaactggtggccggggggccaaatccagccaatggtctcttcttgtaaataaagttttattggaacacagttacacacatttttctacatattgtctgatggctactgtcacgccacagcaatgctgttaaatagtccagaccagaggcggtattgcccgaaaaacctagaatattcaccatctgagcttttacgggaaaatttgctaatatctgttctcatgcattaaatacaatgtttgttacaggttaaggaagtttctgactatttttagctttctgaatatcttgtggttgtgtgtgctttaaaattaggactaaatattaaatttaccagttgcttgttaggggcctatcttttgagatgcccaaagtttcccttttttagtctcttcatgtagtgagttgtactaacagattctctaatgttgaaccgtctttgctttccggagatagactttacttgctcctggtggattggattctgtttgttaatacttttatttttgggtaattacatccctattataaataatatgtcagcatgcaaaaaaaaaa

SEQ ID NO: 45335 - DNA, 2479 bp, Homo sapiens
ttcggcacagaggggtggccgaggggcttcataccagctgaagacgacaaccgctggcagcgcggatctcaccgccgctcaggagatctgttggtaatctgaggatttttattctacgtcgtcttgacagatggaaaacctgaagtaacttcgggctaaccttgtgtttttggaaaattagtagacttggtggtgaagaaactgggaggagtaggatattagctaactttgcatagccacatatagagcgtcgcagctgcattccaccaaagaggaaccaaaaggcctgtggtgttcccagggtacatattcatgccagaagtgaagtgccttggtgaattcgtttcctgaaagtttatcgcatacttgtactgggttaggtttttagaacttcagccataaaaatgggcagaattttccttgatcatatcggtggtacccgtctgttttcttgtgcaaactgtgatacgatcctgaccaaccgctcagaactcatctccactcgtttcacaggcgccactggcagagcatttctttttaacaaggtagttaacctgcagtacagtgaagttcaagatcgggtcatgctcactggccgccacatggttcgagatgtgagctgcaaaaactgcaatagcaaactgggatggatctatgagtttgccactgaagacagccagcgatataaggaaggccgcgtgatcctggaacgtgctctagttcgagagagtgagggctttgaggagcatgtaccatctgataactcttgaagatacagagagaaatccatcttttcccaggtctccttcactgaaaacaaaaatctacttacatacactgtcaccttagcatcagagtcggattaatgaactgcggaacaagaggttgtgagaatctaagatggaacctttctttctttctttctttttttttaaattttgtattttccatccaacagcagtgtgtagagagaatattatgcagatgccgttaattttttaccctatgtttacatcttgaggcagcagagtctgtctgcagctatgtggtgagctatgtaaggaaaaaaatctgggctgttagagtgaaaaagtgtgttttatgtcaattgtgaaaggaaaatgttaggagtatggtttttaaacttgggcttcattttaaacttttttttttaaacccagttatttcacttgatttgctagcttcagagaagagatccgaatctgtgcccagcgctaaaggctcagtgttagcatggcttgtgctggccggtgtgccatattcttgttggagatgaaccgtagcaccagagcccattcttccttgtcagtcttggcccaaagatgtcaccattcctagttatttgtcaccacataattggtgttgattggaaactttttctgagatgggacagaactgctgggttgtctttttccatgtaacttaagcatagtaatataaataaagtaatagttggatgcttttggtcctgtgttgcttttaaaaacaccttataaaagaggagagtatttgataagcaattttcatagtagtaaagttttttttcatctcttaaactaaattgaccatgcatataatattctttgtttaaatgaaagcatactgttgaaacccgcagtgttgcatttagaaaacagttgaacagaatgtcaatgtgcattcatgcaaaaaaacatttaatctgcatctgttttagaaaagggggaaatgaagcaacttgtctaaaaatactgctttacaaagcatttcagcctttccccctcagttttgcattgattttttgacaagtctgtagagcctaatagtttccatcaaaggcctagatctcttatttagcatttttttcagctcttctctcagaagttcagctgttgaaacgaaaactgtactttgtaccctcacatacaaagggatcaaatttgacctggtgttattttagccccaaatttatgacattacacaatattaaaatgtaaatgtttctttacccaaactacttctagatattctagtatttgcttctggtggaattaaatgacggtaaaattggctaattatttgaatgaatgaatggatggatgttttgcatgctcaatttctaggtcctttgtctagaaaggaaatttgcctcagttgaattagtgaaatatttctgtcgttgatattaaaagtgacttctgagtacagttaagttcctcctatttgccactgggctgttggttagaagcataggtaactgattaagtaggtatgatactgcatttgaaataagtggacacaaactatcctttctccaccatggactcaatctgagaacaacagcattcatttccattcatttccatactggcttttgattatatgcagattcctagtagcatgccttacctacagcactatgtgcatttgctgtcacaataaagtatattttgtcttgctaaaaaaaaaaaaaaaaaaa

SEQ ID NO: 45336 - DNA, 7251 bp, Homo sapiens
  misc_feature (1)...(7251): n = a,t,c or g
tttttttttttttttcacgggagaaaaatagactttatttacaagtaataacatttagaaaagatccatccccggcccttaaaaaccttcccatcactccaaatcccaccccagtgcaagtctggggaaggtagggtgtgagctgctgctgaaggctgtcccccaaccccactcctgagacacagggcccatccgtcctgggaaagagcatcctctggcaggtgctcccaccaggtcagacccagtcctggacttcaagagtgagggcccctgctgggcccagccaccaggacagcaggaaccagggcctactcctcttatggtcccttctagatccagaggctaagaggaagactggccaggcccaaggacccagccatcaaaaccagcctcaaatctggttgtgatggagaagtgactttgctttaagaaaaaaggaggcaaggtagggagagcgcccacactgtccatgctccaggccccctgggccagctccgagaaggcgccagtgaaggaccagggaccaggccagggtgcgggcaggcatcactgtctctaggggtttggctactgttggcctgggagctgagagaaggcactgagagggacagtaggcggaggaccaggtgacggcagcatcggggacacaggtggggccactcactggtactggccctttagtgctttgcccttgcccttggctcgaggggtggcacccaatggcggcaagcagtggcggcgctggctgtggtggtggcaatgccgcggagaacggcgggttccactgcgagtgttgggggaagccttggacagggccttctttgaggctccccgccgcagaaggctgttccctagcttcttgggtgtgttgaggatgctgaaggccatcgactggcgccggtcagcctgtttagtagaagctggagctgctttcttctgggcctcagtagtgctctgtttgcgcccttcatgtcggtctcggggagtcatggggcgtgggaaacagctggtggccttcttaagactcaggagttcccagggccctggtggggctctagggagacccgtttgcgctgctgccgggtggtgatgccagtgccctcggctatctggattggctgcatgcctggctcggcgcagggtctcttgggggtctccagttttcatctcctcatctgtgatggtgcccaggctcagggaaggcctggactccaggggatagcaggtcttcagatgtggggggcacactcgattgcgctgctgcagctctgcaatgcggttccagtcatccagctgctgcaggctcatcctggcaagtgcccatgtagaagctgttccttcctggaggggccccactggacaccccggcctgggaacgacgagcagaactgcgagtggtggggcggtagccaggcaagctgagcagggctgagttgccataatcgggagaacccaggcgagctagagactgagtagaggaggtggctcgcaggctagcctgggaagcaggagcagaccgcgtgctgtagaacgatgagttggcgctgtctggctcttccacatctagcttcttggtcatggtgatgttgatgatctgcgtggtgcgccgacgagcggagcgggtcttacgacccgagtccaggaagacgtctcccagggagtccaggctgctctccaggggggcctgactccgagcagggatgggagtgaagtagagactctccagggattctaccttggggggcaggcgctgggagataggtgaggctggttctccagggacgctggtgccgtctggctgggtacgaggcagcttgctggtgatactgagtggggtcccctcctcgcagctcagatccaggctgtcaatactcaagtccagctggggccttagcctggggctcacggctctttaaagcatcagttgccacctggaatttgcccaggtctcgaagctgctggtctgcatgggcaacctgtgcctccaggctgcgcacctgggcagtaaggtggcggcaggtctgttcagcctccttggtcttcagcccagcctgctgtagctcatggcccagccgttcagcttcagctcgcagctctttgttttccttctgcagctgctccaggctccgcagctgctcctgcagctcttggttctgctgcttcttggcatcataatgtgttttggctttctccatctgcagcttatagtgctcagctgcctgctccttctggctcaactgggcttgcagttcattcagctgggcctggaggcgctgggcctcctgctggctctcgcctccctgagcctggacagccttcagcttctgctgctgcaccttgctggcttggtcagagtcagccagtttcttactcagttcttccacctgggcagtgagtttctgcctctcttcctggaaccgctgcctctcctccaggaccttgaccttggcaccctcatacttggcagtcatcacctccagctcccgggcagtgctctgtgcttctcgctgcacctcagccagacgggtctcagcatcagcacgtacggctgccaactcttggacatacttttcccgggcctggtccaactccacttccagaaactgccggccaaggttggcccgctcacccagcccccggttctcctctgccagcaggccatgcgccttcttcagcatgctcagctgctctgcatagctggccttctctgcccgcagctgctgagctgttcgctcctgctctgccaccttctgccgcagaggaatcagctccccaagctcccgctgggcccgcagcagctctgcccgcagtcccccagcggcctgcttgctctgctccagctcctcacggtggcgtttctcggcagcggcctgctcggcctgcagctgctggcagaggtgcttagctggcagcagctcactcaccagggcctgtgtgctggtgtgctcgagctgcagggtggagagggcctgctctttctggaagaacttctcctgccacgccttcaattcttggcccagctcctccgcacgctcagcctgtgaggtcagctcctgccgcaggttctctgaagccacccgctgtttctcagcctccctcccggaggctctgcacctcctcccgcagagcagagctgcgttctgcagctctggcactgttgctggctgtctctgcctgcagcaggcgcagctctcctccagcttctggctcttctctgactcggccatcaccagccgcttcaactccttgctctccccctccttctccaggacctggcgattcaggatggacacctcctcctccaagctgctgatgaggctatttttcctctcagcctcttgccggccccgggccacctgggccttccactcatcttcagccttgctgtggtcttgtaccttggtgcggaaggcagccaactcccgttgggccgaggctaaggcactctgactgtgccctagctcctgggccttctcctctaactggccctgcagagtctccagagcactgtcccgctcagcccgggaggcccgctcagcctcgaggctgcgttccaggctgtcagcctgctcctgctgcttctggcattgctgttccagcttgctcacctctgcccgcagtgcttccagcttggggcctgttggctctgtcctgccagcagcctcagattgggctcctgagccagatgcgtgctccttttctttcttagccagctgttccttcagttgcttcacggtttgccgaagttcctccagctcttttatctgggctgcctccagaccacgaagcttggccaactcctggtccttgccttccttttccgtcagggcatgagccagtgcctcttgcagggtagcgaactccacacgctgctcgttgagggcgttctgcagccgcatctcaagctctgctctggccgccttctccagggcaaggtcagcctgggcacggccccgctcctgggtcagccgcgccacctccctttcctgctgcccacgctcctcctgctgctgcccctggctctccatcagcgcggcccgcagccgttccagctcattgcccatctgctctgcctcccgctccatagcctgcagcgctgcctgtgtgctgcagaactggcgtccctgttgctcttccagccactcgggctgtctgtctcctgccctcgcaggctccttgactaactcccgggaggctgtttcctgctgctcacctgccttgcgcaccaaggtctccaagcgggccacctctttgctggtggcagccatcttttcctgcagagtggagaggtcatctgcaagcttctgggccctgacttccttctcttggacctgctggagtgctctggccaggttggcatggagctcagctagtttgttctgctgccggcttatctggagctcgctgtgggattctatgcctgccaccttctcctttgcctcctgcagctcctggcgggccttctcacattcctccttcaaagtcatcagctgttcctggaacatggcgccatactgtgcctcctcttgctggctatcctcatacccgtcacgccaggcagctacttctttgacgagctgctcacactcactctcagctgtgtgctgggcagccatggcctctgccagctcccgccgcaggacttcagtctcagcctgatgggcctccccaagctgcagtaatcgagcctccagccccttgcgcccagccctctcttcttccagctcctttcgttcccgcttatgctgctccaccaggcttcgggtctctgccttcagctcagagatacaacgctgctgctcttccagggcatctgcagccctgcgcttctcctcttcaaggctgcccttggtgaccttcaaggactctttgagggcctggagctgctcctggagctggtccttctcctgggccaccctttctttctcagttgctttttgctgctcagaccgcagctgcaactctagctctgcaacctgggcctgggcctcatgctgttcctggcgggctgtctcaacacaggcctggagttcctccaccttccggctcagctctgccttctcccgctgggcctgtgtcactgaggtctgggcactgtcccgggcttcattagccacctgaagttgctgctgcagaatctccagcttggcagccttctccttctccagtgcctccagctgcttgagagccgcatcccgctcccttaaggaggcctctcgctcctctgcagcagtggccagttgctgggcatggtcctgcctagttgcctcctgcttctccgctacctccttcaactgctgctccttctgcttcaggctactgcttagctgctccacctggtggcggaggccctgggaggcctgttcttgctgttggagggtctgtgctagctgggcctgcttctctttggcctgctgcttcaggccagccagttcttgatcctgttgctggatggtggcattgagtgtggtgagctcagaggtcagagaggccacctgggcagtcaaccgggccccatgagcctgggaggcctgctccagctcttccttggcctggctgaggttggagatggagctctgcaggtcagtgatcaggctagacagctgctgcttttcttcttcgaagtggccccgctcagcaagcagcttggcttcctgctggcctcgctcagtctccagcatctctaccctggcttggagctgtgtgttgtttgcagcaagagtggctgcctcttgcttcaaggtttccagctgcaagacatcacccagcacctcgcccttctcctggggtgggttatcctgcagctgggacaagtgttcttccagctgtgaaagttttccctgaaggatttcgttcttctcttcaaggcatttcttgtcctgcagggctgcgctgagctccttctccagctgggcctgcttctctagccactcctgagtggccttgctgtgctcctccgtcagctcattgagggcatcctgtagctgctgcagatgactggcaaactcccgcagcttaaaggaaaggtctccattctcctccgaaagctggttgattttgcgatccatctggctcttctctgtcttcaggtcctggcactgcttcagggtttcatgcagccgcatggtaaggctctcattcttgtcacgcagctcctcaagctccttgggctccagtgggctggccgcctgcttctcattcagcagggctaggcggtcaatgcgctgctgcatcatggctatctgtgcatccttctcggtgaggagcttgcggttctcagctagctccagctccagctcatccctattacttctctcatcagcaagctgcttcttcagccgtctcatctggaactgtggggtctgcaggatatcacccatgggagaagctggagaacctgagagaaagttgttcccactggaagaggaggcaaccttctgtagctctaggaagcgaatctccctcttggcctggtggctaggtggggagagctcttcagggaatgtgctagaacaggtagaaggcacaggagctttctgtaggaagttctctaggtcctcattaaggtttagcccgtcctcatggtccagcacaaatttaagaatgacagccaactcagcctgaattttatattcaaactgttcccagtccctggggacttttggagctcatggtagagtggtataagagcagcatggtcatcttcgccagttccagctctgatccctctagcaccttctgtgcagataccaggcattctggggaagagggatgttttcgatttttctgcagaaaactgcacacaaagtccagtctctctgacaccggctgcttcaagatttgctgtccctcttcagtgccatggattctgtcaatgatcttgatgaagatgctgcagtcctggagctgcagcacagcctccacagggtcagccacgtgtagactgttcacccaagagaggagtgcagccccccgggtggcgtggagtgtcatcttggtgatgccagacagtcactccannnnnnnnnnnnnnnnnnnnnnnnnnnnnnnnnnnnnnnnnnnnnnnnnnnnnnnnnnnnnnnnnnnnnnnnnnnnnnnnnnnnnnnnnnnnnnnnnnnnnnnnnnnntggtggaagcctccacacactagaacagggtgatctccagcagtctggcttagaattagtttccacctggctgcgcgctcccgctctgcctcgcgattctccggaatcgtacctcttcgtgggc

SEQ ID NO: 45337 - DNA, 1898 bp, Homo sapiens
tttttgaagggttaatattagcaaagttttactttttttttttctgctcataaatgactctgaaaaagccaatacgcaagaggctaacacaactgtagtctaaaggcaacgtcgaggtcactgatatgtccctcagacaagaggcactgctcagaatccccctgtgctgggggtgagggaaggaggggacggtttaggacagaggaataaatacatgtggttgtgggagttctgccatcagggatggtggccccagcccaggaccccaaaaccctgaggcggtgcagtgggctgccaaccccccagctcggggttccccaaggctgcctcagtgtttggatgggctggaaggaaatgctgaggttctgggagggccccatggccagccccctcttcccactctagccagaggagagccaagctcccggctggccagggccctggggtagggagcagtgcccccaagagggctttctggtgtcaatgtctcatgcagcgtcaggtggtgaggcctgggcctggccctgaggcgggagtgggggtgacaggcgaggctggggtgggccctggcacctgcagctttgggctgccatgtgtgtctgctgacatcccgactatggtccacggccgggaatggtgggcagacggggctgctggcagccctcagccttatagtgtgtgtggggggtggacgaggggtcatgaggacagggatggggctgggcgtctctggtaaggaccagtaagtgccaggcaggacgtactctgaaggctcagccgtggcccatctgggacacagccctgctcccgaaggggctccaggggaactgctcagccaggtgattcaccagggcacgggcaggccaggctgaacccggggccccagtgtgcgatgtggggaggtgactgggtgagcgtgaacagggcgtggggtgcgcgggggcggtggccgtgtgaccggtgcccggccctcagaagacgaagcagcgctccgtggggtggcccacgtggtcccaggttgggaaggcaggcgtactggatcatgggtggggggccacacatcagcaccagcggctcctcctctgggggtggaaggtggtcccggatcatctcctcattcacgaagccctggccgtagtcccaggcttcaggggctctgtccagcgtgtaccagagcttgaagcgtgcagaatgtttgttcctgagttcctccagctcaggtcgcagcaggatgtccttctcggtctggttggcaaagagcaggtggcacacagtgtggtcatcagggtccttcatgatggcgcggatcacctgcagcatcggggtgatgcctgtccctcccgcgatcatgcccacagacttcactgtcctgatgatagggttggactttttgtcaggtcggatggcgaacttccctttgccctggtagaccagccagcccactggggccccggaactcaatggtgtctccaatctgcatgctctccaggtactgagacatcttccctccagcgggaaacttgggatgggtgtccttgaagtaaaccttgatgaccaggtccacgaagcccttgtcatcatcgctggagatgggtgtatagggccggacgaccaggtttccatcaattcgagccgagaggtagatgtgctggccgacagggaggcccaggatgtgctggggtgacggcagggcaaagcggaagcgccgggtgtcatggctgatgatctcccggtcgatgagccgcagcgggtacttgatgtccgggctctcgagggtgatggctggcgtggagcgctggaacagcttcatgagcagactgtacaggaaccagactgggaagagcaccatatggcccaacgtgctgagctgggcccccatggtggcccgcgccgcgctc

SEQ ID NO: 45338 - DNA, 2231 bp, Homo sapiens
ggcggtggcggaagtgggagcgggcctggagtcttggccataaagcatgaggcggcggcagcgggcggagttggcggcttggagagctcgggagagttccctggaaccagaacttggaccttctcgcttctgtcctccgtttagtctcctcctcggcgggagccctcgcgacgcgcccggcccggagcccccagcgcagtcgcgcgtttgaaggatgacctctaggaagaaagtgttgctgaaggttatcatcctgggagattctggagtcgggaagacatcactcatgaaccagtatgtgaataagaaattcagcaatcagtacaaagccacaataggagctgactttctgaccaaggaggtgatggtggatgacaggctagtcacaatgcagatatgggacacagcaggacaggaacggttccagtctctcggtgtggccttctacagaggtgcagactgctgcgttctggtatttgatgtgactgcccccaacacattcaaaaccctagatagctggagagatgagtttctcatccaggccagtcccccgagatcctgaaaacttccccatttgttgtgttgggaaacaagattgacctcgaaaacagacaagtggccacaaagcgggcacaggcctggtgctacagcaaaaacaacattccctactttgagaccagtgccaaggaggccatcaacgtggagcaggcgttccagacgattgcacggaatgcacttaagcaggaaacggaggtggagctgtacaacgaatttcctgaacctatcaaactggacaagaatgaccgggccaaggcctcggcagaaagctgcagttgctgagggggcagtgagagttgagcacagagtccttcacaaaccaagaacacacgtaggccttcaacacaattcccctctcctcttccaaacaaaacatacattgatctctcacatccagctgccaaaagaaaaccccatcaaacacagttacaccccacatatctcttcacacacacacacacacggcacacacacacacacagatctgacgtaatcaaactccagcccttgcccgtgatggctccttggggtctgcctgcccacccacatgagccccgcgagtatggcagcaggacaagccagcggtggaagtcattctgatatggagttggcattggaagcttattctttttgttcactggagagagagagaactgtttacagttaatctgtgtctaattatctgattttttttattggtcttgtggtctttttaccccccctttcccctccctccttgaaggctaccccttgggaaggctggtgccccatgccccattacaggctcacacccagtctgatcaggctgagttttgtatgtatctatctgttaatgcttgttacttttaactaatcagatctttttacagtatccatttattatgtaatgcttcttagaaaagaatcttatagtacatgttaatatatgcaaccaattaaaatgtataaattagtgtaagaaattcttggattatgtgtttaagtcctgtaatgcaggcctgtaaggtggagggttgaaccctgtttggattgcagagtgttactcagaattgggaaatccagctagcggcagtattctgtacagtagacacaagaattatgtacgccttttatcaaagacttaagagccaaaaagcttttcatctctccagggggaaaactgtctagttcccttctgtgtctaaattttccaaaacgttgatttgcataatacagtggtatgtgcaatggataaattgccgttatttcaaaaattaaaattctcattttctttcttttttttcccccctgctccacacttcaaaactcccgttagatcagcattctactacaagagtgaaaggaaaaccctaacagatctgtcctagtgattttacctttgttctagaaggcgctcctttcagggttgtggtattcttaggttagcggagctttttcctcttttccccacccatctccccaatattgcccattattaattaacctctttctttggttggaaccctggcagttctgctcccttcctaggatctgcccctgcattgtagcttgcttaacggagcacttctcctttttccaaaggtctacattctagggtgtgggctgagttcttctgtaaagagatgaacgccaatgccaataaaattgaacaagaacaatgatcaaaaaaaaaa

SEQ ID NO: 45339 - DNA, 559 bp, Homo sapiens
  misc_feature (1)...(559): n = a,t,c or g
tttttttttttttcaggtaaactggtcatttattagcagtggtacaactgtttggcataacaggtttccagtaaataggcatggagttgcatggcggtgacagagccaggcgcaggtgcaggcgcaggccagcatctctcacttcttccactcgttcttttcgtagtcccacttggaggctaagccctggatggggttcaccttcatgtccagcatcctcttggtctgcttggccacccactctttgtcaaagctttgcgggagggggccgtacactacggtgtgagacaggttatggggcaagactatctcaacaggttgtttctaggccaatccctcacacaggttaaatcctcccgacacaccagccaccaggtcagcagagccacctgccactcaacacccgtttcaaacacacggtttctgaccactgacaacactgacattttaaaattagccctttgtttgtaaaaagttagcaacaaaataagctaaaagcagaaggtcctctctaaaggctatggataacaggatntgacaaacagagcccaaggtgacc

SEQ ID NO: 45340 - DNA, 3098 bp, Homo sapiens
ggccgagcgcccgcgctgcccactcgctcgctcgcgcactcagacgcgcgccacaacagcgcgcccacaagctgcgcagctctgcaaaagtttctgctcgggatctggctctcttccccttggactttagaacgatttagggttgacagaggaaagcagaggcgcgcaggaggagcagaaaacaccaccttctgcagttggaggcaggcagccccggctgcactctagccgccgcgcccggagccggggccgacccgccactatccgcagcagcctcggccaggagggacccgggcgcctgggtgtgtggctgctgttgcgggacgtcttcgcggggctgggagtcgcgccgcagccagcgccatgcaaaactacaagtacgacaaagcgatcgtcccggagagcaagaacggcggcagcccggcgctcaacaacaacccgaggaggagcggcagcaagcgggtgctgctcatctgcctcgacctcttctgcctcttcatggcgggcctccccttcctcatcatcgagacaagcaccatcaagccttaccaccgagggttttactgcaatgatgagagcatcaagtacccactgaaaactggtgagacaataaatgacgctgtgctctgtgccgtggggatcgtcattgccatcctcgcgatcatcacgggggaattctaccggatctattacctgaagaagtcgcggtcgacgattcagaacccctacgtggcagcactctataagcaagtgggctgcttcctctttgggctgtgccatcagccagtctttcacagacattgccaaagtgtccatagggcgcctgcgtcctcacttcttgagtgtctgcaaccctgatttcagccagatcaactgctctgaaggctacattcagaactacagatgcagaggtgatgacagcaaagtccaggaagccaggaagtccttcttctctggccatgcctccttctccatgtacactatgctgtatttggtgctatacctgcaggcccgcttcacttggcgaggagcccgcctgctccggcccctcctgcagttcaccttgatcatgatggccttctacacgggactgtctcgcgtatcagaccacaagcaccatcccagtgatgttctggcaggatttgctcaaggagccctggtggcctgctgcatagttttcttcgtgtctgacctcttcaagactaagacgacgctctccctgcctgcccctgctatccggaaggaaatcctttcacctgtggacattattgacaggaacaatcaccacaacatgatgtaggtgccacccacctcctgagctgtttttgtaaaatgactgctgacagcaagttcttgctgctctccaatctcatcagacagtagaatgtagggaaaaacttttgcccgactgatttttaaaaaggaaaaaaaaaatgttttactatgtggccttccaaaataggtagtgtttgcctatgtggaaacaacagcaaactaacaccaagtgccagagtcctggatgtgcaattggtttaagtgttcatgttctagtgaacacagcttgttcaggaacaaacactaaaacgatttgagtagaggctgctggtcaccttttgtgacctgaggaatcccaggcctgtgagaaaagcaaaaattcacattgcagcacatgatgccagaaatagcactgaatcaagaaaatagccattgcggagctgccctcttgagtctttctgtccatcccattctattctgtactgtgacttcagttcaggaagttttgttttgtgttttaaataaaaggaaagagcaagtttgctcagtcaagtgatcagatcccgaatctagattcccagttctaaggccttatcacctcccctgcccataggccaacaaccatagttcctcacattagtgattagcagactctttgtggacgagtgaatttcacaaacagcacaatttcagaagaaatcgagggcacaggccctcaccttttcttcttttgacgcatcatcctgtgatgttgaaatgtcagttgcaggatgctgatgttgtgcacgtcaatcaccgggcacttgcatactcttagaaacagttcgacttcggttactgccttctcccttgaaatccttgctgcgtgcccaccaggatttcctgtgagggcccgggaatgagcaaggcatggtctgccaccagctgacggaaagcagccttctgtacaacagatgggagggtgaagggggcagaatgaaaatcgaaccaaccttttaggctgttgcaaatcagaaggagccagagaagcagggcagtctcatgcatgagaaggttacccttcaggatgacagagctgagggtctttgtaggagttgctcttgctgtgtaaagcactattgtcttggggttgagccctagggcagttcttggtaggttctgctgggcagaacatatgggttaaatctcggtagagagttttcctcatcctctatccgtaagtgtccttccatgcaaggtcccactctaggtgatagacagggaccccttctactgaacctttgaggaaaggaggaaggaagaaatgcgtttagatcttggatgcagacctttcaaagggttaaatgtaaccatatggatcaaccacatgcacatccttactacagaatccgtcctttcatttcaacttatagcaagctatgatttttatatataaatattatataaataatgtataaaacattaaaagttaactatgtaagatattatttctgaaacaatttagctatatccactatgattataaactgtgtctcgacctgtgttatttacattagctgcttaaaaaagcattgagttaatttttttaaatatcaactaaaatatcatagttctgtggtagacattgttttataatgaaataactgcaactagagaaaactgtataaaaacattaaattgtcagtatttttgtaaggttccattttgtaaagagaataatattcaaagacttttgtagcatacaaagtgaaaacttgtatctgcgaaactatacttgtattaaatgtgctttttaaataaaagctcgtaacacaactaaaaaa

SEQ ID NO: 45341 - DNA, 1386 bp, Homo sapiens
  misc_feature (1)...(1386): n = a,t,c or g
tgagtcatgcaaagtatggtgggattatcattagttcttataggttttgggataggcggtggagttaagagcaatgttttgggggcagtgggtggatctcacaaagtgcattctcaagggtggggaggattacaaagagccttctgaagggtgagggagattacaaagcacattgatcagtcagggtagggcagaaacaaatcacaatattggaatgtcatcagttaaggctgtttttacttcttttgtggatcttcagttacttcaggccatctggatgtatacgtgcaagtcacaggggatgcgatggccctggccctgggctcagaggcctgacattcctgccttctgatattaataagacaaataaaacaaaatagtgttgaagtgttggagcggcgaaaatttttggggggtggtatggagagagaatgggcgatgtttctcagggctgcttcaagtgggattaggggcggcgtgggaacctagagtgggagagattaagctgaagggaggtcttgtggtaaggggtgatattgtggggatgttagaggacacaaaggaggctttggattgggaagaagggcagcaatgagatgtagctgtactccaggaatagtcagggaagcagataatttggttaaaatatttcggcctaataagggaagtgggcaggtggggataactaaaaaagagtgcataaaagagtgttgtccaagttggcaccagagtgggggagttttcaggggttttgaagcttggccgtcaatacccacaacagttatgggggcaagggaaacaggcccttgaaaagaaggcaacgtggagtgggtagcccccgtatcgattaaacaggggatggacttaccctccactgtgagagttacccgaagctcggcttctgtgatggtccaggaggcttccgaggcgatcgggcagtgtcagtcttcagccgctaagccgagaagatctgggaaggagtcagtcagagagccttgggccggagttccaggggctctgggagtggctgccaggtgagttgaacagtccgattttcagtggggtcccacacagatgggacgcggcttaggaggaatcccaggctgcgggcattcctttgcccagtggccagatttccggcacatgtagcaagctccggatttgaaattggtgagatgtttcttgggctggtcggtctgaggacctgaggtcgtaggcggatgtttctcacagagcaaagagcaggaggacaggggattgatctcccaagggaggtcccccgatccgagtcatggcaccaaannnnnnnnnnnnnnnnnnnnnnnnnnnnnnnnnnnnnnnnnnnnnnnnnnnnnnnnnngtttatttcacctgggtgcaggtagg

SEQ ID NO: 45342 - DNA, 413 bp, Homo sapiens
  misc_feature (1)...(413): n = a,t,c or g
nntnagctatcnacatgattacgaatttaatacgactcactatagggaatttggccctcgaggccaagaattcggcacgagggctgcacagcgggagagcagctggtccagaccagccctgcagcccccactcagccggcagccagatggccccgcaaggcctccagggatggcccctagccacaggccctggctgaggtctctgggtcggtcagtgacatgtaggtaggaagcactgaaaatagtgttcccagagcactttgcaactccctgggtaagagggacgacacctctggtttttcaataccaattacatggaacttttctgtaatgggtacaatgaagaagtttctaaaaacacacacaaagcacattgggccaactatttagtaagcccggatagacttattgcc

SEQ ID NO: 45343 - DNA, 714 bp, Homo sapiens
atttccattatgaaagagaagctgaagaaagactgactgcagcgacaaagaatgatccttggataatttaaatgagataatgcagttgcaactgtgtgtccacaagtatggacatcaaatctgtgggaaaagaacaggtttgtattttcaggaaggagagaataacagtcttatagacagagggcacagctaagcacagctgccactgcaggagacaggccccatgtcaggatgccatagtgctgtggggagcacagtattacccagtgggtagggcttctgtcttccctgggagcagggatggtatcttagtcaatttttttcccttgagatgaggtctgtgcctgatgtacaacggatactccataaatgtttgacaaaccaacgaagaatgaaaaaaagcctagtcagactcccatccaaagtaggaactatctctttaacattcttgactcactatcactttacctcaaattgaacagattccatgacggaacttcattcttcacaaactagccagtgacatgtgggacagctctggccagggctctgggactgcagtgtacttgcgctctgcacggtccaggagctgtgatgtggctgtggtctaggggaatcctgcctgccccatggagttgcgcagcacaaccctggctccaattgccagaaggctctttttaatgctgaaccaaaatgtgcctttttttttttttt

SEQ ID NO: 45344 - DNA, 1013 bp, Homo sapiens; identical to SEQ ID NO: 3178
  misc_feature (1)...(1013): n = a,t,c or g

SEQ ID NO: 45345 - DNA, 547 bp, Homo sapiens
  misc_feature (1)...(547): n = a,t,c or g
gctccccctcccttgcncaannataccgtttgacatgattacgaatttaatacgactcactatagggaatttggccctcgaggccaagaattcggcacgagagacactgctcagcaacctataagaagccaagaagaagaaagaggatgccctaaatgagaccagggaatcagagacaaagctgaaggagctcccaggagtgagcaatgagaccatgatggccctctgggaagagtgtaagccctgcctgaaacagacctgcatgaagttctacgcacgcgtctgcagaagtggctcaggcctggttggccgccagcttgaggagttcctgaaccagagctcgcccttctacttctggatgaatggagaccgcatcgactccctgctggagaacgaccggnagcagacgcacatgctggatgtcatgcaggaccacttcagccgcgcgtcagcatcatanactagctttttccaggacaggtcttcacccgggagccccaggatacctaccactacctgccttcagcctgccccaccggaggcctca

SEQ ID NO: 45346 - DNA, 1357 bp, Homo sapiens
actgggtgcgcctgcagggatcggaagccggttggggtgtgagaggttttctcgctctagggagattcttcaagcaatcactatgtcaacagacacaggtgtttcccttccttcatatgaggaagatcagggatcaaaactcattcgaaaagctaaagaggcaccattcgtacccgttggaatagcgggttttgcagcaattgttgcatatggattatataaactgaagagcaggggaaatactaaaatgtccattcatctgatccacatgcgtgtgggcagcccaaggctttgttgtagggagcaatgactgttggtatgggctattccatgtatcgggaattctggggcaaaacctaagccttaggaaggaaggagatgctgtcttgggtcttgttgggagggagcttgctttagttagatgtcttattattaaagttacctattattgttggaaataaactaatttgtatgggtttagatggtaacatggcattttgaatattggcttcctttcttgcaggcttgatttgcttggtgaccgaattactagtgactagtttactaactaggtcattcaaggaagtcaagttaacttaaacatgtcacctaaatgcacttgatggtgttgaaatgtccaccttcttaaatttttaagatgaacttagttctaaagaagataacaggccaatcctgaaggtactccctgtttgctgcagaatgtcagatattttggatgttgcataagagtcctatttgccccagttaattcaacttttgtctgcctgttttgtggactggctggctctgttagaactctgtccaaaaagtgcatggaatataacttgtaaagcttcccacaattgacaatatatatgcatgtgtttaaaccaaatccagaaagcttaaacaatagagctgcataatagtatttattaaagaatcacaactgtaaacatgagaataacttaaggattctagtttagttttttgtaattgcaaattatatttttgctgctgatatattagaataatttttaaatgtcatcttgaaatagaaatatgtattttaagcactcacgcaaaggtaaatgaacacgttttaaatgtgtgtgttgctaattttttccataagaattgtaaacattgaactgaacaaattacctataatggatttggttaatgacttatgagcaagctggtttggccagacagtatacccaaacttttatataatatacagaaggctatcacacttgtgaaattctcttgtctaatctgaatttgcattccatggtgttaacatggtatatgtattgttattaaagtaagtgacccatgaaaaaaaaaaaaaaaa

SEQ ID NO: 45347 - DNA, 1208 bp, Homo sapiens
cctcgtcgccagcagcagatgaccagctcgcagaaggccctgatgctcgagctgaaatccctgcaggaggaaccggtggagggcttccggatcaccctggtggacgagtccgacctctacaactgggaggtggccatcttcggaccccccaacaccctctacgaaggcggctacttcaaggcgcatattaaatttcctattgactacccctattcaccacctaccttcagattcttgaccaaaatgtggcaccccaacatttatgagaatggagatgtatgcatttcgattcttcatccgcctgtagatgacccacagagtggagaactgccttctgaaaggtggaatcctactcagaatgtgaggactatcctattaagtgtaatctcactgcttaatgagcccaacaccttctccccagccaatgtcgatgcttcagttatgttcaggaaatggagagacagtaaaggaaaagacaaagaatatgctgaaattattaggaaacaagtttcagccactaaggccgaaggcaggaaaaggatggagtgaaggtccccacaaccctggcggaatactgcatcaaaactaaagtgccttccaatgacaacagctcagatttgctttacggacgacttgtatgatgacgacattgatgatgaagatgaggaggaggaagatgccgactgttatgatgatggatgattctgggaatgaggagtcgtgacgtgctccttcagtgcccctgtactgccctgcccatctcaggccaaagggaggggagcaagtggggggacctggccatggcccctcagcaaaaacctattcacagcgggtggggaaacacacacagctcctgctgactcccccttatggatctcagtttgctcctttttatggacctttaatgggagagagagtaaccctccacagaatgtctgaattcttgcattctttacccttccatcactatattgattctttttttaaaaaacatgaacccaaactcccgcctcacttcgtctctacagaatgttcacagcaaaacacgtttggtctgtttttagattcttgaagaattcaatagtctttcaagatgtttaatgtgtttaaagctgggaacctgttgggagttcacaagtgctgcatatactgggtagcaaaagaaaatggaaaaaaacccacaaaacaaactttaaaaaaaaaaaaaa

SEQ ID NO: 45348 - DNA, 3864 bp, Homo sapiens
ttcacacggcacgacttcatcgagaccaacggggagcaactgcctggtgacactgctgccgctgctaaacatggcctacaagttccgcacccacagccctgaagccctggagcagctatacccctgggagtgcttcgtcttctgcctgatcatcttcggcaccttcaccaaccagatccacaagtggtcgcacacgtactttgggctgccacgctgggtcaccctcctgcaggactggcatgtcatcctgccacgtaaacaccatcgcatccaccacgtctcaccccacgagacctacttctgcatcaccacaggagtaaaagtccctcgcaatttccgactgttggaagaactcgaagaaggccagaaaggagtaggagatggcacagttagctggggtctagaagatgacgaagacatgacacttacaagatggacagggatgataattgggcctccaagaacaatttatgaaaaccgaatatacagccttaaaatagaatgtggacctaaatacccagaagcacccccctttgtaagatttgtaacaaaaattaatatgaatggagtaaatagttctaatggagtgtaggtggacccaagagccatatcagtgctagcaaaatggcagaattcatatagcatcaaagttgtcctgcaagagcttcggcgcctaatgatgtctaaagaaaatatgaaactccctcagccgcccgaaggacagtgttacagcaattaatcaaaaagaaaaaccacaggcccttccccttccccccaattcgatttaatcagtcttcattttccacagtagtaaattttctagatacgtcttgtagacctcaaagtaccggaaaggaagctcccattcaaaggaaatttatcttaagatactgtaaatgatactaattttttgtccatttgaaatatataagttgtgctataacaaatcatcctgtcaagtgtaaccactgttccacgtagttgaacttctgggatcaagaaagtctatttaaattgattcccatcataactggtggggcacatctaactcaactgtgaaaagacacatcacacaatcaccttgctgctgattacacggcctggggtctctgccttctccccttaccctcccgccttccaccctccctgcaacaacagccctctagcctggggggcttgttagagtagatgtgaaggtttcaggtcgcagcctgtgggactactgctaggtgtgtggggtgtttcgcctggcacccctgggtttctttaagtcttaagtgatgccccttccaaaccatcatcctgtccccacgctcctccactcccgcccttggccgaagcatagattgtaacccctccactcccctctgagattggccttcggtgaggaattcagggctttccccatatcttctctcccccacctttatcgaggggtgctgctttttctccctcctcctcaagttcctttttgcaccgtcaccacccaacaccttccatgacacttccttgctttggccagaagccatcaggtaaggttggaaagagcctctgacctcccttgtttagttttggaaccatactcactcactctccaccagcctgggaaatgaatattgggtcctcagccctgccaccctctgctgtcatcagctgatgcattgtttttagctcaggttttgataaggtgaaaagaatagtcaccagggttactcagacctgccagctctcggagtccttggtggttgaaacttggagaaagaccgcatgaagatacttgtaagcacacatgatccctctgaattgttttactttcctgtaactgcttttgcttttaaaaattgaagaagttttaaacagggctttcatttggtcatcccttgcaatccattggggtctagtttggaatctgacaactggaacaaaaagaaccttgaatccggtgcatgccttggttttggtgctgctgctgcttcccaagatcctcagcagggattaagaaggaacccggtgtgcacagcagatccccgaaattggtgggcttgacctcctggcaaattgctgcgtctttccacttgctgttcaggaccactaaatgctgaaatgtggatgcataccgaaataaaagcaattcattgtgtactaaaggttttttttttttttttaatttagtatttgtgtaaaaccaccttttgaagcagcaactatcaagtctgaaaagcaattgatgtttccattaatctttttctggggggaaaaccttagttctaaggatttaacatcctgtaagtgaagtttaacataacagtattccataagcagcctttttattgtcagaccattgcctgattttaatataataaaaaaaaagtgtgcgttaatatttaaaaaaaaaacctttgtcaccccctgcctgctagctggggaccgctccttggcagatgtcatcatccatgagatctcccacagttggtttgggaacctggtcaccaacgccaactggggtgaattctggctcaatgaaggtttcaccatgtacgcccagaggaggatctccaccatcctctttggcgctgcgtacacctgcttggaggctgcaacggggcgggctctgctgcgtcagcacatggacatcactggagaggaaaacccactcaacaaggttccgcgtgaagattgaaccaggcgttgacccggacgacacctataatgagaccccctacgagaaaggtttctgctttgtctcatacctgggcccacttggtgggtgatcaggatcagtttgacagttttctcaaggcctatgtgcatgaattcaaattccgaagcatcttagccgatgactttctggacttctacttgggaatatttccctgagcttaagaaaaagagagtggatatcattccagggttttgagtttgatcgatggctgaatacccccggctgggcccccgtacctccctgatctctcccctggggactcactcatgaagcctgctgaagagctagcccaactgtgggcagccgaggagctggacatgaaggccattgaagccgtggccatctctccctggaagacctaccagctggtctacttcctggataagatcctccagaaatcccctctccctcctgggaatgtgaaaaaacttggagacacatacccaagtatctcaaatgcccggaatgcagagctccggctgcgatggggccaaatcgtccttaagaacgaccaccaggaagatttctggaaagtgaaggagttcctgcataaccaggggaagcagaagtatacacttccgctgtaccacgcaatgatgggtggcagtgaggtggcccagaccctcgccaaggagacttttgcatccaccgcctcccagctccacagcaatgttgtcaactatgtccagcagatcgtggcacccaagggcagttagaggctcgtgtgcatggcccctgcctcttcaggctctccaggctttcagaataattgtttgttcccaaattcctgttccctgatcaacttcctggagtttatatcccctcaggataatctattctctagcttaggtatctgtgactcttgggcctctgctctggtgggaacttacttctctatagcccactgagccccgagacagagaacctgcccacagctctccccgctacaggctgcaggcactgcagggcagcgggtattctcctccccacctaagtctctgggaagaagtggagaggactgatgctcttcttttttctctttctgtcctttttcttgctgattttatgcaaagggctggcattctgattgttcttttttcaggtttaatccttattttaataaagttttcaagcaaaaatta

SEQ ID NO: 45349 - DNA, 444 bp, Homo sapiens; identical to SEQ ID NO: 20843
  misc_feature (1)...(444): n = a,t,c or g

SEQ ID NO: 45350 - DNA, 2468 bp, Homo sapiens
gccacacggtctttgagctgagtcgaggtggaccctttgaacgcagtcgccctacagccgctgattccccccgcatcgcctcccgtggaagcccaggcccgcttcgcagctttctccctttgtctcataaccatgtccaccaacgagaatgctaatacaccagctgcccgtcttcacagattcaagaacaagggaaaagacagtacagaaatgaggccgtcgcagaatagaggtcaatgtggagctgaggaaagctaagaaggatgaccagatgctgaagaggagaaatgtaagctcatttcctgatgatgctacttctccgctgcaggaaaaccgcaacaaccagggcactgtaaattggtctgttgatgacattgtcaaaggcataaatagcagcaatgtggaaaatcagctccaagctactcaagctgccaggaaactactttccagagaaaaacagccccccatagacaacataatccgggctggtttgattccgaaatttgtgtccttcttgggcagaactgattgtagtccccattcagtttgaatctgcttgggcactcactaacattgcttctgggacatcagaacaaaccaaggctgtggtagatggaggtgccatcccagcattcatttctctgttggcatctccccatgctcacatcagtgaacaagctgtctgggctctaggaaacattgcaggtgatggctcagtgttccgagacttggttattaagtacggtgcagttgacccacatgttggctctccttgcagttcctgatatgtcatctttagcatgtggctacttacgtaatcttacctggacactttctaatctttgccgcaacaagaatcctgcacccccgatagatgctgttgagcagattcttcctaccttagttcggctcctgcatcatgatgatccagaagtattagcagatacctgctggggctatttcctaccttactgatggtccaaatgaacgaattggcatggtggtgaaaacaggagttgtgccccaacttgtgaagcttctaggagcttctgaattgccaattgtgactcctgccctaagagccatagggaatattgtcactggtacagatgaacagactcaggttgtgattgatgcaggagcactcgccgtctttcccagcctgctcaccaaccccaaaactaacattcagaaggaagctacgtggacaatgtcaaacatcacagccagccgccaggaccagatacagcaagttgtgaatcatggattagtcccattccttgtcagtgttctctctaaggcagattttaagacacaaaaggaagctgtgtgggccgtgaccaactataccagtggtggaacagttgaacagattgtgtaccttgttcactgtggcataatagaaccgttgatgaacctcttaactgcaaaagataccaagattattctggttatcctggatgccatttcaaatatctttcaggctgctgagaaactaggtgaaactgagaaacttagtataatgattgaagaatgtggaggcttagacaaaattgaagctctacaaaaccatgaaaatgagtctgtgtataaggcttcgttaagcttaattgagaagtatttctctgtagaggaagaggaagatcaaaacgttgtaccagaaactacctctgaaggctacactttccaagttcaggatggggctcctgggacctttaacttttagatcatgtagctgagacataaatttgttgtgtactacgtttggtattttgtcttattgtttctctactaagaactctttcttaaatgtggtttgttactgtagcactttttacactgaaactatacttgaacagttccaactgtacatacatacaggatgctgcaagataggaaattccacatagaaattagaaacctagtcagaggacaagcttcatacagtatgtacagttggaactgttcaagtatagtttcagtgtaaaaagtgctacaataacaaaccacatttaagaaagagttcttagtagagaaacaataagacaaaataccaaacatagtacacaacaaatttatgcctcagctacatgatctaaaagttaaaggtcccaggagccccatcctgaacttggaaagtgtagccttcagaggtagtttctggcacaacgttttgatcttcctcttcctcaacgccaagaccaaggtgcgagggcttattgagatcatctccaatgcagcagggtacgagaatatccccatccagcaccatgaagaaaacttcctgaggcagttggctcagaaggtccctgacaagctgaataaccctaagttcaatgatccgcacatcaagaccaacctgctcctgcaggctcacctgtcccgcatgcagctgagtgctgagttgcagtcagatacggaggaaatccttagtaaggcagtccggctcgtccaggcctgcgtggatg

SEQ ID NO: 45351 - DNA, 1100 bp, Homo sapiens
tggcacgaggggaagaccaggcagcccagctgaaggcagtaagctcggctcacagtcgcaggagagttctggggtacacgggcaaaggggcttgagaaggcccggaggcgaagccgaagagaagcaactgtgccccggagaagagaagctcgcccattccagactgggaaccagctttcagtgaagatggcagggccagaactgttgctcgactccaacatccgcctctgggtggtcctacccatcgttatcatcactttcttcgtagggcattgatccgccactacgtgttccatcctgcttgcagagcgacaagaagctcacccaggggaacaagtatcttgacagttcaagtcctaattcgaagcagagtcctcagggaaaatgggaaaatacattcccaaacagtctttcttgacacgaaaatattatttcaacaacccagaggatggatttttcaaaaaaactaaacggaaggtagtgccaccttctcctatgactgatcctactatgttgacagacatgatgaaagggaatgtaacaaatgtcctccctatgattcttattggtggatggatcaacatgacattctcaggctttgtcacaaccaaggtcccatttccactgaccctccgttttaagcctatgttacagcaaggaatcgagctactcacattagatgcatccctgggtgagttctgcatcctggtacttccctcaatgtatttgggcttcggagcatttactctctgattctggggccaagataatgccgctgaccaatcacgaatgatgcaggagcagatgacgggagcagccatggccatgcccgcagacacaaacaaagctttcaagacagagtgggaagctttggagctgacggatcaccagtgggcactagatgatgtcgaagaagagctcatggccaaagacctccacttcgaaggcatgttcaaaaaggaattacagacctctattttttgaagaccgagcagggattagctgtgtcaggaacttggagttgcacttaaccttgtaactttgtttggagctggcacctcttgaaataaaaaggaggatgcacgagctggcaggcatgc

SEQ ID NO: 45352 - DNA, 2010 bp, Homo sapiens
  misc_feature (1)...(2010): n = a,t,c or g
cgcgggtcgctggcgggggtcgtgagggagtgcgccgggagcggagatatggagggagatggttcagacccagagcctccagatgccggggaggacagcaagtccgagaatggggagaatgcgcccatctactgcatctgccgcaaaccggacatcaactgcttcatgatcgggtgtgacaactgcaatgagtggttccatggggactgcatccggntcactgagaagatggccaaggccatccgggagtggtactgtcgggagtncagagcatcaccagcagcagcagcagcagatcaaacggtcagcccgcatgtgtggtgagtgtgaggcatgtcggcgcactgaggactgtggtcactgtgatttctgtcgggacatgaagaagttcgggggccccaacaagatccggcagaagtgccggctgcgccagtgccagctgcgggcccgggaatcgtacaagtacttcccttcctcgctctcaccagtgacgccctcagagtccctgccaaggccccgcgaccactgcccacccaacagcagccacagccatcacagaagttagggcgcatccgtgaagatgagggggcagtggcgtcatcaacagtcaaggagcctcctgaggctacagccacacctgagccactctcagatgaggacctacctctggatcctgacctgtatcaggacttctgtgcaggggcctttgatgaccatggcctgccctgggatgagcgacacagaagagtccccattcctgggaccccgcgctgcggaagagggcagtgaaagtgaagcatgtgaagcgttcgggagaagaagtctgagaagaagaaggaggagcgttacaagcggcttcggcagaagcaggaagcacaaggttaattggaaacacccagagagggctgatgccaaggaccctgcgtcactgccccagtgcctggggcccggctgtgtgcgccccgcccagcccagctccaagtattgctcagatgactgtggcatgaagctggcagccaaccgcatctacgagatcctcccccagcgcatccagcagtggcagcagagcccttgcattgctgaagagcacggcaagaagctgctcgaacgcattcgccgagagcagcagagtgcccgcacccgccttcaggaaatggaacgccgattccatgagcttgaggccatcattctacgtgccaagcagcaggctgtgcgcgaggatgaggagagcaacgagggtgacagtgatgacacagacctgcagatcttctgtgtttcctgtgggcaccccatcaacccacgtgttgccttgcgccacatggagcgctgctacgccaagtatgagagccagacgtcctttgggtccatgtaccccacacgcattgaaggggccacacgactcttctgtgatgtgtataatcctcagagcaaaacatactgtaagcggctccaggtgctgtgccccgagcactcacgggaccccaaagtgccagctgacgaggtatgcgggtgcccccttgtacgtgatgtctttgagctcacgggtgacttctgccgcctgcccaagcgccagtgcaatcgccattactgctgggagaagctgcggcgtgcggaagtggacttggagcgcgtgcgtgtgtggtacaagctggacgagctgtttgagcaggagcgcaatgtgcgcacagccatgacaaaccgcgcgggattgctggccctgatgctgcaccagacgatccagcacgatcccctcactaccgacctgcgctccagtgccgaccgctgagcctcctggcccggaccccttacaccctgcattccagatgggggagccgcccggtgcccgtgtgtccgttcctccactcatctgtttctccggttctccctgtgcccatccaccggttgaccgcccatctgcctttatcagagggactgtccccgtcgacatgttcagtgcctggtggggctgcggagtccactcatccttgcctcctctccctgggttttgtt

SEQ ID NO: 45353 - DNA, 1350 bp, Homo sapiens
aactggaaggttcgtgtgctagttagatgggcgccaggggtcgcggcgggaagcatggaggggtctttgggggcctttgggaacatggagtcctattctgttccgcctggggcctcggtggcggcttgcacgccccgagatgacggccgctgccctaggcagggccggcgggcgattgcgcgtgtcctgctcctcttaggcccgggaccgcgggatgggtgtcggcgtgaccaggcctgagctccctgtctctcctcagtgacatcgtctttaaaccctgcgtggcaatccctgacgcaccgccgtgatgcccagggaagacagggcgacctggaagtccaactacttccttaagatcatccaactattggatgattatccgaaatgtttcattgtgggagcagacaatgtgggctccaagcagatgcagcagatccgcatgtcccttcgcgggaaggctgtggtgctgatgggcaagaacaccatgatgcgcaaggccatccgagggcacctggaaaacaacccagctctggagaaactgctgcctcatatccgggggaatgtgggctttgtgttcaccaaggaggacctcactgagatcaggggacatgttgctggccaataaggtgccagctgctgcccgtgctggtgccattgccccatgtgaagtcactgtgccagcccagaacactggtctcgggcccgagaagacctcctttttccaggctttaggtatcaccactaaaatctccaggggcaccattgaaatcctgagtgatgtgcagctgatcaaagactggagacaaagtggggagccagcgaagccacgctgctgaacatgctcaacatctcccccttctcctttgggctggtcatccagcaggtgttcgacaatggcagcatctacaaccctgaagtgcttgatatcacagaggaaactctgcattctcgcttcctgggagggtgtccgcaatgttgccaagtgtctgtctgcagattggctacccaactgttgcatcagtaccccattctatcatcaacgggtacaaacgagtcctggccttgtctgtggagacggattacaccttcccacttgctgaaaaggtcaaggccttcttggctgatccatctgcctttgtggctgctgcccctgtggctgctgccaccacagctgctcctgctgctgctgcagccccagctaaggttgaagccaaggaagagtcggaggagtcggacgaggatatgggatttggtctctttgactaatcaccaaaaagcaaccaacttagccagttttatttgcaaaacaaggaaataaaggcttacttctttaaaaagtcaaaaaaaaaa

SEQ ID NO: 45354 - DNA, 1179 bp, Homo sapiens
ttttgcgaacggcgagcagcggcggcggcgcggagagacgcagcggaggttttcctgggtttcggaccccagcggccggatggtgaaatcctccctgcagcggatcctcaataagccactgcttcgcccagagcagaaggaaggggataaacccagcgccaccatccacggccagcgcgcaccatgccggctcctaagcctggcacagccgcggcggcagcagcagttgagagttccaggggtctccctccactgctgtagtaaccccgggtccggggccttcggtggttgctcctgatgcccctcacccacccctgaagatcccaggtgggcgagggaatagtcagagggatcacaatctttcagctaacttattctactccgatgatcggctgaatgtaacagaggaactaacgtccaacgacaagacgaggattctcaacgtccagtccaggctcacagacgccaaacgcattaactggcgaacagtgctgagtggcggcagcctctacatcgagatcccgggcggcgcgctgcccgaaggggagcaaggacagctttgcagttctcctggagttcgctgaggagcagctgcgaagccgaccatgtcttcatttgcttccacaagaaccgcgaggacagagccgccttgctccgaaccttcagctttttgggctttgagattgtgagaccggggcatcccctttgtccccaagagacccgacgcttgcttcatggcctacacgttcgagagagagtcttcgggagaggaggaggagtagggccgcctcggggctgggcatccggcccctggggccaccccttgtcagccgggtgggtaggaaccgtagactcgctcatctcgcctgggtttgtccgcatgttgtaatcgtgcaaataaacgctcactccgaattagcggtgtatttcttgaagtttaatattgtgtttgtgatactgaagtatttgctttaattctaaataaaaatttatattttacttttttattgctggtttaagatgattcagattatccttgtactttgaggagaagtttcttatttggagtcttttggaaacagtcttagtcttttaacttggaaagatgaggtattaatcccctccattgctctccaaaagccaataaagtgattacacccgaaaaaaaaaaaaaaaaaa

SEQ ID NO: 45355 - DNA, 8731 bp, Homo sapiens
cgtctgaaggtcacgagccccgccgacagcccagacccagtccgggctagcccgaggcctccctggaggtggacggtttcagtccacacatactgggaccccagggagacactcaccagcatccgagcctgccatgtttcagaggcaggtcgccgccggactccgacgcggccgggaaggcgacggtgtcctggaaggaccgatccacgcagaccgacactgggcgcggacgcacgaaccaaagcgcgggaaggaggcgtgaagaaggacggacgttaaagagcttctcgccgctgattggtcatcagaggagcacttccttcacaggacgtgaaacgggggcggtttgggaagtttagagaccattctccgccgaccaaaacccgtcaaaggattatcagacacgcgggtcggacggtccacatcagccggcagcccgggcgggtcccggggtgcgagcagcgcacttccggtgagctatttcgttttgtatccctccgccgacgtcaacgggaaagtagtgcggaccgctctctcggtggtccggggtggtacagccacgtgacaacgccaggccccgccttccccctcttttggttacagacgtgagggctctttggagacgtaaacatctccgagtggcgagggtgggcggggctagggcttgggaaagggcggggtggcttgcttgaggtgtggaaagaccagaagaaggtgaggtcaagagagtgcgaatgaggcattccaatggtgggtgggccctgacctgagagagtggcgcggggaggggtgaaagcgcggcgatcctggaacgccagcgggcgttgcggcctatgcgcgaggggcggggcgattaggtcatagagcggctcccagcgttccctgcggcgtaggaggcggtccagactacaaaagcggctgccggaaagcggccggcacctcattcatttctaccggtctctagtagtgcagcttcggctggtgtcatcggtgtccttcctccgctgccgcccccgcaaggcttcggccgtacatcgaggccatttccagcgacttgtcgcacggcttttctatatacttcgttccccgccaaccgcaaccattgacgccatgtcgggttattcgagtgaccgagaccgcggccgggaccgagggttattcgagtgaccgagaccgcggccaccgagggtgagtttgggagccgagctgtcaggccaggcgggtggggggatgggagggcgggtcagggtggcggccggcgggggctttgcggcttggacttggcctttccgggctatcttgggacttcctttcccgaacgttgcgccattttgatattcacgtcacagtgattggaagagatttgacggtgtagtgtcttcaagcttgctttttgtgtggggatttggggagctgtcggggcggctgccatttggtagctgttgagggagttgagagggagcgtattgtgcggatgaaagcggacgcttcgaggcatgacgaaggaacatctgttaggtgcggcgtttcggtaggtgtttttggagtggccgggcattctgtgggagcgaggggaccacttccaaagccctggtgctgttggggtaggagggcggccggcatcagccatgtggctgagtcgcgagtacaaaatgccggcctcggacatggcggcggcgcctttgttaccccgcccggcggaggagctcaaaatggcagcgtcgagaaaatgtggcgcagagagaaatgcgagacaaagggggaagcgccgccccagcgggaacgccgcccggccgactccgcccgggccgggactcctcccccggtagtcgccggctcctccttttcttttttcctgctttatataattttgattcgttgatccggagctctaccgcggcgttcccccagctgggtttgctagcagaagtgtttctgagaaaacccttgttctgttatcgctgactgtactgtttaggttcttaccatcaaagctgtttggttccaaaacggccatatgagtaacatcgtcgtgatgctcttcggttcatgtagccttgttattgctgatagtgaattgctaggctggtggggaagattacagtaaccacaagaagtggtgtgtgccagaatcccaaattctggcatgtgggtgacaagtttccgacatgataaatccccggcttccgacatgataaatcccaggctgtttacatgacctaagtaatgtgtacttgggactacgggaaatgttaactgtggctgttgagagagagagagattttcacgaaggacagtgctaggtttacctctcgaagtctgttttcagtggtttttagcttgtgccaatggatgacaaatctatacagaaacctgggtatagcctaaagaaaatgtgaataacgttttttttcattccaggtttggtgcacctcgatttggaggaagtagggcagggcccttatctggaaagaagtttggaaaccctggggagaaattagttaaaaagaagtggaatcttgatgagctgcctaaatttgagaagaatttttatcaagagcaccctgatttggctaggcgcacagcagtgagtaaattcatgtggcttcatcaggctgtaactcgatcgtggattctagtaaatgaaattatgacaggtgttttgcaaataactcaattttggtagagttacatgttctgacttcataattgggaaaggtgtgactcacttttggaatataggtggctttgggatttttacttaaattaggttgagtataacaagaaatttttttttcataatagggtgttcataggtgggtcagattaaaatgaaggctactttaactagttactaaattatgaagttaggggcttatcaattacgtatttacgtagggtggtgtcatgaatttagactgtatattgtttgcagcaagaggtggaaacatacagaagaagcaaggaaattacagttagaggtcacaactgcccgaagccagttctaaatttttatgaagccaatttccctggtaagtgctacttttcagttctacctacccgtgtttttgtttccacctaccccctctttttcttggcatcactaatttttactaaatatctgttactaattatagcaaatgtcatggatgttattgcaagacagaatttcactgaacccactgctattcaagctcagggatggccagttgctctaagtggattggatatggttggagtggcacagactggatctgggaaaacattgtctgtaagtttgggagaactcttgagttgatctgatatatgcaagaaaatgtaatggtaatttaaaaacgagtattttaatgtgatttctgtttgtccccactttcaccctaaatagtatttgcttcctgccattgtccacatcaatcatcagccattcctagagagaggcgatgggcctattgtaagtatatattttacttttattagaagcataatgtgtagattttagactacatagctaaagatgtaatcatttgtggtggttttatatagaggttagctcatcctattcagctggagctgttttgggtattggacaacacatgaagaaaggatctgctagtataataagttagcagtttaaaactagtaccaggtttgtgctgaaagctgtttctcttttccttagtgtttggtgctggcaccaactcgggaactggcccaacaggtgcagcaagtagctgctgaatattgtagagcatgtcgcttgaagtctacttgtatctacggtggtgctcctaagggaccacaaatacgtgatttggagagaggtatgtaatgaaaagggttttatttgtcattggtgctaaatatcctaggtattgtagttacacttacgtatttaattaaaggtgtggaaatctgtattgcaacacctggaagactgattgactttttagagtgtggaaaaaccaatctgagaagaacaacctaccttgtccttgatgaagcagatagaatgcttgatatgggctttgaaccccaaataaggaagattgtggatcaaataagagtaagtgtcctttgaaatatgtgatcaaactgaattgtgtttcactcttaagagtctgatactaatttttccccccaaaatccattagcctgataggcaaactctaatgtggagtgcgacttggccaaaagaagtaagacagcttgctgaagatttcctgaaagactatattcatataaacattggtgcacttgaactgagtgcaaaccacaacattcttcagattgtggatgtgtgtcatgacgtagaaaaggatgaaaagtaagttttattaactctgttatatttgcttcctaacaactttgctgtaaaattgaggatcattgtttggtgagttgttttaggttatttcagttggtgtgatttcatttagttagcctactaatcctgaaaatttcttgaatcttcaaataatggccgtcaccatttatagctttccatatgaagaattgaattcatgtctccctggttgacttaaggaccaagggtcgaactgctcgataagtggattagcaggcgtcttccttccttttgacctttccagccatgtaaattgaacttaatgttttgctgaccataaatgtgtggccctagcaatggtcttttaaaactcaggattttcctttctctctcctattattagacttattcgtctaatggaagagatcatgagtgagaaggagaataaaaccattgtttttgtggaaaccaaaagaagatgtgatgagcttaccagaaaaatgaggagagatgggtatgtgtgagctcctccttgaagcagattgattaaaacagcttaggaagggcaaacttggatcacgagcagtggatttttttcatatctgatagtgaatttaactttttcatttctggcgaaattaaagagatctgtgaccaaaagtggtcaagcactggagtctgaggttttcaatgtgagtttaataacacaacttgtcttttaacttaggtggcctgccatgggtatccatggtgacaagagtcaacaagagcgtgactgggttctaaatggtaaatatttcaaatgaagtatttttcccccttacttaacctagctagaattcaaacatggaaaagctcctattctgattgctacagatgtggcctccagagggctaggttagtacaaactcgcattcatggcttggtttcccagaagatctccatttaacttttttaaagaaagtttattgctttctttaacctgcattttttctaagttttttttcacataaaggtgctgtctttgtggcaaggcctaggcatgacaatcggaggactcgagggggatggaggactagtgatcggctggctgcttccagtcgattagagaggtgaaaaagctgaacgtgtgccagtaatcttcaaaaggcagaacatatcacctctgccccgtaaactgttctctccgagggaaaaaatggaagttatcctcacagttcactgccgtggtatttcttctgtcccatgctttgcatgactgccatggtacagccttgtttcaaactgttcactgtgatctgtgggtctttgagtttcagtgagtttgctgaaatgtcgaagaagtagttccaaacttcaatgttcaatgaaatttttgttcaagtttgaaatggagagagcagctttaaaaggtactaagccttttacaaattggtgagtactggcacatgagatctagagcaggagcaacttctcacacatagtaagtgggaaaagaaagtgctttgaaagttcctccctcacctacacagtagtcgtcatgtcgagacctgccagagagagacacattctcaagtgaatcctgggcttcttggaagcgcttgcctagacgagacacagtgcataaaaacaacttttgggggacaggtatgttttcttgcagctgcggttgtaaggtcttggcaagacaagcagtgtggccagaattttgaacttctgatgaatgtgtaatgcaaaggaccttgtacatttttttgtttcaaggtcctcaaaatgagcacatgaagaggttgctgtgaaactttaagtggccctactgcgcagaagcattcagatgtcacttgatgatctgtaagggaacttgctgatttgggaatgtgcttagggaacacacattccttttgacagggtctgtccactgggtgggtgatgaattatacagatgacatgtgcttttttttcttttttcaacctcaatggtattcctacaggaaatgggataaccattttaactgtatttttttgcagcccgtaccttcttggggaatacaattgtctaactttttatttttggtctggctgttgtggtgtgcaaaactccgtacattgctattttgccacactgcaacaccttacagatgtggaagatgtgaaatttgtcatcaattatgactaccctaactcctcagaggattatattcatcgaattggaagaactgctcgcagtaccaaaacaggcacagcatacactttctttacacctaataacataaagcaagtgagcgaccttatctctgtgcttcgtgaagctaatcaagcaattaatcccaagttgcttcagttggtcgaagacagaggttcaggtaaggatgactgataggaaatgttggtagttacgagtcacatcgttgtctacaaatccatttaaatggtattggagggtgagtaaaaccttgaatgtgaaaacttaagctgaaaaattgtaaaaacatttcacgcctaccatgaatagatctgtttctttctgtccacaatgatttgtgtcatagacataattgatcaatttgcaattgttttcttgacaggtcgttccaggggtagaggaggcatgaaggatgaccgtcgggacagatactctgcgggcaaaaggggtggatttaatacctttagagacagggaaaattatgacagaggttactctagcctgcttaaaagagattttggggcaaaaactcagaatggtgtttacagtgctgcaaattacaccaatgggagctttggaagtaattttgtgtctgctggtatacagaccagttttaggactggtaatccaacagggacttaccagaatggttatgatagcactcagcaatacggaagtaatgttccaaatatgcacaatggtatgaaccaacaggcatatgcatatcctgctactgcagctgcacctatgattggttatccaatgccaacaggatattcccaataagactttagaagtatatgtaaatgtctgtttttcataattgctctttatattgtgtgttatctgacaagatagttatttaagaaacatgggaattgcagaaatgactgcagtgcagcagtaattatggtgcactttttcgctatttaagttggatatttctctacattcctgaaacaatttttaggttttttttgtactagaaaatgcaggcagtgttttcacaaaagtaaatgtacagtgatttgaaatacaataaatgaaggcaatgcatggccttccaataaaaaatatttgaagactgaattaagtggaaattgtactttattttatataatgtcatgtaaaactttgctagtatggttaaatgagaaaatagtaaaatagatacaaagtcatctatatagtgtgagaacgtgggtgactttttcaaagtttataatttaaaaagctccaaataactggctttttcaagagacttatactcatgctcttggctatactgtgaattactgaaatgttgaacaaacctgtgaaagacatacattagccctttaagatggccaggagctaagcttgagtctcctttactgaatttcgttcttagtgcaggttacttgtagattctagtcttcacaggctccctggggctcttaactagtcacactgggagtcatgaatgtctttccaataattcagggaattctagagatcctcaaactgtaaggtctattcatactcaacacaaggaaaaaacctcattaaaattaatgactaatcaggaggcaacgtaaccaaaagcacagtgaatgaaagttttcatggtaggttcaacatgggtttattgctagaaagatccaggggatagctttaggtttaacttcggctcaccaacgtaactttctaatcatttatttcagtaatagctagaagtgggtctgaatgttttcccagagtctgatacgtgtttttttttgccagaagagaggtcttcaggagacttcatttaaattctgattattaaactgaggctttaattgatgttaatgccttatgtcaaatgtaaagttagaatttgctagggctgggatagggagtgatatttctaggacttagacattgaaaactaattcagcctgtagtaacctggatggttttcaatggcatggttagtcaaattcatggttttaaacttagaagcagctttcgggggagagggtaggttggagcatttattacatattttactgtttaatgtcttaaccgtgggccttttaatttgtaaacactgaaatgattgttgggctgtggaaaacatttacctatttaccttggaagttttaaaagacagtccactttttagcatgtgtgttgtgtccagcctgtggtcgtcttaactaataaatgtgatttttctccccaaaggggaaaaaaaaaaaaaa

SEQ ID NO: 45356 - DNA, 665 bp, Homo sapiens; identical to SEQ ID NO: 3287

SEQ ID NO: 45357 - DNA, 774 bp, Homo sapiens
ttttctcgttccccggccatcttagcggctgctgttggttgggggccgtcccgctcctaaggcaggaagatggtggccgcaaagaagacggtgagtgaggcgggccaggcccggaagacgattcacgtggagagatgttttggccagggcgggcagatgtgagcccacgggggtgacagcatgcctgctggcatttggagggccccagaaggaatcccagtggccctctcaatgacttggggtcctcgacttcggaagtttaaggggctcggcttcaaaaagctgggtccggttttgaggcggttgcaggcgaggcccttaggtccgtatttaatgtttgctttgtagaaaaagtcgctggagtcgatcaactctaggctccaactcgttatgaaaagtgggaagtacgtcctggggtacaagcagactctgaagatgatcagacaaggcaaagcgaaattgggtcattctcgctaacaactgcccagctttgaggaaatctgaaatagagtactatgctatgttggctaaaactggtgtcccatcactacagtggcaataatattgaactgggcacagcatgcggaaaatactacagagtgtgcacactggctatcattgatcccaggtgactctgacatcattagaagcatgccagaacagactggtgaaaagtaaaccttttcacctacaaaaatttcacctgcaaaccttaaacctgcaaaattttcctttaataaaatttgcttgttttaaaaactaaaaaaaaaaaaa

SEQ ID NO: 45358 - DNA, 2183 bp, Homo sapiens
gggaaggtacgcagccttcccgcacagaaaatcgcgatccactacccaatccatgggcaccaccgccagctacccagagttctgcaactaccagcacgaccacaagcactggtagtgggtctggcaatagttccagcaatgctactgggaacaccgttgctgccgctaattatgtcgccagcatctttagtaccccaggcatgcagagcctgctgcaacagataactgaaaacccccagctgattcagaatatgctgtcggcgccctacatgagaagcatgatgcagtcgctgagccagaatccagatttggctgcacagatgatgctgaatagccccgctgtttactgcaaatcctcagctgcaggagcagatgcgggccacagctcccagccttcctgcagcagatgcagaatccagacacactatcagccatgtcaaacccaagaggcaatgcaggctttaatgcagatccaggcaggggctacagacattagccactgaagcacctggcctgattccgagcttcactccaggtgtgggggtgggggtgctgggaaccgctataggccctgtaggcccagtcacccccataggccccataggccctatagtcccttttacccccataggccccattgggcccataggacccactggccctgcagccccccctggctccaccggctctggtggccccacggggcctactgtgtccagcgctgcacctagtgaaaccacgagtcctacatcagaatctggacccaaccagcagttcattcagcaaatggtgcaggccctggctggagcaaatgctccacagctgccgaatccagaagtcagatttcagcaacaactggaacagctcaacgcaatggggttcttaaaccgtgaagcaaacttgcaggccctaatagcaacaggaggcgacatcaatgcagccattgaaaggctgctgggctcccagccatcgtaatcacatttctgtacctggaaaaaaaatgtatcttatttttgataatggctcttaaatctttaaacacacacacaaaatcgttctttactttcattttgattcttttaaatctgtctagttgtaagtctaatatgatgcattttaagatgggagtccctccctcctacttccctcactccctttctcctttgcttatttttcctaccttcccttcctcttgtctccccactccctccctctttgtttccttccttccttatttcctttagtttccttccttagccgttttgagtggtgggaatcaatgctgtttcactcaaaagtgttgcatgcaaacacttctctttattctgcatttattgtgatttttggaaacaggtatcaaccttcacagttgggtgaacaagtgttgtcctacagatgtccaatttatttgcatttttaaacattagcctatgatagtaatttaatgtagaatgaagatattaaaaacagaagcaaattatttgaagctctctaatttgtggtacgatattgcttattgtgactttggcatgtatttttgctagctaaatgctgtaagatttataccattgatcttttttgctatatttgtatacagtacagtaagcacaattggcactgtacatctaaaaatattacagtagaatctgagtgtaatatgtgtaaccaaaatgagaaagaatacaagaaatgtttctggagctagttatgtctcacaattttgtagaatcttacagcatctttgataaacttctcagtgaaaatgttggctaggcaagttcagttaaaatatagtagaaatgtttatcctggtatctctaagtatacatttaattgtacagaaaatttacagtgtaacattgtgtcaacatttgcagattgactgtatatgaccttaatctttgtgcagcctgaaggatcagtgtagtaatgccaggaaagtgctttttacctaagacttccttctcagcttctcccataaagagaccctaatatgcattttgatttgtaattggaaatgtaactttcactgaaagtgtcatgtgatgtttgcattacttttaactgctatgtataaaggaaagtgtgtcttttgacttcatcagttatttctcttgtgcacagagaaaaatgcattaaaaatgactaaaaaaaataaaaaattaaaaaatggaaaaaaaaaa

SEQ ID NO: 45359 - DNA, 2305 bp, Homo sapiens
gcgcgactgagccgggtggatggtactgctgcatccgggtgtctggaggctgtggccgttttgttttcttggctaaaatcgggggagtgaggcgggccggcgcggcgcgacaccgggctccggaaccactgcacgacggggctggactgacctgaaaaaaatgtctggatttctagagggcttgagatgctcagaatgcattgactggggggaaaagcgcaatactattgcttccattgctgctggtgtactattttttacaggctggtggattatcatagatgcagctgttaatttatcccaccatgaaagatttcaaccactcataccatgcctgtgggtgttataggcaaccatagccttcctaatgattaatgcagtatccgaatggacaagtccgaggtgatagttacagtgaaggttgtctgggtcaaacaggtgctcggcattgggcttttcgttggtttcatgttggcctttggatctctgattgcatctatgtggattctttttggaggttatgttgctaaagaaaaagacatagtataccctggaattgctgtatttttccagaatgccttcatcttttttggagggctggtttttaagtttggccgcactgaagacttatggcagtgaacacatctgatttcccacagcacaacagccctgcatgggtttgtttgtttttttactgctcactcccaaccttttgtaatgccattttctaaacttatttctgagtgtagtctcagcttaaagttgtgtaatactaaaatcacgagaacacctaaacaacaaccaaaaatctattgtggtatgcacttgattaacttataaaatgttagaggaaactttcacatgaataatttttgtcaaattttatcatggtataatttgtaaaaataaaaagaaattacaaaagaaattatggatttgtcaatgtaagtatttgtcatatctgaggtccaaaaccacaatgaaagtgctctgaagatttaatgtgtttattcaaatgtggtctcttctgtgtcaaatgttaaatgaaatataaacattttttagtttttaaaatattccgtggtcaaaattcttcctcactataattggtatttacttttaccaaaaattctgtgaacatgtaatgtaactggcttttgagggtctcccaaggggtgagtggacgtgttggaagagagaagcaccatggtccagccaccaggctccctgtgtcccttccatgggaaggtcttccgctgtgcctctcattccaagggcaggaagatgtgactcagccatgacacgtggttctggtgggatgcacagtcactccacatccaccattgaaggaaaggaaaaaagggcagagacttgacactccagtcttagacaggggacaatttctttgtagttgttctgataataaactgggttccatgttgcatttcatctgtgtactgaaccactagcctaatagaccagcacggtcaactagaatgacaaacattagctactgggaactcttgttgtctcttcctcttcagaactcttgtccccccaggctccccacctctgcaagatgggatacactcttcaggaccacagtttgaaatgtctttcataaaatgtgctacaattagccttcggaatatttgctgggtgatttaaatgtgtgggtctcatttccatgctagccatggtcatctgacagtctctacgctgtgaatattgcctggtgatcaagactctcctcaaagaaatgacttgctgtcatcccacatgaactcctgatgttttttctacaaaagtccataaaatgtgaaaactggagaagatcttagaggttgaagcccaccttctcttttcacataggagggaacagaccatggaaatttaaacgacttcctcacggtcacagaactagttttttaatcctcaggcagtgcatccccccaccctacaactgagcacaacctctttccccacagtgcaattcagaatatgctcagggaatgccagccaccttgtaaaactgctgggagaaaagcatgattcccacaaggactaagtatcagtgatttgtaattttcctgttttgtattatctgctttgctgatgtagacaagagttaactgagtagcatgctttattaagcatgagaaagaatcttaagaattgtcaataaaattaacccaaaactttaataatgtgtctgtaaccaagaaaatattgatagcatcatcctaatgaaactaaacatttattttaaacttattaaattgactcttaaactaaaaaaaaaaaa

SEQ ID NO: 45360 - DNA, 842 bp, Homo sapiens
aatgagatggtgcacgatgcacagttgaagtgaacttgcggggtttttcagtatctacgattcatagatctggaattcgcggccgcgtgggcacaactgtgttcactagcaacctcaaacagacaccatggtgcacctgactcctgaggagaagtctgccgttactgccctgtggggcaaggtgaacgtggatgaagttggtggtgaggccctgggcaggctgctggtggtctacccttggacccagaggttctttgagtcctttggggatctgtccactcctgatgctgttatgggcaaccctaaggtgaaggctcatggcaagaaagtgctcggtgcctttagtgatggcctggctcacctggacaacctcaagggcacctttgccacactgagtgagctgcactgtgacaagctgcacgtggatcctgagaacttcaggctcctgggcaacgtgctggtctgtgtgctggcccatcactttggcaaagaattcaccccaccagtgcaggctgcctatcagaaagtggtggctggtgtggctaatgccctggcccacaagtatcactaagctcgctttcttgctgtccaatttctattaaaggttcctttgttccctaagtccaactactaaactgggggatattatgaagggccttgagcatctggattctgcctaataaaaaacatttattttcattgcaaaaaaacagaaatggagatatcaagtaagacagtctttggagaagtctgcatagagagggagaaggaatcctcaagagggggaggtagttaaaagagttttttggggttgacattatgatttcctttttttttttttt

SEQ ID NO: 45361 - DNA, 611 bp, Homo sapiens
  misc_feature (1)...(611): n = a,t,c or g
tttttttttccggcgttcaagatgtcgaagcgaggacgtggtgggtcctctggtgcgaaattccggatttccttgggtcttccggtaggagctgtaatcaattgtgctgacaacacaggagccaaaaacctgtatatcatctccgtgaaggggatcaagggacggctgaacagacttccccgctgctggtgtgggtgacatggtgatggccacagtcaagaaaggcaaaccagagctcagaaaaaaggtacatccagcagtggtcattcgacaaccgaaagtcattaccgtagaaaagatggcgtgtttctttattttgaagataatgcaggagtcatagtgaacaataaaggcgagatgaaaggttctgccattacaggaccagtagcaaaggagtgtgcagacttgtggccccggattgcatccaatgctggcagcattgcatgattctccagtatatttgtaaaaaaaggcaaaccactgctggatgtaccttttttctgagctctggtttgcctttcttgactgtggccccggattgcatccaatgctggcagcattgcatgattctccagtatatttgtaaaaaatnaaaaaaaactaaacccatt

SEQ ID NO: 45362 - DNA, 413 bp, Homo sapiens
cggacgcgtgggttattttttgagtgtgagcatttaattgaaaataagaaagctatgaagtaaatgttaacttctctgtagcagctaatgcatagagacactaaaacccacaccacattttgtgggaaatgaggatcctgatcctcttttgtcctctccaggtagtctcgcaggttatgcagcttaagttcagtcttctttatgctgcgattgatttccacctcagtggcttagcctttgggacagtggatactgcaacagccaagaactcttggttatccgcacaagctgctggtagactacattagccctctggttttccagctcaacctctgataaagtggactgagagccacgctgctcagtctgtttcgtcagccgactcaggttattttcagggaaggcatggaggg

SEQ ID NO: 45363 - DNA, 2148 bp, Homo sapiens
ggacggggtccgactcagaaatggcggcctccatgttctacggcaggctagtggccgtggccaccctttcggaaccaccggcctcggacggcccagcgggctgcctgctcaggttctgggaagttctggattgtttaataaccatggactccaagtacagcagcaacagcaaaggaatctctcactacatgaatacatgagtatggaattattgcaagaagctggtgtctccgttcccaaaggatatgtggcaaagtcaccagatgaagcttatgcaattgccaaaaaattaggttcaaaagatgtcgtgataaaggcacaggttttagctggtggtagaggaaaaggaacatttgaaagtggcctcaaaggaggagtgaagatagttttctctccagaagaagcaaaagctgtttcttcacaaatgattgggaaaaaattgtttaccaagcaaacgggagaaaagggcagaatatgcaatcaagtattggtctgtgagcgaaaatatcccaggagagaatactactttgcaataacaatggaaaggtcatttcaaggtcctgtattaataggaagttcacatggtggtgtcaacattgaagatgttgctgctgagactcctgaagcaataattaaagaacctattgatattgaagaaggcatcaaaaaggaacaagctctccagcttgcacagaagatgggatttccacctaatattgtggaatcagcagcagaaaacatggtcaagctttacagcctttttctgaaatacgatgcaaccatgatagaaataaatccaatggtggaagattcagatggagctgtattgtgtatggatgcaaagatcaattttgactctaattcagcctatcgccaaaagaaaatctttgatctacaggactggacccaggaagatgaaagggacaaagatgctgctaaggcaaatctcaactacattggcctcgatggaaatataggctgcctagtaaatggtgctggtttggctatggccacaatggatataataaaacttcatggagggactccagccaacttccttgatgttggtggtggtgctacagtccatcaagtaacagaagcatttaagcttatcacttcagataaaaaggtactggctattctggtcaacatttttggaggaatcatgcgctgtgatgttattgcacagggtatagtcatggcagtaaaagacttggaaattaaaatacctgttgtggtacggttacaaggtacacgagtcgatgatgctaaggcactgatagcggacagtggacttaaaatacttgcttgtgatgacttggatgaagctgctagaatggttgtaaagctctctgaaatagtgaccttagcgaagcaagcacatgtggatgtgaaatttcagttgccaatatgatctgaaaacccagtggatggctgaaggtgttaaatgtgctataatcattaagaatactgtgttctgtgttattgttctttttctttttagtgtgtggagattgtaattgccatctaggcacacaaacatttaaaaggatttggactgcatttaattgtaccattcagaatggactgtttgtacgaagcatgtataatgcagttatcttctttctttcgtcgcagccagtcttttttgcttctcctacaaaacgtaacttgcaatttgccagtttattattgttggatacaaagttcttcattgataagagtcctataaataagataaatacgaagataaagctttattctttagtgttaaaatacagtatatctaataactagcctcattagtagagcagtatattaaaacaatgttttatgtaaaaagtgtttatcttcagcaccaaatacatgataaatgtatcaatcactatttataaacagagctttcaaacactcctcagaatattcttctaagtattttgatgaagtaactttgtaattatttgaacattgttttaatcattaggaaacactgattaactgcaagtcttcatgattctgtcatattaagaaacacctgtaggtttgcttcaaataaaggcatatataccaaggacttacagacaaaattaagaatgtcaatttaagttaataaaaatctcccaatatgaaaaaaaaaaaaaaaaaaaa

SEQ ID NO: 45364 - DNA, 821 bp, Homo sapiens
  misc_feature (1)...(821): n = a,t,c or g
gcaaccactgcagctgggccatcagaccatggcatgccggggcncanagcagaaganccaactgcagatgaggatgccgcgtggaagccgaagccgcacctcccgcatggcccctccggccagccgggcccctcagatgagagctgcacccaggccagcaccagtcgctcagccaccagcagcggcacccccatctgcagttggctcttctgctgctgcgccccggcagccaggtctgatggcccagatggcaaccactgcagctggcgtggctgtgggctctgctgtggggcacacattgggtcacgccattactgggggcttcagtggaggaagtaatgctgagcctgcgaggcctgacatcacttaccaggagcctcagggaacccagccagcacagcagcagcagccttgcctctatgagatcaaacagtttctggagtgtgcccagaaccagggtgacatcaagctctgtgagggtttcaaatgaggtgctgaaacagtgccgacttgcaaacggattggcctaatgaagaagttcaacctggagagatggaaaatcagctctcataactaagttaatttagtataaaaatagaattgatagtgagggtataaagtgtaaccatcagttaaacctctcctgtcattcctagcttccttgcttcagaattgaaatggaagtgggggtgtccctactctgtagaatctgggactgggcaaatgtttgtgtggcctccttaaactagctgttatgttatgattttattctttgtgagttaattagaataaagtcattttcttccaaggtaaaaaaaaaa

SEQ ID NO: 45365 - DNA, 1441 bp, Homo sapiens
ttttttaacagtcataaccttttatttcatgtcataaaatggtgacacttacttgtgttaaaaaaatttaataacaatgtaatcattatatctctgcaatcagctgaagttctaagaaaaaatgacaatgttgaaagttgtatcatcattattataaactttcatgttcagtatatgtaaactccaaagccaatttcaaaagatatttttgtgaaataccattctttaaaaaaaaggatattatatataattgtatgaatgttaaatgttttacagtactgatttgctacattttatgtatgctgtaaaacaaataccattttaaagtatattggaattcgtaactaaagtaataaataaatgcttgaaatatacccagtagaaacttatttttattatccaatccttttgataagaaatgcctctagtgttatgtacaaacttgatcttcttggaaacgtgttgtccactgcttttctgtttctgtcacagtagctataaacagctgtttaaggatatccttatctaaatttctgccaaggaggaccaatcgatttgttctctcagtgtcatccttccagctcactggagtctcctccagatcatagagctcatggacaccctggacaatcacttgttgtgatttgtctttgattgacaccaatcccttcagccttatgacctccatgcagtgattgtccttgtttctcacattcttttcccacaggagattctgaataaacatattaagatgttcttcctttgcatttcctggtacttcaaatgtgattgtaacaatactctgatcaaggtgaggttgtgttcctggcacatgctgaagtttttttctgcaaacttattccagagagactatcaaaggcatgaagatctaatacattagagagatcaactcttgatctttgtgtttctaagatttgtcctagtccatttatggatctaattgtcgctcttaatttctttacatcttcttctggaaccaagtctgttttattaatgagaatggcatctgccaaagcaacttgtctagtagcttcattgataaggccatcaggtttctcttctgttaaatgttttaatccatattttgaatccacaatagttatgataccatcaagataaatatcactccctaattcagcatcaacccaaaacatagaagccactgcaccagggtctgctaatccagtggtctctaacagtatgtaatcaaatttccccttcttttgcatcaaattctcaatagctctaaggccattgtccttcactgaacagcagaggcaaccgtttctaagttccagccactcttcatagagctctccaccttggctgacagctaaggatttctccagcgcacttccttccccaaattcatttaaaatgaccgctactcttttactatgttgctctgtcaaaatatagt

SEQ ID NO: 45366 - DNA, 1396 bp, Homo sapiens
  misc_feature (1)...(1396): n = a,t,c or g
ttttttttttcgaaacctaaaaatgtattttattttgaagttgtgctttggattttccccaatccaacatctgttgagtgacagtcttaggttcacacaaagcatctccaagcatacatacaatattccagttatcaacactattttaaagaatataccattttacacaaatgtgacatacaagtcagacgccacaacattgcgattccctggaagatgtgacttctcttctgcatgggaagtagatctgcaccagcccttccagtgctctgcgcatcccggtgctggcatcaccgctcctcatctccttggggagaagccagggcgccctgaggaggttggctgagaccagtgtttccagtttacaggctgctggctacaaactcctctgttttctaaattgggatgctagtagccccaccccacctctcttccccgaagactgacccttcagagtccacaccaggaaaaggatccatgccatgaggggtggagcagggctctttgaagcatcatgctggtttcggcaagcatagctgaggaaggctggtctccctaggccctggatggccagctccttttggcttttcggtgtaaaaatcacagtgtgcaacctcaattccagttgtttgcagtgagctctgccgagaagaactctcctcctatcggttcctagtcctctcgacaggaccatctcacaggtgttaggagcaccagagatggggaagcagctctgcccccagagctgggtttagtaggtgaccactcacacactgttcagttcatgatgcaaattagcgcggatggacactgatcaaggggatggtgaacacgagtcatgtacagggttgaaagagaaataaggcaggagcaacagaacaggcccaaagtgttgcccattaagaaaggctttgcttttactttccttagaggggagtgtgctggagagagggagaaagggcaagtgtgggtaccagttttgatcagttggattgaaaggaatgtaaagtgaaagatagggtttcattttcagcaaggaaacagatccttgggtatgaaagccccgttggctcgggacctgtgtaggcccaggtgacaggcaagaacaggtcaggaaacagcaacaaaaatcaagactgtgggttgcctcttctaggctgactcacttcactgaaagagttcttcagttctcctgcctagcacttggaaaggtttctctggtgctgcaggttagccttctcattagtgatttcccacanagnacctcttttcctttgcacnggattaaaaaaaanaatcctaccactttccatagacctaactaccaatttcgcnggttggtccaanaagaatctcttctaggtcaaagattagaaaacttagattttcctgccag

SEQ ID NO: 45367 - DNA, 1247 bp, Homo sapiens
atagttctccctgagtgagactcacctgctcctctggcccctggtcctgtcctgttctccagcatggtgtgtctgaagcctccctggaggttcctacatggcaaagctgacagtgacactgatggtgctgagctccccactggctttggctggggacacccgaccacgtttcttgcagcaggataagtatgagtgtcatttcttcaacgggacggagcgggtgcggttcctgcacagagacatctataaccaagaggaggacttgcgcttcgacagcgacgtgggggagtaccgggcggtgacggagctggggcggcctgacgctgagtactggaacagccagaaggacttcctggaagacaggcgcgccgcggtggacacctactgcagacacaactacggggttggtgagagcttcacagtgcagcggcgagttgagcctaaggtgactgtgtatcctgcaaggacccagaccctgcagcaccacaacctcctggtctgctctgtgaatggtttctatccaggcagcattgaagtcaggtggttccggaacagccaggaagagaaggctggggtggtgtccacaggcctgattcagaatggagactggaccttccagaccctggtgatgctggaaacagttcctcggagtggagaggtttacacctgccaagtggagcacccaagcgtgacgagccctctcacagtggaatggagagcacagtctgaatctgcacagagcaagatgctgagtggagtcgggggctttgtgctgggcctgctcttccttggggccgggctattcatctacttcaagaatcagaaagggcactctggacttcacccaacaggactcgtgagctgaagtgcagatgaccacattcaagggggaaccttctgccccagctttgcatgatgaaaagctttcctgcttggctcttattcttccacaagagaggactttctcaggccctggttgctaccggttcagcaactctgcagaaaatgtccatccttgtggcttcctcagctcctgcccttggcctgaagtcccagcattgatggcagtgcctcatcttcaactttagtgctcccctttacctaaccctacggcctcccatgcatctgtactccccctgtgtgccacaaatgcactacgttattaaatttttctgaagcccagagttaaaaatcatctgtccacctggctccaaagacaaaaaataaaaagaaaagaaaaagggaaa

SEQ ID NO: 45368 - DNA, 3889 bp, Homo sapiens
ctctttccctctcccaacatggcggcctcagcaaaaaagaagaataagaaggggaagactatctccctaacagactttctggctgaggatgggggtactggtggaggaagcacctatgtttccaaaccagtcagctgggctgatgaaacggatgacctggaaggagatgtttcgaccacttggcacagtaacgatgacgatgtgtatagggcgcctccaattgaccgttccatccttcccactgctccacgggctgctcgggaacccaatatcgaccggagccgtcttcccaaatcgccaccctacactgcttttctaggaaacctaccctatgatgttacagaagagtcaattaaggaattctttcgaggattaaatatcagtgcagtgcgtttaccacgtgaacccagcaatcccagagaggttgaaaggttttggttatgctgaatttgaggacctggattccctgctcagtgccctgagtctcaatgaagagtctctaggtaacaggagaattcgagtggacgttgctgatcaagcacaggataaagacagggatgatcgttcttttggccgtgatagaaatcgggattctgacaaaacagatacagactggagggctcgtcctgctacagacagctttgatgactacccacctagaagaggtgatgatagctttggagacaagtatcgagatcgttatgattcagaccggtatcgggatgggtatcgggatgggtatcgggatggcccacgccgggatatggatcgatatggtggccgcgcatccctatgatgaccgaggcagcagagactatgatagagcctatgcattcccggatagccagtggcagaagagcatttggcagtgcgtatcgcagggatgatgactacagaggaggcggggaccgctatgaagaccgatatgacagacgggatgatcggtcgtggagctccagagatgattactctcgggatgattataggcgtgatgatagaggtcccccccaaagacccaaactgaatctaaagcctcggagtactcctaaggaagatgattcctctgctagtacctcccagtccactcgagctgcttctatctttggaggggcaaagcctgttgacacagctgctagagaaagagaagtagaagaacggctacagaaggaacaagagaagttgcagcgtcagctggatgagccaaaactagaacgacggcctcgggagagacacccaagctggcgaagtgaagaaactcaggaacgggaacggtcgaggacaggaagtgagtcatcacaaactgggacctccaccacatctagcagaaatgcacgaaggagagagagtgagaagtctctagaaaatgaaacactcaataaggaggaagattgccactctccaacttctaaacctcccaaacctgatcagcccctaaaggtaatgccagccccctccaccaaaggagaatgcttgggtgaagcgaagttctaaccctcctgctcgatctcagagctcagacacagagcagcagtcccctacaagtggtgggggaaaagtagctccagctcaaccatctgaggaaggaccaggaaggaaagatgaaaataaagtagatgggatgaatgccccaaaaggccaaactgggaactcttagccgtggtccaggagacggagggaacagagaccactggaaggagtcagataggaaagatggcaaaaaggatcaagactccagatctgcacctgagccaaagaaacctgaggaaaatccagcttccaagttcagttctgcaagcaagtatgctgctctctctgttgatggtgaagatgaaaatgagggagaagattatgccgaatagacctctacatcctgtgcttttctcctagtttctctccaccctggaacattcgagagcaaatcaaaacctctatccagacaagacaaaataaaactcaccatctcctgaagacctttcttacctttttttaaaaacaaaaaatgaaattattttgcatgctgctgcagcctttaaagtattgaagtaactggagaattgccaatacagccagagagaaagggactacagctttttagaggaaaagttgtggtgcgttatgtcaccatgcagttgccagtgtgattagtgcctaggggtctccatttagcagaaatggtaatgacagtgatataatgcctggaacctggttgggcagtaggggagggaggtagaaggaaaagtgtgagatttctaccttttagtttttatcctattgtggcatatatgaattctcaaacattatctgaataaattttccactcttggaaaggtagatttagcctcaagttgttctagtctccaggaggctgccagcccctcctcttatttaattctgagttttgggggccagcctagagggaattccttttttttttttttttaaccccccaggggggtagttgggagtgagactataggccataaagaatgggactgcattggaccaaaataaatgggaaaatcgtggtttgaaaagaagcttttgggaagtgatgagtcattttgcaccaggtaataggggaaaattgtgtgacctccagcaaacacatgaatggttatttcctggagccggaagcacttgggggtcgtggtaattcccagtgttttctgtgtcctagttttaccctttctaaacactgtcctttttgaaagttttgaatatatccacattctattgaaaccttgaaactaaaaatttagactcttatcgtcatcttaagttcttcatgctactcttaacctcccaaaaagcagtatctaagtcacatacatgatgtcttgggcattttctgagccatggagaactctgaaaggaagaatcgctgcttttctcaagcaaatcggtttcttgatgtcttttggttctccttgcctggctcctgatgcttgggaccccttttattgatcagagtgctctagaataatggatggtcttggatgatggataaatagggacagggacagttaaattgggagcctttcttacaaccttgatggggatttttccccccaagtttccttctccactgaaatgccacactaatgcttgttgggattcatgaggtggccagaccaatgtgttgttttgttgttgttttttttttaagcttcccttgagagaataaatggtaatggagagaactatttaacaaggtcctggtttctcttgcaacacagtagctaaacttgcctgcttttatatgcatttttgtagggatcagcttggtagacagtattagcggagaaacaccttgatcttggtttgcaagcccttctcccatcagtcctagattaggccctgttcagccatgcaggggtgttggtttatgcgtgctgcagcagtgggcataatgaatataatttacccagtggacaaaggtgtgtacccaagtgaatttaaataattggtgtggattggccagtagctaagaagtgggcttttaaagagtattgaagattgaaagggtttttctttcttttttaaaaaagaaaaacaaactattgattgtagataatgaaaagctagggtttgccctcttcatgtctactctccttccaaatagttatatccaaaactgtttttccctctcccctaccttgtcccccctattaaaatagaaacagggattgattaatgtcccgctcctgaatacatgtaaaatttgtacaaaaatatcttctatgaaaatgatttgtaatctgtagacttattacctgggagatgtcttgatgtaaaatcccatcctttgggttgtgggttttttgttttctccaaataaatctgatctttaaagttaaaaaaaaaaaaaaactctagagtcgaggaattc

SEQ ID NO: 45369 - DNA, 447 bp, Homo sapiens
  misc_feature (1)...(447): n = a,t,c or g
gnggnnttnnnttntttgatcntnatacnctttntgacatgattacgaatttaatacgactcactatagggaatttggccctcgaggccaagaattcggcacgagaaaagtcccccccaggatggatgccaagatgtacctgggctatgagtatgtcactgccatccggaatctacgggaaggcacatgcccagaagccccaacagatgaatgcaagcctgtgaagtggtgtgcgctgagccaccacgagaggctcaagtgtgatgagtggagtgttaacagtgtagggaaaatagagtgtgtatcagcagagaccaccgaagactgcatcgccaagatcatgaatggagaagctgatgccatgagcttggatggagggtttgtctacatagcgggcaagtgtggtctggtgcctgtcttggcagaaaactacaataagagcgataa

SEQ ID NO: 45370 - DNA, 1730 bp, Homo sapiens
tttcttaattttggggctttattataatttttcttttcaagatgctacatagtcaaacagaactgggttggtcttttatggcataaaattaattcacagtcaaactctcaactagtactagaaggattcgctgaagagtttctctcttcccttgctccccacccacaactgctggtgccctcgcttctaaccctctgcagcccgatccatttgtcctgactccaggctaggtccccaaggggaggtcaggctcagacttggacctgggcgctggaagtgtgagtaatggttgagaggtggtataagaacaatctagaagactgactactcttcattaaaaaaggtaacctagagttgactgtcactactgagaatttccctccctatgacagttgttatttactgacccagaaaaaacacttcctggcagctcttctccagcatcccaataaaccccacctccacatgaccagactctccagagacagaggagcccacagccctccagcagcaataccagttcacccaacagagttcagcagcacgcagcattaactgtactcttgtgacaataagaaaacatgagatgaaatacattaaataagttaaatatgcattaaacatctctgaataacagtttgacttcactacatgaaccaatacaaatttagcttggtccctttaagtgaacaaagcactgccatttatttccaaagcgctgggtcaatcagtcaacacacgcctctcacttatgacgagtacgtctgatgctgccacagtgcaattcctttgggcttctgactctgttcatcagtcccaaggagctgatggcttggacagaactgaagacacggaaagcagcctgggccgggagtgggccacgtggggactactgtgtggagctgaccgcactccccagcatgctgggctccagctccccaagggccagcaccaacaggcgaggaagggtgtcattttaagagaggtaatccagcatcatgtaccaaggcctaccaatgtttaaaatgacatttacaatatgccattgtggcattactcatggtttcccttgtcattaataaagatcattcttttccccctcaatcagttactatacatttttaactttctaaaagatcgttacattatatttgtgtgtgtgtatctgtgtatgtgtgtgcagggaggggtaatttaaaggcaagacctgtgagatgtcatcatacattaatttctttttacacatggttatgataaatttaaatcccatgatatggtggatccaccaatccaatttaccatcctgtgcatgctacctctacaaggcaatcttcccaataattacaccaacgataaagaacaaaaccaccagagccaagagccgggtgctaaggccttcttccttcccagttggggctaatgctgaaatggggctgttgctctgcactgtcttcctcatccgcagtccatcttcttccttgaactgcttgttctcctcccgtagcctctgaacttcaccttgcagcctcttacattcttccataaccttcttaacttcggtgtcatccaaagaagaactcagagacttagacactattggtgtttctgtctttgatgcagttgtggatataattttatttatttctacatcatgtggtttatcattctctgctggcaattcaaacacacatctaagttttgaatccataaggtcttcctgttttgcctcc

SEQ ID NO: 45371 - DNA, 1844 bp, Homo sapiens
ggcgtcgaggcggggcgcgggaacgacggcggccatggcggctcggggccgggtgtcgtagctggtgcttgtgtcccgaggtgccatccgccaccttcttcactgcgctgctctcgctgctggtttccgggcctcgcctgttcctgctgcagcagcccctggcgccctcgggctcacgctgaagtccgaggcccttcgcaactggcaagccactatggaaggaggggtcaggattacagcagaggagactggcacacaagagttttaagtgacacccactcaatccaccccgaagctgttacacttaattaaccctcaaacttgcccagtgaagtttacaggctggtaacctacatctttgtctacgagaatcccatctccctgctctgcggcggctatcatcatctggcgctttgctgggcaatttcgagagaaccgtgggcaccgtccgccactgcttcttcaccgtgatctttcgccatcttctccgctatcatcttcctgtcattcgaggctgtgtcatcactgttcaaagctgggggaagtggaggatgccagaggttttcaccccagtgggcctttgccatgctgggagtcaccaccgtccgttctcggatgaggcgggccctggtgtttggcatggttgtgccctcagtcctggttccgtggctcctgctgggtgcctcgtggctcattccccagacctctttcctcagtaatgtctgcgggctgtccatcgggctggcctatggcctcacctactgctattccatcgacctctcagagcgagtggcgctgaagctcgatcagaccttccccttcagcctgatgaggaggatatccgtgttcaagtacgtctcagggtcttcagccgagaggagggcagcccagagccggaaactgaacccggtgcctggctcctaccccacacagagctgccaccctcacctgtccccaagccaccctgtgtcccagacgcagcacgccagtggtcagaagctggcctcctggccctcctgcacccccgggcacatgcccaccttgcctccgtaccagcctgcctccggcctgtgctatgtgcagaaccactttggtccaaaccccacctcctccagtgtctacccagcttctgcgggcacctccctgggcatccagccccccacgcctgtgaacagccctggcacggtgtattctggggccttgggcacaccaggggctgcaggctccaaggagtcctccagggtccccatgccctgagagaatttctagggaagtcatctcacttggccttctgaaggtcctccctaagagtctcctgacaaaagttacttattgaacacctctatgtgccaggctctgtgttgggtactttgatcaatgcccctgtttcagtctcatctgtactcacggcagccctgtggagtacggtgtactggcccagcttacagatgcagaaagcgagacgttctgccatcagataaagtcacgtggctctttagtaacacggacaaggctcctcgccaaggaactcgtggcagaagagggcagcagttggcagtagctgccgatgtctgtccccagctccaccattcctccctgtggctgtgccatgctcgtggtttcagtgtccgtgtgtccatgtgtctgcccttcaggagctcgcagctggtgtgcttggcggtcccaggcctgtgtagtgtctctcccctgctgcgggcgcccccaccccgattcctctccccagaagcggtgggatgggcccccatgaactgcagcagcatgctgaggtgtccatgttgtctgcctttgtataaagaaacagcctctgaaaaaaaaaaaaaaaa

SEQ ID NO: 45372 - DNA, 2834 bp, Homo sapiens
gggtacacattgcacagtctgagaaaaagccaccacgtgagaatggccataagcagataagtagcagttcaactggatgtctctcttctccaaatgctacagtacaaagccctaagcatgagtggaaaatcgttgcttcagaaaagacttcaaataacacttacttgtgcctggctgtgctggatggtatattctgtgtcatttttcttcatgggagaaacagcccacagagctcaccaacaagtactccaaaactaagtaagagtttaagctttgagatgcaacaagatgagctaatcgaaaagcccatgtctcctatgcagtacgcacgatctggtctgggaacagcagagatgaatggcaaactcatagctgcaggtggctataacagagaggaatgtcttcgaacagtcgaatgctataatccacatacagatcactggtcctttcttgctcccatgagaacaccaagagcccgatttcaaatggctgtactcatgggccagctctatgtggtaggtggatcaaatggccactcagatgacctgagttgtggagagatgtatgattcaaacatagatgactggattcctgttccagaattgagaactaaccgttgtaatgcaggagtgtgtgctctgaatggaaagttatacatcgttggtggctctgatccatatggtcaaaaaggactgaaaaattgtgatgtatttgatcctgtaacaaagttgtggacaagctgtgcccctcttaacattcggagacaccagtctgcagtctgtgagcttggtggttatttgtacataatcggaggtgcagaatcttggaattgtctgaacacagtagaacgatacaatcctgaaaataatacctggactttaattgcacccatgaatgtggctaggcgaggagctggagtggctgttcttaatggaaaactgtttgtatgtggtggctttgatggttctcatgccatcagttgtgtggaaatgtatgatccaactagaaatgaatggaagatgatgggaaatatgacttcaccaaggagcaatgctgggattgcaactgtagggaacaccatttatgcagtgggaggattcgatggcaatgaatttctgaatacggtggaagtctataaccttgagtcaaatgaatggagcccctatacaaagattttccagttttaacaaatttaagaccctctcaaactaacaggcttagtgatgtaattatggttagtagaggtacacttgtgaataaagagggtgggtgggtatagatgttgctaacagcaacacaaagcttttgcatattgcatactattaaacatgctgtacatactttttgggtttatttggaaaggaatgcaaagatgaaggtctgttttgtgtacttttaagactttggttattttactttttggaaaagaataaaccaagaattgattgggcacatcatttcaagaagtcccctctcctccacatttgttttgccaatttgcacattaaatgactcttccctcaaatgtgtactatggggtaaaaggggtagggtttaaagatgtagacagttgggttttttaagggccctttttcaataactggaacactctataacaaaggatacttatttaaatagatgacattgactatttttgtttttattaaaaggaagcttacatgcctaccaatatttaatcttttatgattgcctttttataactttttatattctcagcagagtgctttaccaattgaagtaaaatgtggcagggctggagttattgaagcagagtggcagtcttcagtttgcagagtaggggtctgtcttttaaactctgagtgcaaacttcagagttcttgccttggctgcagtttttttccttcaagaatgcagtactaacatttatttgagtggagttactgaacagtaacatagctgtgatttttggtatttgaaacactggttttaaatattttgacttgttgagggtatgttttatatagcaagacattatatagcagtaaaaaatggtgttttatcttctatataattcctgtttttattattaacaaaacagtcctaaatagcagccctcaattgtgaaaaaatttactttaaactacattaggttgtgaatgcaggttttatcagaactatgtttttgttcagtttatctgttcatatggataaatattggttgggatgacttggtgtctaatgtgtagtgctacacacctaacttatggggccaaaatagcatgtcctaatgcttgctgctgatttaaacacattaaaggtactttgcaggaaatccttgcaccatgggattaatatccaattgctgcttgtacactcattcattactaaaagttttgagaaatttttttttccagtaatgagcttaagaaatttgtggaaaataactcacctggcatcttacatctgaaataaggaatgatataaggtttttttttctcacagaagatgaagcacacaggaacctaatgggccaactgggatgaggtgactattctgagatgactattcagtggctaacttgggttaggaagaaaataattaggtattttctccaaatgttcactggtactctgccactttatttctctcatctgttacacaaagaaccaccaggaaagcaaatcagtttggttggtaactctgtaattcctaactatcactggtttggttctggactaaaactacattgacagattgaatttgcctaatatgatgactgtttttaatatggatctgtatgtgttctattcagcacaaggaaataaaattttagttgaggattcagcactaaa

SEQ ID NO: 45373 - DNA, 712 bp, Homo sapiens
tttttaagttacaataaaaaaaacctttcaaaaaggaatccttcagtatcttccagcccctccctcccttctctcctccctccctctcccaatgccaggtcagcccagtgtgattcccacagaggccagagcgtcagtggcccaggtgggacagagggtgggatccccgtacatggcgcccatgaagtcccgcacgaagtccgggaagcgcttctccacgatgctggtgcggacggcgctcatgagctgcagctggtaggcgatgttgtggaccgtgaggtggtgcagcgcggccgtgttgtcactgtgcagcagtgcgtgcaggaaggcgcggctgtgcttttggcacgtggggcaggtgcactccgggtctatggggccgaagtccttctcaaacaccttcttcctcaactgcaggttcccagtgggcaccagggcagagccaaagcgcgctgtccgtgtggggaagacgcagtcgaacatgtcacatccaagagccacgcagactaccagatcagtggcatacccaacccccatcagatatcggggcttgtccttcggcagccgagaggtgctcagcgccaccatccgccagaactgcgacttgctctcacccccgctcaggcccccgatggcgaagccaggcacgtctcgcttggtcatctcttcaaggcaggtggcccggagatctgcgtccagcccaccctggata

SEQ ID NO: 45374 - DNA, 3484 bp, Homo sapiens
  misc_feature (1)...(3484): n = a,t,c or g
gattttctacacaacctgccataaacgaaatttaagcctttggaaatttatagcattttcagctaatttgcattatttatctctgcaagatattgactagaaatcacgtttcagaacttctcagatgaaaacatcatacaacccttaaaactaagctcataatttaaaaatgtatgcagattaataggcttaaattgccaggactttagatagacattaccacttccaggttaatacttttagcggtttttatgccttcaatggtttgaagccctcaaccttagttgaaaacttaaaaatggcattgaatggctgctgcaataaggacacatgaattttggcttaagtggactaggaggacttaaatcttgcttaggcttttaaaaaatgcccacccactgggtctaggggatttgagggttattttcctgaattatggctaattatggattacaattcaaggttaaagatacacatatagtattctcaggttattcatatgatagcattttttaagagccaaagtnnnnnnnnnnnnnnnnnnnnnnnnnnnnnnnnnnnnnnnnnnnnnnnnnnnnnnnnnnnnnnnnnnnnnnnnnnnnnnnnnnnnnnnnnnnnnnnnnnnnnnnnnnnnnnnnnacgtacctatggccccaaggcactttaacaaatgagtaacagacacagttaaggtagaacctagcattttatttagatcttcattaaactgttggaattgagaaccagacatacgtaataaacctccaaaaatagatcctgaaaggcactttctgcttagggcaagcagtcatggaataagcatgtaaacaagctggcttctctgtaccacaccagccaagtcagctttctccatggccagccgcaccagctctgccctcccttctgttaacaccagccagaccccctgtaggtctaacccaaggtttttctgtaggacaccttggcctacctgggaatgctggaaacatgttgttaaaggaatcatggtgttgagagaaaaaaaaaaaaatcttttaaaagctgccatctgaggtgatggcttctctgtacttacgccatacccccagaatacaataaataagcaattagaaaacgttcaagtatgaagggatttcctcctccccgccaaaagcactgctctctgaaggaagctggtttctctgtagctacaccagctgttcagaaagctcattggacctggttttgaaaataaaacaaagttaaaaccctgggaggagttattgtgcagtgtggagtactcaggctttcttataaagaaaaaaaaaagttatctggtaccaaagtgtgcaacctacagaccctcaggtactgccctgtgacttctctgtatgacatcacaaggctgccaagtgcctgtttttctagaactaggagttggtgaggtttggctagtgctgaaaccatgcataggattggtttactaaattaaaaccttattacgtacgtcctccaaaagacagctgaaagtggagagattttgatttggtgctgttagaggtggcaattaagagcataagcaccagggagatggtttaatggtaactgccttttttgatgtcaggctggagctccaactgggaacttgcgttacatgcaagattgattggatagggaacactccctgacaaagagctacataattagaaatggatcaagttacagggaggataaggggaaggcttcacattcataatagagctcaagacattacaaattcatgctgacagggctgtggcattgccagacagaggctataagtggaactacaagtactttacgtgcacatcacaaggacattttcagcatctggtggggaaagtcaatgcaattatgactttggagcgttgggtgatagggcacaaaggttcaatttcaaagcattatttactacagtgttgtttctaggcagttacatggatcacctatgctcactaaattcattataatggtgaacaaaacacctagggacagaatagcaagcccaacttacagtcccccacaaaagctaaaattcatgtcattgactagagtgactgcaactggtcaggagctgaaagaggacaggaaaatttaggaaggagggccctttccctcagagcttgaaggcttctctgtagcctacgccaacaagtctggggaaaaaaggctaacactttcaatatttaagctttttgggcacttcccatgggaagctgtccctaccaaagtggccataggctgcagtcctctgataaattggcttcttcagatccagatccctgacaatgaccccagggcggagatcgaaattcttcttcacaatctctaatagctctctctcactcttctgagaggtaccataatggaaaatggagatagataatggatgagaaactccaatagcataagagacctgaacaagaaccctccggcacagacctcctttaacaagggattttgccacccaacgagcagcataagcagctgaacggtcgaccttggtataatcctttcctgaaaaggcacctcctccatgagcaccccaaccgccataagtgtccacaatgattttccgtccagtcaaaccagcatcaccctgaggcccaccaataacaaatctgccacttggctgtaggtggtagattgtatcctcatcaaggtatttcgcaggcacaactgctttgatgactttctcctttagggcatccctcatttcatcaagacaaacctcttcatcatgctgaacagatataacaattgtgtggactctgatgggaagcacagcacctcgatcctgcatatactgcacagtaacttgagttttagaatcagggcgtaaccaaggcaaagtgccattacggcgtagttctgccagtttggcatttagcttgtgtgccaagacaatggttaaaggcatacactcctcagtttcatcagtggcatagccaaacattaagccctggtctccagcaccaatgtcttcttcatttctgtcaagatgaacaccttgagcaatatctggtgactgttgctccaaggctaccagcacgttacaagtcttgtagtcaaaacctttggaagaatcatcatatccaatgtgtttaacagcttcacgaaccactttctggtagtcaacagcagctctggatgtaatttccccagcaagaaggatcattccagttttagcaacagtttcacaagctactttggcatcaggatcctgctgaaggtgggcatcaaggacagcatcactgatttggtcacaaatcttatctgggtgccttccccgaccgactctgaggtgaaaaggaatgtgccctcctcgatgaacgcctcgtggaagccgttgagctgtccgttcatgttggtgtcggtgtgcggaagtggccttacgaaggagcagcggcgaggcggcagcggctgcgaaattggcaagctgcggacagcgttctactcgtagcag

SEQ ID NO: 45375 - DNA, 374 bp, Homo sapiens
gcaacctcaaacagacaccatggtgcacctgactcctgaggagaagtctgccgttactgccctgtggggcaaggtgaacgtggatgaagttggtggtgaggccctgggcaggctgctggtggtctacccttggacccagaggttctttgagtcctttcgggatctgtccactcctatcagaaagtggtggctggtgtggctaatgccctggcccacaagtatcactaagctcgctttcttgctgtccaatttctattaaaggttcctttgttccctaagtccaactactaaactgggggatattatgaagggccttgagcatctggattctgcctaataaaaaacatttattttcattgcaaaaaaaaaaaaaa

SEQ ID NO: 45376 - DNA, 1187 bp, Homo sapiens
gaaggaggttcctgctgtgccagaaacccttaagaaaaagcgaaggaatttcgcagagctgaagatcaagcgcctgagaaagaagtttgcccaaaagatgcttcgaaaggcaaggaggaagcttatctatgaaaaagcaaagcacctatcacaaggaatataggcagatgtacagaactgaaattcgaatggcgaggatggcaagaaaagctggcaacttctatgtacctgcagaacccaaattggcgtttgtcatcagaatcagaggtatcaatggagtgagcccaaaggttcgaaaggtgttgcagcttcttcgccttcgtcaaatcttcaatgggaacctttgtgaagctcaaccaaggcttcgattaaccatgctgaggattgtagagccatatattgcatgggggtaccccaatctgaaagtcagtaaaatgaactaatctacaagccgtggttatggcaaaatcaataagaagcggaattgctttgacagataacgctttgattgctcgatctcttgggtaaatacggcatcatctgcatggaggatttgattcatgagatctatactgttggaaaacgcttcaaagaggcaaataacttcctgtggccccttcaaattgtcttctccacgaggtggaatgaagaaaaagaccacccattttgtagaaggtggagatgctggcaacagggaggaccagatcaacaggcttattagaagaatgaactaaggtgtctaccatgattatttttctaagctggttggttaataaacagtacctgctctcaaattgaaatatattgttgtatttgtgatttgttgttgttgttgttagcctgcctctgtcttcccttaactactgtggcaagtgtggtgtgtgataaaattaagccaaatcaacagcccatttcgtgcaaaatcagggtcgagtctgtgtgaaagacatctcttgggtttttaaaaggcttttctatacaaaagattttaattttttgttttttaactgtgctgagtgattcgaaatgggtttattctaagaaagcctgtttcacaagcatttgtacatgatttgtcggtaaggtaatccaactttggtttatggaaaaaattgaatttagttgctaaaatttatttctcgggccttcgcttgtttataaactgccatgtaaaaaaaaaaaaaaaa

SEQ ID NO: 45377 - DNA, 1254 bp, Homo sapiens
ttaggtgtggtattattttatttattggacgacttacagaaaagggttgtatttcagttatttatgcaaatagggctactgtggtcccaacagctctggctctgggcagcacaagaccctttgcccactcccagctttccaaagaacccaaacccaaatccctgccagctccaacttgctcagcactttaattgctacagtgggagccacactggtgccacaactgctcccaagcagcaatatttgtctttcagttgtctttctggtgacaatctttcagcacaaaagaatgcctcaaacagagtaggaatcagcccctgtggcaaatttttgggaagcactttggagtaggtgtccttcaggcttgccttcactggtgactaaaaaagtgactgtgatggcaggtggataatggacttgctttgccaaatgtccattctagtaaattatgtttatgattgaaataatgtcccacttttaagaacagattctcatgcctgagctagagtaccatctggaaactagtgttacttattgaaaggtttttatttttgctttatttccccctaaatgtagtttctagtctaaggctttttaccccgttagtcttgtcttccttgacatactgatctttacttcattgtgggtttctgatttggctactagagatcttgatgacaagctacttatgaggcctgggtccagtaccatcctttcaactcgaaattggccaaatcgagctgtggagtttagtacatcatctctgtcatacacagtgcagtccaccaggagacgcaatccaccaccacgaactcttcatccgatcagcacgagccattcatgtgctgaaacaccaagatctgtggaagaaatcctcagaggagcccgagtcccagtggcacccgactcgctctcctctccctcaccgacgcccctgagtcgaaataatctgctaccacctattggcacagctgaagtggaacatgtgagcactgtggggccacaaagacagatgaaaccccatggcgactctagtcgagctcaaagtgcggtggtggatgaacctaactatcagcagccacaagaaaggctccttttgcccgactttttccccagggcccaacacaattcaatcatttttggtaggagttgacgttatttcctaggattgggtttttgatagttgggggaaaggaaaaggttggggggattattagttttgggcagatttaaggtttttattttaggaggttt

SEQ ID NO: 45378 - DNA, 2110 bp, Homo sapiens
gaagtccggacgcagtagctccctgaagcggaggcgaaggggagtttaagccccagcggcggcaatggcggagaggcccgaggacctaaacctgcccaatgccgtgatcaccaggatcatcaaggaggcgctcccggacggtgtcaacatctccaaggaggcccggagcgccatctcccgcgccgccagcgtcttcgtgctgtacgccacatcctgtgctaacaactttgcaatgaaaggaaagcggaagacgctgaatgccagtgatgtgctctcagccatggaagagatggagttccagcggttcgttaccccattgaaagaagctctggaagcatataggcgggagcagaaaggcaagaaggaggcctcagagcaaaagaagaaggacaaagacaaaaaaacagactcggaagagcaagacaagagcagggatgaggacaatgatgaagacgaagaaaggctggaagaagaagaacagaatgaagaggaagaagtagacaactgaaaagggcgggagactgtggcaccttggaaggtaccacttgaaatgagacgtgctacgtgtttctgtgaagcttttccatgctgggcagagtagtctcaggcaaaagtgcctgaaaagatcagaataaaaactgactagaaataccgtcaaaaccagcacttaccaaactcagagcatctgagtagcagaatcctgttttgcttcatcaatctgaaggttatggccttttgacaagagggattctgaacgactaaattagtcagtttgctcgcttttgtttacttaaatgtatgggttagatggtttttgatctgcagtcttccctagtcccccaaataagtaataataacttcccatgctgcctgctgtgttccagatcacagggggcagccaaggctcaggaaaaactggggctttgcttatggtcagcctatgtttgattgcacagtctttgacaatagtagcttactaagactgctcagaatgagtaagctttaggaaactactaaaatgctgtgggagaataacaaaatctgttctctctcttcacttgacagaagcattaactgaattttgtttttcatagacccacttggcccaaaacctttctatattgcctgtagatgatcggcctgcctggtgtggtagtaatctgatcacagatattcttaaatcagcagtgtggaatggtattagtcaaacatggtgccagtgtcttttacaaaaacagatggcatagtgtcagatgtaccttactctctgctactgtacagctttaggatttgtcatcacctcccggaaggtgtaaaaccccaggcttcctcttcttgtagtccatctcccagacttgtgactatggcttttcattcttcaattcatgacgagtgccaaacttgattttctctaggcacagctttctccctctgtgcctcctgcttcctttctctctcctgcctctcctctgctccccatcccactttctcatctgcctccttttctcacttctgtcagtctgtaagctttgataacctgcttaatactccaaagtgtgagttcctctgatctcttgattccttagttctaatctcacgttttgtttttaagagatggagtctctcactctgtgggcccagggtgggagtgcagtggcatgatcatagctcattgcatccttgaaatcctggggctcagggtgattcctcccggcctgaggcccccctgagtatctgggacctacagatgcgtgccaccaagccctggcctaattttgtctcatgtcttctaaaaattattttgtgaagccccttcacaaaaaaccttaagggaaatctgatggtgctcaggaatctaactctccctaaaccatcctctttaactgcttctaaaatatctctgttggcctttcttagcctttttctgtttccattcagtgctccaagcgctttttgtttctaagttgagtgcttggggtttgacaggtagtgacgtgtagtttgacactgttaacttgttaaatacagtgaaaagtttgtgagtgaagaatgctgagaagattgtaatgctttgtacaaataaaagtcttgttaaaaaaaaaaaaaaaac

SEQ ID NO: 45379 - DNA, 1384 bp, Homo sapiens
  misc_feature (1)...(1384): n = a,t,c or g
gcctgcgagcagcgcgggcggcagcccgggggaagcgtccgggaccatgtctggagaactaccaccaaacattaacatcaaggaacctcgatgggatcaaagcactttcattggacgagccaatcatttcttcactgtaactgaccccaggaacattctgttaaccaacgaacaactcgagagtgcgagaaaaatagtacatgattacaggcaaggaattgttcctcctggtcttacagaaaatgaattgtggagagcaaagtacatctatgattcagcttttcatcctgacactggtgagaagatgattttgataggaagaatgtcagcccaggttcccatgaacatgaccatcacaggttgtatgatgacgttttacaggactacgccggctgtgctgttctggcagtggattaaccagtccttcaatgccgtcgtcaattacaccaacagaagtggagacgcacccctcactgtcaatgagttgtgaacagcttacgtttttgcaacaactggtgccgtagcaacagttctaggactcaatgcattgaccaagcatgtctcaccactgataggacgttttgttccctttgctgccgtanctgctgctaattgcattaatattccattaatgaggcaaagggaactcaaagttggcattcccgtcacggatgagaatgggaaccgcttgggggagtcggcgaacgctgcgaaacaagccatcacgcaagttgtcgtgtccaggattctcatggcagcccctggcatggccatccctccattcattatgaacactttggaaaagaaagcctttttgaagaggttcccatggatgagtgcacccattcaagttgggttagttggcttctgtttggtgtttgctacacccctgtgttgtgccctgtttcctcagaaaagttccatgtctgtgacaagcttggaggccgagttgcaagctaagatccaagagagccatcctgaattgcgacgcgtgtacttcaataagggattgtaaagcagggaggaaacctctgcagctcattctgccactgcaaagctggtgtagccatgctggtgagaaaaatcctgttcaacctgggttctcccagttacggaaaccttttaaagatccacattagccttttagaataaagctgctactttaacagagcacctggcgtgggccaagtgcctgatactcccttacactgaatcatgttatgatttatagaaatacctttcctgtagcttttatagtcattgtttttcaaagacgatataccagccctcacccaggttttaaaaaagcactggtaggcatagaataggtgctcagtatatggtcagtaaatgttctattgattatcaatcagtgaaaaaaaaa

SEQ ID NO: 45380 - DNA, 474 bp, Homo sapiens
  misc_feature (1)...(474): n = a,t,c or g
gatgnctttgaaacctttngacatcnttacgaatttaatacgactcctatagggaatttggccctcgaggccnagaattcggcacgagggaggagaaggtccagttttaaaaaatgacagtttgtgtttaataaatgagggcatgagaggaagtaagtagcaagttgaaggacaggtagttgagatgaaacacttcaaaaccctggttatagatgtactgtttggatgtagcatagtcttgagtctagcgtccacaaagaattattcaaatgatatttagaagaattataactattacattgaatggagtcccttggatattttgatagtaaaattaatagccataaagtcctagacttcttatttgaagttaaaatttcttatttgaaaagttgaaatttatgagctttgaagattgctaaattaaataatttatagctccaaaaacaaaaatatacttgnatatgtcacaga

SEQ ID NO: 45381 - DNA, 1850 bp, Homo sapiens
ggcacgaggtaagatggaagatgaggaggtcgctgagagctgggaagaggcggcagacagcggggaaatagacagacggttggaaaaaaaactgaagatcacacaaaaagagagcaggaaatccaaatctcctcccaaagtgcccattgtgattcaggacgatagccttcccgcggggccccctccacagatccgcatcctcaagaggcccaccagcaacggtgtggtcagcagccccaactccaccagcaggcccacccttccagtcaagtccctagcacagcgagaggccgagtacgccgaggcccggaagcggatcctggggcagcgccagccccgaggaggagcaggagaaacccatcctcgacaggccaaccaggatctcccaaccccgaagacagcagggcagcccaataatgtgatcagacagcctttgggtcctgatgggtctcaaggcttcaaacagcgcagataaatgcaggcaagaaaagatgccgccgttgctgccgtcaccgcctcctgggtcgtccgccacgggttgcactgccgtggcagacagctggacttgagcagagggaacgacctgacttacttgcactgtgatcccccttgctccgcccactgtgaccttgaaccccatgcactgtgacctccccccttctcccccttcccactgtgattggcacatcgacaagggctgtcccaagtcaatggaaagggaaagggtgggggttaggggaaggttggggggacccagcaaggactcagagagtcagacagtgccacttggccacttggggtaaagccagtgccagcaataacagtttatcatgctcattaatttgggatttcaaaacacaaatgaaaactcacacccacccacccccaagtgcatgtctccatcacttaaaaagtaagttccatttgaaaatatcctttcttttttttttcttcctatttttgtttgtttatacaaatatctgatttgcaagaaaaagtgcatgggaggggttttagtggtttaatgaatttttaattaagaaagggtagtttggtagtctacttaaaaatgtttctgggaaattcactagaaacattaaccaataggattttggtgagcttagcttctgtattcctactgccgcccagaaaaggggcagggctctgcagccgccaggacagacgagcaccccatgcctatacctccctccccgagctaagtcccagggcatctgggccttgcctggagactgggctagctctgtaggctcggagagcctggggagggtgccaaccccacctctagtattttgggagatagggaaagtgaaccgacttccccttcccatacccctcagggtggttccctaccagccaggcttactacttctagaagaaagcagagtgcccagggagtgagattgcatccctgggcttagaagtgacggagagaagacttgtttagtattttgccatcagcacaaggaaaaccaggagagagtctgcctccaggactctgagccttctgcctcgtatgttcagaaggtggataggtcttcccactccagcatggcttgaactcttaggggtctgcagtgctccatctccattggtggccccagctcagtaactatacctggtacatttcctgtgtgcaatcagtaccttgaaggcagaacattctgaataaagttggaaaaagaacagctttgctttgcaaagattgatgacagactggttcctcagaggcctaggctacccgtcacccctttttccagagcgagggcctggaatgaaggcagtttatcctctgtccctggagcctggggtttgctttggctccttgaggt

SEQ ID NO: 45382 - DNA, 694 bp, Homo sapiens
tttttttttgttttatataatttattcttatttgtgattacaagtatacctctacagaaagttagtatactcacacaaaggcaacttgtgcagaagagaatgttaaatgtgtaacgtctcagaaacccaataatgataattatcaaattatccaatttttgtggagatggggttttgccatgttggttgtaaaaggagagaccaagtaagtgggggttgaagtcagattagagcaaaagtgaatggcagagagtactataatgtccatgaagggctgctagagtcaccgtgatcatagcccaagcagagatagggaaaggaagatgtgagcagagtttggggtctcgaacaatggaggttattcgtgcagcccaggaaaggctccccaaagccaggatcaacctcccttggaggcggtccctcatggaggcatggtcaggcaccttagatttgagaccagctatgttgctgctgaccagctgtgtgaccctgggctggtttccttccacacaatgggagtgccaatggctgcatgcatgcaaagaccgtctgaggataggaggaagcaatctgttgagcacccgtgtacctgagtgtcatcacctcccaagggcatccttcgttccagagctggcaccttggaaggcccttggtcactgaaggcagtgatgatggtaacagcagtaaatcatca

SEQ ID NO: 45383 - DNA, 6654 bp, Homo sapiens
tgcttatggcggcgctggagagggggcgctgagctgttgggtatgaagtgtaacagaacagactttaccacctgaaactgctgcttcaagttcagatcaggcaaggaacaaacctcgtaacaactaacaagaccaaagaagagtacacttaagttgaagacacaacacttgatctgaaacaagaagtttgtgcctactcaacagctttgaaagagcacttcccaacgctgctagtagtctttgttttcttcagtgctgtactgtgagattgcccggtacagcagcagttgtattctttattaagcttggtagatcattttctctccgctcttttttttaatactagcaactttcatcctttgaaacgtgtgctgaaaaagaagaatcagcaaatactactgaaagtgcaatatttgagtatcactgcgagatgagctttgatccaaaccttctccacaacaatggacataatgggtaccctaatggtacttcagcagcactgcgtgaaactggggttattgaaaaactgttaacctcttacggatttattcagtgttcagaacgtcaagctagacttttcttccactgttcacagtataatggcaacctgcaagacttaaaagtaggagatgatgttgaatttgaagtatcatcggaccgacggactgggaaaccccattgctgttaaactggtgaagataaaacaagaaatcctccctgaagaacgaatgaatggacaagaagtgttttatctgacttacacccctgaagatgtcgaagggaacgttcagctggaaactggagataaaataaactttgtaattgataacaataaacatactggtgctgtaagtgctcgcaacattatgctgttgaaaaagaaacaagcccgctgtcagggagtagtttgtgccatgaaggaggcatttggctttattgaaagaggtgatgttgtaaaagagatattctttcactatagtgaatttaagggtgacttagaaaccttacagcctggcgatgatgtggaattcacaatcaaggacagaaatggtaaagaagttgcaacagatgtcagactattgcctcaaggaacagtcatttttgaagatatcagcattgaacattttgaaggaactgtaaccaaagttatcccaaaagtacccagtaaaaaccagaatgacccattgccaggacgcatcaaagttgactttgtgatccctaaagaacttccctttggagacaaagatacgaaatccaaggtgaccctgctggaaggtgaccatgttaggtttaatatttcaacagaccgacgtgacaaattagagcgagcaaccaatatagaagttctgtcaaatacatttcagttcactaatgaagcccgagaaatgggtgtgattgctgccatgagagatggttttggtttcatcaagtgtgtggatcgtgatgttccgtatgttccttcccacttccagtgaaattctggatgggaaccagctccatattgcagatgaagtagagtttactgtggttcctgatatgctctctgctcaaagaaatcatgctattaggattaaaaaacttcccaagggcacggtttcatttcattcccattcagatcaccgttttctgggcacggtagaaaaagaagccactttttccaatcctaaaaccactagcccaaataaaggcaaagagaaggaggctgaggatggcattattgcttatgatgactgtggggtgaaactgactattgcttttcaagccaaggatgtggaaggatctacttctcctcaaataggagataaggttgaatttagtattagtgacaaacagaggcctggacagcaggttgcaacttgtgtgcgacttttaggtcgtaattctaactccaagaggctcttgggttatgtggcaactctgaaggataattttggctttattgaaacagccaatcatgataaggaaatctttttccattacagtgagttctctggtgatgttgatagcctggaactgggggacatggtccgagtatagcttgtccaaaggcaaaggcaacaaagtcagtgcagaaaaagtgaacaaaacacactcagtgaatggcattactgaggaagctgatcccaccatttactctggcaaagtaattcgccccctgaggagtgttgatccaacacagactgagtaccaaggaatgattgagattgtggaggagggcgatatgaaaggtgaggtctatccatttggcatcgttgggatggccaacaaaggggattgccctgcagaaaggggagagcgtcaagttccaattgtgtgtcctgggccaaaatgcacaaactatggcttacaacatcacacccctgcgcagggccacagtggaatgtgtgaaagatcagtttggcttcattaactatgaagtaggagatagcaagaagctctttttccatgtgaaagaagttcaggatggcattgagctacaggcaggagatgaggtggagttctcagtgattcttaatcagcgcactggcaagtgcagcgcctgtaatgtttggcgagtctgtgaggggccccaaggctgttgcagctcctcgacctgatcggttggtcaatcgcttgaagaatatcactctggatgatgccagtgctcctcgcctaatggttcttcgtcagccaaggggaccagataactcaatggggtttggtgcagaaagaaagatccgtcaagctggtgtcattgactaaccacatccacaaagcacaccattaatccactatgatcaagttggggggaatctggtgaagggttctgaatatctccctcttcatccctcccgaaatctggaatacttattctattgagctattacaccagttttaacaccttcctcgtgttatgtttaaaaaaataaataaatttaagaaaaccattttaaataatgcacagttgcagcctggaaaaacttaaggtggcgccttatagtatcaattttaggagctttatttggtgcatttaacgcaactggtaattgcagaatccactttgcctgtgtaagtgaaaaatatagactgttatcttgttggccctatggaaattctgcacttttcattatatactctaccttcattaattacttctggcaagatgttctgccttagcactcagttgcattcttttcctttttcttcctgttcattatgctttaattctgaggaccatatgagggtagaatatattatcttttaaaaattacaaaaatttgtatagggcaaaccatttcttaaagttgatggccaaattttaaaatgttatttttcatatcatttataatcttgtcacaatccacttaaagaagtttggttatatttcagtgaaaattttcttccagagtaggttttttttcgtgggttggggggtaactttactacaattagtaagtatggtgcagaatttcatgcaaatgaggagtgccagcagtgtgataatttaaacatatttaaacaaaaacaaaaaaaatgaatgcacaaacttgctgctgcttagatcactgcagcttctaggacccggtttcttttactgatttaaaaacaaaacaaaaaaaaataaaaaagttgtgcctgaaatgaatcttgtttttttttataagtagccgcctggttactgtgtcctgtaaaatacagacacttgacccttggtgtagcttctgttcaactttatatcacgggaatggatgggtctgatttcttggccctcttcttgaattggccgtatacagggtccctggccagtggactgaaggctttgtctaagatgacaagggtcagctcaggggatgtgggggagggcggttttatcttcccccttgtcgtttgaggttttgatctctgggtaaagaggccgtttatctttgtaaacacgaaacatttttgctttctccagttttctgttaatggcgaaagaatggaagcgaataaagttttactgatttttgagacactagcacctagcgctttcattattgaaacgtcccgtgtgggaggggcgggtctgggtgcggctgccgcatgactcgtggttcggaggcccacgtggccggggcggggactcaggcgcctggcagccgactgattacgtagcgggcggggccggaagtgccgctccttggtgggggctgttcatggcggttccggggtctccaacatttttcccggctgtggtcctaaatctgtccaaagcagaggcagtggagcttgaggttcttgctggtgtgaaatgactgagtacaaactggtggtggttggagcaggtggtgttgggaaaagcgcactgacaatccagctaatccagaaccactttgtagatgaatatgatcccaccatagaggattcttacagaaaacaagtggttatagatggtgaaacctgtttgttggacatactggatacagctggacaagaagagtacagtgccatgagagaccaatacatgaggacagggcgaaggctttcctctgtgtatttgccatcaataatagcaagtcatttgcggatattaacctctacagggagcagattaagcgagtaaaagactcggatgatgtacctatggtgctagtgggaaacaagtgtgatttgccaacaaggacagttgatacaaaacaagcccacgaactggccaagagttacgggattccattcattgaaacctcagccaagaccagacagggtgttgaagatgctttttacacactggtaagagaaatacgccagtaccgaatgaaaaaactcaacagcagtgatgatgggactcagggttgtatgggattgccatgtgtggtgatgtaacaagatacttttaaagttttgtcagaaaagagccactttcaagctgcactgacaccctggtcctgacttccctggaggagaagtattcctgttgctgtcttcagtctcacagagaagctcctgctacttccccagctctcagtagtttagtacaataatctctatttgagaagttctcagaataactacctcctcacttggctgtctgaccagagaatgcacctcttgttactccctgttatttttctgccctgggttcttccacagcacaaacacacctcaacacacctctgccaccccaggtttttcatctgaaaagcagttcatgtctgaaacagagaaccaaaccgcaaacgtgaaattctattgaaaacagtgtcttgagctctaaagtagcaactgctggtgattttttttttctttttactgttgaacttagaactatgctaatttttggagaaatgtcataaattactgttttgccaagaatatagttattattgctgtttggtttgtttataatgttatcggctctattctctaaactggcatctgctctagattcataaatacaaaaatgaatactgaattttgagtctatcctagtcttcacaactttgacgtaattaaatccaacttttcacagtgaagtgcctttttcctagaagtggtttgtagacttcctttataatatttcagtggaatagatgtctcaaaaatccttatgcatgaaatgaatgtctgagatacgtctgtgacttatctaccattgaaggaaagctatatctatttgagagcagatgccattttgtacatgtatgaaattggttttccagaggcctgttttggggctttcccaggagaaagatgaaactgaaagcatatgaataatttcacttaataatttttacctaatctccacttttttcataggttactacctatacaatgtatgtaatttgtttcccctagcttactgataaacctaatattcaatgaacttccatttgtattcaaatttgtgtcataccagaaagctctacatttgcagatgttcaaatattgtaaaactttggtgcattgttatttaatagctgtgatcagtgattttcaaacctcaaatatagtatattaacaaattacattttcactgtatatcatggtatcttaatgatgtatataattgccttcaatccccttctcaccccaccctctacagcttcccccacagcaataggggcttgattatttcagttgagtaaagcatggtgctaatggaccagggtcacagtttcaaaacttgaacaatccagttagcatcacagagaaagaaattcttctgcatttgctcattgcaccagtaactccagctagtaattttgctaggtagctgcagttagccctgcaaggaaagaagaggtcagttagcacaaaccctttaccatgactggaaaactcagtatcacgtatttaaacatttttttttcttttagccatgtagaaactctaaattaagccaatattctcatttgagaatgaggatgtctcagctgagaaacgttttaaattctctttattcataatgttctttgaagggtttaaaacaagatgttgataaatctaagctgatgagtttgctcaaaacaggaagttgaaattgttgagacaggaatggaaaatataattaattgatacctatgaggatttggaggcttggcattttaatttgcagataataccctggtaattctcatgaaaaatagacttggataacttttgataaaagactaattccaaaatggcaacaaaaaa

SEQ ID NO: 45384 - DNA, 896 bp, Homo sapiens
gcaaaaggcactgagataacatctgcttctagatcattgctaggctcgaaaaataaagcttgttctaccaggaatgacaagttagaacttagtatttgccaaagcagaaattatatagtgtcagttatttcaggcaaaccttattcggctctcatccccaactatctgtcagaacaattaaaagagatcaaaacagtccagcataactaggcttcattatataaggccattttgttctaagacactaataaaccaaaataagaaatattaaaatcaaaataaaagatattatttgagctattttcatacaaactgttggttccttatatcctcccttctataataaagggcatattttactgcaaagaaaattttactttatatatatcactagccataaatttttgaatgtcattaattacatgttgtctagtaccattaaccaaatagcgtaactattttatgtccacatttcacttctgtatttacaaacatatcagtaaagagttaacaatgagatgcgatcaaacatccatattatctgttttgtagacagcaatgtagatgattttgtaatcacctttcatcggagtgaccttatataaaaaataagtcaataatttagaggttctaagtctccaaaggagattttcaaatgtaaatatagaaatggttatagataatgagatttttaggaaacctctgccatgtctgcatcctgttaactgttatatcatcttttcttccagctgcgttcctttgcctgcaacaggggtcaagatgagttttgcctgacttctttgatgtcctgaactttccgtagtcctttttcttgaatttgttcattataaatatagcttggcatttgtttgatcttttcccaaaaaaaaaaaaaa

SEQ ID NO: 45385 - DNA, 802 bp, Homo sapiens
tttttttttttttttttttaaagtttcatactaagttttattgtatgctgctgccagtgtatataaaacaattacccttgtgaaatagaaattcatgaaaattcagagaggtagatgttaaggactgacgaaagtagaagtttgtatattatggcacatgtgttacagggataagcttttgtacaggcttcaaatgtagctctcttgaatattcactggatcataaggagtggtttgggaaacctttgaaagattcattttactacaaaaaaggaacagactttctggggtctgaagggatttgtacttgaagatactccagtcagcagagggtcatgttgagcattctgcagacagaactgtttcaagtctgcagctgcctgggaaacttttacgcggttgagtccggcctccagccggagctgttgaaccactttcttcatagcggcgacgctggaggagccagacatggtgcacgcgacggccgggccgattcgtgggtcggtgggtcgtgagccgtgggtcggccgggccagacaactcagcggcgcgcggcgggggcggggctccgaactttgtctctaagtttccggttctgtgctcagcggctccaccctcaggtgatgcgcgccttgccagccctctgttccagctccacacccggccccgagcgcgagccgttagccgcgaagaactaagagggggtctgaagaggaccagggagggaaggcagagcttgtgggagtttctaaaaggccggcggcgggtgaccaggaggtctcagttttcctcccagtttgtg

SEQ ID NO: 45386 - DNA, 4977 bp, Homo sapiens; identical to SEQ ID NO: 4796
  misc_feature (1)...(4977): n = a,t,c or g

SEQ ID NO: 45387 - DNA, 962 bp, Homo sapiens
ttttttttttttttttggttacggcagcacttttatttttccttacacaatgacgtgttgctggggcctaatgttctcacataacagtagaaaaccaaaatttgttgtcatcttcttcaaagaatcgagaattgcgtacaaaaaaaaccttacataaattaagaatgaatacatttacaggcgtaaatgcaaaccgcttccaactcaaggcaagttaacagcccacggtgttctggccaaagacatcagctaagaaaggaaactgggtcctacggcttggactttccaaccctgacagaccccgcaagacaaaaacaactggttcttgccagcctcttagaggaaatccccagaacactcagccctgacacgttaataccaagggggaacagttaacttcaatacaaggtcaaaatcagcaacaagttctacaatcccagtgctgatatcagatacaagcttcaaggacaatttcttttcgaaggcttattccagtttcgtgaggctagcatgaggtgtgtgcatttgccaggggcaaatttctattctcaattaacccatgcagcaaatgctacgcatctgctgagtccgtttagaagcatttgcggtggacgatggaggggcccgactcgtcgtactcctgcttgctaatccacatctgctggaaggtggacagtgaggccaggatggagccaccgatccacaccgagtacttgcgctctgggggtgcgatgatcttgatcttcatggtgcctgggccgcagggcggtgatctccttctgcatcctgtcagcaatgcccggatacatggtggtgccgcccgacagcaccgtgttggcgtacaggtctttgcggatgtccacgtcacacttcatgattaagttgaaggtggtctcgtggatgccgcaagatttcataacccggaaagaaaggttggaagaggccttccggaaaccgggacc

SEQ ID NO: 45388 - DNA, 1020 bp, Homo sapiens
ccagcacggaaagtacgagtcggctcagcctggagggacccaaccacagcctggcctgggagccaggatggccatccacaaagccttggtgatgtgcctgggactgcctctcttcctgttcccaggggcctgggcccagggccatgtcccacccggctgcagccaaggcctcaaccccctgtactacaacctgtgtgaccgctctggggcgtggggcatcgtcctggaggccgtggctggggcgggcattgtcaccacgtttgtgctcaccatcatcctggtggccagcctcccctttgtgcaggacaccaagaaacggagcctgctggggacccagctaagaggccggtgtcaccatacagcgggtacaatggggcagctgctgaccagtgtgtaccagcccactgagatggccctgatgcacaaagttccgtccgaaggagcttacgacatcatcctcccacgggccaccgccaacagccaggtgatgggcagtgccaactcgaccctgcggctgaagacatgtactcggcccagagccaccaggcggccacaccgccgaaagacggcaagaactctcaggtctttagaaacccctacgtgtgggactgagtcagcggtggcgaggagaggcggtcggatttggggagggcccctgaggacctggccccgggcaaagggactctcccaggctcctccttccccctggcaggcccagcaacatgtgccccagatgtggaagggcctccctctctgccagtgtttgggtgggtgtcatgggtgtccccacccactcctcagtgtttgtggagtcgaggagccaaccccagcctcctgccaggatcacctcggcggtcacactccagccaaatagtgttctcggggtggtggctgggcagcgcctatgtttctctggagattcctgcaacctcaagagacttcccaggcgctcaggcctggatcttgctcctctgtgaggaacaagggtgcctaataaatacatttctgctttattaaaaa

SEQ ID NO: 45389 - DNA, 959 bp, Homo sapiens
  misc_feature (1)...(959): n = a,t,c or g
gggtttcaccgtgttggccaggatggtctccatctcttgacctcatgatctgcccgcctcgggctcccaaagtgttgggattacaggcatgagccactgcgcctggcaaatgttttagtttttatggttattattatttttttttttggtggggggagggtggtgagggcaaaggatttgtttttcaaattatgtggtttctcagggttaacaaagttattttanattcccngccangccagcaggngttanngagagcctgaagtgttccatatggcagaaaataaatgtctctgattactttgctacctttaaaaaaatctatatgtgtttgcaaaacagcctagggggatctaccacctacacagcatganttattcataagtcataggtgcacatgtatgagcaagttatttttgagaaagaaactgcctataatataataaacctgtcaggtctttgggtattgtttaatttgtgtgttgttgctgttttatctggactgcatcttggggggtactgggctctgcttctggttttnagtttgcctttgaatttactgagctactagaaagacaaaaaaaagctattttnatggtaatagaatacagaatgacttaggtgtaaaagtacacgtgaagaccatcgtagaatatacagctttggagttttcttaagacacagtccttcctactgaaaaggcttgctcacctttggagaggattgtttatattttcagcctgggttcctttatgcagtcccaacttagaggggagcttcggtttatttacactttgctttgcacgataacttgtatgcgaagacctctttatatctttcagtaggtcagagggctctttgtcctggttgaagtcccaaagtgtcagtgcagctgagaatgtttctcagcctccccctttacagaggaagggtcctggattttcataaatccagaccat

SEQ ID NO: 45390 - DNA, 577 bp, Homo sapiens
ttttttggttttaaacctttaatgagaaaaaaatatataataccgagctcaaaaacactgtgtttggtgtcattgggtcaagggttggggatacacacggcagaattcggaaacagggtatagatcaacaaaaatacacagtcataacaagaaaaactggcgcctggcacaatcaactctcagtttcctcttcactcagcagcatgttggggatcccgcggctgatggggaacatacggtccagattccgggcactgcagggtgccctctatcactttccacctccagcagcaggtggtgcatggtcctcagaaactcctcattctcctcatatccctcaaccgggccctttcggcacctggatcagacgcaagttatcggccgcctccaggaacgccgaccactccactttaggtatcatacgcgccacgaagttggggttgaattccacagggcagatacggacctcggtggcctggaggcgcagggggaagccacgggaccccaccccccgcacatgcgagctcagcagattgtgggtaagcagtttcatgtcgccgcacaaactctcgccagg

SEQ ID NO: 45391 - DNA, 2220 bp, Homo sapiens
gtgggaaactaagcttttttgttttgttttgttttgttttgtttagacttgttttaaatatttgattcagatgggaatgtttcagcctttaacactgttccccttgatggggttatttgtccttgggttaaagggttggaaatcgtgccaaatgggataacattgacgatggactaccaggggagaagcacaggggaggccttcgtgcagtttgcttcaaaggagatagcagaaaatgctctggggaaacacaaggaaagaatagggcacaggtatattgagatcttcagaagtagcaggagtgaaatcaaaggattttatgatccaccaagaagattgctgggacagcgaccgggaccatatgatagaccaataggaggaagagggggttattatggagctgggcgtggaagtatgtatgacagaatgcgacgaggaggtgatggatatgatggtggttatggaggttttgatgactatggtggctataataattacggctatgggaatgatggctttgatgacagaatgagagatggaagaggtatgggaggacatggctatggtggagctggtgatgcaagttcaggttttcatggtggtcatttcgtacatatgagagggttgccttttcgtgcaactgaaaatgacattgctaatttcttctcaccactaaatccaatacgagttcatattgatattggagctgatggcagagccacaggagaagcagatgtagagtttgtgacacatgaagatgcagtagctgccatgtctaaagataaaaataacatgcaacatccgatatattgaactcttcttgaattctactcctggaggcggctctggcatgggaggttctggaatgggaggctacggaagagatggaatggataatcagggaggctatggatcagttggaagaatgggaatggggaaccaattacagtggaggatatggtactcctgatggtttgggtggttatggccgtggtggtggaggcagtggaggttactatgggcaaggcggcatgagtggaggtggatggccgtgggatgtactgaaagcaaaaacaccaacatacaagtcttgacaacagcatctggtctactagactttcttacagatttaatttcttttgtattttaagaactttataatgactgaaggaatgtgttttcaaaatattatttggtaaagcaacagattgtgatgggaaaatgttttctgtaggtttatttgttgcatactttgacttaaaaataaatttttatattcaaaccactgatgttgatactttttatatactagttactcctaaagatgtgctgccttcataagatttgggttgatgtattttactattagttctacaagaagtagtgtggtgtaattttagaggataatggttcacctctgcgtaaactgcaagtcttaagcagacatctggaatagagcttgacaaataattagtgtaacttttttctttagttcctcctggacaacactgtaaatataaagcctaaagatgaagtggcttcaggagtataaattcagctaattatttctatattattatttttcaaatgtcatttatcaggcatagctctgaaacattgatgatctaagaggtattgatttctgaatattcataattgtgttacctgggtatgagagtgttggaagctgaattctagccctagattttggagtaaaaccccttcagcacttgaccgaaataccaaaaatgtctccaaaaaattgatagttgcaggttatcgcaagatgtcttagagtagggttaaggttctcagtgacacaagaattcagtattaagtacataggtatttactatggagtataattctcacaattgtattttcagttttctgcccaatagagtttaaataactgtataaatgatgactttaaaaaaatgtaagcaacaagtccatgtcatagtcaataaaaacaatcctgcagttgggttttgtatctgatccctgcttggagttttagtttaaagaatctatatgtagcaaggaaaaggtgctttttaattttaatccctttgatcaatatggcttttttccaaattggctaatggatcaaaatgaaacctgttgatgtgaattcagttattgaacttgttacttgtttttgccagaaatgttattaataaatgtcaatgtgggagataataaaaaaaaaaaaaaaaa

SEQ ID NO: 45392 - DNA, 461 bp, Homo sapiens
tcccattttattcatttatttattttttgcaaacaattttagaggcagggtgttaaactgattaaaatttcacaagattgacattattgcttaaagtgcttgaattggttacattttaaaaaattaaggtacagattattttaaataaaaactacaatatttttagcaacaaaataataggaatgccacacaaatacagtaactattttggttatacagaaatggaagccaaaaataaattaatgtaatactggaaaacagaaatttaattaggcagaaaagtaggaaataattttccctgacccatgccacttacatgagttcattacaatagtgctgataaatgccttgaccatataatagcaaacaagggcaaaacatttagtgcacaatattttaatacacgtgaatatacaaagttgatcaaaatgcaatgttgaaagataaaacggacgcgtggg

SEQ ID NO: 45393 - DNA, 2133 bp, Homo sapiens
cgagattccgggattggaatcaaaatgctaatttaaaaggtcaagtgaagctgctcctcacgttttggcgtgcctgcgctctctgcaggcagaagcgaacaaagacccagcaagagaaggcagaggctaagacccatcccgtatctgctctcctgaaataattctggagtcatgcctgaaatgccagaggacatggagcaggaggaagttaacatccctaataggagggttctggttactggtgccactgggcttcttggcagagctgtacacaaagaatttcagcagaataattggcatgcagttggctgtggtttcagaagagcaagaccaaaatttgaacaggttaatctgttgggattctaatgcagttcatcacatcattcatgattttcagccccatgttatagtacattgtgcagcagagagaagaccagatgttgtaggaaaatcagccagatgctgcctcttcaacttaatgtgggatgcttctggggaatttagcaaagggaaggcagctgcctgtttgggagcatttctcatctacattagctcagattatgtatttgatggaacaaatccaccttacagagaggaagacataccagctcccctaaatttgtatggcaaaacaaaattagatggagaaaaggctgtcctggagaacaatctaggagctgctgttttgaggattcctattctgtatggggaagttgaaaagctcgaagaaagtgctgtgactgttatgtttgataaagtgcagttcagcaacaaagtcagcaaacatggatcactggcagcagaggttccccacacatgtcaaagatgtggccactgtgtgccggcagctagcagagaagagaatgctggatccatcaattaagggaacctttcactggtctggcaatgaacagatgactaagtatgaaatggcatgtgcaattgcagatgccttcaacctccccagcagtcacttaagacctattactgacagccctgtcctaggagcacaacgtccgagaaatgctcagcttgactgctccaaattggagaccttgggcattggccaacgaacaccatttcgaattggaatcaaagaatcactttggcctttcctcattgacaagagatggagacaaacggtctttcattagtttatttgtgttgggttctttttttttttaaatgaaaagtatagtatgtggcactttttaaagaacaaaggaaatagttttgtatgagtactttaattgtgactcttaggatctttcaggtaaatgatgctcttgcactagtgaaattgtctaaagaaactaaagggcagtcatgccctgtttgcagtaatttttctttttatcattttgtttgtcctggctaaacttggagtttgagtatagtaaattatgatccttaaatatttgagagtcaggatgaagcagatctgctgtagacttttcagatgaaattgttcattctcgtaacctccatattttcaggatttttgaagctgttgaccttttcatgttgattattttaaattgtgtgaaatagtataaaaatcattggtgttcattatttgctttgcctgagctcagatcaaaatgtttgaagaaaggaactttatttttgcaagttacgtacagtttttatgcttgagatatttcaacatgttatgtatattggaacttctacagcttgatgcctcctgcttttatagcagtttatggggagcacttgaaagagcgtgtgtacatgtattttttttctaggcaaacattgaatgcaaacgtgtatttttttaatataaatatataactgtccttttcatcccatgttgccgctaagtgatatttcatatgtgtggttatactcataataatgggccttgtaagtcttttcaccattcatgaataataataaatatgtactgctggcatgtaatgcttagttttcttgtatttacttctttttttaaatgtaaggaccaaacttctaaactaattgttcttttgttgctttaatttttaaaaattacattcttctgatgtaacatgtgatacatacaaaagaatatagtttaatatgtattgaaataaaacacaataaaattaacacttgaaaaaaaaaaaaaaa

SEQ ID NO: 45394 - DNA, 675 bp, Homo sapiens
gggggaggcgcgtcgcgaggcgagcgtcctccttttgtgcgagcgccggcggctcggcttctcgaaggagaagaaactgaggcctggaatttgattaactcattcaaggttacccagttggtaattcatttgcacacctgttagcaagaaacagaagttgaaggactggaacaagtgaactaggaaagagggaacgccaatccaaggatagaaggacaaggacagaatcaccagcactggctgaaggtaccttaacatggggaatcttcttaaagttttgacatgcacagaccttgagcaggggccaaattttttccttgattttgaaaatgccccagcctacagagtctgagaaggaaatttataatcaggtgaatgtagtattaaaagatgcagaaggcatcttggaggacttgcagtcatacagaggagctgggccacgaaatacgagaggcaatccagcatccagcagatgagaagttgcaagagaaggcatggggtgcagttgttccactagtaggcaaattaaagaaattttacgaattttctcagaggttagaagcagcattaagaggtcttctgggagccttaacaagtaccccatattctcccacccagcatctagagcgagagcaggctcttgctaaacaggttgcagaaattcttcatttcaca

SEQ ID NO: 45395 - DNA, 1226 bp, Homo sapiens
tttttttttttttttagaaaaatgaaagctgatttttattttatcatcaacagccattctttagacatgaacatgcatacgtaatattctacgcacacatcacagcttttaacgttagttaataaaggttaaacacacaacatacatccttacaaaaaaagtcaaaatgcaaacttaaaactttaaacaaaagtattactaatttaaaaaaagtttgtgttgggtaccatttgtacaacacagttaatttaaacattttcattttggttgcacatgaaaaaggcggcagtagaaaataaagtcattgagggtttttaaatagcagaataggcagttttgccatgcaggagaagcaatattaaatattagtttcaaaaaaaatccacatttaaaaatatttagttcaagtcacagaatttttctcagtagagaccccaatgcaatgcataattagctgccttagatggcccgtttgaaaggatgatatcccttcagagtgtaactttactgattttggcacagaaaagaagtcttaagaacatgattaaaaaagagggaagaggaacagaggaaagaaataaaagcaagaataaatgagatagtaattgcaatcactaaaaaactgcattctcagtcattgcagaatactgtcttctgtctacagcaggtgcttattccagaattgttattgcagcatggatttaatttgcttggaggtagtctcatcattcaaatgttttgttgtgtacctgagagcatttagaagaccttccacactattaggaggttggtccttaagaactttgatacaacctttcatatcaattttggaagttttagcaaatgctcccactggatgtacgtggtcatagagtattatgacacccaccattaccctcaagcagaatgacactgtctcttcatttgtaaatctgcttctgtattccggtgtttccagcatgactctgcatacactagccattgtgcttaaacaatctgtggtattttctattggtaaatttttattctctgatacaaattttgttgtggcatcactcaaggttttcagcattggagttgcctcagcataaaacaaagacattcgatttgccaattcattatttacttcattttctccttctgccggtacattgttaatcctcatacgactcaatgttcttctataatagctgaaatcattctgtatggcaggatttgtcatcttg

SEQ ID NO: 45396 - DNA, 4912 bp, Homo sapiens
gtgactgcggagaccggggagacgtgggggacaggggagacaagcagcagggcatggcacggggtcgggggcctcaatggaaacgaggcgcccgagggggcaacttggtgactggcacacagcgtttcaaggaggccctgcaggatcctttcaccctgtgccttgccaatgtgcctggccagccagacctccgccatattgtcattgacggcagcaacgtggccatggtgcatggcctccagcactacttctccagccggggcattgccattgctgtgcagtacttctgggaccgtggtcaccgtgacataactgtctttgtgcctcagtggcgcttcagtaaggatgccaaagtcagagagagtcacttcctgcaaaagctgtattccctcagcctgctctccctcacaccctcacgagtcatggatggcaagaggatctcctcctatgatgacaggttcatggtgaagctggctgaagagacagatgggataattgtctccaatgaccagttccgggacctggcggaggagtctgagaagtggatggcaatcatcagagaacgcctgctgccctttacctttgtgggaaacctcttcatggtacctgatgacccactggggcgaaacggccccaccctggatgaatttctgaagaagccagccaggacacaggggtcttctaaggctcagcatccttccaggggctttgcagaacatggtaaacagcagcaggggagagaagaggaaaaaggtagtggtggcattcggaagacccgggaaacagagcggctccggcggcagctgctggaggtgttttggggtcaggatcacaaagtggacttcatcctgcagcgggagccatactgccgggacatcaaccaactgtctgaggccctgctcagtcttaacttttgagcctcacctgcttgagtggctgccgccctgtcagctccagccgcctccagctcagccctttctgtgagagtccctctgctgctcactctgatccagaggcaccctgagttggtgctttggatcagggaagccactttgggacaggtccataaagtgaactgatcttaccgagtcaggacctcagccagctctcaagaggttctgctcagccttaacttctcaactttgccttagcacagggtttctgtagggagtgggggctgctagaggggattagttccggagactgagactgttggctccacctccaagctgagctagggtggagggcagggtgggcaggaagtgacaggaagttaagctgttcctctccctgggctgctgctctggatggccagagaacaagatgctcccttgctgagctcctgggagcgtggaaggagatgctaggccctggcacagtgttatgtggactgggccacgatagggtggagtgagctagtgaagaaggcagagggagacttggcttctggtctcagctatgcctgttttgtgaccttgattgagttgcttgggctttacttctgcctacaaatcaggggtaaaaatacctgttgggaggagaaatgagaacatagaggaaagcctcttggaggaaaggtgcttggaccaagtctcaggtgtgtctgcctgtggctgcacaggctctctaaccgaaacctcactttcagagagatgtgggtcctttgtctccaggatccacaccctagattttaacactgcattctcactataacatgccctataatggctgcatcccttttgagcaacctccaaaatctacatttacacagtaggtaaattagggatgactgcattatcaaaatactctcagggttcctataaatggcagctctcctgttgtattcaggtgttgtttacagactaacaaatgtgttggcaaatccctggttagatgcacttcctggtgttgagatgaacacgtcgatttttcaccaatcgatgaagccatgctctgcaatgacaatattaatgtgatccgaccctaacattttctctatggaagacgtatgttgcataaagcaaggcacacttctgctttatgtgtgtgtgtatggggatgggaggacttaacggaagttgaaccagttggttctagatgaaccaattatctggaaaatgaaagaaccagagttggaaggcacttgactggccaccagaccaactctgctgttactgacatgctttcttcaccctgattcctaaaggtcattgccctggatctgcttgaagtcctcctgtgccagggaatttactatctccagggtagcacattccctgtgtagacggtattaatcagtactccttactttagtgcagcctaaagtatgcttttctgttacatccacctttgaggctggtcatacctccaggaacaatacagagccagtcaacttcctggaatccaagaccagataaagaagtaggacaggtgcccctgggttctgttctgtgtgggcctgtggggagtctctagacaagatcttttccaggccctgacttctgcctccctctgagtggcacagggagttgaatactgcatggcgagtgtaatgatgatggggagggtccttgtgtcctcaccccttcctttttggtgatttacaccactgtaccatactgacccaggctgggggcaggtgtgttggagacaggctggtcaaagaggtgacaatgattaagagataacccagtggtccctgagaagagattggttagtatggcctgaactggtggctgggggaactgtgtctggtcaagttatggcagatgtcacagctttaggtaggtaaaaagggtcctagatgaaaaccttggagtttttttttttcctgatagggttgtttatacttcttgattggtttcttgccattttcactttcagtgatggtgggtgtgcagtagaccaaaagtgtcttctgcccttttgtgctaagggccctggttgactgagtggccccagtcagatgagaggcaagtcctaagcttcttatagacagggatgttgactttgttctgctgcagcctgataaactgggaccactgtgtggttagtaatgcacttgccatttggtgacacagactgaaggctatcctacacctgggccttacctcttcctctactggcatcctaatggcactctgacagcatccagggtgactacagggcccattggaaatggatcatcattctctcttctagtgtctatctttatcataacctgatgtcccaaacttgtgacaagttcttttggcaactgaaggaccaagaagggaaacggtgatgagagagactgcccattataactttcaaaaccccgtctttggggaagaatcatctagggtgacattccttgaagtaaatcccaggagaatctaggccaaagagatgagccaaggttagtgagacaatttatttttattgcctaaactgcagagcattctctacacagcgtaaaggagaagtggggcagctgcaggacatgtagagaaaccaaaccgggaaatcttacaaggagttgaaaagattaatgtcccaacctgatgagattacggccttgagacaataaggtggagcaacagaacaatgggaaagaggactgggagaggaatctaagaaccagatggcttcagctctctagaggagctgagcctattcacagtgcctaacctggaagcctgtgaggaacaggcctcaggcccttgccatgacctacttaggctacaatttcctttaaggcagcccctagctctgggaaggaatactggtagccagtggccagtgttcgccgtgggatcaccttctggccctccagcagcatgatggcacgctgtcgcccaaagacagcttgcaccacagcgctggggagagggatgaaggctcggcggcccagggcagcaccgaaggtctgggcaaactcagcattagtggcggaggatggagccactccattcaggaccccgtgcacgtggtttgcttcaagggcatgggtcaggattcctgccaggtccccgatgtgtatccaggggaagaattggtggcctgagccgatggggccccccaggcccaggcgaaagggcagcagcatgtggcccatggcaccacccccacggcccagcacaacccctagagcaggaaagagggaaggtacaggggtcttctcagccttgaaggagcccactgctcctcctggtttctgtttccccttcctcactctccccatgctgacttggctctgtaacagaagtgagcagtatggctgtctttaagacctcacaccttctcatctgcaggttggctagaagtggtggcatcctctcactctgtaattgtaatctcagctctcctaatcccatcacttccccagcccagagaagacattccaaccctgtctgatacccaggcccgtttctcacctgagcgcaccaccacctggcgtgtagaatctccaggaagcctggctgcagcttcccatttggttacgaggttggagaaaaagtcaaagtcccctcctggggctgtcttcatcatactccgcagtcagactgggctggtagtaagctgccggtggaacacaatcatttgccctggggtgtccttggtcctgcctggctctctgtagtggaggctccccttggcatcaccttctctggcccttaggatctccccatttggagacagagccatttggatattttccccttgaacttctccatgacctgaagcgttccttccctggaggaactctttggttgcagggctaaacttagaggctgctagagtgtagtggttaagaacaggaacttgggtaccaggcgcctgaattttaatcagctccctcatttattaactctctgacttgatgcaagttacttaacctctctgtatagaattttcacatctttaaaatggg

SEQ ID NO: 45397 - DNA, 1684 bp, Homo sapiens
tttttttttttggttccatcggtgattttaagaatttcatttaggctacagaggttcataggaggactcagagttccaggccctccaaggagactctggcctgtaactgatttaatcccagggcagtaaggtgagcagcatgtaaccccttgtcaaataaggcagtggaataagggttgacagaggccagcactcaggctgtgctgctcaatgacagtgaactcttccaggcacagatgatgagggtctgttgctctcagacttggaacatgagaacagcaactgtctcttgtccattaagaaaaaaaaaagccaaatttcttctctgggcaatatccaagcccaaggtgtaagaagaaagcttccttacactttcagcactcaaagtgggattccaaaaatcgtaactacaaaacatgcagctaagcaggctctagcaagtccagaaacatctccacatggtcagaccacatgacaaatgttgcttttggtttgatcaaacctggagctggtcagttgcacagctaatccatggcatccatgatgtcttccaggcttctcttgatttttacaccaacctttagccaaacttcactgagggcctgaagagacttgattgggaaggccatggacatgccaatagacccaagacccatgctagggaacagtgatccaaagcagaaagccatctccctagggccacctaatgaaggccagtgaaacgcaggtgtgttctgcagccccaggccccaacagagaggcatccaaatgcctttcccagctcaggttgcacacagagaggacaatgaatggagtgaaaggaaggtaaggcagggaagaagtttccatcctggtttccaaagaaagctcctcaggtaggcagagggttgggtcaaatgcaaaacccaacgaatggatggtcagaaagcctgtggtgttaccagtttttaattctttgtggattcaaaactgaagtagaagggccttctgagtcaaacaacacggcagcctgggctatgaaattctgttctgtgattttggcatcacaaccacgtaaattctcttcacacctctgctcccacatggaaggactgcagggaaaggcacatcacagcagcattgccctggggtgggtggcttcccagaccagagttagatgtccccatgcacaaccatgggaatgcggggtccctgcattcaaaactccagtgacagaatatagtccccaaccagctgctagagacaagaacactctccaggctgcatgctcaggcccaatgccctgctccttccatacctcatgggtgacagtccacaaaagtggtggcagcaggagggctcagtagaagcgctttcggctctgttccctgcccatttgttgtagagtatgataccaatgactatggcaaatacagaaaacacccagggagaaaaagacgatgaggaagagggccaggccactcaggggcggcagtggagctgtcatctcaggcagcttcatattgtccactgagggcaagaacacatctcgatggagcttttcctcttctggggttctctccactgtcagttcaaacaacttcaaggaaatgacatcatgattatctgagagatccccagtgatggaggaggtgccgaagtagtagccgcggggcaggcggactccgggcacttcaatgcagtc

SEQ ID NO: 45398 - DNA, 2206 bp, Homo sapiens
gcacgaggtggtttctgcgggtgaggctggcgcccgtaccatgagcgaggcggacgggctgcgacagcgccggcccctgcggccgcaggtcgtcacagacgatgatggccaggccccggaggctaaggacggcagctcctttagcggcagagttttccgagtgaccttcttgatgctggctgtttctctcaccgttcccctgcttggagccatgatgctgctggaatctcctatagatccacagcctctcaggcttcaaagaacccccgctcttgcttggtgttctgcatccaaatacgaagctgcgacaggcagaaaggctgtttgaaaatcaacttgttgggaccggagtccataggcacatattgggggatgtgatgtttactggggacagcagatgggccgggtcgtaaaacttgaaaatgggtgaaataggagaccattgcccggtttggttcgggcccttgcaaaacccgagatgatgagcctgtgtgtggggagaccccctgggtatccgtgcagggcccaatgggactctctttgtggccgatgcatacaagggactatttgaagtaaatccctggaaacgtgaagtgaaactgctgctgtcctccgagacacccattgaggggaagaacatgtcctttgtgaatgatcttacagtcactcaggatgggaggaagatttatttcaccgattctagcagcaaatggcaaagacgagactacctgcttctggtgatggagggcacagatgacgggcgcctgctggagtatgatactgtgaccagggaagtaaaagttttattggaccagctgcggttcccgaatggagtccagctgtctcctgcagaagactttgtcctggtggcagaaacaaccatggccaggatacgaagagtctacgtttctggcctgatgaagggcggggctgatctgtttgtggagaacatgcctggatttccagacaacatccggcccagcagctctggggggtactgggtgggcatgtcgaccatccgccctaaccctgggttttccatgctggatttcttatctgagagaccctggattaaaaggatgatttttaagctctttagtcaagagacggtgatgaagtttgtgccgcggtacagcctcgtcctagaactcagcgacagcggtgccttccggagaagcctgcatgatcccgatgggctggtggccacctacatcagcgaggtgcacgaacacgatgggcacctgtacctgggctctttcaggtcccccttcctctgcagactcagcctccaggctgtttagctctcccagatagctgcccctgccacgcaggccaggagtcttcacactcaggcaccaggcctggtccaggaggagctgtggacacagtcgtggttcaagtgtccacatgcacctgttagtccctgagaggtggtgggaatggctgcttcattcctcgaggatgcccgggccccacctgggcttgtctttctgtttagagggaagtgtaacatatctgccatgaggaacataaattcatgtaaagccattttctcttaaacaaaacaaaactttctaagtacagtcattctctaggatttgggaagctccttgcacttggaacagggctcaggtgggtggagcagtaaggcactacccagagagcttgctgctgcggccctgtcctgcggcctcaaagttcttctttactatatataacgtgcggtcatacctttcttcgttgtggtggggatggaagagcagagggagcatggcccaggggtgttgaggccagcggtgagagccgtgttagccaagacatggaactgtgttctcaagggttatgtggggcgtgggctctccatagtgtgtatgaaaagcttgttgactctagcggctcagagaggactttgctgggtttctttctgtgaatatctccgtgctgaccatgctggaattggatgattctgcaattcgggacctactgcaggggtccgtttagtaacgtcttgtctgtgatctttgttcttgacctctagaccccaagatgtgaacagtgcacgtgttaatgtcatctttgctcatgtgttataagccccaagttgctgtatattttcacaagtatgtctacacactggtcatgattttgataataaataacgataaatcgacttctgctgattaacctttaaaaaaaaaaaaaaaaa

SEQ ID NO: 45399 - DNA, 2984 bp, Homo sapiens
ggagcctcagcgagcggaggaggaggcgccggccgacggccgagtactgcggtgagagccagcgggccagcgccagcctgcaacagccgccagaagtacacgaggaaccggcggcggcgtgtgcgtgtaggcccgtgtgcgcggggcggcgcgggaggagcgcggagcggcagccggctggggcgggtggcatctgtaggcccatggacgagaaggtgttcaccaaggagctggaccagtggatcgagcagctgaacgagtgcaagcagctgtccgagtcccaggtcaagagcctctgcgagaaggctaaagaaatcctgacaaaagaatccaacgtgcaagaggttcgatgtccagttactgtctgtggagatgtgcatgggcaatttcatgatctcatggaactgtttagaattggtggcaaatcaccagatacaaattacttgtttatgggagattatgttgacagaggatattattcagttgaaacagttacactgcttgtagctcttaaggttcgttaccgtgaacgcatcaccattcttcgagggaatcatgagagcagacagatcacacaagtttatggtttctatgatgaatgtttaagaaaatatggaaatgcaaatgtttggaaatattttacagatctttttgactatcttcctctcactgccttggtggatgggcagatcttctgtctacatggtggtctctcgccatctatagatacactggatcatatcagagcacttgatcgcctacaagaagttccccatgagggtccaatgtgtgacttgctgtggtcagatccagatgaccgtggtggttggggtatatctcctcgaggagctggttacacctttgggcaagatatttctgagacatttaatcatgccaatggcctcacgttggtgtctagagctcaccagctagtgatggagggatataactggtgccatgaccggaatgtagtaacgattttcagtgctccaaactattgttatcgttgtggtaacccaagctgcaatcatgggaacttgacgatactctaaaatactctttcttgcagtttgacccagcacctcgtagaggcgagccacatgttactcgtcgtaccccagactacttcctgtaatgaaattttaaacttgtacagtattgccatgaaccatatatcgacctaatggaaatgggaagagcaacagtaactccaaagtgtcagaaaatagttaacattcaaaaaacttgttttcacatggaccaaaagatgtgccatataaaaatacaaagcctcttgtcatcaacagccgtgaccactttagaatgaaccagttcattgcatgctgaagcgacattgttggtcaagaaaccagtttctggcatagcgctatttgtagttacttttgctttctctgagagactgcagataataagatgtaaacattaacacctcgtgaatacaatttaacttccatttagctatagctttactcagcatgactgtagataaggatagcagcaaacaatcattggagcttaatgaacatttttaaaaataattaccaaggcctcccttctacttgtgagttttgaaattgttctttttattttcagggataccgtttaatttaattatatgatttgtctgcactcagtttattccctactcaaatctcagccccatgttgttctttgttattgtcagaacctggtgagttgttttgaacagaactgttttttccccttcctgtaagacgatgtgactgcacaagagcactgcagtgtttttcataataaacttgtgaactaagaactgagaaggtcaaattttaattgtatcaatgggcaagactggtgctgtttattaaaaaagttaaatcaattgagtaaattttagaatttgtagacttgtaggtaaaataaaaatcaagggcactacataacctctctggtaactccttgacattcttcagattaacttcaggatttatttgtatttcacatattacaatttgtcacattgttggtgtgcactttgtgggttcttcctgcatattaacttgtttgtaagaaaggaaatctgtgctgcttcagtaagacttaattgtaaaaccatataacttgagatttaagtctttgggttttgttttaataaaacagcatgttttcaggtagagcttaaactaaatgatgtgtttacttagtgcagtttctggttatgaatattatattgctatgtgtatattatatggactctttaaaatgattgacagattggcaaattcttaaatctttgtacattgttgagtcatatgttcttagagttaaatttgtctcagataagaaagtgttaaagcattagcctgtgtcaagttctttgagtgatactagtgaaaccaaatagaaaactattgttggatcatgatttagtcttatgtacattcacccgaagacaaaaatggtacttaaagtggcagtgttcaacatttaatgagtttttccccttttatccttcgaataggattagatgtttaaaaaaaagttcttctgtgggaactaatatttgatattttaacctaccagagtaaacaggaacacttaatcatacttgtgagtgtagtaaataaaagttttcttgctttgtgctgtgttgaatctggaaccaacagggaagttatagcatatcccctttctaaaatgcttgaggaacacatacataccgaatgtcttttctgatctaattgatagtatttttagtggcttgtggagttaattttccaaagcaaaaggccattagggtttctacatttcatttcatttcattcttttctttcacaagaaatacattctctgtgtgtctttttgttgctctgtcactctatgccctttctctccgactgaacaaatagcttatccatgtgcagtggttttaatacccaaacaatctagacaccaagcagctattttttccggtcctgtgatat

SEQ ID NO: 45400 - DNA, 1445 bp, Homo sapiens
ttcagttctactattatttatttttttaaatatttttgaaaaaatataatttttttacaatattttcaacttaaacactattcacactgaacacgtatggcagcttaacctacccaaatatgaagtttaagaagccaaaactgttctagctttgttaaaagttgtgctgcagactctcgtgatggttaacaaagcaaggaaaagcaccactcaaatcataatgttacagtatctttgttcagctggattatgggttggtattggtcatatgttagactccatacaggcatagctatgatgcagtgaatcccttagaagttacaattctcaaattacatacttcctcagatgtaacattagaactcaatatttcctaacaataacataccagaaaaggctgggactgggcactcatctgctgactaacttgtagcctcagtaatatgacatacttgcctttaacaaattatctcaaattaactaacagaccttcagaaaatggagattctttttgatggggacataatcaaatttaagtctgagaaatatgcttaacagttggaactcaaattaaatgtactgattttaaagtttagacattaacaagtgatagattagcctcaaaaaaagacaatttggtaaggtttaggtcttttaatttggtgcttgttcacaacttgactggtgcttctttccttgctgtcttcacatcaagccatggggccaattctattttcagtaaatgtttgacagctttttacttagtaacagtctcagcacttttattaagcatgcaagactaacaaaaactttggcaatgcataagtgtaacacagtgacaagagagcttttacaattaagtcttctaatactgccttcacagtgtggaaattgtgctacatccaccaaaagagggccccgtctactcaaatatttccgtacttcaccccaggaacaaactcctttgcatttggattcagattgctcttgaccacaagatcttccagagaagagccatcactgataacaaggtcattaaactggtcttggatttggtccatagtttgtgggagatctcgagctggaataaaccattcatgctcttcttcctcttccagcatttcttggaaacagcgttcaataaattcttcttcccataactcctcttctatttgtctgttgaattcttcttcattttccatccacatgtactctgcaaatggattgtcatcttcatgagaatgaccgttaataatcacatcttcattgatgatgcttgggctagtactgctgcgacttggatctttcatggctgatgttggttgtcgtttttaacccaatgcacagcagcggggacggcagccaacgaatcctgtcggcctccgcggatctccaacaggcagcgccgctcccccgctcgacggtgccttcgcccgccgcctccc

SEQ ID NO: 45401 - DNA, 665 bp, Homo sapiens
ggtgagggcgggcggagatgtagacccggtagtgttgtgccttgtggtgacaactggcggcagcgcgccgcgggcccgagacttagtctcgggccgccatggccagcgtccacgagagcctctacttcaatcccatgatgaccaatggggttgtgcacgccaatgtgttcggcatcaaggactgggtgacgccgtacaagatcgcggtgctggtgctgctgaacgagatgagccgcacaggcgagggccgccgtcagcctcatggagcggcggaggctcaaccagctgctcctgcccctgctgcagggcccagatattacactgtcaaaactttacaagttaattgaagagtcttgtccacagctggcaaattcagtgcagatcagaatcaaactgatggctgaaggcgagttgaaggatatggaacagttttttgatgacctttcagattctttctctggaactgaaccagaggttcacaaaacaagtgtagtaggtttgtttctgcgtcacatgatcttggcctacagtaagctttctttcagccaagtgtttaaactgtacactgcccttcagcagtacttccagaatggtgagaaaaagacagtggaggatgctgatatggaactgaccagtagagatgagggtgaaagaaaaatggaaaa

SEQ ID NO: 45402 - DNA, 1419 bp, Homo sapiens
atattatattttccttgacttctctagcaaaattattatgatttttttttccttgactaattttcttttcatttttgcaggcacgctgtttctcttccaaacccctaattctagctttattcacgccatttatgcttaaacggtcttttgtctctgtacctcaccagggaatatatttacccttcttggattcaactattagttcaatgtcgatagctcccaaatcaacattaccaacctgggtctttgactcaagctctagaacatactcccaccgtgaccagccaatgtgccttcttatagtgtctactcattggtctttgttctgcccagtgataacaatgggataacgcctgctacacatcttcattgtgaaacccttcccctgtgctgagattaaatgaactctaagattattaaatagtatattttccttgacagcctagcgtttgatgattttaaagccttatgtataaataaaccaaaggaagtaagcagtcatattgctaatttgctaactcctatctattgaatggtgaagttttaaaaatttccccagggtaagtttaagattcaaacaccatctattgagcacctacattgtgtgccaggtagtaaaataggtgctttcatacacattgtctcaattcctgtgaggtcagaattatctctgcatttgaaacttgagggaaacatgctcagagtgcaagaagcttccttgcctgagatcacctagaaagggaaccctcagagccggcaactgaatcttggtccctgtgatgtcaagcccattgctctcccactgcagaacatggcctctagattaatgccaccgattcaggaacacctccgacagtcttgaaatacccccatgttgccttgtttgttttttccttctggcttcttctattacagtctcttcattggaagctctgtaggccaaggccagagctgatactgacacggagccaatgcagatagcacatcagatgctaggggtcgctgggaggattaagggacttaatctgctaggaacacctgtacttgaagtggaggaggctagggggccacagttgctgcttcattaacatagaggttttggatttttttctcttgtggtttgttttttaagtggattggcagactccttgttgcttaagagtggctttctaggcaggccactggcatctgaattcatcattgacaataaatgtaagaaattgggaataaaaaagagagacctgctgttattcgcttttgttctccagtgatttgattaactcagggcaaggctgaatatcagagtgtatcgcactgaagaataataatccattcagtaatgttatagttatcctcaatctaaatatgtcaactgtcattttgctgcttttcaaataaaatacttgaaaactgtcaaaa

SEQ ID NO: 45403 - DNA, 3828 bp, Homo sapiens
  misc_feature (1)...(3828): n = a,t,c or g
gcgggcggtggcggcggtggccggaggcggcggtgcctcctcctcctcgccccggcgccggcggtgatccgagcgagcggccgcggcccccgatgagactgctggcgggctggctgtgcctgagcctggcgtccgtgtggctggcgcggaggatgtggacgctgcggagcccgctcacccgctccctgtacgtgaacatgactagcggcccgggtgggccggcggcggccgcgggcggcaggaaggagaaccaccagtggtatgtgtgcaacagagagaaattatgcgaatcactccaggctgtctttgttcagagttaccttgatcaaggaacacagatcttcttaaacaacagcattgagaaatcgggctggcctatttatccaattatatcattcttttgtgtcatctgtttttagcctgtttatgtctagaacatctatcaatgggttgctaggaagaggctcaatgtttgtgttttcaccagatcagtttcagagactgcttaaaattaatccagactggaaaacccacagacttcttgatttaggtgctggagatggagaagtcacaaaaatcatgagccctcattttgaagaaatctatgccactgagctttctgaaactatgatatggcagcttcagaaaaagaaatacagagtccttggtataaatgaatggcagaatacggggttccagtatgatgtcatcagctgcctgaacttgctggaccgctgtgatcagcccctgactttgttaaaagatatcagaagtgtcttggagccaactagaggcagggtcatccttgcccttgtcctcccctttcatccctatgtggaaaacgtaggtggcaagtgggagaaaccatcagaaattttggaaatcaaaggacagaactgggaagaacaagtgaatagtctgcctgaagttttcagaaaagctggttttgttatcgaagctttcacccagactacccatacctgtgtgaaggcgacatgtataatgactactacgttctggatgacgctgtctttgttctcaaaccagtataaacacgtggaggtcgaagtcttcagagtcccgccacctccgggatgtgcccttggaagagggtctgtgttcacaattacgtgaagggaggacccttggggaccgccattctaaatatcatgtaggaatttaaaaagccaaaatactaattatttctttgtagtgtgtaaaggaatgtttttaaaagacaaaaacccaactctttgtggatttttatcaactctttactcagagccactctccaatgcaggtcacactccaattatgatggaagatattttttatacttaattgcagtagggactcattcccagacaaagcaatagtcacgacttcatggaaccaatcaatggattgttttttgaagactggcaataaagctgtccattcaattccaaatactggttttaaggtatagccactgatattctttcatgtttagaaattctttctgttattattcaagaaaatgtttttaatcatgctaataaacttttttggagatgactttggcatcatgtttgaattcatataaagctcccctagcattttttattggtttggcttcaggagtacccaaatagtagcattatgagaatgacgcagacaatttgaataggggggaaggaaggcttcagacttgggggaaggggagattattgcaaattgcagtgaacactgagtcagtaaaaaaaaaaaacagaaacaaaaacccagcctcattcagatacagaacttcagggacccctccccccacccccccagttaatgctgctgtgaaaaatgcaaaataacctggttctgactttgtgatcactcatgtcccatacactgaactttgtttttttctggacaatctcaggttctcagaattgaaacattcagttttgtctactgacaaaatgcaactaaaaatgttttaattcaacttcttactctacacttatatacctctctcccagaggcttgggctcttccctgaaatccttaaaggagtttattatttgccaagaatatggtttgatgaagaccgtgtcagactcatgcattctggaatccgtgagtgcctccaaccataaacccagaaatgctgccatagaggaacccattagcaagatcaataaccatcgtggatattccaaagagcagagcatttaacccagaatctgaaatctcagtaataacagaaatgtcaatatgagattgtggttattaacaatatgttatcctcactactttatttcttttttcatccaggtgtttcattaagtattctcatttatatgctcatagaagtcatcagatcaacacattcactccaacacctgggtataaaggcgaattaaaacctgaagaattactttattattcattaagaactgcattcccacatcctcacaccaatatcttccactgttactgtgcagtcataataagagttgggttatgtgatttatgcaaaattgttattggtgtgttctaatgatttttttccaggaattcaagtaagtgaagtacaaatacttagcaccatagattgtaaaaatagaaagaggaaatgagaaaacttaatgtcgttcttgtacagtngnggctcccttgcaggtgggactggtgggcttctgcctggtatttgcaacccccctgtgctgtgccctattcccccagaagagctccatacacataagcaacctggaaccagagctgagagctcagatccatgagcaaaaccccagcgttgaagtggtctactacaacaaggggctttgaggagggtcagcctctgtcccctccctcacttccttgggctgctgctttagtggagtcatgtcacccctaccacttggctatctgcctagcactgggcaggggccttggtgggcagatggcaattgagggtagcaacctattagggtgggggagggacctccataaggcttttcctcccttctctggtttcaaagatcagagcacataacccctcctgtgcttgagtgtccatgcatatacatacatgatacacatgtgtatgtgtacattgggtcctgaaagctagaagcaggcatgctagcctagtatgttctgacatctggcttcccttctcagcctcatgtccacctgcctgccagccagggtaacaggtgtgacttccttcttttaaactgttacaccagccaagttattttttgatgggcacctcatcccttctagaaataggaggagccccaggatctcaggacagagacttatagacactagtaggacaaagcgggctgaatccttcaggtttctgatacctagctccccaagctgactgggctggcagaggagaacatgttgagacaagggaggcaggggacttatgcatccctcagtgccatcccttgtatcctggaatagctccatttcccctcctcctctctaccagacaaaggagtgcctgtgtcctgtactgccctcgctgtctcccccaccaccctacttgacagcgtgggcatcttcaggcacagccttgggagttcctggtgtgctctgacatcatgacctcaaatctaaatcctccaatcccaactccctttcccaaacaaaaagccacagaggcagagcaaggcattcccctttaagagcttccactgcaccccctcccaagggacacagcggtaggaatggtgcttaaactccacaggtatcagagagggtgtaactaggacatcctcaagggcagctaggccccgaatgtacaatgttaagacagggaattttgtgttccattgactt

SEQ ID NO: 45404 - DNA, 2177 bp, Homo sapiens
atcgccagagtcggattcgccgccgcagcagccgccgcccccgggagccgccgggaccctcgcgtcgtcgccgccgccgccgcccagatccccgcaccatgccgtcggagaagaccttcaagcagcgccgcaccttcgaacaaagagtagaagatgtccgacttattcgagagcagcatccaaccaaaatcccggtgataatagaacgatacaagggtgagaagcagcttcctgttctggataaaacaaagttccttgtacctgaccatgtcaacatgagtgagctcatcaagataattagaaggcgcttacagctcaatgctaatcaggccttcttcctgttggtgaacggacacagcatggtcagcgtctccacaccaatctcagaggtgtatgagagtgagaaagatgaagatggattcctgtacatggtctatgcctcccaggagacgttcgggatgaaattgtcagtgtaaaaccagaaaaaatgcagctcttctagaattgtttaaacccttaccaaggaaaaaaaagggatgttaccaactgagatcgatcagttcatccaatcacagatcatcaaacagtagtgttcccacctaggagtgttaggaagttgtgtttgtgtttcaagcagaaaaactgagctccaagtgagcacattcagctttggaaactatattatttaatgtaggctagcttgttttcaaattttaaaagtttaaaaataaaatactttgcattctaagttgccaataaaatagaccttcaagttattttaatgctcttttctcactaataggaacttgtaattccagcagtaatttaaaggctttcagagagaccctgagtcttctcttcaggttcacagaacccgccgcctttttgggtagaagttttctactcagctagagagatctccctaagaggatctttaggcctgagttgtgaagcgcaacccccgcaaaacggcatttgccatcacagttgggcacaaacgcagggtaaacgggctgtgtgaggaaaacggccctgactgtaaactgctgaaggtccctgactcctaagagaaccacacccaaagtcctcactcttgcaggggtagacatttctggtttggtttgttctctagataggtttacacacataaagacaccactcaaaaggaaacttgaataatttataattttgatcgagtttcttaaaagaccctgggagaaagagtggcatttcttctgtttcaggtttgggtctgagttcaaactagtgcctgtgttgttacggaaagcagcagtgtaccagtgtcactctgggagtacagcgggagaaacacaaaatagtataactgaaaacattaacattcagacacactcccttctggccttccggctttaaagctgtgggatgatccacgtttttgtttttttaatgttaaatgtgtaactcagtattactgaaaagggtacccacattttgaatagtagttatcactcttaggtcagacagccatcagaattctcccacaccaagtgcatgtcagttgtggagaaaacatagcaaaaagagccgtacgctctttacagatactaatgtcaagagttaaacctcctcaggttcaacctgtgataaaagactagtgcttcccagtacttgcatggggttcactatttatagttttcttgggagtatcacaggaaaatcacaattacacccactttagacccctatgtgtagcaggtcacaacttaccccttgtgtgtttagatgtgtatgaaatacctgtatacgttagtgaaagctgtttactgtaacggggaaaaccagattctttgcatctgggccctctactgattgttaaaaggagttcctgtcacctgctccccccacccccgcatgcgtctgtccacttggctaacttttaatatgtgtatttttacattatgtatattcttaactggactgtctcgtttagactgtatacatcatatctgacattattgtaactaccgtgtgatcagtaagattcctgtaagaaatactgctttttaagaaaaaaaataacatgctgaggggtgacctatatcccatgtgagtggtcactttatttataggatctttaaaacatttttaatgaactaagttgaataaaggcacaattaaaaactgtcatcaaagcc

SEQ ID NO: 45405 - DNA, 916 bp, Homo sapiens
gcaggatgccacggatccctttgtggccttccacatcaacaagggccttgtgaagaagtatatgaactctctcctgattggagaactgtctccagagcagcccagctttgagcccaccaagaataaagagctgacagatgagttccgggagctgcgggccacagtggagcggatggggctcatgaaggccaaccatgtcttcttcctgctgtacctgctgcacatcttgctgctggatggtgcagcctggctcaccctttgggtctttgggacgtcctttttgcccttcctcctctgtgcggtgctgctcagtgcagttcaggcccaggctggctggctgcagcatgactttgggcgacctgtcggtcttcagcacctcaaagtggaaccatctgctacatcattttgtgattggccacctgaagggggcccccgccagttggtggaaccacatgcacttccagcaccatgccaagcccaactgcttccgcaaagacccagacatcaacatgcatcccttcttctttgccttggggaagatcctctctgtggagcttgggaaacagaagaaaaaatatatgccgtacaaccaccagcacaaatacttcttcctaattgggcccccagccttgctgcctctctacttccagtggtatattttctattttgttatccagcgaaagaagtgggtggacttggcctggatcagcaaacaggaatacgatgaagccgggccttccattgtccaccgcaaatgcttctaaaacactttcctgctcctctctgtctctagcacacaactgtgaatgtcctgtggaattatgccttcagttcttttccaaatcattcctagccaaagctctgactcgttacctatgtgttttttaataaatctgaaataggctactggtaaaaa

SEQ ID NO: 45406 - DNA, 1430 bp, Homo sapiens
gccaggtgttggaggcctttgctacgcggtccgaggctttcattgcacaccgcggctaatgccgccgccacggctacagaaacgacctcccaagacgtcgcggcgacccccgtcgcgcggtacccgccgattgtggcctccatgacagccgacagcaaagctgcacggctgcggcggatcgagcgctggcaggcgacggtgcacgctgcggagtcggtagacgagaagctgcgaatcctcaccaagatgcagtttatgaagtacatggtttacccgcagaccttcgcgctgaatgccgaccgctggtaccagtacttcaccaagaccgtgttcctgtcgggtctgccgccgcccccagcggagcccgagcccgagcccgaacccgaacctgaacctgcgctggacctcgcggcgctgcgtgcggtcgcctgcgactgcctgctgcaggagcacttctacctgcggcgcaggcggcgcgtgcaccgttacgaggagagcgaggtcatatctttgcccttcctggatcagctggtgtcaaccctcgtgggcctcctcagcccacacaacccgggccctggccgctgccgccctcgattatagatgcccagttcatttttactgggtgcgtggtgaagaaattattcctcgtggtcatcgaagaggtcgaattgatgacttgcgataccagatagatgataaaccaaacaaccagattcgaatatccaagcaactcgcagagtttgtgccattggattattctgttcctatagaaatccccactataaaatgtaaaccatgacaaacttccattattcaaacggcagtatgaaaaccacatatttgttggctcaaaaactgcagatccttgctgttacggtcacacccagtttcatctgttacctgacaaattaagaagggaaaggcttttgagacaaaactgtgctgatcagatagaagttgtttttagagctaatgctattgcaagcctttttgcttggactggagcacaagctatgtatcaaggattctggagtgaagcagatgttactcgaccttttgtctcccaggctgtgatcacagatggaaaatacttttcctttttctgctaccagctaaatactttggcactgactacacaagctgatcaaaataaccctcgtaaaaatatatgttggggtacacaaagtaagcctctttatgaaacaattgaggataatgatgtgaaaggttttaatgatgatgttctacttcagatagttcactttctactgaatagaccaaaagaagaaaaatcacagctgttggaaaactgaaaaagcatatttgattgagaactgtgggaatatttaaattttactgaaggaacaataatgatgagatttgtaactgtcaactattaaatacattgatttttgagacaaataaaaaaa

SEQ ID NO: 45407 - DNA, 3078 bp, Homo sapiens
  misc_feature (1)...(3078): n = a,t,c or g
gggctcgcgggctcctcagagcgngggcccgggaccttgagtcagacgcgcatgtgtaagggaggagaggcggcggcgacaccatgtcatctcccagtccgggcaagaggcggatggacacggacgtggtcaagctcatcgagagtaaacatgaggttacgatcctgggaggacttaatgaatttgtagtgaagttttatggaccacaaggaacaccatatgcaaggcggagtatggaaagttagagtggacctacctgataaataccctttcaaatctccatctataggattcatgaataaaattttccatcccaacattgatgaagcgtcaggaactgtgtgtctagatgtaattaatcaaacttggacagctctctatgatcttaccaatatatttgagtccttcctgcctcagttattggcctatcctaaccccatagatcctctcaatggtgacgctgcagccatgtacctccaccgaccagaagaatacaagcagaaaattaaagagtacatccagaaatacgccacggaggaggcgctgaaagaacaggaagagggtaccggggacagctcatcggagagctctatgtctgacttttccgaagatgaggcccaggatatggagttgtagtagaaaaagcacctgcttttcagaaagactattatttcctaaccatgagaagcagactataatattcatatttaaacaaagcaattttttttattactaaacaaggtttttatgaataatagcattgatatatatatattatatatcaccctttagatcttgatttcttggtcatttctcaacctgaggtgcatagcatattcccacattccatttggtagcaatatgcggtctgaatgcatgcattcatgagtccatgtggccaagtcagcctgtgtgctactgaactgtcgaaggaaatagccgctctgataggtagatgtgagtaaaaagaacaggaaaaaattgcttcttttattggtttccaaagaaacaaaccaaaccaaccagctcttggatgtgaagataaaatagtgcttttttgaaatggagaggaaaaacttggggaggaagaggcctgctgtgggggcatcggagccagccatgtaagaatcagagctgctccttcctgtgaatcctaggtggccctatgtcttctgtggagttacagtataaagcagggagctaattaagagtattaaaacttaaaaccattttttgactctgattttaagtacatttttatatgtcagttgctgcccttcacactaccaggccctgcagccacagtgttctgttggagaaacttggggaagtgttttctgaaccagttctttttcttggggtagagcgtgaaatccagacctgtttttgaaaggacagcacaggaggagaaaagtgactgggacgatgcttcctctcatccaaaacacatgcagagtcacatcctcatcctagtgtttggcagtttgagaccgctaccctgaacttaagagctttaaatatgagggttgtgtttctgggggggttatttttttggtgtgtgtgtgtgtgtattgtgcttagaaaggttgcagatttcatcttcacctaccaaagaggcggccgcctccttggacaagccgctcatggaccattagacttgagaagacgacccacgtggtgactgcaaagccctgggtacttgccttcatgttctggtttggttttccctttttctgctgctcttggcagcagcctggtcatcatctgcttgtgggagtgggaaatgggtattttagacccaacacaggttctaaatttaaaacaaataataattggaacaaataaaggttcttgtacccagagtgattctacatggggaaaaacaaaccagcttttttcagagagtgaccgaataggaagaagggattcagaaatatgatgtagtagaacatgccctgcaggaagaaaatgttttctctcctgcgtatgttaagaggaaatcagtttaaaatgccctggctaatccaaatgtccgactcagctaacccatatggtccagggttgctgcagagtttcctttcaaatctgagtgttgcctgctgaactcggaggggagtttggagaaattttagacagcagctctgtgttcttttttttgccgcagccaataagataatagcagaattagccaatcctaaaaccttctaaagacgatttttgagcatcccactgggattatttaatttttctttttgacgtgtgtttttagtttagaagtgctgtattccacaaggtttaagtcagtgaggttggaagataccctatcttttttattcaaaaagcacaatcaatcttttgtttgaaaatctatataaagtacaacttgcttttagcatgattattttcctaaataaaaagacaaagaatttacttactttatgttaattacgggcatgaagcaaaaggttttctttaaaaaaaaaaaaaaaagtgcagtgatgtagggctgtggttagttaaccgtactgagttatccatctagcatctgtggcttgctggaagggtagtattaactatttaacatgtaatggtgtacttcactcttacctagcacgctgtcttctcattgctttgggggagggagggtctctctgctggcactgtctaacttgcttacctgctgactttgcagtttgcttgtgctatgacatttattgtaggtgctatttagggtaggcttaaagtgctgggtggtgatttgagttcaaacaataaaaaattgtattttttcaatattgtataaacaatagtgttctaattaccttaaaaaaaaataatgaccagttaagaattgcttttgatcttgtcaaaaaactgaatagaccccagtttcgggaaggtgtgtgagcagtgccatgactctgccccttacctaatcccacatctctctaatgataagacattggctcgcctctgaccagagccccagcaccagagagcgggaaggatgcaggaattgtccaaatgacctgctggggggaggttgtagggagttttagcaggatttgagtgtggctg

SEQ ID NO: 45408 - DNA, 286 bp, Homo sapiens
cggggttgtggtgaggaaggggtgatggcatgcggagttctttatcttcagtgagaatgtgcctgcccgcctgagagccagcttccgcgttggaggcacgtgttcagagagctgctgagcgccaccctctacccggctgacagacaacacagacctgtgccgaaggctaatttgtggcttttacgaccctaccccaccccctgttttcaggggtttagactacatttgaaatccaaacttggagtatataacttcttattgagcccaactgctttttttttttttt

SEQ ID NO: 45409 - DNA, 1450 bp, Homo sapiens; identical to SEQ ID NO: 5344

SEQ ID NO: 45410 - DNA, 2679 bp, Homo sapiens
ttttttttttttttttgactttcctacatcagttttatttaaaacacaaacaagtatttctctttctgtaagggcaaatggttcaaataatgcggaacacgaaacattgactaatacaagtgctttaaatatgaaacaaaattattttttaaaaaagcaaaagaataaagaatatatacaaaagggacctggaatctgtaaggtgattccaaaaacgaaataagtagaaaatccatggtgaaacctgaacattctacctctgctttggagaagggctatcatacaacattcagtcagctgaagatggattggtagaggtgtgtctatacataaacttcagtcatttttgcttgtgcagaatcatcccaatcttcccaagactgaatgggcagtcctgtggctttcttccttttccatattcccaacaaggctacgtggaagttcaactcttgatgagccgcttacaacagcagttccttaggagccaacatgacaggtgggtcagatttccctatgagaaacaaaactggccacctacagcaaaatatcaaaatgggtaagtccttccttcctcttcctcctgattatatacaacatatctcctttcaagactattatttccatcatgcttattccttcacaaatctaaaccttgaggtgatatgaaggaaaccaacatcaagaaaagaaaactcaattcagaaatgaagaaaactggcaggtatacaatacacccccagagcatctcaatatccctggcacagtacaattcagtgtactgctacagcccatagataaatattggcagcttgaataagctcattttttccctcaggtggttaaaggccaccaaacaaatactgggcaacaggggtttgttgggagagttagaaataaaaaattaaccaaattttgtccctgtgttaattcaatgccagcaaggaggcaagtactgaagaagaaaagggacaattttcatactaaaaaagaattcctctaatcatgtcaccatctcatataatgaatccagggaatcccagaaatagaaaattagtttcaggggacccctgaggcactttaaagccttttaaaaaattacagtaataataaattagatattgctcttcagaggctaacagagcagcagaagcatcaagatcaggtccaaagagttatgcccacattacaggcttcctgagctgctcagccctctttaaagcttagttgaatctttaaatacctttaaaaagacatacaatttaacacagactgagtgggtatttttgtttagtggtagcataaaatttggtccttaatggtagcagctgtcttcatccatttcaaactcaggtaatattaagtacatcaagacaatacataaagaatacaacaaagaagaaaaaagccaaaactgacaaacacctcaaggagtcactaagttcgcttgcaccctttcacttgatctccctctcagtctcttttttgtggagagaagggtatgacagaacttttttctcaaaagatgataaacaatggcatcaaatggacaaaatggttataaagtaactttaaaaatctgaccccaaggaatccaggacacatacagataattcagaggtatacttctgatttggggcaaattctagactaaagaaatgatcatctcaggtaaatgttacaatagatgaaactaagtccagttttttggcgattttttttttaaagtgtcctcactaccaccttcagctatcaatcatttctgatagctcaagcagaaggtcatcttcatctttcccaggatccaggtcaatctcagcttccaatttgcctcctgaaatctcccatattagtttctcaaaatcatcctccacagagagtgggggctttcctgttgaggcagagctgagtcggcgagttttcatgctcatttgggatgaggaagggccagacacctccgggggtgaggaatctgaagaggactgggttggaggcagcacaagactgtctctaggattttctgcttcaggcacagtgactgatttgtcctcagagacaagcgggacaacagccacagctgcctttttggctgggggttcctgtaggacactgctggagctgagtggcttcacagcggcaatgacagcagcgtgcatctccactgccttacgttttggggccaatttgggggatgacacaactttaaccacagatggcttcacgttcactttgggtttagctttaccccttttttccaaggtctgtgctgcacatttcacattcaataatgagtctccaatccctgaggtttctacctccaccttctgggatgactttgtgggaagccgcttggtcaggtgccgtgtgattcctggcacagcagtgagcactggtttctctgccacttgggtattgcaagaggctacatctccccgaagaggtgtcaagactgatttttccctctcctgctgtttctgcatgtgcttctctctcatggtctcacatctcttgacttgaattttagtgatgtcaactcctgtggtctcacctgaagcctctttagcttctgttctaatactgctctgagaatcaacttcatttccttcctgaaggttcttctcttctttcatccctgttcttttggtgattcgcagcagccgccttgcccctggagtggcctcg

SEQ ID NO: 45411 - DNA, 982 bp, Homo sapiens
tttttttttttttctttgcaactcacttttattgtttctttataaacttcctctcccatggaggaatatattgttatagtcattagcttatctctttttttaaaactctatgctaacagcaatggagccaagaggaggaaaacataagctacgatagaaaggcacttagaacctgttaaaatactgacgtcctggaatgtgcaacaacacaccaatgacaaccacaaaaagtacaccggccctgccgagcctggtccgtcaccgagtcgcatgctgagctcgtcggccttccagtgccctgttcctccgctctgctcaagtcgcaaacccatgaccccgccagggacttaagggcctggggccctcacaggggtggggggtgctcagggcctgggtggggcccgaagaaaggagaccagctccctcctaccttgctcatagccccttcgaggggcagagccagtgtggctgggccctgtcagggctggagtccaaagcccagtggcaaggtgggccgggtcagggtgacccctctgggacagaagggcagtccgggagagggtggggtcagcagagctgccagaggacctgcagggccactaaggaccccaaggctgtccgggcagctgccctcgttttacagatggggaggtggaagggcctggcccactcaagaggccctggtgacagggcaggcctagaagccagaactcccagctgccaggtgggagagggaacagggagaggccccagatggggggtgcatggctgcgtccatccctcagggcgtcctgggatgggactggggcacaaggccctccagcaccacccttaagtggtctctggcccctgccagggtccctctgagtggcacagaacctgggggggcccactgggtgttaggggtggggaagtgcctctgagaaagcggcccagcagggaaaagccagaggaagcaacgtgtcatgggtccagcaccctc

SEQ ID NO: 45412 - DNA, 927 bp, Homo sapiens
  misc_feature (1)...(927): n = a,t,c or g
tttttcactgtaaaatgtactatttttaatgggtgtgcatgtcaggattttctttagaaatacactggtctggtctaatttatttaagcaggagcactttaaagtatcccaccctaccccattccacccccagtggacagaaaggaaattgactgacttgaggggatgcagacatctgggttattccaacagaccagtggttaggaggagggggtgggtagcattatggcctcggcaggcccccccaccctgagcctctgaaagctgactttatctgtaagagggaggtcaggctcgccttctcaatagcgtgtatttggatgagatgagtttcttctggagtacacttaggcagagcagggctggcttagggctggagcctcagcgtttcacaacttctcaccttctcttccatgtcagtcagaatggcatccagctttgccaccacctgccgtgcattgtccaggctgaagcacattgggggcttaaacttcaggatgttcctcccagggccatcagtgctcagcaaaacgtagttctccttcagccttgataccaagtaggcagcctcttcagttgctggtgtccttgtggcctcatctttgatcagatccacaccaatgaagagcccaacacccctgacatccccgacgatgggatgtttgattttttgctgcccgaggagctgcatcaggaagctgcctacactggtggcatgatcctggggctgctccttctccaagacattcaggacggccagccccacagcgcaggacactgggctgcccccaaacgtgttgaagtactcanacccggtggcttcaaatgccctcgccacaggctgggttgcggccacgcaggcaacagggtggccgttgccaatggacttgcccatggtgacgatgtcagggacgaagtcttttccct

SEQ ID NO: 45413 - DNA, 1276 bp, Homo sapiens
ttcggcacaggggacagtggtcaggccagtaggacaaactcagggcagtgactgcccaaacaccttcactgcgacaaacatcaaatggtggatcaggtccatttgctgagaaacaaaatatgctagtataggaggccacctttgggctaaagctcatggaatcccaactaaaaccaaaggccttccagcagagaacccttccgacagaatgcacttgagatgggcatctcagccccagagcaactccgtatctaatggaggcaggcaactgggccaactgcagcccaggggagcagaggacaggctgggaccaggcaccacaccttggtcctgctgggctagagggtcagacaagacttctcagatgaggggccttagacaatgaggttttaacatctttttctctttacagaagaaactcatctcatccaaatacacgctattgagaaggcgagcctgacctccctcttacagataaagtcagctttcagaggctcagggtgggggggcctcccgaggccataatgctacccaccccctcctcctaaccactggtctgttggaataacccagatgtctgcatcccctcaagtcagtcaatttcctttctgtccactgggggtggaatggggtagggtgggatactttaaagtgctcctgcttaaataaattagaccagaccagtgtatttctaaagaaaatcctgacatgcacacccattaaaaatagtacattttacagtgtcccagtcatacttttaattggcaaattaaaataatgcaatctgatatattctatcctactaaattaaaaatactgaatataaccaactaaatatacttactcctaagactcactaccagtagtttcacttaaactctgccttagaggctcttcccacccatttcccattatggcacatagagaaaaaggcctctatcactgtccactggagtaataaccactgcttcccctaactgcctcaaagactgtcattttatagaaaatttaagactatcctaatccactctttccaaactcccagccaggatagagacttccaggagttccacctgtcccaccttatctggctgccaactcctgctcagaaacagaacctgccacaccctgccactgcaggccgcaacctcaactcccaactgccaacttgaagcctgaactaccctttccctgaccagagttcaggaggggaagagctacacctccctgcacatgaatccactcatttgaaagcacaactgaccctggatttaag

SEQ ID NO: 45414 - DNA, 2014 bp, Homo sapiens
cggacgcgtgggttctttttcacttcagagaaagcgacctcaagatacaactggcaactgaggaaaaggcctcaattcaacaagagctaacaagcttgggagtttatttcggaatctttaaaagactcttctgcttacccacaatctgggatccactgcaggaaaacaaaaaaaggaaaacttcatttaaaagaagcaagaagtaaaatgggacaaattgggaatgtttaagtctctgaaactctgcactgaaaagaaaataagattgataacttaagcttaacattctgaggcataaagaaacattaactttggagtattcatcttgactactgaaatacaagtttagaagacaagtggtttcattctggtcacagatgcacagcttttctttaaatttataatcctatgggttggactcgttgactgtattttttaaaggttgctcgtcagttaactgagccttggaattcatggattttctaaagactaacaaatgaaaatattttcctgttgaagaacccagcggaaattttacagcaacaaatttcatgtttcttttgggtatttctgagaaaaaggaaatatttataaaaccatccaaagatccagataatttgcaaataaattggaggttatagaggttataatctgaatcccaaaggagactgcagctgatgaaagtgcttccaaactgaaaattggacgtgcctttacgatggtaagcgttaacagctcccactgcttctataaatgactccctttaaagtacactttgtatgggtgcatgttccagcaatggtgttttgtgcttggggttaatatcccaattggtgttgccatatacattttcatctggcgtcctcaaagtccgaaatgaaactacaacttacatgattaacttggcaatgtcagacttgctttttgtttttactttacccttcaggattttttacttcacaacacggaattggccatttggagatttactttgtaagatttctgtgatgctgttttataccaacatgtacggaagcattctgttcttaacctgtattagtgtagatcgatttctggcaattgtctacccatttaagtcaaagactctaagaaccaaaagaaatgcaaagattgtttgcactggcgtgtggttaactgtgatcggaggaagtgcacccgccgtttttgttcagtctacccactctcagggtaacaatgcctcagaagcctgctttgaaaattttccagaagccacatgggaaaacatatctctcaagggattgtaattttcatcgaaatagtgggattttttattcctctgaattttttatgtaattgttctagtatgggtggctaaaaactttaaccaaaccagttacattaagtagaagcaaaataaacaaaactaaggttttaaaaatgatttttgtacatttgatcatattctgtttctgttttgttccttacaatatcaatcttattttatattctcttgtgagaacacaaacatttgttaattgctcagtagtggcagcagtaaggacaatgtacccaatcactctctgtattgctgtttccaactgttgttttgaccctatagtttactactttacatcggacacaattcagaattcaataaaaatgaaaaactggtctgtcaggagaagtgacttcagattctctgaagttcatggtgcagagaattttattcagcataacctacagaccttaaaaagtaagatatttgacaatgaatctgctgcctgaaataaaaccattaggactcactgggacagaactttcaagttccttcaactgtgaaaagtgtctttttggacaaactatttttccacctccaaaagaaattaacacatggacattttaaagtctttagtataaagaaaatttgtattcaatgtgttaagcattaacatgtattttatttgtgtatccactccatctgatttttctgagccattttgatttgttccttcattaaaaaaaatctcttaaa

SEQ ID NO: 45415 - DNA, 4811 bp, Homo sapiens
tggcgatacattcacacaggaacagctatgccatgtttacgaattccggttttgaaaaaactttcgttgacagttacacaaagggtcacttcctccccagcgacacatgggcctctcaaaggagaggagggagtaagtcccacggtagggccagtggttgctccctgggttttggaatcatttctgcggagctttcaaggccagaccctgggcttagggtcgagactttatagcagtgacagccagacccagcaagatggctgcgaccgtgaaaccctgggcggcgatccgggtgcgcatcatgagctgagagcgctggctgttgccccggtggaaggagtagaggccgtaggtgagggcggccgccgtggccaggcaacctatgggtaccaccgggttctcgcgggcaagtcaagctgggaggaccaaggccgggcagccgggagcacccaaggcaggaaaatgagacctacattcatgtctttcaggtggctgcttctctattatgctctgtgcttctccctgtcaaaggcttcagcccacaccgtggagctaaacaatatgtttggccagatccagtcgcctggttatccagactcctatcccagtgattcagaggtgacttggaatatcactgtcccagatgggtttcggatcaagctttacttcatgcacttcaacttgggaatcctcctacctttgtgaatatgactatgtgaaggtaggaaactgagggaccaggtgctgggcaaccttctgtgggcaggggagaccacagacacagagcagactcccggccagggaggtggtcctctcccctgggctccttcatgtccatcactttccggtcagatttctccaatgaggagcgttttcacaggctttgatgcccactacatggctgtggatgtggacgagtgcaaggagagggaggacgaggagctgtcctgtgaccactactgccacaactacattggcggctactactgctcctgccgcttcggctacatcctccacacagacaacaggacctgccgagtggagtgcagtgacaacctcttcactcaaaggactggggtgatcaccagccctgacttcccaaacccttaccccaagagctctgaatgcctgtataccatcgagctggaggagggtttcatggtcaacctgcagtttgaggacatatttgacattgagggaccatcctgaggtgccctgcccctatgactacatcaagatcaaagttggtccaaaagttttggggcctttctgtggagagaaagccccagaacccatcagcacccagagccacagtgtcctgatcctgttccatagtgacaactcgggagagaaccggggctggaggctctcatacagggctgcaggaaatgagtgcccagagctacagcctcctgtccatgggaaaatcgagccctcccaagccaagtatttcttcaaagaccaagtgctcgtcagctgtgacacaggctacaaagtgctgaaggataatgtggagatggacacattccagattgagtgtctgaaggatgggacgtggagtaacaagattcccacctgtaaaattgtagactgtagagccccaggagagctggaacacgggctgatcaccttctctacaaggaacaacctcaccacatacaagtctgagatcaaatactcctgtcaggagccctattacaagatgctcaacaataacacaggtatatatacctgttctgcccaaggagtctggatgaataaagtattggggagaagcctacccacctgccttccagtgtgtgggctccccaagttctcccggaagctgatggccaggatcttcaatggacgcccagcccagaaaggcaccactccctggattgccatgctgtcacacctgaatgggcagcccttctgcggaggctcccttctaggctccagctggatcgtgaccgccgcacactgcctccaccagtcactcgatccgaaagatccgaccctacgtgattcagacttgctcagcccttctgacttcaaaatcatcctgggcaagcattggaggctccggtcagatgaaaatgaacagcatctcggcgtaaaacacaccactctccaccccaagtatgatcccaacacattcgagaatgacgtggctctggtggagctgttggagagcccagtgctgaatgccttcgtgatgcccatctgtctgcctgagggaccccagcaggaaggagccatggtcatcgtcagcggctggggaaagcagttcttgcaaaggttcccagagaccctgatggagattgaaatcccgattgttgaccacagcacctgccagaaggcttatgccccgctgaagaagaaagtgaccagggacatgatctgtgctggggagaaggaagggggaaaggacgcctgttcgggtgactctggaggccccatggtgaccctgaatagagaaagaggccagtggtacctggtgggcactgtgtcctggggtgatgactgtgggaagaaggaccgctacggagtatactcttacatccaccacaacaaggactggatccagagggtcaccggagtgaggaactgaatttggctcctcagccccagcaccaccagctgtgggcagtcagtagcagaggacgatcctccgatgaaagcagccatttctcctttccttcctcccatcccccctccttcggcctatccattactgggcaatagagcaggtatcttcacccccttttcactctctttaaagagatggagcaagagagtggtcagaacacaggccgaatccaggctctatcacttactagtttgcagtgctgggcaggtgacttcatctcttcgaacttcagtttcttcataagatggaaatgctataccttacctacctcgtaaaagtctgatgaggaaaagattaactaatagatgcatagcacttaacagagtgcatagcatacactgttttcaataaatgcaccttagcagaaggtcgatgtgtctaccaggcagacgaagctctcttacaaacccctgcctgggtcttagcattgatcagtgacacacctctcccctcaaccttgaccatctccatctgcccttaaatgctgtatgcttttttgccaccgtgcaacttgcccaacatcaatcttcaccctcatccctaaaaaagtaaaacagacaaggttctgagtcctgtggtatgtcccctagcaaatgtagctaggaacatgcactagatgccagattgcgggagggcctgagagaagcagggacaggagggagcctggggattgtggtttgggaaggcagacacctggttctagaactagctctgcccttagccccctgtatgaccctatgcaagtcctcctccctcatctcaaagggtcctccaagctctgacgatctaagatacaataaagccattttccccctgataagatgaggtaaagccaatgtaaccaaaaggcaaaaattacaatcggttcaaaggaactttgatgcagacaaaatgctgctgctgctgctcctgaaatacccacccctttccactacgggtgggttcccaagaacatggaacaggcaaagtgtgagccaaaggatccttccttattcctaagcagagcatctgctctgggccctggcctccttcccttcttgggaaactgggctgcatgaaggtgggccctggtagtttgtaccccaaggcccctatactcttccttcctatgtccacagctgaccccaagcagccgttccccgactcctcacccctgagcctcaccctgaactccctcatcttgcaaggccataagtgttttccaagcaaaatgcctctcccatcctctctcaggaagcttctagagactttatgccctccagagctccaagatataagccctccaagggatcagaagctccaagttcctgtcttctgttttatagaaattgatcttccctgggggactttaactcttgacctgtatgcagctgttggagtaattccaggtctcttgaaaaaaaagaggaagataatggagaatgagaacatatatatatatatattaagccccaggctgaatacccagggacagcaattcacagcctgcctctggttctataaacaagtcattctacctctttgtgccctgctgtttattctgtaaggggaaggtggcaatgggacccagctccatcagacacttgtcaagctagcagaaactccattttcaatgccaaagaagaactgtaatgctgttttggaatcatcccaaggcatcccaaaacaccatatcttcccatttcaagcactgcctgggcacaccccaacatcccaggctgtggtggctcctgtgggaactacctagatgaagagagtatcatttataccttctaggagctcctattgggagacatgaaacatatgtaattgactaccatgtaatagaacaaaccctgccaagtgctgctttggaaagtcatggaggtaaaagaaagaccattctggtatgaaggttttgggggaggagatatcaatcaagaaggcttcccagaagaggtgactggaccagagccttgtccacaggtaagacggaggaggccttccacatggagggagaacaatagtaaatgtccactcaagatgtcctttattataccagcctccctccccacaaaaacacatgtccagtggactcctttttctgggatcagaaccaacaccaaaaagagcttttctccttaaagtttagaattctaaaccaggacttgaaatggcctccaaggtttgtgcacaaata

SEQ ID NO: 45416 - DNA, 3859 bp, Homo sapiens
cagagtggggcacagcgaggcgctagggggaacgctggcctctgaaactagctctgggaccggggtctgcggccggcccctagctggccccgtctcccatccccagaagggtattcactggggattctgagctttggctactccagtttcccacgacacgatgttccctttctacagctgctggaggactggactgctactactactcctggctgtggcagtgagagaatcctggcagacagaagaaaaaacttgcgacttggtaggagaaaagggtaaagagtcagagaaagagttggctctagtgaagaggctgaaaccactgtttaataaaagctttgagagcactgtgggccaggggtttcagacacatacatctacatcttcagggtgtgccgggaagctgggcaaccacacttctggggcaggcctggtgcaaatcaacaaaagtaatggggaaggagacagtggtagggagactcaacgagactcacatcttcaacggaagtaattggatcatgctgatctataaagggggtgatgaatatgacaaccactgtggcaaggagcagcgtcgtgcagtggtgatgatctcctgcaatcgacacaccctagcggacaattttaaccctgtgtctgaggagcgtggcaaagtccaagattgtttctacctctttgagatggatagcagcctggcctgttcaccagagatctcccacctcagtgtgggttccatcttacttgtcacgtttgcatcactggttgctgtttatgttgttggggggttcctataccagcgactggtagtgggagccaaaggaatggagcagtttccccacttagccttctggcaggatcttggcaacctggtagcagatggctgtgactttgtctgccgttctaaacctcgaaatgtgcctgcagcatatcgtggtgtgggggatgaccagctgggggaggagtcagaagaaagggatgaccatttattaccaatgtagattgcactttatatgtccagcctcttcctcagtcccccaaaccaaagctacacagccagatttctcaagcagtctcaactccagtccctcatctcacccttactattgctcttgctttccagtttgcttttgatttgcatcttctcactagtaaaactgccttccctttgttccttattttctgttttttctctagagaggtacagttgtaagtcagagttaatataatagggcctgtgaaaacagaggcttttgcattgtctcttgacatcagaagttacaataggcatatgggcaaaatggtgtagcaggctcactggccgtttgttttttaaacacattttcacaagtttttgagacactggatttctttaattaaaaaaaaaatgccaagaaacattatttatacagggttgattgctttcatgttgttattctgtaccctatagtagcctccatgagaatctggtatttcttgctgcttggaactactttgcagtgattacttggttgcagtccaagtactctcgtttagtctgagcctggagatgttctagacttgcttctcccacctctgagattaggacaggaaaaatgtgaaatttcccaattacaggattatacggtaccatcacatcatttgtggaaattggggtgactgtatagctgggattgggctaaggactgtggtcttatctgtccacatacagccaaaatgcctatccagaaatccagttcgttggaaaggaaaattggtactcctgtgccacaggggttccagaaaagggaagtcactttaccttgcggtggtgggatcctgatgtctttcatccatttgtagtaaaagctggtaaagcttttcttactcctggttccctaccagtatttctaaacatgtcgcactttctccacaggcatgtggttttgacctttttttcaatcttctagaaagggaacggaagcagaagtgggacatcgagggctctgctgtcctctgcgctgggtgtggaatgctgctgcacctgtcccttctgctggctcagggaagtgtcttcttgcccacatttctgtgggggaaaggtttttaatcctctgatgcttcccatcttccctgtttaggccatgtgcccagaaacctggactgatctttctttaatagtgaacccctgggccactgaagagtaacatggctccactggacacaaaagagggatggaatcaacaggcagggggccttttataagccttaggaaaagaaaatgaaactatttcatctttggacttttcaatactattggagtgattttttttctttctaaacagggaaaataatgttacaaaagcatcttttttgttatttgtttgcatccctcccccacaccctggtgttttaaaatgaagaaaaaaaaccatcaccttttgtacaaaaactcttaatgattaaaaaacaaacaaaacatattggccttgtcatttgtgtgaaagtgggcaaagactggaatagagtaagacaactgaaaccaattttcatccttttactgaggaaaaaaatatttaatatttttgttatataaggaatagtgcctaaggcaggtacttatactcctgacctcagccccacacactctggttttataaagctataggacagagcagagatggaactgaaaaacagggtagaaaataacataaattggaggggaacagtgggatgcagaaagaatgacaacagccacatgtgccccagtcaaatacttttagtccctgcagcagaagatgccaaccaagtctctatactggctggggatcctgccatggatgcaggagaaaaaattcaatcacaagggagtaagtgacaacaaaaagaaaaaactctgagccacagctacactgggaggggggaggaccagattttgctacttctgtcacacaagctagaaaaaccctacctctcccattgggcaggcaacctgacattccacccagttccttgccttaccatactatgtattcctcctcttggagaattaagacctgggctaaatgctccactccaggataagggctgagcagtcctagttctctagactgcctcttttataaagattggattaaggtacgtgaaatggtgagaactgtaaagattttaaaaaataaagtagaacccagagaaaatgtcaaagctgccgcccatgtagcaccagcaaccaattcttgcacttctcttccctgtctcagtaatcccctacagaaggttacatgattggaacaactctttcttccctgcaaagtctgctggtaccaggttataacctggacagtggagagtgtctgccttaggctggtttgtgcaagagggccaccttaggtctccttgaggacatttatcttggcgcagatcttgagggcagggcccagcttgatgttcatggcactcataagatgttcttctttaagtaataaaagggcctgtccatcaatctcctgtgagcgaaattcctctgcaatctcttggcagccttggagagaagcaataaactcgtacacctcctctacactccaacggctgggattactggacaggaacacagggttgatgccatgtaattccggtgtaggtggagctgtattgggattccccaggtcacgttctccatgcccagctcttactgataaaggcccaggagatgttggagagagtgcttcatcataactggaattatctgaaccccggctagagtcttcttgaccccggtggcacttgccctgaatcttggcacgggcaatgtcagaggagctgcggcggggtccacgcctgcgaacgcgagcatagttggcttcttgaaactctttcatttttt

SEQ ID NO: 45417 - DNA, 390 bp, Homo sapiens
tcattttagactgctacttccaaactaagctagattcttggttttaatgagaggaggcagagagagggaggcagatggaagaagaaaaacagttaaataagacatacccagtcactgcatttttggactataccgtatctttctagcacaaggaaatagataaactgtaaggtcttttttactcactttttatttatgtgttctatttgtgttagtcataactgtttatagtggttgtctaatttttacttttattatatgagatagagctgtgcagatcttcactcaagttagttctgtcacgcttcttcccattatttagagcacagttttttaaagcaactgtcaatttctcagccttatgagcttgctgtatttcttggtatcatg

SEQ ID NO: 45418 - DNA, 900 bp, Homo sapiens
gtggcagagtgccctgcgggactgccagcccctcctgtcctccctcagcaacctggcggaacagctgcaggccgcacagaacctgcggtttgaggattagcgcctagatgtctgattttggagctgcagcatgccaggccgtggctgagagtatgtgagccatgccttgcccttttctgaggctcagggaagtggatggagctagagagacaacaggaaagacggtgctgaagaacatagtgtctttcctctattgtggacctaaagaggtggggaagcaaggacaagaggcaaagagccacactgcccttggcatcatccaaagcattgtctggttgacaccaggtcctggttttgtgtcttttgtcaatacctgaatccttgacaaaagaaaaagtggttttgatgatttaaagaaataagggtgattttgacagaaaatatattttaaaaattttgaccaattgcaatagttatcctcaagccaatttccagaacctgccaccagggggaggtggtgcagcatgaatcattctgaatgctttgtctttgaagtgttcccctattgctgttaccatctcagaggaagtaactgggcatggtgagactcctaaaatgacaggagtttttttggccaaagctggcatctgacttgccacattcctctgagtctggagtagccgcaggggtgggagaatgcccagcccagagtcagtccatcggggttacatttccaaggtctgctgccttcatctatgtaatggccgtgttactttcagatctttcagcttcccagagtgttgtgggaatcttggtcattgaatgtaaagggacttagtaaagggtatagatatttttcaaaaatgaaaataacttttgttcttataagtgataagcttt

SEQ ID NO: 45419 - DNA, 637 bp, Homo sapiens
ctggcttcgactccgtcgctctcaattcgtcaccaggaggaagacggagctggctgcccagcccaaaggcccatgaggggatgcagttatgggctctgtcgccgtggattgttattttgtgtcagtaagtaatccataaagtgccaacatgggaaagaaacggacaaagggaaaaactgttccaatcgatgattcctctgaaactttagaacctgtgtgcagacacattagaaaaggattggaacaaggtaatttgaaaaaggctttagtgaatgtggaatggaatatctgccaagactgtaagactgacaataaagtgaaagataaagctgaagaagaaacagaagaaaagccttcagtttggctgtgtcttaaatgtggccatcagggctgtggcagaaattctcaggagcagcatgccttgaagcactatctgacgccaagatctgaacctcactgtctggttcttagtttggacaactggagtgtatggtgttacgtatgtgataatgaggtccagtattgtagttcaaaccagttgggtcaagtggttgattatgtcagaaaacaagccagcattacaactccaaagccagagaaagataatggaaatattgaacttgaaaataaaaaaaaa

SEQ ID NO: 45420 - DNA, 496 bp, Homo sapiens; identical to SEQ ID NO: 21238
  misc_feature (1)...(496): n = a,t,c or g

SEQ ID NO: 45421 - DNA, 2230 bp, Homo sapiens
ccgctcgtgccgaattcggcacgagaagtggtgggactcgcgtcgcggccgcggagacgtgaagctctcgaggctcctcccgctgcggggtcggcgctcgccctcgctctcctcgccctccgccccggccccggccccggccccgcgcccgccatggagaagactgagctgatccagaaggccaagctggccgaggcaggccgagtcgcatacgacgacatggccacctgcatgaaggcagtgaccgagcagggcgcccgagctgtccaacgaggagcgcaacctgctctccgtggcctacaagaacgtggtcgggggccgcaggtccgcctggagggtcatctctagcatcgagcagaagaccgacacctccgacaagaagttgcagctgattaaggactatcgggagaaagtggagtccgagctgagatccatctggcaccacggtgctggaattgttggataaatatttaatagccaatgcaactaatccagagagtaaggtcttctatctgaaaatgaagggtgattacttccggtaccttgctgaagttgcgtgtggtgatgatcgaaaacaaacgatagataattcccaaggagcttaccaagaggcatttgatataagcaagaaagagatgcaacccacacacccaatccgcctggggcttgctcttaacttttctgtattttactatgagattcttaataacccagagcttgcctgcacgctggctaaaacggcttttgatgaggccattgctgaacttgatacactgaatgaagactcatacaaagacagcaccctcatcatgcagttgcttagagacaacctaacactttggacatcagacagtgcaggagaagaatgtgatgcggcagaaggggctgaaaactaaatccatacagggtgtcatccttctttccttcaagaaacctttttacacatctccattccttattccacttggatttcctatagcaaagaaacccattcatgtgtatggaatcaactgtttatagtcttttcacactgcagctttgggaaaacttcattccttgatttgtgtttgtcttggccttcctggtgtgcagtactgctgtagaaaagtattaatagcttcatttcatataaacataagtaactcccaaacacttatgtagaggactaaaaatgtatctggtatttaagtaatctgaaccagttctgcaagtgactgtgttttgtattactgtgaaaataagaaaatgtagttaattacaatttaaagagtattccacataacttcttaatttctacattccctcccttactcttcgggggtttcctttcagtaagcaacttttccatgctcttaatgtattcctttttagtaggaatccggaagtattagattgaatggaaaagcacttgccatctctgtctaggggtcacaaattgaaatggctcctgtatcacatacggaggtcttgtgtatctgtggcaacagggagtttccttattcactctttatttgctgctgtttaagttgccaacctcccctcccaataaaaattcacttacacctcctgcctttgtagttctggtattcactttactatgtgatagaagtagcatgttgctgccagaatacaagcattgcttttggcaaattaaagtgcatgtcatttcttaatacactagaaaggggaaataaattaaagtacacaagtccaagtctaaaactttagtacttttcccatgcagatttgtgcacatgtgagagggtgtccagtttgtctagtgattgttatttagagagttggaccactattgtgtgttgctaatcattgactgtagtcccaaaaaaagccttgtgaaaatgttatgccctatgtaacagcagagtaacataaaataaaagtacattttataaaccatttactatggctttgtaacaattgcatacccatattttaagggacaggtgaatttactactttctaaagtttattgatacttcccttttatgtaaaatgtagtagtgatacctatatttccacattgtacattgtgacacacttgtctagggatgcctggaagtgtataaaattggactgcatttcttagagtgttttactatagatcagtctcatgggccatctcttcctcagatgtaaatgatatctggttaagtgttatatggaataaagtggacattttaaaactagcaaagttaaaaaaaaaaaaaaa

SEQ ID NO: 45422 - DNA, 2235 bp, Homo sapiens
gtcgcgtgtctaggtgagtcgcggtgggtcctcgcttgcagttcagcgaccacgtttgtttcgacgccggaccgcgtaagagacgatgatgttgggcacggaaggtggagagggattcgtggtgaaggtccggggcttgccctggtcttgctcggccgatgaagtgcagaggtttttttctgactgcaaaattcaaaatggggctcaaggtattcgtttcatctacaccagagaaggcagaccaagtggcgaggcttttgttgaacttgaatcagaagatgaagtcaaattggccctgaaaaaagacagagaaactatgggacacagatatgttgaagtattcaagtcaaacaacgttgaaatggattgggtgttgaagcatactggtccaaatagtcctgacacggccaatgatggctttgtacggcttagaggacttccctttggatgtagcaaggaagaaattgttcagttcttctcagggttggaaatcgtgccaaatgggataacattgccggtggacttccaggggaggagtacgggggaggccttcgtgcagtttgcttcacaggaaatagctgaaaaggctctaaagaaacacaaggaaagaatagggcacaggtatattgaaatctttaagagcagtagagctgaagttagaactcattatgatccaccacgaaagcttatggccatgcagcggccaggtccttatgacagacctggggctggtagagggtataacagcattggcagaggagctggctttgagaggatgaggcgtggtgcttatggtggaggctatggaggctatgatgattacaatggctataatgatggctatggatttgggtcagatagatttggaagagacctcaattactgtttttcaggaatgtctgatcacagatacggggatggtggctctactttccagagcacaacaggacactgtgtacacatgcggggattaccttacagagctactgagaatgacatttataattttttttcaccgctcaaccctgtgagagtacacattgaaattggtcctgatggcagagtaactggtgaagcagatgtcgagttcgcaactcatgaagatgctgtggcagctatgtcaaaagacaaagcaaatatgcaacacagatatgtagaactcttcttgaattctacagcaggagcaagcggtggtgcttacgaacacagatatgtagaactcttcttgaattctacagcaggagcaagcggtggtgcttatggtagccaaatgatgggaggcatgggcttgtcaaaccagtccagctacgggggcccagccagccagcagctgagtgggggttacggaggcggctacggtggccagagcagcatgagtggatacgaccaagttttacaggaaaactccagtgattttcaatcaaacattgcataggtaaccaaggagcagtgaacagcagctactacagtagtggaagcccgtgcatctatgggcgtgaacggaatgggagggttgtctagcatgtccagtatgagtggtggatggggaatgtaattgatcgatcctgatcactgactcttggtcaacctttttttttttttttttttctttaagaaaacttcagtttaacagtttctgcaatacaagcttgtgatttatgcttactctaagtggaaatcaggattgttatgaagacttaaggcccagtatttttgaatacaatactcatctaggatgtaacagtgaagctgagtaaactataactgttaaacttaagttccagcttttctcaagttagttataggatgtacttaagcagtaagcgtatttaggtaaaagcagttgaattatgttaaatgttgccctttgccacgttaaattgaacactgttttggatgcatgttgaaagacatgcttttatttttttgtaaaacaatataggagctgtgtctactattaaaagtgaaacattttggcatgtttgttaattctagtttcatttaataacctgtaaggcacgtaagtttaagctttttttttttttttaagttaatgggaaaaatttgagacgcaataccaatacttaggattttggtcttggtgtttgtatgaaattctgaggccttgatttaaatctttcattgtattgtgatttccttttaggtatattgcgctaagtgaaacttgtcaaataaatcctccttttaaaaactgcaaaaaaaaaaaaaaaaaaa

SEQ ID NO: 45423 - DNA, 506 bp, Homo sapiens; identical to SEQ ID NO: 21255
  misc_feature (1)...(506): n = a,t,c or g

SEQ ID NO: 45424 - DNA, 1798 bp, Homo sapiens
ttttttacattttaaaaaattatctttatttaggtttctgattcagcacatgtatcaaagactaatcaacataaaggagtaaataagacattaattgaaagtcttacatctctctaaactctgaccaagaatgtcaagattgccactattaccagaactccaacctagtcaagttgtagacaagctatcatgaacaacatacagtgtgcacagatatgcagaggcaaaaggcatgctagcgcttggctctcctcttttccttgttgacatctttctgttggacagtccactttcgctttccaggctaagttccaaatcaagtccaaagaaggctcagggtcaacctgaccagatactcttctggaggaatgcattcttaaactgttgtgcctgcaactttgtttttgccaggatgaagttcagaccgagatgtacaatacaatctagatgacggtgcagactaagtcaagaactaaagttgtgcagtaacccgagttaaggcatgaatgcagacacacacatgcacacacacagcacccatgctatcaagacacaggattttttcagttgcctcatgagaggcaacctgggcttggcagttaatcagaactgcctgagcattccagaaaatgccccccacgactttatgctaacagctgtgtgtatgttttaatcaaaaaattaaagaagaaaaaaaaaccctaaaaaacaaagaaaaaaacaaacaaaaaatcaccaaaaacctagaaaccccttaatctcttacaatggctcttgagcatggaactcatgtagcagcatcaatggctggctctttaacaatttggaaataaaaggttgttttactatgtatttctttggtagtcatcactacaaagttttcagtgttggttacctataagacaagtactagacagaagatcaagttacacagaaatatttcttctgtactgataagatacaaatattgagctctcaaagcacaagttactatgctttttcttgccttattgggcattctctaaaagcaaggctttgtgcaggaaaagttcatgtctacctaacaaagggtgatacatgttctattttcctacaagtgaacaattaacaaaaattcacattatcaattatttctggttgaatctgttagaagccaattacaaagggacagtagcacttggtgtcaaagccactttctggtcacacattcattccatggttgctagtcagtatctcaggagctcagaatttaaaactcctttcagtcaacgaaggagtaagttcaattaaaggcttccactgtctgccaaatttctagaattctgtctagagtgcctagcatgcttgatgagagaaagcagttcagagcccaaagaggtgtcaggtattaggtaagttaatttggttttgtataaaaggcatggtaatctggcaacagagtacttatcctattagcagcacagtggtagccaagggtctctgtctgcaagacaggaaaatgaagctactgaagcccctgttgctcccacctgcctgcaggatggctactgattttacaaaggccttctgggagccaatccagggctcacctgggagagtgggtaacagaatggcaggaaccatgttcagcccccatgagaagtgcccgactgagggaagtcagcttcccataggtgagggggctgttgccattatgggctcagaatctaaatcttactgatccctagtagtaagaccatttgccagaaattggttccaagcaggtactacccaagtgttacaggctctgcagtcgacg

SEQ ID NO: 45425 - DNA, 415 bp, Homo sapiens; identical to SEQ ID NO: 21262
  misc_feature (1)...(415): n = a,t,c or g

SEQ ID NO: 45426 - DNA, 2534 bp, Homo sapiens
gaattggagcttatcttggacgagtatatggggacagccttggtggtggtcttagctacagcaatagctttgctaagatatttgttttatccttgttgctgtgccagagtcgttgcctgagaaaatgagaccggtttcctggggagctcagatttcttggaaacaagcagacccttttgcgtcgttgaagaaagttggaaaagattctactgtcttactaatctgcatcaccgtgtttctttcataccttcctgaagctggacagtattcaagttttttttctctatctcaggcaggtcataggttttggatctgttaaaattgcagcattcatagctatggtaggaattctgtctattgtggctcagacggcctttcttagcatcttgatgagatcattaggaaataagaatactgtcctccttggcttgggcttccagatgctccagttagcctggtacggttttggatcacaggcctggatgatgtgggcagcagggaccgtggctgccatgtccagcatcacgtttccggcaatcagtgccctcgtctctcggaatgcagagtcagatcagcaaggagttgcccaggggatcataactggaataagaggactatgcaatggcctggggccagcactgtatggcttcatattctacatgttccatgtggaactgactgagttgggcccgaaattgaattctaacaacgttcccctgcagggagctgtcatcccaggcccgccgtttttatttggggcatgtatagtccttatgtcttttctggttgccttattcattcctgaatacagtaaagccagtggagttcaaaaacacagtaacagcagcagcggccagcctgaccaacaccccagaacggggcagtgatgaggacattgagccactactgcaagacagcagcatctgggagctctcttcatttgaggagcctgggaatcagtgcactgagctgtaaactcggcagaaagtgggattctgcatacgccatctctgagagccatggagggagccacacccctggtggacttcatggtgctggatgggagacgctagcggcatccttcagggccaagtttgataaataccaccgccatcattctgctcatcctcctcctgtttttttttttctcttacattctttttttttttcctgtttatacattagaacaagataagatttgaaatacttccttgcaaataatgtgcaactcccaagggtgaaactcaaatagaaaaagtcatctctctggtagaaaggatggctttcctgtaatgactatagagtaagagtggcagcaatctttccatgcccttttcagcagaaggcacagaacagtagcgggactgccatctctggcaagatttcaggtaaagaatctcttcttaatttctaccttcctgtttctctgaatcagcccataggtgttgatgagtggccactcttaaagagtcactcagtatcagggatctactgtctttgttcaaaggtcaaataaaaacctagtctccttttattctactttctattcttagctagaatgaaactcagcatatatacacttctggacataataatattgaatagtaattacctttactagatgaaagaaattttcattacaaacttaaatcatgtaaaactcaacaactcagattcctggacctggtgtcctggttgggtccaaggtgattttacagaagaaaaaaacaactcaagcattctggtggcaacatagagattgtaggctgcttctaagaaagttattaacaatttggaaattcctaagtaggatgagagttagtaactggatacgagtgaagtttatatccaagttcagactcaaaggcattattatgatttgcttcttcccatgtcttccatgtcctgcttctcaaagtttttctcatccatcacactcctgccttaactgctctgagtatgcatttgttttcaattcatctttatttcaatctgtttaacttttgaatcgcatgggaatacgcacattaagttcctttctaaaataaggttttatgaagctgagtgagtttcacgataagtgtcttgctattttttgagatgttttatggacaaagaaaactttacagatttatatgtattttgctgcaccagtaaatggaccattaactagggcccacctttaacagagcacccctttgaaagttttataggtatgaaatatatgtagatatttgtaaagggttttaaatttttttttttgatggggtgctgtgtaaatcttgtatttataaatgtaatgaaggtattgacagaaaaaaatatatacaacttttataaaggattgtgtactgactgaatacatttaaaagaaaatatattttgaaacctgttctgctatgaacagagataacatatctttttactatgctattatgcattaggaagcttaacctaaaaaccaatagcatagtaaaaagatatgttatctctgttcatagcagaacaggtttcaaaatatattttctgtcgac

SEQ ID NO: 45427 - DNA, 405 bp, Homo sapiens
  misc_feature (1)...(405): n = a,t,c or g
tttgaccccttgatgactnattacgaatttaatacgactcactatagggaatttggccctcgaggccaagaattcggcacgagggaggaagcccatagacccccaagccccactgaggcccctactgaggccagccccgagccagccccagacccagccccggtggctgaagaggctgccccctcagctgtcgaggagggggccgccgcggaccctggcagcgatgggtctccaggcaagtccccgtccaaaaagaagaagaagttccgtaccccgtcctttctgaagaagagcaagaagaagagtgactcctgaaagccctgcgctaacactgtcctgtccggagcgaccctggctctgccagcgtccccggccacgtctgtgctctgtccttgtgtaatggaa

SEQ ID NO: 45428 - DNA, 2097 bp, Homo sapiens
cccacgcgtcccgatttcgtggacgccgggtgagtgagagagttggttggtgttgggcccggaggaaagcgggaagactcatcggagcgtgtggatttgagccgccgcattttttaaccctagatctcgaaatgcatcgtgattcctgtccattggactgtaaggtttatgtaggcaatcttggaaacaatggcaacaagacggaattggaacgggcttttggctactatggaccactccgaagtgtgtgggttgctagaaacccaccccggcctttgcttttgttgaatttgaagatccccgagatgcagctgatgcagtccgagagctagatggaagaacactatgtgggctgccgtgtaagagtgggaactgtcgaatggtgaaaaaaagaagtagaaatcgtggcccacctccctcttgggggtcgtcgccctcgagatgattatcgtagggaggagtcctccacctcgtcgcagatctccaagaaggagaagcttctctcgcagccggagcaggtccctttctagagataggagaagagagagatcgctgtctcgggagagaaatcacaagccgtcccgatccttctctaggtctcgtagtcgatctaggtcaaatgaaaggaaatagaagacagtttgcaagagaagtggtgtacaggaaattacttcatttgacaggagtatgtacagaaaattcaagttttgtttgagacttcataagcttggtgcatttttaagatgttttagctgttcaaatctgtttgtctcttgaaacagtgacacaaaggtgtaattctctatggtttgaaatggatcatacgaggcatgtaataccaagaattgttactttacaatgttcccttaagcaaaattgaatttgctttgaacttttagttatgcacagactgataataaacctctaaacctgcccaggcggaagtgtgtttttttttaaatttaaatacagaaacaactggcaaaaattgaactaagatttacttttttttccatagctgggatataggctgcagctatagttgaacaagcagtctttaaaaactgctgtgaaacacaggccatcagggaaaacgaaatgctgcactattaaattagaggtttttgaaaaatccaactctcatcctgggcagaggttgcctagttggtatagaatgttaagtttcaagaaagtttacctttgctttaggtcataagttccttatttgattgccgtatatggatacatggctgttcgtgacattctttatgtgcaaatttgtgatttcaaaaatgtcctgccagtttaagggtacattgtagagccgaactttgagttactgtgcaagatttttttttcatgctgtcatttgtaatatgttttgtgagaatccttgggattaaagttttggttacaaattgttctttaacttgaaagcctgtttttccttgcaaactcaaatctgtgagcttggtaccaagtccaggtataacattcctattggaagccatacttatattttcttgtaaagtgcttttgaattaataaaatattagcataattgtgtatagtcagttgaacccactgttacccattggttcttatccccatgggaagcagttggttacacgattcttattttataagaaacagctgagaggcactatggattagtcttctgaagtgaaggaaatatagatgtcacctaagtgatagttaacccatttttttttttttttaggcatagaagccagttcagggtccataatatttagtgaccaacattttaaagtatagcagcaacctggttcttaaacacaaagtaagttgcccattaacaaatggcttttatctttagcatgaaaactttccacaggtctaaaaattgcttccattttataatttgaggtgttgcatgggaattctaagctgatccatcatgatgtaaaagttcacaatatggttcaaatgtaacagtgcagaattgaatatggaggcatgcataaccttcctcttagaaaatggcaggtgttgtaatttcaaatttttgtgcaattagattaaatcataatgcaacagtaaaaaaaaaagtcgacg

SEQ ID NO: 45429 - DNA, 1168 bp, Homo sapiens
acccagcaggggtttttaattttataaataaatatgtggtacagctggcagactcctgagctcagttttaaccatgctttaacatggttaatacaggagcagggaggagaaaaggactaagtgcagggtcagtactccagcgccctctcatcagacaatgaattctgacactggctgtaagttttctgtgcagtaatacagatccttaagacattgccccaggcaatgcccataatatcctaaaggttccttgaagttaagtttcaaggatcaagtttcagttttctattttagaatagaaacattactcttgggttcaatccagtagctcatctgccccccagtctccttaggcactgattccttcatgctgtgctttgagaaaggaagcctaggctgacgagaccatcttgcctccctgtagatcgtcacagctacctgtctctggggatccctagtataacacattcagtgttcccctttcagtcttactactttgaccgcgatgatgtggctttgaagaactttgccaaatactttcttcaccaatctcatgaggagagggaacatgctgagaaactgatgaagctgcagaaccaacgaggtggccgaatcttccttcaggatagactgtgatgactgggagagcgggctgaatgcaatggagtgtgcattacatttggaaaaaaatgtgaatcagtcactactggaactgcacaaactggccactgacaaaaatgacccccatgtgagtattggaaccccaggaaataaatggaggaaatcatttgccttagggattgggaaagctgcccactaactgtcttccccattgttttgcagttgtgtgacttcattgagacacattacctgaatgagcaggtgaaagccatcaaagaattgggtgaccacgtgaccaacttgcgcaagatgggagcgcccgaatctggcttggcggaatatctctttgacaagcacaccctgggagacagtgataatgaaagctaagcctcgggctaatttccccatagccgtggggtgacttccctggtcaccaaggcagtgcatgcatgttggggtttcctttaccttttctataagttgtaccaaaacatccacttaagttctttgatttgtaccattccttcaaataaagaaatttggtacc

SEQ ID NO: 45430 - DNA, 3226 bp, Homo sapiens
ttttttttttttcacaggcaactaactgataaaatttttatttcacttttgaatttttacacttttcctgattattctgtgtaaggtgaaactagaactgtttaaaagacatacacaaatctagtacatcaataaccggggatttttcttttttgctatactattttcacaaccacgggtgtgcttgctaggcaatataaccatcacagaagcaaacgttaggcagaatactggtaagaaaaaacaaagcaagaaaagagctaccagatatacagacaggcttggttccacattcactactgcattttcaagcgccaagtattaactgcacatttttgttcagctagaaaggagggatttttttttttgttttttctctttttttttggtttgttttaaatcagtgcataaatttttcttttctcatttcagcagatggacaaacagatggactctacagctaagtggaatatcaaaggtagaggggtgattctgtgagactgataggcctgactattctcaattctccccactgcagtgttcacgcaacttccctgaatatagggtctccttaaacacatctgaggcactgacctggatgagtgcacttgggagacctggtgacaggcacaaaaaagcatgatcagggctagcctcaatacagggagaaatcatggatatttaaaaatacttttttgattcagattccgggtatgactgaaagagcaacaccgtgttgagaactggaggaagacagggttctggtgccagaagctcttctccaatctttaaagcccaggcttgctcaccaaggtgctcagtaatgtctctcacccctgccccatatatagcattaaaaagtgaacaaaagacagataaagatagaattcaaaaaggaaaaaaagtaaggaagcagagggacagaaacttagaagagaaaaccaaggtcaacagtcaaaaaggatggtgggaaagaatgtttagatttcaaaatttaaaagccccgagctaggaagaacctgaaaactgagtactcctcaagtgaaaggccatctctacagaacatcattcctttttttgttttttgttttcttttttggagatgaggtctcgctatgttgcccaggctggagtgcagttattcacaggtgcaaccacagggcactgcagctttaaactcctgggctcaagcgatcctcctgcctcagcctcccaaatagttgggactagatgcacgcaccaccacgcctgactcaggacattattcttaaaggtattatccaggaaacagataaggtcattcataaaacacacggctttttttctttagctcagtgttaacaatgaaagtagattccactattgaagcacaagttgcaaattggtaacatagtgaacatattgctgtaggaaagggggttcagtgtggtgtgttatatgagcacttgaacttttcaaggtgtcataagccagttatctgccacaaagaatttccatttcaggattcgagtttcctcagaggaagacactgtggacatttgtggtcatgaacttttaagtggcaacagcccaaacaggtcaagtgtctttaagtcccgaacaacggcagcattactgtgaattaccattcaactcaaatgccaaatgatgtgtgtctcactccaagttccagcatcacaatataatctctataactttctgtacaactttacaatggaattgtatttcaatgattattttgatatcagattaaaccttccaaaaagttacacataattcaggtctattttttctaccagtaagagttctgctaaattacaaaaccccataatcacagtgttcagtttttaaaaaattaaacacacagtaatcctgtcaatgttaatcaaaatcaaaacttcggaatgccgtggcatttatgtgaccaatctgagttttagatacaaataccagctgtttatcccatgaaccatttttcctaggctgaggctgtgaaaaatcgaaagtcgacgtacgattctcttttttttttttttttttttttatcgcacaagggatatatgttgagggtacagagtgacactgaacagatcacaaagcacgagaaacattagttctctccctccccagcgtctccttcgtctccctggttttccgatgtccacagagtgagattgtccctaagtaactgcatgatcagagtgctgtctttataagactcttcattcagcgtatccaattcagcaattgcttcatcaaatgccgtttttgccaggctacaggccttttcaggagagtttagaatctcatagtaaaagactgagaaatttagtgccagaccaagacgaattgggtgtgtaggctgcatttctttcttactaatttcaaatgcttcctggtaagcctgctgggagttcgacacagtggtttgtttgttgtctccagatgccacttcagaaagatacctaaaataatctcctttcattttcaagtagaacaccttactttctggttgtgtagcattgggaataagatatttgtccaacagctccagaacatcattgcagatgtcctgcagttctgcctctatcttctcacggtactctttgcccatctgctgcttcttctcattcctctctgttttctgctcaatgctggagatgacacgccaggaagagcggcgggcgcctaccacattcttgtaggcaacagagagcagatttctcttcttcggttggagagttcatgccccttgttctgtgactgccttcatggctgcagccatatcatcatatcgctcagcctgctcagcgagtttggctttctgtaccagctcacttttatccattgtcattccctgactccaagtccagtgctcttcctgcttctctatccacagccgaatgggcaaaatgcactttttgtagcggcccaaatctctggagactctgccgtgggagggctgcagggaacaaagacccttccgagcgaagctccgagcgagatgacctcttccttcctaagcccactactcaggcggcggcagcggtgcctgcagtggctgcagcggcggcggcggcggcggcgactaccccggctccggaatcggcggcggcggtggcggtacactactcaggcggcggcagcggtgcctgcagtggctgcagcggcggcggcggcggcggcgactaccccggctccggaatcggcggcggcggtggcggta

SEQ ID NO: 45431 - DNA, 1584 bp, Homo sapiens
  misc_feature (1)...(1584): n = a,t,c or g
gcttggtcttttancatagtgtgtcaggtcttcatattttgggcccagggcacagagaagtcacagctctccggcatcctgtgacctttaccctctttgccaagggaaaatgtggcccaccaaagcaagaaacttgagggcatgggtcaccccagccctggcatctgcccagagcccgagaaggaaggaacaatgatcctccagctacctcacggggctggcacaggtgaccactgccctggcatcacccagctgtgtccggcagcctgaaccccatctgtggggatgccaggaggaaaatacaaaagtccttaggtgaacactgagaaagcaagatgcagcagaaacctccangccagaactacccagtcttggncctatggtggagatagagcatagctggcgatcatgtgtacttacactctaaggtcacctggttgcactatggcctcatctgtggctctgaaaatgaagatttggaaggagatcatcacagctaatgtttaacaagcccctcctgtgtgccaaatcattcacccctcaccacaaccgaatgagctaaggattctcattatatatagtttatggagagggaagtgcagacataaagaggtgaattatcttacccagatcacacagctgataagtggtggaggcagaatagaatctaaacagtgtggctccggagcccacatgcattgattcgacaagtgtttattgagcacctgccgcggacaaggccttgtgtgattaaatagggttataattagtaatataaaaatgagaaatcactaatgctttttagacttaacattttgtttttttgtaggtttcaggcacagaactgtatatccaataatagtgaaatggatcccactaattatgacagaaatgatgatacatttaaatgacttggatgttttataggtatgatctcgtgaaaccttgagagaaactgaatgacgaatgaaactattgttcctgtttcacacagaagaaaactgaggttaaaaggggtaaagtaattttgcatggcatgaagtagaaattcaaagtacaggaatttgaacttggttctgtccttttctgaagcccttgaccactatagactcaaacatcaccttgtttttccactcattcaacactttttttttaaaattatctaataggttggcactcatgatgagcccctgttctcattctgcaaatggtgaagctctctattgtcctgaccccacagttcctgtcgcatgaccagagccagttcaccaaggagctgcagcagcatgtaaagtcagtgacatgcccatgcgagtacctgaggaaggttatcaatagtctggctgtctatcgtcatcgtgagactgactttggtgtnnnnnnnnnnnnnnnnnnnnnnnnnnnnnnnnnnnnnnnnnnnnnnnnnnnnntggataatttgataattatcattattgggtttctgagacgttacacatttaacattctcttctgcacaagttgcctttgtgtgagtatactaactttctgtagaggtatacttgtaatcacaaataagaataaattatataaaacaaaaaaaaa

SEQ ID NO: 45432 - DNA, 1160 bp, Homo sapiens
aggactaggcatgcaccaccaggccaggctaattattttttgtagagacagcgtctcactatgttgcccaggctgatcttgacttcctaccctcaggtggtcttctgcctcaggtaatacattacagacagtgagccaccatgcccagttgctgcctacattttcaatattccactcaacaaacattgacacttcctgggactggaaagtaaaaaaaatctaagtactgtgtagaattaagcaaacaagtgatgtttcagaagtaacccattactgcttaaaataaagcctacatcaacacttaactcaaacgaggacaattgttatttagtttttatttcataatcataaacttaactctgcaatccagctaggcatgggagggaacaaggaaaacatggaacccaaagggaactgcagcgagagcacaaagattctaggatactgcgagcaaatggggtggaggggtgctctcctgagctacagaaggaatgatctggtggttaagataaaacacaagtcaaacttattcgagttgtccacagtcagcaatggtgatcttcttgctgggtcttgccattcctggaccccaaagcgctccatggcctccacaatattcatgccttcttttcactttgccaaacaccacatgctttgccatccaaaccactcaagtcttggcagtgcagatgaaaaactggggaacccatttgtgttggggtccagcatttgcccatggacaagatgccaggacccggtatgctttagggatgaagttctcatctttcaaatttctccccatagatggacttgccaccagtgccattatggcgtgtgaagtcaccaccctgacacataaaccctggaataattctgtgaaagcaggaacccttataaccaaatcctttctctccagtgctcagagcacgaaaattttctgctgtctttgggaccttgtctgcaaacagctccaatctgttaacatagttttatggattagatgagcagtcacttcttgctttccaggccccttacctagtagtggggtaaaaaataaagattggtttctagtatatctggttttgaacctttcttgaatgtataatacgttatggctagagaggtagcttaaataccataaacatttacaagccctttca

SEQ ID NO: 45433 - DNA, 1814 bp, Homo sapiens
gaggatgacagtcctgccaagggtctgacggcctcgtgccaggggacctcatcctggagtatggcagcctggacgtgcggaacaagacagtggaggaagtctatgtggagatgctgaagcccagggatggcgtccgcctgaaggtgcagtaccgccctgaggagttcacgaaggccaagggcctgcctggtgacagcttctacatcagggccctgtacgaccggctggcagatgtggagcaagagttgagctttaagaaggatgacatcctctacgtggatgacaccttaccccagggcacgttcgggtcctggatggcttggcagctggacgagaatgcccagaagatccagcgcgggcagattcccagcaaatatgtgatggaccaagaattctccaggaggctcagcatgtctgaagtcaaagatgacaatagcgccacaaagacgctgtcagcggctgcacgccggtccttttttcggaggaaacacaagcacaaacgcagcgggtccaaggacgggaaagacctgctcgccttggatgccttttccagtgactccattccactctttgaagattcggtgagcctggcctatcagcgggtccagaaggtggactgcaccgctctgaggcctgtcctgattctggggcctttgctggacgtggtgaaggagatgctggtgaatgaggctcctggcaagttctgcagatgtccccttgaggtgatgaaggcctcccagcaggccattgagcggggtgtcaaagattgcctgtttgtcgactataagcggagaagcggccatttcgatgtgaccactgtggcgtcaataaaggagatcacagaaaagaaccgacactgcctcctggacattgctccgcacgctattgagcggctccaccacatgcacatctaccccattgtcatcttcatccactacaagagcgccaagcacatcaaggagcagagagaccccatctacctgagggacaaggtgactcagaggcattccaaagagcagtttgaggcggcgcagaagcttgagcaggagtacagcaggtacttcacaggggtcatccagggaggagccctgtcaagcatttgcactcagatcttggcaatggtcaatcaagaacaaaataaagtcctgtggattccagcctgcccgctctaggagaatgctgtgctgtggatgactgcagctggccgcctgaggggacgccagactcagctcttttctagcgactgaaagtagaagtctgtctgtctatgaacatgcgggggaaggatccggaaccaggacccagaagcacctcctttgtagacagagggccacggctgcgtgcgatccaggcccaggcccacacactctgcccgtgtcacacgtgtgctttaacacaaaacagataacactaaagacgggttcagcacccacctttctttagccagctgatcagagatgctgcaaagagaacctttcggatcactcgtttacaagccttttctaagtatttggtggtttatgtttacttgaacggctccatgttgccggtgcccagcccctgtcccctctgtcaaccccctgtcgctttggtgttggtttcgttcccgtcttcagcaaaacgaccttggaacctcaatgggggctgctttgctttgggaggttcttgttggtgggaccagagctttgacaaacctcctgctccttggtggcacctctcctggaaggacgtcacaactccagggtgcttcagaattgcctgtggagcagaaccagtggcctttggagttttcctcccacaatgggggaaggtga

SEQ ID NO: 45434 - DNA, 737 bp, Homo sapiens; identical to SEQ ID NO: 6395
  misc_feature (1)...(737): n = a,t,c or g

SEQ ID NO: 45435 - DNA, 2429 bp, Homo sapiens
agatgtaccgggagaagatccggcagctggggagtgcggccctggctaggcatggcactgatctttggatagacaacatgagtagtgccgttcctaatcactccccagagaagaaggactctgatttcttcacagaacacactcaaccccctgcctgggatgcgccagccactgagccttcagggacccagcagccagccccgtctacagagagcagtggcctggcacagccggagcatggccccaacacagacctgcttggcacctcacccaaagcctcactggaactgaaaagctccatcattggcaagaagaagccagcagcagctaagaaagggctgggtgccaagaaaggcctaggggcccagaaggtgagcagccagagcttcagtgagattgagcggcaggctcaggtggcagagaagctccgtgagcagcaggcagccgatgccaagaagcaggcggaggagtccatggtcgcctccatgcgtctggcctaccaggagctccagattgatcgtaagaaagaggaaaagaagctacagaatctggaagggaagaagcgagagcaggcagaaaggttgggcatgggcttggtatcccgaagctctgtctcccactccgtgctgtctgagatgcaggtgattgagcaggaaaccccagtgagtgcaaaatcctctcgctcgcagctggacttgtttgacgatgttggtactttcgcctctggacccccaaagtacaaggacaatcccttttccttaggggaaagctttggctcccgctgggatacagatgctgcctggggtatggacagggtagaggagaaggagccagaagtgaccatctcaagcatccggcctatttcagaaagagccacaaaccggagggaagtggagagccggagctcaggcctcgagtctagtgaggcgcgtcagaaattcgcaggagccaaagccatctcatctgacatgttctttgggcgggaggtggatgcggagtatgaggccaggtctcggctgcagcagctctcaggcagcagtgccatcagctcttcagacctctttggggacatggatggagctcacggagcaggaagtgtatctctggggaacgtgctgcctacagcggacattgcccagtttaagcagggtgtcaagtctgtggctgggaaaatggctgtgctggccaatggtgtgatgaattccttgcaggatcgctacggttcctactgatccgagctctgtgactcaggcttacgatggtgacggcaacaagaactccacagttcccaggctggggatgctttgccttgtggaagctggggaggatttgttacttcgtatgtgtggtgtgtgtgtggggtggcctttgaggcgctcactcctgtgaggggaatggtcagtaccagcccttgtcctctgcctgtggactgagccctttattccctctcacaccaccctccgtgtgttaggactcttgtccttctgtcctgcccccacagctgctgctcacttatcctgccatactgggaaagggggttcccccacgatgggcttattctggggtccagactttccccaggtagggaaagcggaaggtagaaggcttttttttgctgggctctagggttcttctagttcgaggccttgggtccccatcctctggaaccagggggaggcctggaaggagttcactgtagacccgtcccatggggaaagaggctgcggacttgctgctgctgctgctgccagtggcctcttctgggtgccaggagaggggaaggacctttgtctgggcgttaccaagggctggaaactttacctggtacctaaaggtttcatttgggatcagaccggagacccttgggttctcccgtctcaccacccctttctacagtaagcacttggaagattgtttcagggtgtctcagggtccctctgtaccatctgctgtggaatgcaggaccctctgtgacattctttatcccttcttccccgggttggtggccatggagggtcttgtctgctgtgattcgactctggatgctgtgagcttgatgctggccagggaagcagaggatgtgagaggcagaggcaggctcctggggctgagctccttcctctgcatcattctgggcttggcctggacagcacccgccagtgagagctgtgggcctcaccctctggcagctgagccaagcactgtcattcttggtgccatcttcccctgccgcaccggcagtctcagcccagcccccacctttgggttgtaggttgggctcccaagcaacacagaccactcttccccttgcccctcccccagagggacttgactttctttctggactgtttgtattgaaacaaagtgggtgtcaaaataaagcccctgcagggcctgggctccctgttggtctgagtgaaaaaaaaaaa

SEQ ID NO: 45436 - DNA, 4168 bp, Homo sapiens
atggcggagcgtggcggggacgggggcgagagtgaacgattcaacccgggggagctcaggatggcccaacagcaggccttgaggttccgaggtccggctcccccaccaaatgcagtgatgcgaggcccaccacctctgatgcgacctcctccaccttttggtatgatgcgaggccctcctccaccaccacggccgccctttggacgtcctccttttgatcctaatatgccgccaatgcctcctccaggagggatacctccacctatgggccctccacacctccagagaccacctttcatgcctcctcccatgagttccatgcctcctcctccgggtatgatgtttccaccaggaatgcctcctgtgactgctcctggtactccagcactacctcctacggaggagatatgggttgaaaataaaactccagatgggaaggtttattattataatgctcggacacgtgaatctgcatggaccaagccagatggagttaaggttattcagcaatcagaactgacacctatgcttgcagcccaggcacaggttcaggctcaggcccaggcgcaggctcaggcccaggcgcaggctcaggcccaggcacaagctcaggcccaggctcaggctcaggcccaggcccaggcccaggcccaggcccaggcccaagcccaagcccaggcccaggctcaggctcaggcacaagctcaggcccaggcccaggctcaggtccaggcccaggtccaggcacaagtgcaagcacaagcagttggagcttccacccctacgaccagtagcccagcacctgcagtatccacttcaacatcatcatccaccccttcctctaccacttctaccacaacaactgctacttcagttgcgcagacagtatcaacacccacaacacaagatcagaccccaagttctgctgtttcagttgccacgcctacagttagtgtttcaactcctgctcgtacagccacacctgtgcaaaccgttccccagccgcaccctcagacgttacctcctgctgttcctcattcagtacctcagccaacaacagcaatacctgcttttccaccagtaatggtacctccgtttcgtgttccccttcctggcatgccaattccacttccaggtgtagcaatgatgcaaatagtcagctgcccgtatgtaaagacagtcgctaccaccaagaccggtgtattgccaggaatggcccctcctatcgtacccatgatacatccccaggttgctattgcagcttcacctgctaccttagctggagcaacagcagtttctgaatggactgaatataaaacagcagatgggaagacatattattataataatagaacattagaatcaacctgggaaaaaccccaagaactaaaggaaaaagaaaagttagaagagaagattaaagagccaattaaagaaccctctgaagagcctctgccaatggagacggaggaggaggatcctaaagaagagcctataaaggagataaaggaggagcccaaagaagaggagatgactgaagaagaaaaggctgcccagaaggcaaagccagttgctactgctcctattcctggtactccatggtgtgtcgtttggactggtgatgagcgggtcttcttttataatcccaccactcgtctttctatgtgggaccgacctgatgatctgattggcagggcagatgttgacaaaattattcaggagccccctcataaaaaaggaatggaggaattgaagaaactaaggcacccaactccgacaatgctgtcgatccaaaagtggcaattctctatgagtgcaattaaagaggaacaagaattaatggaagaaattaatgaagatgagcctgttaaagcaaaaaaacggaagagagacgataataaagacattgactcagagaaagaagctgccatggaagctgaaattaaagctgcccgagaaagggccattgtccctctggaggctcgaatgaagcagttcaaggacatgctgctagagagaggggtgtctgctttttcaacgtgggagaaggagttgcacaagatagtttttgatccccggtacttacttctcaatcctaaagagagaaaacaggtgtttgatcagtatgtaaagaccagggcagaggaagaacgcagggaaaagaaaaataaaataatgcaagccaaggaagatttcaaaaaaatgatggaagaagcaaaatttaatccaagagcaacttttagtgaatttgcagccaagcatgctaaagattcaagattcaaagcaattgaaaagatgaaagaccgagaagccttgtttaatgagtttgtggccgctgctaggaagaaagagaaagaagattcgaagaccagaggtgagaagattaaatcggatttctttgaactattatctaatcatcacttggacagtcagtctcgatggagcaaagtaaaagacaaagtagaaagtgatccacgttacaaagcagtagatagttcatcaatgagagaagaccttttcaaacagtacattgaaaaaatagccaagaatttagactcagaaaaagaaaaggagcttgaaaggcaagcccgcattgaggcaagccttcgagaacgagaaagggaggttcaaaaggcccgttcagaacaaacaaaagaaatagatcgagagagagagcagcacaaacgagaagaagctatccagaatttcaaagctcttctgtctgacatggtacgttcttcagatgtgtcatggtctgatactcgtaggaccctccgaaaagatcaccgctgggaatctggatccttattggaaagagaggagaaagagaagctttttaatgaacacattgaagcacttaccaaaaaaaagagagagcactttaggcaacttctggatgaaacttctgcaattaccttaacatccacgtggaaagaagtaaaaaaaatcattaaggaagatcctcgatgtattaagttctcctccagtgacaggaaaaaacaaagagaatttgaagaatatatcagagacaaatatatcacagccaaagctgacttcaggacgcttttgaaagagaccaaatttataacatatagatccaaaaaattaatctaagaatcggatcagcacctgaaagatgtagacaacattttgcagaatgataaatggtatccagtactggactgtgtctgagaggcatcaactgaatgtggatgttaatgacctggactgtcagggtccacctctacctcccagagcctcagagcccacaagacgatcaacaaaataattctaaatactcttccatgggggtaatctactaattcaaaatgcttgcatgagcccaattttcaggtttttatgtagataagtattagttaacctgttgcaaaatgatctgacaaacagaaggagaagcatttgtgacgtttctgaacagaacactttggaaatatttatgcttttctttgtgtggcatgactgacatacatactcaaatataggctgtctctagtaaatcttaaaatcttgaagctaaaattcatccttttatgaggtgtggaagtcagtgacttgggtgacgttcttcctagcagtgttaatacatgcaagaagtaagagcatttgtggcttgaacttgccagatgcaaataccacagactccaagaaaacccgagttggggtttgttttgttttgattttttttttttaaagcgggtaaaagagaaaacactgaaaattgaattcttatcttccagaggctacaattattataatggacaatacttttacctttgtctctaaagatcagattagttttatttgttcacttacgtgctttgattatcccctctgaattatagaccgagtcttgttgtttagcctaagagaagatttatgtagtaatttcttctcaggtatggaaccacggtcataactaacatgttggccagaatagaaccactggttaaacatattttattcaccattaagtgatctttatcaatattctggattagacaacaaattacctttctgggtgtttcttgtaaactatactcctgtttgaatgttaaactttgttgctaaagtttaattttaagatgtttgaatgttcagtttatgtatttgaactacaataaaccaaccctttttataaaaaaaaaaa

SEQ ID NO: 45437 - DNA, 825 bp, Homo sapiens
tttttttttttttcactgaaaactttttattgctcttttggatagaaacgggaatttatttgccaggaaggatgatcccatcatacttctgctggaaccagcgcatggcctcctctttgctgattctgtgtttggccccaatgcagcctgtcctgcgcttcttgtctgcgatgctgaaacctggcctacccagcacctgtcccagggaataaccaacagtcacctagccagctcagagtcaagagcagatggacaagactcacacattacagacagatcttcaaagagtcacttgggcagcccaatggattctgggaggcaaggacccatgatctgtgtctgacaaagctggccaccagcatcccacggaacacacagccatactataagtttgctttggaggctggaactttcagcacccccctaacccagcctattttccagtggtgctgaggatcctccattactgctcccaaatctccatttttctttttaaaagtaacatttaaaaatctattgccacaccagcagtgtagaaaacatacaactctgagaagcacaaatatatatattttcttccttctgcttcagctcaaaaatgcttcccaaaggtgtgctgttcctccaacatcctgtgagtatccaattcttattacttgtctgtctaatgagggtgccaccatctttcaggttccacactagtcaggacttctgatttaggctattcagttttattgttggaccaaaacacggcagtaacacaaaaggtcatttctatgttaaaacccccttcctgagcaaaccactgcatcacctgtgccgaat

SEQ ID NO: 45438 - DNA, 3613 bp, Homo sapiens
tgctcagagcagcaggcaggttgggggagggggggggtcatagttgggttccagctcctggcttgatgagcccagggcgcttacaggcagcccatgaagttgatgacagttttagcatgagaatcacacagggtccctgtcctgggctcctctaaagccagtggatgtgctgggcaccagagacaaatcatggagatggctgctggtggctcccaggttggcccagatggggtgagctgacatactacaggcccatcccagggccccgtgggctctggcttctggggctccataccctgccctgcaggggtgctgtgtttttaacacatttctttccctgaagccttctgtaacctgtcattttccttccttcctcttccggagcctgctgctttctctggacctgtctccacctcccacacagctcatcgtgaacaccacttggtgatggagggagtggacccgtgtgtgggtccccaagtgaggccactggggagtttgtccttttcctcctttgcttcactcccagcagcagacccaggttgtcaggacaggagggcctggagctaagcagtaggcatcagtctcgtttgtcttcagacggcgggggcaggtccagggtgaggctgggtggagggctgaccaaggtccaaagggcctgcgcagcctccgggagggcagcttctccagccagaggcttgtgtgagccatcgtgtgctgggcttgtttttaagtaagaaacaaggaaatcactccagattctgtcattccaaggaaagggaaggggacagttcaggtttctcagctgttcttaggggtcactgagcgtctacctcctcctccagaggaggctggctcagaacacctagaggagggggccggggatgcaccccccaccagaggctgccttcagccgtctcacgggtgcaggacagcgctcaggcttgggctctaagctctgtgtctagtgtagaacatggggaaggagcatcttaggaactgctgaagtaacttcttactgctctcacaattctaaggaagcgggagaacggcctcctaccaacagcgcccaccccagagctgcctgggaaagggcagttttactgaaaggtgctttactgttcacctgcatctttcagcagctcccctcctgccctcacctggtcttttccctctttatcccaagcctttatgcttgagtcccttccccaggggctgcccacccgacagttccaggcattccctacctgagcttcttgtctgcttttccttctcccactgcaagcggctgcttgtggggcctgggatgagccctctctgtccccaccggccctccttgccaagccattcctgggtgagttcaggcctgcgggagccacacattcatctccacctggacacttgagccgcatggccagacccctcccacctgatgcggtggtgcgtgtgatttgtcaaaagaaagccttctggatgctgttaagatgtacccttcaggtgaacctggtatcagacccacagtacttgctgtttgagaaaaaataaaaacaaaaaggtcacctgttctccagcccttttctcttacctggtatttccttcctttctcctcccccaccccaaataaaaaaacaaaaaacactagaatttatttatatgtattgatgttgtaggtctaggtgaaaaaaaaagaagtaaatgtttcactgctctatttatatataatgtctgaattaattctgtgcaggaaaggccaggaaattgcatgtgaagttcggtgcagtcaccacctctgtgtgacctgcagctgcagtctcttcgctgagatgcaggttttaaatgagacttggggggctgagggcaggcctcaggcctcccagcgccccaacccctccttggtctaatgaaatgcagttcttagtgcagagatgttttaaggtgcaatatatctcttcctttcccgtggttttagagccaagctcaaggtagtaggacgtagggtcttattttgttttcaaacccccatcctcagagcgcagatacatgcagaggcttctgccagggataccacggggccttagtgggaacaggtggagaccagcacttccctttcctgctgctgaggtagggattggggggtcagaacccactcacttttgcctgttaaagttgccctcctgacgctggcagctctgccttggtcactggggatgcggctcgttgctcagccaccagtggccttgcggtattgtccaccatccactagagtgggatgaagtccagagtgtgggtatacatctcagatgcccatctacccactggggacttcaatgccagctgcatttggtttggttttcttaactgttggcttctccccacagcgttttttgtttttttttaaacattcatattgttttcaaacttggaattcatagacactctggctctaggttccttaagggggaaaacaaaagatgactttatttcacattcaagaaaatcagttcagttccaaagctgtggtccttccagccacttctagggacactggggaaccttgttaaacgttgacatcagtgctctccagccgtgctgtcaccctcctatcttctggatctgccttcgggatggtcagtgacagcttctggaagctgagcacacacaggtgcacagccatgctgtggtctggcctgctacggcagcatggcagctctggtggagccttctcccttgccatttggttcccctgtgccaagtagctgcaggctgcccctcaaatcttcatttgtcccttttcacttcctgcagaacaagcctgggttagagggtctgctggaaatggcctttgaagaccaaggataccaggatgtgtgcactctgtcgtgttctgtgatgaatgggaaacgtaggcttccagaaagccagctctcttctgaaatgtgacggacctaagcaggaagtcatccaggacaggagtggctcagtgttggggatggacgctgtcgcccagccatgctccaccagggccaccaatgtgtagttggctggtggtcttcgggcatgtgagacctgctcttcactgtttccaccccacttggtggcctccaggatggtagtggcaccctcagagccccatcttcagcatgttctgaagcctcagagtggaaattcctgctaaggctctgtgtggacgcctttctcccgtgatctaaaggggacactgtactcaagcttttgacctcatgcccttgtgtagtaaaaaaggatttgggggttttgtttggttcctgagagggttgtgttttgtttttgtttccttttgtttatgttttggcctttcctctttgtctttccatgtagaccagatatttgaaagggcagacgatggctagaggtgtaatgtgcagcttgtttatacggtattttgggaaacttaccttggatgggaaatcgaatcgtggattcaccaggccggtgctggcacactcaccctcgccctttccctccggttcagtacctattgtttctcctttcaaatatgtgattgtactagctctttccatatgaaagaattctccttatttaaataaaaaaagtttaaaaagataaaaaaaaa

SEQ ID NO: 45439 - DNA, 468 bp, Homo sapiens
  misc_feature (1)...(468): n = a,t,c or g
gtgtgtntnccnacngatctcttantaccntcntgacatgcntacgaatttaatacgactcactatagggaatttggccctcgaggccaagaattcggcacgagagatggaggacgaggacaccatcgacgtgttccagcagcagacgggaggtgtgccggagagcagcctggcagggcacagtttctagagggcccgtccccagcccgggccgtccatcctcgcattgctgttgaatggtgagcacgtgaccatgccgaccacaaaggtgtctgcggaaactcgaggacattcaccacgatgattttcctctctttgatgtacttcaagtgcaactcaaaactatatctgcagggatgaatctgtaacttaaattgggccaatcagaattgttatctttgttcaggtaaaatgagttgcaagatattgtgggtacttttgtgtgctcatttgtgttttccccccctc

SEQ ID NO: 45440 - DNA, 3140 bp, Homo sapiens
aagcgaactgtactcctctgctgttcctttgaacttggttcagtaggaagaagtgatatcctccccagaccatctgctttggggagcttggcaaaactgtccagcaaaatgaaaagactcacgtgctttttcatctgcttctttctttctgaagtatcaggcttcgaaatccccataaatggactttctgaatttgtagactatgaagatcttgtggaactggccccaggcaaatttcaattggtggcagagaaccggagatatcagagaagccttccaggagaatcggaagaaatgatggaagaggttgatcaagtaactctttatagctataaagtccagtctactattacttctcggatggccaccaccatgatccagagcaaagtggtgaacaattccccgcagcctcagaatgtcgtgtttgatgttcagatccccaaaggagcattcatttccaacttctccatgactgtggacggcaagacatttaggagctctattaaggagaaaactgtgggcccgagctctttatggcacaggccagagcaaaaggcaagacggctggccttggtgaggagcagcgctctttgatatggaaaacttcagaacggaagtaaatgtccctcccaggggcaaaggtgcagttcgaacttcactaccaggaggtgaagtggaggaagctgggctcctatgagcacaggatctatctgcaacctggacggctggccaaacacttagaggtagatgtgtgggttatcgaaccacagggactgagatttcttcatgttcccgacacatttgaaggccatttcgatggtgttccggtcatttcctaaaggacaacagaaggcgcacgtctccttcaagcccacggtagcacagcagagaatatgccctagctgccgggagactgcggtagatggggaactggtggtgctgtatgacgtgaaaagagaagagaaggctggtgaactggaggtgtttaatggatattttgtccacttctttgctcctgacaacctggacccaattcccaaaaacatcctctttgtcatcgatgtgagtggctccatgtggggagttaaaatgaaacaaactgtggaagcaatgaagaccatattggatgacctcagagcagaagaccatttctctgtgattgatttcaaccagaacattcgaacttggagaaatgatttaatttcagctacaaaaacacaggttgcagatgccaagaggtatattgagaaaatccagcccagtggaggcacaaacatcaacgaagcactcctacgggcaatcttcattttgaatgaagccaataacttgggactgttagaccccaactccgtctcgctgatcattttggtttctgatggagatccaacagtgggcgaactaaaactgtcaaaaattcagaaaaacgttaaggagaacatccaagacaatatctccttgttcagtttgggcatgggatttgatgtggactatgattttttgaagagactgtccaatgaaaaccatggaattgcacaaaggatttatggaaaccaggacacgttttcccagcttaagaaattctacaaccaggtctccactccattgctccggaatgttcagttcaactatccccatacatcagtcacggacgtcactcaaaacaatttccataactactttggaggctcagagattgtggtggcaggaaaatttgaccctgctaaattggatcaaatagagagcgttatcacggcgacttcggctaacacgcagttagtcttggagaccctggcccagatggacgacttgcaggattttctatcgaaagacaagcatgcagatcccgatttcaccaggaaactgtgggcctatctaaccatcaaccaactgctagctgaacgaagcctggctcctacagctgccgccaagagaagaattacaagatcgatcctgcagatgtctctagaccaccacattgtgactccgctgacctcgctggtgatcgagaacgaggctggggatgagcgcatgctggcggatgccccaccgcaggatccctcctgctgctcaggggccctgtattacggcagcaaagtggttccagattccaccccgtcttgggccaatccttcaccaacgcccgtgatctccatgctggcacaaggatctcaggtgctagagtccacgccacccccacatgtgatgagagttgaaaatgacccacatttcatcatttatctaccaaaaagccaaaagaacatttgtttcaatattgactcagaacctggaaaaatcctcaacctggtttctgacccagaatcaggaattgtagtcaacggtcagcttgttggtgccaagaagcccaacaatggaaaactaagcacctattttggaaaactgggattttatttccaaagtgaagacataaaaatagaaatcagcactgagaccatcaccctgagccatggttctagcacattctccttgtcctggtccgacacggctcaagtcacgaatcagagggtgcagatctcagtgaagaaagaaaaagtggtaactatcaccctggataaagagatgtccttttctgttttacttcatcgtgtttggaagaagcatcccgtcaatgttgactttctgggaatctacataccccctacaaacaagttctcacctaaagcccacggactaataggccagttcatgcaggaaccaaagatacacatcttcaatgagagaccaggaaaggaccctgagaagccagaggccagcatggaagtgaaggggcagaagctgatcatcaccaggggcttacagaaagactacagaacggatctagtgtttggaacggacgttacctgctggtttgtgcacaacagtggaaaaggattcattgacgggcattacaaggattacttcgtgcctcagctctacagctttctcaaacggccttaaaggtttatagtttgggaaattatatatattaatatacatctttcccctgtcacttttgcagatattcttcggtttgaataattaaaatgaaccagatatcagggtggttaattaaaatgaaccagatatcagggtggtttataaagcctgtaaacacacctaagaaaataaacattttacaaatg

SEQ ID NO: 45441 - DNA, 911 bp, Homo sapiens
gaaaattggaagatagaaacaagatagaaaatgaaaatattgtcaagagtttcagatagaaaatgaaaaacaagctaagacaagtattggagaagtatagaagatagaaaaatataaagccaaaaattggataaaatagcactgaaaaaatgaggaaattattggtaaccaatttattttaaaagcccatcaatttaatttctggtggtgcagaaattagaagataaaaacatacttttagaagaaaaaagataaatttaaacctgaaaagtaggaagcagaagaaaaaagacaagctaggaaacaaaaagctaagggcaaaatgtacaaacttagaagaaaattggaagatagaaacaagatagaaaatgaaaatattgtcaagagtttcagatagaaaatgaaaaacaagctaagacaagtattggagaagtatagaagatagaaaaatataaagccaaaaattggataaaatagcactgaaaaaatgaggaaattattggtaaccaatttattttaaaagcccatcaatttaatttctggtggtgcagaagttagaaggtaaagcttgagaagatgagggtgtttacgtagaccagaaccaatttagaagaatactggaagacagaagtacgggaaggcgaagaaaagaatagagaagatagggaaattagaagataaaaacatacttttagaagaaaaaagataaatttaaacctgaaaagtaggaagcagaagaaaaaagacaagctaggaaacaaaaagctaagggcaaaatgtacaaacttagaagaaaattggaagatagaaacaagatagaaaatgaaaatattgtcaagagtttcagaaagattaattgggagtggtaggatgaaacaatttggagaagatagaagtttgaagtggaaaac

SEQ ID NO: 45442 - DNA, 638 bp, Homo sapiens
gccgcgtcgacacaaccatcacgcctcaggagatcaatggcaaatgggaccacgtgcggcagctggtgcctcggagggaccaagctctgacggaggagcatgcccgacagcagcacaatgagaggctacgcaagcagtttggagcccaggccaatgtcatcgggccctggatccagaccaagatggaggagatcgggaggatctccattgagatgcatgggaccctggaggaccagctcagccacctgcggcagtatgagaagagcatcgtcaactacaagccaaagattgatcagctggagggcgaccaccagctcatccaggaggcgctcatcttcgacaacaagcacaccaactacaccatggagcacatccgtgtgggctgggagcagctgctcaccaccatcgccaggaccatcaatgaggtagagaaccagatcctgacccgggatgccaagggcatcagccaggagcagatgaatgagttccgggcctccttcaaccactttgaccgggatcactccggcacactgggtcccgaggagttcaaagcctgcctcatcagcttgggttatgatattggcaacgacccccagggagaagcagaatttgcccgcatcatgagcattgtggacccc

SEQ ID NO: 45443 - DNA, 968 bp, Homo sapiens
agaagccgcagcgccgcctcttctctcgcgccctcgcctcttcctccgcctcctccttcgcctcttcctgcctcctcccggcttccgccgccgccactccagcctaatcccaaccccagggcgaagcgttttcttatttatttccgttttctcgccactacagcctcctgacaaggtgatccgggcgggccccgcaggaattttatcccctcaccggcctcacactagtatcgcatgtccactatccagaacctccaatctttcgacccctttgctgatgcaactaagggtgacgacttactcccggcagggactggaggattacattcatataagaatccagcaacggaacggcagaaagacactgactactgttcagggcattgcagatgattatgacaaaaagaaacttgtgaaagctttcaaaaagaaatttgcctgtaatggtactgtgattgaacatcctgaatacggagaggttattcagcttcaaggtgaccaaagaaaaaacatctgccagtttctcttggaggttggcattgtaaaggaggaacagcttaaggttcatggattctaaaatgaacctaaatacgtggagaatttcttgaatagttttgttctctaaacccggtttggctgccttgtgaaatgattccctgcagtaaacggacttttcatttatttaatcattcaaacttccattcacatctgcatgattacagaaaacatggggtatgtagactagtaacacataagaaaattgcagtaagatggtaacaaaacctcatattgtctttacatgtttccaatggaaaatgttttgagtgtttattgttcagtttattacgtttcacttgattaaattttttttgttgttgtattaaaccatgtacgttgcagcttaacaataaaaaaaaaatctatgaatctttgtgagcaattatgctcccaaatctaagcaagtaaaa

SEQ ID NO: 45444 - DNA, 2743 bp, Homo sapiens
  misc_feature (1)...(2743): n = a,t,c or g
gtgctcttgcggagacgcgcgcgtcggtggtttaacgcgtttctgggccgccgtaagcccggcctaggggcagctttgactcgagagccggctataggcgcatggaaggttccctggaacgggaggcgccagcgggcggcgctggccgccgtgcctaaagcacagctcgacgttgccgcccgaaagcacccaggtccggggctacgacttcaaccgcggtgtgaattaccgcgcactgctggaggccttcggcaccaccggcttccaagcaaccaacttcgggcgcgctgtacagcaagtcaatgccatgatcgagaagaagctggaaccactgtcacaggatgaagaccagcacgcggacctgacccagagccgccgcccacttaccagctgcaccattttcctgggatatacatccaacctcatcagttcaggcatccgtgagaccattcgctaccttgtgcagcacaacatggtggacgtattggtgaccacagctggcggcgtggaggaagacctcatcaagtgcctggcgcccacatacttgggcgagtttagcctcagggggaaggagctccgggagaacgggatcaataggatcggaaacctgctggtgcccaatgagaattactgcaagtttgaggactggctgatgcccattctggaccagatggtgatggagcagaacacagagggtgtaaagtggacgccttctaagatgatcgcccggctgggcaaggagatcaacaacccagagtccgtgtattactgggcccagaagaaccacatccctgtgtttagtcccgcacttacagacggctcgctgggcgacatgatcttcttccattcctacaagaacccgggcctggtcctggacatcgttgaggacctgaggctcatcaacacacaggccatctttgccaagtgcactgggatgatcattctgggcgggggcgtggtcaagcaccacattgccaatgccaacctcatgcggaacggggccgactacgctgtttacatcaacacagcccaggagtttgatggctctgactcaggtgcccgaccagacgaggctgtctcctggggcaagatccgggtggatgcacagcccgtcaaggtctatgctgacgcctccctggtcttccccctgcttgtggctgaaacctttgcccagaagatggatgccttcatgcatgagaagaacgaggactgagcggctgcggtcccaggaaggtcttaccccctcttctatttattaatttgcagacccagcccctcccctactttttggtcagctacgtctctagaataagatggtatctgaagtccttccatgtctgtgtctcggtccttggtcctgttggtgggtcccctggcttcagcctgctccatcctctgcctcataggcctcctctcgccagcactgggacgctgcctcccatggcggtcagcagggcagggctctgttgggtggtaggccagcgactgcaccacaccggaacccacagggcagggccagagccagcgcaccctccaccaggtcccagaagaacaccttcccgtcctcagaacagctgaccacatgtgtgtcacgctcgctcaggcagcagtccagcttgtattcctggttcttatggcccttgtactcgcccagcagctcccctgtgtctttgtccaggagccgcaatgtggagtccaggctggacaccagggtgcactgcccatcccggctgaagcaggtgcaggtgatggggctgcccacgtagtctgagaagagctgccccatccttaggtcatagcgtctcacgcggccatccacggaaccctncgtggccccggaaatttgcgcacgaacctgcccctgatgccaacatcccacagaaccaccgccttgtccccgccgccggagcaaagacttctgttgtcaaaggagctcgtagccgtggccgctgtacgtcgcagcagcgtcccccgaagcgggttccacagcttcagcgtcttgtcactgccgcacgtcaggcagtaattgccatccactggggaacaccaggcgggggttactgggccgtcgatctcaggaggcgggaggaggacccggaatgaagacgaaggcgctcaccattaaatcgtacggctcgcactgccccctgcccgcagtccagcgtcttcaaccgtttctgcggcagctctggaggccgcggctttggctcagggaaagccatgctccccaggactccttccttgcagccttaaatcggtctttccctagctgaagtggtgtgcttgggtcgctgtctactgctccttcatcagctttgccaactctcggagctcggaggacacgaagcaaatgatgagtaagcttcatgctgtcccatctctgcccgtggtgatgtcctatctgcaagaatcctcagccccatgacggcccccatggtgataccagccctagaagggtcacattttggaccctgtctatccacttaggcctgggctttggctgctaaacctgctgccttcagctgccatcctggacttccctgaatgaggccgtctcggtgcccccagctggatagagggaacctggccctttcctagggaacaccctaggcttacccctcctgcctcccttcccctgcctgctgctgggggagatgctgtccatgtttctaggggtattcatttgctttctcgttgaaacctgttgttaataaagtttttcactctgaaaaaaaaaaaaaaa

SEQ ID NO: 45445 - DNA, 1264 bp, Homo sapiens; identical to SEQ ID NO: 8147

SEQ ID NO: 45446 - DNA, 4533 bp, Homo sapiens
aagctttgaaacccggtgagacagttagtgagagttttctcccaagtagcatatcatatctcctaaatagcttctttctttatattgatcttattacataagagcctctttgtggtgcttcataatatgctgatttttttctgatggtcttcggaatcccttgttgcagaattcacacctgtgtggatagtcttttgtatgtattgatatcacatgtcgtttaaagccagatgcatctgtagtgctgtattcacaatactcacattggtaactcttccttccagtatgggtcttcatatgtttttttagctcattttgttgtctgaatcctctcgtgcaccctttacacttcaatggctgatctttagtatgaactgaaaggagatggccactaagaataaatggatcggatgttttaaagtcacagtgcctgcacgtatgaatcttcctacccttatggatatcactatgctttttgagctcagaaggacgatgaaaacctttatcacagacctcacatttgtgaggaaaatccttagtatggacagatatgatgtgccgcttaaggtcacttgaattggtgctcttatggtcacaatgaggacactggtgtgtcttatgtccttgaaacaaatccagatggcgttgaagctccctctcatcaccaaatgcttggggacaatgctcacatttatatggcaaattgttaccatgtttagacttaatgtgagttttcagatttgattgatctgcacacctgaaaatacaatactgacactgatatggcttctcaccagtatgggttctcatatgtttcttgagttcagaaggatgtcgaaaacccttcccacactcaacacaaacatgaggaaaattcttgctgtgaacggccaacaaatgcctgtttaacagtccttgttctgcagtttcatagtcacaatatttgcacttgtcagtcttcggctccttgtctcttaaaataagtttattggaactcagtggactagcctctctgtatcttcgtgtgtattctgtaaattcatgggttttgtcgactttgtttatgagcttatggctttctaagtggttatggaaactcactttcttgttagttgtaaagtcacaatctgtacactgatatttttttctcattaaatgatcaggatgattcttcatgtgtctttttaagaatcccttggatttaaacttttttgtgcaaatatggcaagggtacactgtgaggggctgtccatcaggacctattataacagctgtttgccactgcctggtttctccccttctcctctttttggctttttgtttaagtactttatttgtattaatgccgtcacaaatttgaaggtactgtgctgctgtactacttctgctttctaatgctgagtccaaagtatttcctgatgcttgacaatcttcataccttcgggaaactcttctttcatctctgatatcatcttcttcttgagaagaatctttaactgccatgtaaaccatcttctcccgctgcattcggctctggtcaagcactccagctactgaatgtccactggtgtactcactctctggtgacatttctgttccacctatttcaacatcatcttcagcctccgctttaaatatatacacttttataacttcagaaccaaacccatcttctttagcatcttcttgtgaaccatcactgccaatttttaatggtgtattccccatatgctctaatttttctccaacatcatccaaagatatcattaagtagtcttcagaagtgctcttgacatcatcatcatcatcatcttcggtttttatagtaactgtagaaccaggaacacctccagctgcttgaatcacagtttctgtatctgaattagttacaagaacctcctctgataccattgtgggagagtcgactcctgaaacacaatcttggaccacatgttctaagtgtccattaggaccagtaacaaggtcagccacgaaaacctgctctggtaccctaacggtttcagtaattagttcagaagtcaagatgtgatcaccatcatcttcctctaaatcctcttcaatggcaacatcagcttcaagtaccgcttcaggaacaatcacaccttctgttactacatcagtctctgtgatgatatcaggtccatggacaacttcaagctgcaaggccatgatcaagagttatcccatcatctgtagcaacatcagaaactaaacagcttcaggaactgaacaacaatatggtctccatcgatatgtgcagtaccagccattccagccacaaaatcttgcataatcatggtatgggccattctagagtctggcgtgtgcaatccaagacttccaccgcctgactccatacttagcaaagttcattcaccaatattagaggactcagatgtctagtattagtgaatttcatccactggctctcatccatttcttccagacccagatcagccctgcagcggacgtctgcagataaacttgtattcacctctggctcccagggttctacttataatgtaaatgttctatccagttcccggagttctttgaaccagtaaggacttctggcctcactctactacattctcttgtctcagttttgaggactcatgaaacatgactgcttcctttatatgagtgtctcgaagaaaattgtagattttgtgagataaagtaaaatctgcagcaatttctttttatttttccttctgtgctatgttattttctttgggaaaacgctctctttacctgctgctgcagctacagcctggccgccgcctgccgccgccgctgccgccgccgccgccgccgccgcctccgttgccgccagtcgactgtgaccgcgctctggatggccccgtccccctgccccgttcacaatgcagcctgcttctgcaaagtggtacgatcgaagggactatgtcttcattgaattttgtgttgaagacagtaaggatgttaatgtaaattttgaaaaatccaaacttacattcagttgtctcggaggaagtgataattttaagcatttaaatgaaattgatctttttcactgtattgatccaaatgattccaagcataaaagaacggacagatcaattttatgttgtttacgaaaaggagaatctgggccagtcatggccaaggttaacaaaagaaagggcaaagcttaattggcttagtgtcgacttcaataattggaaagactgggaagatgattcagatgaagacatgtctaattttgatcgtttctctgagatgatgaacaacatgggtggtgatgaggatgtagatttaccagaagtagatggagcagatgatgattcacaagacagtgatgatgaaaaaatgccagatctggagtaaggaatattgtcatcacctggattttgagaaagaaaaataacttctctgcaagatttcataattgagagaattcctgagttgatagctctaaaggcagatatgctgtatttgcctactttaacccatttttcaacctgtttgttttttaaaaggcttcactaagggttgatatgtaccattgtatggggcaattttaagtcagctaaggcaataaccttatgcatgaacatttcccagactttcatgaagctgttgaggtcctaggcaattaatgcagcagttgcgataaataaaaacatctcacctaagtctccttttcttcataacatagatactgacatgataggaagctctcagcttagggaaagagaataaattttagattatagaacatggattcaaaagtgactggaacaaattggctgacaccttactggtaacctgctattcttctggtgttatccttcaggattgttccactaaaatttatttttcaaaaaatttacttcacattattctatgtaagtgatgacttgtccagtgttccaggtgtatcttagctaaaactagagaatgccctaacttagatggtttttgaagcctatacaattggtattgtttgacccttaagcttttacatctcttagcatggaggacgaagaaagctgtacattgttgcttgagagtctgtacatttagtcccagatttgtatttgcactgtcagtatggcaaatgagtgaaaaatgtttaatacactattggattttttatttcctttttttgattcagcttatacccgggctgaaaacctcaatttatgttcatgacagtggggatttttttaaatgtctacattctttctaataaactgttggaagacttcttggctgtccttttaagtgtctggcttactgtaatttttatgtatttaccatttactggaatggagtttatttgaggaagaatttgggattattcctctgtttgaaaaaagaggcttgctgtaatgtcacaggaaaccttttaaaagtggatctgtaatagcatattgtagatgcactttgcagcagttggaaaagaaagtgttgtgtgatttgattgaaataaaactaaatgtgttgtcctcctaaaaaaaaaaaaaa

SEQ ID NO: 45447 - DNA, 1518 bp, Homo sapiens
tttttttttttttgatcagctagaagagatttttttattgaagggcgagtctccggcatctgatggcagctacaactggatctcacggaacgcccgcttctccaccagcttcaccttgtacttgcgtttgaacttggctctctctcgaggctcgatcatattcctcctctggaagctcttgaaccggtctcgaaggatgttgccctcgggcttcagggtcctgagcgagtctgtcagctccgagctcagctgcacgtcgatgtcaggtgcctggtacttgagccgccccagccttcggggcttgtcagcctcagcctcccgccgcgcctgccgccggcctctgccgccgcgccagctccgccagcctcagggccacctgggccttgatcccgcgcagccggaacagctcctggtgccggagccgggcggcccgcaacgcggcctggctgtacccgcagcctgtgcacagccttctcccgccgccgctgctgctccgtcttcttctctgtggtggccaggcgggcgggcgtgggacagacctcggcatcccaagcctccggcccctcgccctggcctggctccccctcaccatccgactcctccagcagcccctcgcacagctcctggaatgtggactcctgggtggcggcctgctccgtggcggggcagggcgcagctgccgctccagcttctccgcctccttctgccgctgcaactccacctcgtgggccgctgagagcagggtctggtggtcttcaaaggatggattgtaggaagctccggcaggcgccacctccacggcgggcgcctgggacaggcttggtgtgcaggcgtgctggccgcttcactcctttcttcttggtctgctccaggaaaaactcatcctggccaaccaacggcctgtccagggggttgtctgaggcccagaggtcgtagaagggccgctctacggtgtcctggggcccgggcttggcccttgttgcagaagggttgaggagccgggcctgggccctgcgcacctcccggggcagctcgccctgcttggccagcttctcccatagctgctccttccgcctgagcttcttggcgttggggacctggtgggcgaggacgtctttgggggcagggactttggatgtgttctcgaggatgaggtcaacccgaaggggtttcttgagaagcagtgacttcttctggactttggttctcttctttgtcagccctttttccttggagccagtgtccacgaagaagagtttttcatttggggcctctgacaacaagccaccgctcgtgcgctcctgtagccgcacgtcttccaggaactggtcaacctccagccccagcggctcctgagcaagccgccgccagccccggcttcttatttcttgggcctcgccgccgccgcctcagcgctgggtccaccgaagtgggccgcagccccaggaaaccagaatcggcatcgcttttcgacgtgcgcttcccaccaacgccactgcctcctgccgccatcttgtc

SEQ ID NO: 45448 - DNA, 3012 bp, Homo sapiens
  misc_feature (1)...(3012): n = a,t,c or g
ttgaacgccctncaggtaccggtccggaattcccgggtcgacccacgcgtcacccgggccagcgtcacagttggaggagagcagattagtgccattggaaggggcatatgtgtgttgctgggtatttccctggaggatacgcagaaggaactggaacacatggtccgaaagattctaaacctgcgtgtatttgaggatgagagtgggaagcactggtcgaagagtgtgatggacaaacagtacgagattctgtgtgtcagccagtttaccctccagtgtgtcctgaagggaaacaagcctgatttccacctagcaatgcccacggagcaggcagagggcttctacaacagcttcctggagcagctgcgtaaaacatacaggccggagcttatcaaagatggcaagtttggggcctacatgcaggtgcacattcagaatgatgggcctgtgaccatagagctggaatcgccagctcccggcactgctacctctgacccaaagcagctgtcaaagctcgaaaaacagcagcagaggaaagaaaagaccagagctaagggaccttctgaatcaagcaaggaaagaaacactccccgaaaagaagaccgcagtgccagcagcggggctgagggcgacgtgtcctctgaacgggagccgtagctcaggaggcagaattcagtgtgttatcattgggcagaactggatcctgaaaaattcaagatgctaagcacctacactactttaagaatttggaactgaaacatgaagaggaagacagaaataagaatttgggaacctgaatagctctgcaaaaaacaccaaaggaccgttttatcgttttctgttgttgctgtggtggagtgatgcagtgggcactgccggtgggccagggggcgggtgcgcatgtggtagaaggtgtgcgctcgtgcctcccccacagaaaggctttgttggtttctaccacatcttggcttgcttttggaacaggctggcccagcatcatttgtcatcaagtccactgtggtgtattctgcgtgtccatggcgggggttctccaatacactcacactgtccatgttctttttattgccagggcccgtgttgaagtgtcaagagagcaatcatcaatgataatgtattgtgtgagacctttgcatcttgtaaattttctcttttttctaaaaataaataataataaaatccggaagatggcggcggccgttccacagcgggcgtggaccgtggagcagctgcgcagtgagcagctgcccaagaaggacattatcaagtttctgcaggaacacggttcagattcgtttcttgcagaacataaattattaggaaacattaaaaatgtggccaagacagctaacaaggaccacttggttacagcctataaccatctttttgaaactaagcgttttaagggtacctgaaagtataagtaaagtgtctgagcaagtaaaaaatgtgaagcttaatgaagataaacccaaagaaaccaagtctgaagagaccctggatgagggtccaccaaaatatactaaatctgttctgaaaaagggagataaaaccaactttcccaaaagggagatgttgttcactgctggtatacaggaacactaccaagatgggactgtttttgatactaatattcaaacaagtgcaaagaagaagaaaaatgccaagcctttaagttttaaggtcggagtaggcaaagttatcagaggatgggatgaagctctcttgactatgagtaaaggagaaaaggctcgactggagattgaaccagaatgggcttacggaaagaaaggacagcctgatgccaaaattccaccaaatgcaaaactcacttttgaagtggaattagtggatattgattgaaatagcagtgcttcagctctaaggatattagcaacaatgataaaacttggccttgaagaaatttacacaactagttagaacttgttactattgtaaaggaagagtcaactggaaaattcaaggagttaataaaatttgtttacttggtcccagcttttgagagataaatcccttatgaatccctggtctaaaatactttcctacagctgtgtaaaatactggtcaaggagaactttttccttttacctcatgttgtaaacttaagaaaagacggggtgtggcgggggtaggtgggcgaggaacctgggatgcaaaccagtgtttggggccaggagtggctgtatggtttcagaggcgcccaccactctgggtttgagggacacagcaccctcgtctcggcgctttggattgtcacgcaccagaccacggggcggaggaatggagtggcatccctggggggagttaagacacacgaggtttgcagtttcattttgtttcagaatcagtttggccataaaaatgggactgggttggggacaggcggagcgattgaaccaccggagatgaggaggaggtggcaggcgcctctcctggggtggggactgagggctgtggagacagtaccatggtgaaggaccccatggcaatgggagtattgcactgagccaggtttcgggggaacggggacgtgtcgggatggcgtagggggacagagcctggcaggagacacatggaagtttccgccttgtcagtctcagagcaaacgccttttagtctttacagtacaggaatttggacactgcccacgttctcagtggacagcagccatcagaggtgacccaggagggaagtgggcattggtcaccaaggtatttacagacttctatcatgggggacagcggggtgggtccagcagcctccctcgcgggggatctgagggagaccgagttcgctaaatattataaataggtcttgccgtcctcctgcccccgcccctcggcacagtcagtggagcacgtcagcctcggtttacagttctctgaaaaggaaccaaaaaacacaaccaacaccaagtatatctccaaaggggccttggagacaacacaagaatggaaatgaaatgctcgtgcc

SEQ ID NO: 45449 - DNA, 2040 bp, Homo sapiens
aaaccatactgcaactttgataaatatgatgaagatcacagtggtgatgataaagtcttcctggactgcttctgtaaaatagctgctggcatcaagaacaacagcaatgggcaccagctgaaggatctgattctccagaaggggatcacccagaatgcacttgacctacatgaaaaagcacatccctagcgccaagaatttggatgccgacatctggaaaaagtttttgtctcgcccagccttgccatttatcctaaggctgcttcggggcctggccatccagcaccctggcacccaggttctgattggaactgattccatcccgaacctgcataagctggagcaggtgtccagtgatgagggcattgggaccttggcagagaacctgctggaagccctgcgggaacaccctgacgtaaacaagaagattgacgcagcccgcagggagacccgggcagagaagaaacgcatggccatggcaatgaggcagaaggccctgggcaccctgggcatgacgacaaatgaaaagggccaggtcgtgaccaagacagcactcctgaagcagatggaagagctgatcgaggagcctggcctcacgtgctgcatctgcagggagggatacaagttccagcccacaaaggtcctgggcatttataccttcacgaagcgggtagccttggaggagttggagaataagccccggaaacagcagggctacagcaccgtgtcccacttcaacattgtgcactacgactgccatctggctgccgtcaggttggctcgaggccgggaagagtgggagagtgccgccctgcagaatgccaacaccaagtgcaacgggctccttccggtctggggacctcatgtccctgaatcagcttttgccacttgcttggcaagacacaacacttacctccaggaatgtacaggccagcgggagcccacgtatcagctcaacatccatgacatcaaactgctcttcctgcgcttcgccatggagcagtcgttcagcgcagacactggcgggggcggccgggagagcaacatccacctgatcccgtacatcattcacactgtgctttacgtcctgaacacaacccgagcaacttcccgagaagagaagaacctccaaggctttctggaacagcccaaggagaagtgggtggagagtgcctttgaagtggacgggccctactatttcacagtcttggcccttcacatcctgccccctgagcagtggagagccacacgtgtggaaatcttgcggaggctgttggtgacctcgcaggctcgggcagtggctccaggtggagccaccaggctgacagataaggcagtgaaggactattccgcttaccgttcttcccttctcttttgggccctcgtcgatctcatttacaacatgtttaagaaggtgcctaccagtaacacagagggaggctggtcctgctctctcgctgagtacatccgccacaacgacatgcccatctacgaagctgccgacaaagccctgaaaaccttccaggaggagttcatgccagtggagaccttctcagagttcctcgatgtggccggtcttttatcagaaatcaccgatccagagagcttcctgaaggacctgttgaactcagtcccctgaccaccacacagcagctgcggcggcgaagacgaagctggcttgccttccaccctctgttctccctccttgtgcattaagttccctccgcgggatgctgcattgttaccccgccctcccctctctcatttttcttggtgtggcttggggtttttaggcttcctgttttatctcgtgtgtgtggtgcaccagctatgaggttgtctgtaacccaagccatcaaagggcctgtacatacctaggagccatgagttgtcccggccagcttcatacttgagtgtgcacatcttgagaaataaacaagtgacttaacagtcgacgcggccgcgaattcggatcctcgagagatctctttttttgggtttggtggggtatcttcatcatcgaatagatagtgatataca

SEQ ID NO: 45450 - DNA, 2810 bp, Homo sapiens
gcagtcagcgtcaccgtggggggcaagcagtacctcctaggactctatgacacggccggacaggaagactatgaccgtctgaggcctttatcttacccaatgaccgatgtcttccttatatgcttctcggtggtaaatccagcctcatttcaaaatgtgaaagaggagtgggtaccggaacttaaggaatacgcaccaaatgtaccctttttattaataggaactcagattgatctccgagatgaccccaaaactttagcaagactgaatgatatgaaagaaaaacctatatgtgtggaacaaggacagaaactagcaaaagagataggagcatgctgctatgtggaatgttcagctttaacccagaagggattgaagactgtttttgatgaggctatcatagccattttaactccaaagaaacacactgtaaaaaaaagaataggatcaagatgtataaactgttgtttaattacgtgagaaacatcttcagtggccaaggaaactgtccatttctctcagaaagcaaatgaaatgctacagctatacccagaccttttataggtaatgaagcagttcaaaacttgaaagaaaacaaaacctgtcctcagaattctataaagtgtattaagaatgttccttaaaggtttaagaagcagtaagcagcatctgaagccacaatctattataaatactttatttcaactagaaggtacaatctctcaggggtttcatagtttaaaaagctacaatcacatcatgttgtaactacgtaaaaaacagagctgtaaatggaactgcttggctttgaccatacacatttctgcccagcccttacagaatctgcacaaagaaatatctccctttgctccagttaattgttcttgtatgtaagttgctttctattccagtatatccagagtggtgaaataacaaggccagccacgtagccaaaggtcgctccaagcgtacaggagatgggccatacctgaggagagaatgtatgagatcaaaaaagaacaaatgttttattattacttgagcacaagtgtaacctaaatatttctatattaaagcttaatgtgctttcttaaagaatgccaaaagtgtaataaggtcataactgcatttatcatgaacactaaaaatgtacacattttagttaatgtgcattaaactgtaacaaggcttctggcaattgtagatttagtttgacgctccccaaagtgcatgagacacatgctaaaattacaaattaaaattttgggtcagactttgccataatgatagactcaatttagctctctgaactagttggtaattttttttttttaattcccactttggctgtgtacatcaaatgaaatgagaagtgtgtatgctgaccaaaccacaagaaactttctttaagttgtgttaaagaggaaagacctagaatccaagcgtgttacatgaaaattgtaacagagcagctgcttccacctttcagatatagatgttggaaccacagcagaagttatagagcgacaacttatatacacacctagaatgtaagttaaacaaaataccggcttccagagaccccttttctccagccatattacatcaggctagaagtaattaatgttgatttatttcatctacaagcagttggtccctaagtgaaaggctctgcttgaaaaaaaaaaagaaaaaaaagttggaggaaaattttcatgttcttctgtgaagcttatttggtacactggagccatttctaatctttctctggggggaacaggccacagaactgtgttagaggtgaaccatcttaattactagttctattacctaattcagcttccttgtttggtctgctgtggatctgccttattgcatatgccatgcatcagataatggatgcatcagataatggtgttagacaaagcttcattgtgaaacaacctaatgcattttagagaaacaatctcatcacattttttctagcctttcctacatttaaacttgctgttgcccaaattataattttttaaatgtctttggtgggcttctgttaattcacatgacttgagcttatagctatgtctactgcacagattgggtaatgggaacactaaacttttatacttgaaaatgacagccttaaatgctcatatcagtcacaaatctaggatgtactgtcttgttgtatgtgagctttgtagagatttttaaaaatataagcatcaccttcccattgaagagtggagagagtctactggatgactggccaggaactttctctctgaatcggacatttggatgtcttctttcttccaagaaatggtggttcacattaaagtatcatggccttatgtatgctcaaatggaatcttatgtaactttcttatttaattttggtctgcttatttttagataaaattgaaaggaattgtataaatcaattaacatattagctgagttgtccaacacatggtataaacgaattacaacagtaaactattacacatttccaacttgcctttggggatttatgaggattttttttggtggggggagggggctccaattcatatctctgaaacccttcacacttggtttactaattcaaagttagaagtctagaatttgccctgccctaacagaaacagattaggaatttgtctacacaaactggtgtcacctgtttcttgactggggatttggtttcctcattataaaatatggggaggtaggaacagaggttctccaacgtctctcccattttatcacagtaattttcttatttcacagtaattcattgttgggtg

SEQ ID NO: 45451 - DNA, 583 bp, Homo sapiens
ttttttgtttatcttatttctaatactttccctaatctctttctttcagggcaataatgatacaatgtatcatgcctctttgcaccattctaaagaataacagtgataatttctgggttaaggcaatagcaatatttctgcatataaatatttctgcatataaattgtaactgatgtaagaggtttcatattgctaatagcagctacaatccagctaccattctgcttttattttatggttgggataaggctggattattctgagtccaagctaggcccttttgctaatcatgttcatacctcttatcttcctcccacagttcctgggcaacgtgctggtctgtgtgctggcccatcactttggcaaagaattcaccccaccagtgcaggctgcctatcagaaagtggtggctggtgtggctaatgccctggcccacaagtatcactaagctcgctttcttgctgtccaatttctattaaaggttcctttgttccctaagtccaactactaaactgggggatattatgaagggccttgagcatctggattctgcctaataaaaaacatttattttcattgaaa

SEQ ID NO: 45452 - DNA, 2020 bp, Homo sapiens
aaactgtagtagttggtctagaaacaaaatactccaagaaaaagaaaattttcaaataaaacccaaaataatagctttgcttagccctgttagggatccattggagcattaaggagcacatatttttattaacttcttttgagctttcaatgttgatgtaatttttgttctctgtgtaatttaggtaaactgcagtgtttaacataataatgttttaaagacttagttgtcagtattaaataatcctggcattatagggaaaaaacctcctagaagttagattatttgctactgtgagaatattgtcaccactggaagttactttagttcatttaattttaattttatattttgtgaatattttaagaactgtagagctgctttcaatatctagaaatttttaattgagtgtaaacacacctaactttaagaaaaagaaccgcttgtatgattttcaaaagaacatttagaattctatagagtcaaaactatagcgtaatgctgtgtttattaagccagggattgtgggacttcccccaggcaactaaacctgcaggatgaaaatgctatattttctttcatgcactgtcgatattactcagatttggggaaatgacatttttatactaaaacaaacaccaaaatattttagaataaattcttagaaagttttgagaggaatttttagagaggacatttcctccttcctgatttggatattccctcaaatccctcctcttactccatgctgaaggagaagtactctcagatgcattatgttaatggagagaaaaagcacagtattgtagagacaccaatattagctaatgtattttggagtgttttccattttacagtttatattccagcactcaaaactcagggtcaagttttaacaaaagaggtatgtagtcacagtaaatactaagatggcatttctatctcagagggccaaagtgaatcacaccagtttctgaaggtcctaaaaatagctcagatgtcctaatgaacatgcacctacatttaataggagtacaataaaactgttgtcagcttttgttttacagagaacgctagatattaagaattttgaaatggatcatttctacttgctgtgcattttaaccaataatctgatgaatatagaaaaaaatgatccaaaatatggatatgattggatgtatgtaacacatacatggagtatggaggaaattttctgaaaaatacatttagattagtttagtttgaaggagaggtgggctgatggctgagttgtatgttactaacttggccctgactggttgtgcaaccattgcttcatttctttgcaaaatgtagttaagatatactttattctaatgaaggccttttaaatttgtccactgcattcttggtatttcactacttcaagtcagtcagaacttcgtagaccgacctgaagtttctttttgaatacttgtttctttagcactttgaagatagaaaaaccactttttaagtactaagtcatcatttgccttgaaagtttcctctgcattgggtttgaagtagtttagttatgtctttttctctgtatgtaagtagtataatttgttactttcaaatacccgtactttgaatgtaggtttttttgttgttgttatctataaaaattgagggaaatggttatgcaaaaaaatattttgctttggaccatatttcttaagcataaaaaaaatgctcagttttgcttgcattccttgagaatgtatttatctgaagatcaaaacaaacaatccagatgtataagtactaggcagaagccaattttaaaatttccttgaataatccatgaaaggaataattcaaatacagataaacagagttggcagtatattatagtgataattttgtattttcacaaaaaaaaagttaaactcttcttttctttttattataatgaccagcttttggtatttcattgttaccaagttctatttttagaataaaattgttctccttctaaaagtaaaaaaaaaaa

SEQ ID NO: 45453 - DNA, 481 bp, Homo sapiens; identical to SEQ ID NO: 21428
  misc_feature (1)...(481): n = a,t,c or g

SEQ ID NO: 45454 - DNA, 1069 bp, Homo sapiens
agtggaacacgatattgcgatgcacacacacacacacacaacacacatacacacagatgagagtagcacacacgccaaagatacatcaagcaagtgcttttttaatcaatacatcaaatgatatttttgctagcctgaggaagcttctctttgcctgtcctatcattcccacccattgcctcacagggatggaaagaaattccttcttggacccaacattagataaacataaccaagtctttacatgtggctttggagaaggctgctaggatgcttgcgaacacgacatcgggggtctgggatgcatcgatggcggagtggatcccccgtttcctgtagtactctatgagtggggtggtttgagtgtggtaggcttgcaggcggattttcaaggccttttcattatcatctgatcgacggatcaagggttccccggtgatgtcatctttcatgggctcttttggagggttgaactcctcgtggtaggaacggccactcttggggtgaaatcagccttcctgtgattcttcggatcagcagagagtctgggatgctgaattcaatcacagaatcaagcttctctttcctcttctccatgaggtcatcgagcatttctgcctgcctcacagtccgagggaagccatccagaagaaaaccatttttgcacaagggggtctccaaattcttctcaatgagctccactaccatttcatcactcaccagtttccccagcatcccatagttgccttcagcttttttcctagctctgagccagaagccaccatggccctcagcatgtccccagtagctaaatggcagacacagaagttttcagccaatctgggtgcctggggcagtagatagcagcagaaagagcaggagctttggagtcattcagatgcaagctctgtaaattacttgctatgtagcctagagaacaagccattcaaacttcagtttctccaactgggtccctttaccggccccgggaggccccagcagcacggcccggatgcctttaggatactcgggttctgccgctggcacgctgggagccatgtccgccgaa

SEQ ID NO: 45455 - DNA, 505 bp, Homo sapiens; identical to SEQ ID NO: 21435
  misc_feature (1)...(505): n = a,t,c or g

SEQ ID NO: 45456 - DNA, 506 bp, Homo sapiens
gatggaaagaaaggaagaaaggcaggcaaaagccccagacaggccaaaaccttcatccttcatgcacccaacctgtaccaaacaccagcatggcctggctgtgagtgcacagcagatggaggtttgctgggcagagacactgggctggcctagacactgcctttggtgataccctaaaccaaaggggccagtcccacagtaagaaggagaccactactactcctgctgccctcctccccccaccttgcctagtttataagacaggagaaaagggagaaagcaaaaagttagaaaacaaaacaaaacagaagtaagataaatagctagacgaccttggcgccaccacctggccctggtggttaaaatgataataatattaacccctgaccaaaacgactggtgttatctgtaaattccagacattgtgtgagaaagcaccgtaaaactttttgttctgttagctgatgtgtgtagcccccagtcacgttcctcacgcttacttgatc

SEQ ID NO: 45457 - DNA, 421 bp, Homo sapiens; identical to SEQ ID NO: 21439

SEQ ID NO: 45458 - DNA, 659 bp, Homo sapiens
ccaatttaatacgactcactatagggaatttggccctcgaggccaagaattcggcacgacgcaggatcaaggtgaaaaggagaaccccatgcgggaacttcgcatccgcaaactctgtctcaacatctgtgttggggagagtggagacagactgacgcgagcagccaaggtgttggagcagctcacagggcagacccctgtgttttccaaagctagatacactgtcagatcctttggcatccggagaaatgaaaagattgctgtccactgcacagttcgaggggccaaggcagaagaaatcttggagaagggtctaaaaggtgcgggagtatgagttaagaaaaaacaacttctcagatactgggaaactttggttttgggatcccaggaacacatcgatctgggtatcaaatatgacccaagcattggtatctacggccctggacttctatgtggtgctgggtaggccaggtttcagcatcgcagacaagaagcgcaggacaggctgcattggggccaaacacagaatcagcaaagaggaggccatgcgctggttccagcagaagtatgatgggatcatccttcctggcaaataaattcccgtttctatccaaaagagcaataaaaagttttcagtgaaatgtgcaaaaaaaaaaaaa

SEQ ID NO: 45459 - DNA, 3317 bp, Homo sapiens
  misc_feature (1)...(3317): n = a,t,c or g
cacggacgcgcatgaaatttggtgccgtgacttggatcgggggacctcccttgggagatcaatcccctgtcctcctgctctttgctccgtgagaaagatccacctacgacctcaggtcctcagaccaaccagcccaaggaacatctcaccaattttaaatcaggtaagcagcctctttttactctcttctccaacctccntcactatccttcaacctctttctcctttcaatcttggcgccacaattcaatctctcccttctcttaatttcaattcctttcattttctggtagagacaaaggagacacgttttatccgtggacccaaaactccggcgccggtcacgacctgggaaggcagccttcccttggtgtttaatcattgcagggacgcctctctgattatacacccacgtttcaagggtgtcagaccacgcagggacaactgccttggtccttcacccttagcggcaagtcccgctttcctggggcaggggcaagtacccctcaaccccttctctccgtgtctctaccccttctctgcttttctaggggaggggtaagtaccccaaccccttctctccgtgtctctactccttctctgcttttctggggacagggcaagtaccccaaccccttctctccttgtctctaccccttctctgcttttctggggcaggggcaagtacccctcaaccccttctccttcacccttagcggtaagtcccgctttcctagggggcaagaaccccccaatcgcttatttccgccgcaccccaacctcttatctctgtgccccaatcacttatttctgcaccctgacctcttatctctgtgccccaatcccttatttccctgccccaaccccttctctgctttcctggagggcaagaaccctccgccccttctccctgtctctactcttttctctgggcttgcctccttcactatgggcaaccttccaccctccattcctccttcttctcccttagcctgtgttctcaaaaacttaaaacctcttcaactcacatctgacctaaaatctaagcatcttattttcttctgcaatgccgcttgaccccaatacaaactcgacagtagttccaaatagccagaaaatggcactttcaatttttccaccctacaagatctaaataattcttggcgtaaaatgggcaaatggtctgaggtgcctgatgtccaggcattcttttacacatcagtcccttcctagtctctgtgcccagtgcaactcgtcccaaatcttccttctttccctcccacctgtcccctcagtcccaaccccaagcgtcactgagtctttctaatcttccttttctacagacccatctgacctctcccttcctccccaggctgctccttggccaggccgagctaggtcccaattcttcctcagcctctgctcctccaccctgtaatctttttatcgcctcccctcctcacacctggtccggcttacagtttcgttccgtgactagccctcccccacctgcccagcaatttactcttaaaaaggtggctggagctaaaggcatagtcaaggttaatgctcctttttctttatcccaaatcagatagcatttaggctctttttcatcaaatataaaaatccagcccagttcatggctcgttcggcagcaaccctgagacactttacagccctagaccctaaaaggtcaaaaggccatcttattctcaaaatacattttattagccaatctgctcccgacattaaataaaactccaaaaattagattccggccctcaaaccccacaacaggatttaattaacctcaccttcaaggtgtacaataatagaaaaaagttgcaattccttgcctccactgtgagacaaaccccagccacatctccagcacacaagaacttccaaacgcctgaaccggcagcggccaggcgttactccagaaccttctcccccaggagcttgcttcaagtgccagaaatctggccactgggccaaggaatgcctgcagcccgggattcctcctaagccgcgtcccatctgtgtgggaccccactgaaaatcggactgttcaactcacctggcagccactcccagagcccctggaactctggcccaaggctctctgactgactccttcccagatcttctcggcttagcggctgaagactgacactgcccgatcgcctcggaagccccctagaccatcacggatgccgagcttcgggtaactctcacagtggaaggtaagcccgtccccttcttaatcaatacggaggctactcactccacattaccttcttttcaagggcctgtttcccttgcctccataactgttgtgggtattgacggccaggcttctaaacctcttaaaactccccaactctggtgccaacttagacaatactcttttaagcactcctttttagttatccccacctgcccagttcccttattaggctgagacactttaactaaattatctgcttccctgactattcctggactacagctatatctcattgctgcccttcttcccaatccaaagcctcctttgcgtcctcctcttgtatccccccaccttaacccacaagtataagatacctctactccctccttggtgaccgatcatgcaccccttaccatctcattaaaacctaatcacccttaccgcactcaatgccaatatcccatcccacagcatgctttaaaaagattaaagcctgttatcactcgcctgctacagcatggccttttaaagcctataaactctccttacaattcccccattttacctgtcctaaaacgagacaagccttacaagttagttcaggatctgcgccttatcaaccaaattgttttgcctatccaccccgtggtggccaaacccatatactctcctatcctcaatacctccctctactacccattattctgttctggatctcagacatgctttctttactattgctttgcacccttcatcccagcctctctttgccttcacttagactgaccctgacacccattaggctcaacaaattacctgggctgcactgccacaaggcttcacagacagcccccattacttcagtgaagcccaaatttcatcctcatctgttagtcatactcccgttcaccgttctcaactactcatacatgccctgctcttctttacactgccggtttacactgtttctccaagacatcacagctgatatctcctggtgctatccccaaactgccactctaaactcttgaagtaaataaataatctttgctggcaggactctgctgaatctccttaggcactc

SEQ ID NO: 45460 - DNA, 1676 bp, Homo sapiens
gttttttttttttttttttgttcttgctccttaagtttttcttccttccttttacgaattctggcagctgcttcttccctctcttttcgatgttgttctgcttttaattcccggaactcctgctttgcctgtcgtaatatatcaacataatcttcaataaaatccctagttgaaactagggtcagtagctttccacagagagcatggagtatcttcattttttctcctggtgtcaaatcatacactgaggtgcttgacagtttcttcactagactgggattgctcaaacgaagctccatacaagcatcatctgtagcatcaaatcctcctcgttttttgatatctatactttgcatttgctgatgttacatcagcacctgaagctaagatgtgcagtctgaggatttctgaaagagtgcagctatcaagatccaaacttttcaaactgcagcctttggtggtcagcatcagttagttgctctttggctacttcctcttcttcttcagctattgcctggaaggattgcagtcaggaagaaaaaaagcaaattcacacagtgggccttcactgtcatttcctacaagagcttcctctaatacttctagggttactccatcaggaaactcatcttgaagatcaaaaagttccccaaatgcattaaggaactccaaaaccatcagagcatcaccaaagatttcaggaggtagtctagttttcactggtgttggttctggaagttccttaaggtcatcacattccatatcttctctaggtttactccactgttttaagtattccacatactttcgcttttcttcacggtaacttctctctttccttttctctttctactttaagcctctctttttcttcttttttctttagtctctcttcttcaacaatttttttcaattcttccctctttttctctttatcttctttttcttttttcttcgcttctagggcatctgctttttctctttttaatttagccttttcaaaagccagtgacttcatttcttcttgtttcaaaagtttatctctttctttagtagctttgctcctataacttgcaagagtctgtttattagcaacattgtcctcttgactaatatgtattcgtttgggaggtctccctcttcgtctgttagcaggactgaagataaatgtgggtggatcatcagggaagaaataagaaaaatcttgttctgctattttatacgttgaaagagatgatgcctttattttaatgactccatcttgtggttcacagtgttgcttcagaaaaagctttagtttatcacgagaaaataggtgttttctccggctgatttgtgttgctttaacaatagcagactcatgtaattcttttttagtgggttgcactttatacttgaatagtaagggatcaattgcatcttttttcttcccattttgaaaagaacagctttgtgtttctgaatcatcactatcactgatgataatagtttctccatccacactgttaacatgtccattagcaaaaccattttgatgtgatggagggaggacttccaaaatcctacatattagtcaagaggacaatgttgctaataaacagactcttgcaagttataggagcaaagctactaaagaaagagataaacttttgcccacgcgtccgcggacgcgtggg

SEQ ID NO: 45461 - DNA, 1829 bp, Homo sapiens
atacctcagacagataatgaaattttcaccagaaagtgttgcagcgtttatagcagtccttggcattctttccattattgcacagaccatagtcttgagtttacttatgaggtcaattggaaataagaacaccattttactgggtctaggatttcaaatattacagttggcatggtatggctttggttcagaaccttggatgatgtgggctgctggggcagtagcagccatgtctagcatcacctttcctgctgtcagtgcacttgtttcacgaactgctgatgctgatcaacagggtgtcgttcaaggaatgataacaggaattcgaggattatgcaatggtctgggaccggccctctatggattcattttctacatattccatgtggaacttaaagaactgccaataacaggaacagacttgggaacaaacacaagccctcagcaccactttgaacagaattccatcatccctggccctcccttcctatttggagcctgttcagtactgctgggctctgcttgttgccttgtttattccggaacataccaatttaagcttaaggtccagcagttggagaaagcactgtggcagtcacagccatcctcataatacacaagcgccaggagaggccaaagaacctttactccaggacacaaatgtgtgacgactgaaatcaggaagatttttctatcagcacccaggtcttagttttcacctctagttctggatgtacattccatttccatccacagtgtactttaagattgtcttaagaaatgtatctgcatgaactccgtgggaactaaaggaagtgggaacttagaaccagacagttttccaaagatgttacaatttcttttgaaaaaccttttgtttattagcaccaatttcttgccactaagctatttgttttattatacatcctttaattaaaaactatatatgtaacttcttagatattagcaaatgtctctgctaccatttccttaaggtgttgagctttaactctatgctgactcagtgagacacagtaggtagtatggttgtggacctatttgttttaacattgtaaaattttgagtcagattttaatattgtaaaatcttgggtcaaataattcaaagccttaatgcagatgcactaaaacaaagaaatggtaaatgaattgtttgcatttaaaaaaaaaaactcttaagaaaactgtactaaatctgaatcatgttttgagcttgtttgcagtacttttaaacattattcactactgtttttgaagtgagaaagtatcagccatttagcatttaagttggggtatttagagcctgtaatctaaatgctggctcaaatttattccccagctacttcttataccactattcttttaatgtttgcataatcataagcacctcaacacttgaatacataatctaaaaattatatagtaaagctggtagccttgaaaatgtcagtgtgatatctattatgtagataaatatatatagtggcctttcaggactgtcacagtaacactttatttacagagctaatgtttgtcctaaattttcaggaccctagaggagagctttatacaattaccgatgtgaatttctctaaagtgtatatttttgtgtccagttatattatttaaaaaagtgttactttgtaaaaattgtatataaagaactgtatagtttacactgttttcatcttgtgtgtggttattgcttaatgctttttaaacttggaacactcactatggttaaataaggtcttaaaagaaatgtaaatattctgttaataaagttaaatattttaatgattttttttt

SEQ ID NO: 45462 - DNA, 2498 bp, Homo sapiens
  misc_feature (1)...(2498): n = a,t,c or g
ttttttttttttttctcttttgtgcattttattaaaacttgaaagctatggcttgccgccatcaatgacgcctattgggttccaatagcctcatgttcaaatctgactcgttagcaaatccacccaactcaacatcggtcatcttgacattgcaggatattcagcaagtctgaagtttttaatcgggaaggattttctaccgttactgaacaaataaaggttctttgtagcaatggctggaaatgcaacatgagccctttcttcacaccaaaagaactcataaatagttcaccgggtgaaccaaagactttatttttcaaaagcaggtaacaccaaagtactatgtggtatccatattcgttgcaaaaatgataattactggaattttccaaacatcaaatgaagggggatcaatggttaccactatcgttttcaaccaatatacagatgttcgctcaaggtctaggttttatttctacatagtagtattcacatgagttccctattctgaagtattatcaaaacgaggacccttgaaggtcgagcccagctttgtcttgacttcaaagatgacacagcagccaacctagaatcctggcttgctgcttgagtcctagaaatcatgtcttctcatgttttacaacaagctgtgtctctgaaaactaaaatcagactttagattcctctgaaacagttcctggttcccaagcatccgcaccatggtacccagacatgctcaaaatgtgctttcccttatctttcaaaacccaccaccaggaaaccaaaacggaccccactctgagagttccatgatgaaggtgtttaagaatcacattaaccccaagtaaaggcagtagatgaaattatccatttctttttcttttttttttttttaagtgagactacattggcaaatgggaaaatgacaccaatcatttgattacagaaaatggttttataaatcctcctcttgaaattatgttcaggcccagcannnnnnnnnnnnnnnnnnnnnnnnnnnnnnnnnnnnnnnnnnnnnnnnnnnnnnnnnnnnnnnnnngggttcgacaccagcctggggcaacatagtaagaccccatctctgttttttttttaaaaaaaagaaattctgttcaaaagtatttcagaccaaaaggaggtcataaaaactgttcatataattactctatgagaaaaaaatccctgtatggaaaggggcactgaagatctggcacagagaaacaaggggagacagggcagtgataagatccagccctatttttcctagcatgcatttacgaccttgtggatatgtctgtactggggtgttaatagccccctccttgtatttaaaaaaaaaattaagaaattaaagtgaatctgtgtgctaatgaagtctgcagttacagaatctcaaagccaagcctgtaaagtctgtaaggcaagatctttgtcatcagggacgggaagagacggataagataatggtaggcactaaaggctggttcagccgagctctgggcagaacagcctcaaaaataaggcaactgtggcttctcagtttgagactgccaccagaaaggcccatggaagcaggaaaaaagagccactgatggcagatcacaggaagatattcggatagggcaatgatcacagttagatggcaggactcagggtctcagggaggcaggaaaccgtggaactgacactcaaggggaatgtctttgcaagtcctatgcacgactccaagcagcaatttctggggtttggagatttgttagttttgcgacgtattccccccaaaagaagacatgaaggtgggccccctggagaggtgagaccaccagggcagaacctccaccaggcgtgaagctggatgagaggtggaaaggacttcctgcggcacccggctccctccacgtctggctgagtcctacaaacgcttgtaggtgcccaggagagctctgcagttgggacagtaatggtccacgtcctgcagggcatccacgcagaaggggatgaagcagcagcccgctatgcaccccagcaggcacaggctcccgcaggacagccaggtcagagcaccggcgttataggacagctgactcacgatcatcttgttgcaggaaggacaacacatttggatagggcggtccaaaaaggtgatggggtgctgcacgtagaccgtctgcacggtaattggattgttattggggatgggcgctggctgggtataatacgaaggaggattcatgcccttcccatcaggccccgtcacaagccccgtagttggcccaggcatgggagctggaggtgtggggtaataactgttaacagccactgtctcttcataggatggaggtgcggatggtgctgaggaaggcccagtggccgcctggtaaggtcctggaaccgacattttaaccgccgcccgcgccgcctgctcgtgccggtattctttggatgcctctagtgtcgactctgctatgctgcgcgtg

SEQ ID NO: 45463 - DNA, 446 bp, Homo sapiens
  misc_feature (1)...(446): n = a,t,c or g
gnnnccttcagctntaacagctatgacatgattacgaatttaatacgactcactatagggaatttggccctcgaggccaagaattcggcacgagccaggctcccggacgtccctgctcctggcttttgccctgctctgcctgccctggcttcaagaggctggtgccgtccaaaccgttccgatatccaggctttttgaccacgctatgctccaagcccattgcgcgcaccagctggccattgacacctaccannnnnnnnaanaaacctatntcccatnggaccacaagnntncattcctgcatgantccnagacctncttctgcttctcagactctattngacgnactccnnatggacnngaccacctgaantcccatanacatctggtgnacatgtcatgttgntntcctaannanttnctgctnnngaccctgacggnaccat

SEQ ID NO: 45464 - DNA, 7163 bp, Homo sapiens
  misc_feature (1)...(7163): n = a,t,c or g
tacgaatttaatacgactcactatagggaatttggccctcgaggccaagaattcggcacgagcatgctgtgtgctttttgtccttttcttgttctgtctacctctcctttctctgcctacctctcttttctctttgtgaactgtgattatttgttaccccttccccttctcgttcgttttaaatttcaccttttttctgagtctggcctcctttctgctgtttctactttttatctcacatttctcatttctgcatttcctttctgcctctcttgggctattctctctctcctcccctgcgtgcctcagcatctcttgctgtttgtgattttctnnnnnnnnattaatctctgttggcttgtatttgttctctgcttcttccctttctactcacctttgagtatttcagcctcttcatgaatctatctccctctctttgatttcatgtaatctctccttaaatatttctttgcatatgtgggcaagtgtacgtgtgtgtgtgtcatgtgtggcagaggggcttcctaacccctgcctgataggtgcagaacgtcggctatcagagcaagcattgtggagcggttccttatgccaggctgccatgtgagatgatccaagaccaaaacaaggccctagactgcagtaaaacccagaactcaagtagggcagaaggtggaaggctcatatggatagaaggcccaaagtataagacagatggtttgagacttgagacccgaggactaagatggaaagcccatgttccaagatagatagaagcctcaggcctgaaaccaacaaaagcctcaagagccaagaaaacagagggtggcctgaattggaccgaaggcctgagttggatggaagtctcaaggcttgagttagaagtcttaagacctgggacaggacacatggaaggcctaagaactgagacttgtgacacaaggccaacgacctaagattagcccagggttgtagctggaagacctacaacccaaggatggaaggcccctgtcacaaagcctacctagatggatagaggacccaagcgaaaaaggtatctcaagactaacggccggaatctggaggcccatgacccagaacccaggaaggatagaagcttgaagacctggggaaatcccaagatgagaaccctaaaccctacctcttttctattgtttacacttcttactcttagatatttccagttctcctgtttatctttaagcctgattcttttgagatgtactttttgatgttgccggttacctttagattgacagtattatgcctgggccagtcttgagccagctttaaatcacagcttttacctatttgttaggctatagtgttttgtaaacttctgtttctattcacatcttctccacttgagagagacaccaaaatccagtcagtatctaatctggcttttgttaacttccctcaggaagcagacattcatataggtgatactgtatttcagtcctttcttttgaccccagaagccctagactgagaagataaaatggtcaggttgttggggaaaaaaaagtgccaggctctctagagaaaaatgtgaagagatgctccaggccaatgagaagaattagacaagaaatacacagatgtgccagacttctggagaagcacctgccagcaacagcttccttctttgagcttaggtgagcaggattctggggtttgggatttctagtgatggttatggaaagggtgactgtgcctgggacaaagcgaggtcccaaggggacagcctgaactccctgctcatagtagtggccaaataatttggtggactgtgccaacgctactcctgggtttaatacccatctctaggcttaaagatgagagaacctgggactgttgagcatgtgtaatactttccttgatttttttcttcctgtttatgtgggaagttgatttaaatgactgataatgtgtatgaaagcactgtaaaacataagagaaaaaccaattagtgtattggcaatcatgcagttaacatttgaaagtgcagtgtaaattgtgaagcattatgtaaatcaggggtccacagtttttctgtaaggggtcaaatcataaatactttagactgtgggccatatggtttctgttacatatttgttttttaaacaacgtttttataaggtcaaaatcattcttagtttttgagccaattggatttggcctgctgttcatagcttaccaccccctgatgtattatttgttattcagagaaaatttctgaatactactagtttccttttctgtgcctgtccctgtgctaggcactaaaaatgcaatgattattgatatctaggtgacctgaaaaaaaatagtgaatgtgctttgtaaactgtaaagcacttgtattctactgtgataagcgttgtggatacaaagaaaggagcaagcataaaaaagtgctctttcaaaaggatatagtactatgcagacacaaggaattgtttgataaatgaataaattatatgtatatttgaggccaatttgtgtttgctgctctggtaattttgagtaaaaatgcagtattccaggtatcagaaacgaaaacacatggaaactgcttttaaactttaaaatatactgaaaacataagggactaagcttgttgtggtcacctataatgtgccagataccatgctgggtgctagagctaccaaagggggaaaagtattctcatagaacaaaaaatttcagaaaggtgcatattaaagtgctttgtaaactaaagcatgatacaaatgtcaatgggctacatatttatgaatgaatgaatggatgaatgaatattaagtgcctcttacataccagctattttgggtactgtaaaatacaagattaattctcctatgtaataagaggaaagtttatcctctatactattcagatgtaaggaatgatatattgcttaattttaaacaatcaagactttactggtgaggttaagttaaattattactgatacatttttccaggtaaccaggaaagagctagtatgaggaaatgaagtaatagatgtgagatccagaccgaaagtcacttaattcagcttgcgaatgtgctttctaaattataaagcacttgtaaatgaaaaatttgatgctttctgtatgaataaaactttctgtaagctaggtattgtctctacaaaattctcattgtatagttaaaccacagtgagaagggttctataagtagttatacaaaccaagggtttaaatacctgttaaatagatcaattttgattgcctactatgtgaactcactgttaaaggcactgaaaatttatcatatttcatttagccacagccaaaaataaggcaatacctatgttagcattttgtgaactctaaggcaccatataaatgtaactgttgattttctcacttggtgctgggtactaggtttataaaattgtatgatagttattatattgtgcaaataaagtaggaaaatttgaataacaatgattatcttttgaatacggcatacgcaagggattggttgtctgaagaatgccactatagtagttatctattgtgtgccaatctcattgctagggcattggggatgcaaagataaaccatctttattgtgtcttgggtagcagaagaaaatatgtgtaaaatcaatttataatttgtaaactgccacccatatataagctatatctgctgaatgatcattgattactcttatccttagagataacaactgggggcacaaacatttattatcattattgaacctacaacagagatctatgtgtagatttacaaagcctacagttctatacagataggaatgaactattggcttactgaatggtgattactttctgtggggctcggaactacatgccctaggatataaaaatgatgttatcattatagagtgctcacagaaggaaatgaagtaatataggtgtgagatccagaccaaaagtcatttaacaagtttattcagtgatgaaaacatgggacaaatggactaatataaggcagtgtactaagctgagtagagagataaagtcctgtccagaagatacatgcttcctggcctgattgaggagatggaaaatttttgcaaaaaacaaggtgttgtggtcttccatccagtttcttaagtgctgatgataaaagtgaattagacccaccttgacctggcctacagaagtaaaggagtaaaaataaatgcctcaggcgtgctttttgattcatttgataaacaaagcatcttttatgtggaatataccattctgggtcctgaggataagagagatgagggcattagatcactgacagctgaagatagaagaacatctttggtttgattgtttaaataatatttcaatgcctattctctgcaaggtactatgtttcgtaaattaaataggtctggcccagaagacccactcaattgcctttgagattaaaaaaaaaaaaaaaaagaaagaaaaatgcaagtttctttcaaaataaagagacatttttcctagtttcaggaatcccccaaatcacttcctcattggcttagtttaaagccaggagactgataaaagggctcagggtttgttctttaattcattaactaaacattctgcttttattacagttaaatggttcaagatgtaacaactagttttaaaggtatttgctcattggtctggcttagagacaggaagacatatgagcaataaaaaaaagattcttttgcatttaccaatttagtaaaaatttattaaaactgaataaagtgctgttcttaagtgcttgaaagacgtaaaccaaagtgcactttatctcatttatcttatggtggaaacacaggaacaaattctctaagagactgtgtttctttagttgagaagaaacttcattgagtagctgtgatatgttcgatactaaggaaaaactaaacagatcacctttgacatgcgttgtagagtgggaataagagagggctttttattttttcgttcatacgagtattgatgaagatgatactaaatgctaaatgaaatatatctgctccaaaaggcatttattctgacttggagatgcaacaaaaacacaaaaatggaatgaagtgatactcttcatcaaacagaagtgactgttatctcaaccattttgttaaatcctaaacagaaaacaaaaaaaatcatgacgaaaagacacttgcttattaattggcttggaaagtagaatataggagaaaggttactgtttattttttttcatgtattcattcattctacaaatatattcgggtgccaataggtacttggtataaggttttctggccccagagacatgggaaaaaaatgcatgccttcccagagaatgcctaatactttccttttggcttgttttcttgttaggggcatggcttagtccctaaataacattgtgtggtttaattcctactccgtatctcttctacccactctgggccactacgataaggcaggtaggctggggttttgtaggtgaggcttgctccttaagttacagggaactctccttattaataggacacttcattttcctagtccatccctcatgaaaaatgactggaccactgctggggcagcagggaggggatgatgaccaactaattcccaaaccccagtctcattggtaccagccttggggaaccacctacacttgagccacaattggttttgaagtgcatttacaaggtttgtctattttcagttctttactttttacatgctgacacatacatacactgcctaaatagatctctttcagaaacaatcctcagataacgcatagcaaaatggagatggagacatgatttctcatgcaacagcttctctaattataccttagaaatgttctcctttttatcatcaaatctgctcaagaagggctttttatagtagaataatatcagtggatgaaaacagcttaacattttaccatgcttaagttttaagaataaaataaaaattggaaataattggccaaaattgaaaggaaaaatttttttaaaatttctctaaatgtaggcctggctgggctttgaccttttccgtttttaaatcactcacagagggtgggacaggaggaagagtgaaggaaaaggtcaaacctgttttaagggcaacctgcctttgttctgaattggtcttaagaacattaccagctccaggtttaaattgttcagtttcatgcagttccaatagctgatcattgttgagatgaggacaaaatcctttgtcctcactagtttgctttacatttttgaaaagtattatttttgtccaagtgcttatcaactaaaccttgtgttaggtaagaatggaatttattaagtgaatcagtgtgacccttcttgtcataagattatcttaaagctgaagccaaaatatgcttcaaaagaagaggactttattgttcattgtagttcatacattcaaagcatctgaactgtagtttctatagccaagccaattacatccataagtggagaaggaaatagataaatgtcaaagtatgattggtggagggagcaaggttgaagataatctggggttgaaattttctagttttcattctgtacatttttagttagacatcagatttgaaatattaatgtttacctttcaatgtgtggtatcagctggactcagtaacacccctttcttcagctggggatggggaatggattattggaaaatggaaagaagaaagtaactaaaagccttcctttcacagtttctggcatcactaccactactgattaaacaagaataagagaacattttatcatcatctgctttattcacataaatgaagttgtgatgaataaatctgcttttatgcagacacaaggaattaagtggcttcgtcattgtccttctacctcaaagataatttattccaaaagctaagataaatggaagactcttgaacttgtgaactgatgtgaaatgcagaatctcttttgagtctttgctgtttggaagattgaaaaatattgttcagcatgggtgaccaccagaaagtaatcttaagccatctagatgtcacaattgaaacaaactggggagttggttgctattgtaaaataaaatatactgttttgaaaactttgta

SEQ ID NO: 45465 - DNA, 697 bp, Homo sapiens; identical to SEQ ID NO: 9153

SEQ ID NO: 45466 - DNA, 455 bp, Homo sapiens; identical to SEQ ID NO: 21464
  misc_feature (1)...(455): n = a,t,c or g

SEQ ID NO: 45467 - DNA, 304 bp, Homo sapiens
  misc_feature (1)...(304): n = a,t,c or g
ccagaattcccaggtgttttcatttggtgatcagcactgaacacagaggactcaccatggagtttgggctgaactgggttttccttgttgttattttacaaggtgtccagtgtgaggtgngnctggtggagtctgggggaggcttggtccancctggagggtccctganactccaccagctgcgacncggncgnnaattccagatctatgaatcgtanatactgannaaccccgcangntcacttaactgtgcntnntgcaccatntnnatttctttnatttatacatnnntnngncttntttt

SEQ ID NO: 45468 - DNA, 2502 bp, Homo sapiens
cggcgtttaaattgcgcttccgccatctttccagcctcagtcggacgggcgcggagacgcttctggaaggaacgccgcgatggctgcgcagggagagccccaggtccagttcaaacttgtattggttggtgatggtggtactggaaaaacgaccttcgtgaaacgtcatttgactggtgaatttgagaagaagtatgtagccaccttgggtgttgaggttcatcccctaggtgttccacaccaacagaggacctattaagttcaatgtatgggacacagccggccaggagaaattcggtggacttgagagatggctattattatccaagcccagtgttgccatcataatgttttgatgtaacatccgagagttacttacaagaatgtgcctaacttggcatagagatctgggtacgagtgtgtgaaaacatcccccattgtgttgtgtggcaacaaagtggatattaaggacaggaaagtgaaggcgaaatccattgtcttccaccgaaagaagaatcttcagtactacgacatttctgccaaaagtaactacaactttgaaaagcccttcctctggcttgctaggaagctcattggagaccctaacttggaatttgttgccatgcctgctctcgccccaccagaagttgtcatggaccccagctttggcagcacagtatgagcacgacttagaggttgctcagacaactgctctcccggatgaggatgatgacctgtgagaatgaaagctggagcccagcgtccagaagtctagttttataggcagctgtcctgtgatgtcagcgggtgcagcgtgtgtgccacctcattattatctagctaagcgggaacatgtgcttcatctgtgggatgcctgaaggagatgagtgggcttcggagtgaatgtggcagtttaaaaaataacttcattgtttggacctgcatatttagctgttttggaacgcagttgattccttgagtttcatatataagactgctgcagtcacatcacaatattcagtggtgaaatcttgtttgttactgtcattcccattccttttcgtttagaatcagaataaagttgtatttcaaatatctaagcaagtgaactcatcccttgtttataaatagcatttggaaaccactaaagtagggaagttttatgccatgttaatatttgaattgccttgcttttatcacttaatttgaaatctattggggttaatttctccctatgtttatttttgtacatttgagccatgtcacacaaactgatgatgacaggtcagcagtattctatttggttagaagggttacatggtgtaaatattagtgcagttaagctaaagcagtgtttgctccaccttcatattggctaggtagggtcacctagggaagcacttgctcaaaatctgtgacctgtcagaataaaaatgtggtttgtacatatcaaatagatattttaagggtaatattttcttttatggcaaaagtaatcatgttttaatgtagaacctcaaacaggatggaacatcagtggatggcaggaggttgggaattcttgctgttaaaaataattacaaattttgcacttttttgtttgaatgttagatgcttagtgtgaagttgatacgcaaggaaaatggtccatgtttacccacagttttcaggtactcctagactttaaagatgtcttgaacatttaagttcttcagcagttcacactacaccgtttttttgtttttttttcccccccgggagggtttttttgtagggcagcacagcagagcaggacatggatgaaatactaggaatatgcacagtggggcagtgtgggggcttctcagtaatggagaacagttggtgaaacttttttttttttttaactaagcatttaatttatcttgcatattttccacatttaaaaatgaattaggtctattaggataattaggagtttgatcccatcaacactattcttgtagcagttaggaatcttgagctatttttttctcatacgattactatagtccagtttaccaaagttttctttagatgtctgataatcttgagatgattgcttaccttaaaaggtatagaaaggatcacttaaatatatggaaaaatgaaataagggtgaagctgaataaagttctacttactgtattaactggcaacagttgagtttcttaagatctgaattgctgtgtatgttacgctgtattcagaaccagtttctaaccagcctgtgagatgggaagttttttccccataattgggatgaaacctttcattcaggtattttgaattgaaggtgtatgtgttgtttgtaaccttgtggagattgcaagtggtgttgacattctggatcttctatgtaacagttgaaatttggaagtgacgtcacttacctgtctaacgtggtgtgggagagaatttacaagtcctttattgaaagaataattgttgcaaaatatattgcttctactttgcctggaaaaa

SEQ ID NO: 45469 - DNA, 2648 bp, Homo sapiens
ggcaaagcgaactctagttggcctagtaagagacctgagagggatcgctttcgctttcaatgccaagaccagcttcatgatgctctttgaatggatatatccatcctatatgccaattctccaacgggcaattgagctctggtaccatgatccagcctgtactacacctgtactcaagttgatggctgaattggttcataataggtcccagcgactccagtttgatgtctcttcccccaatggcatcttactcttccgagaaaccagcaagatgataacaatgtatggcaatcgcatcctgacactaggagaggtcccaaaggatcaggtctatgctctgaagctcaagggcatctccatctgcttctccatgctgaaggctgctctcagtgggagttacgtcaatttcggagtctttcgtctctatggagacgatgccctggacaatgctctgcagaccttcatcaagctgctcctctctattcctcacagtgatctcttggattaccccaagctcagccagtcttattattcactactggaagtcctgacccaggaccatatgaactttattgcaagcctggaacctcacgtcatcatgtatattctctcttccatttctgaaggacttactgcacttgacaccatggtatgcacaggctgctgctcctgcctggaccacattgtgacatacctcttcaagcagctgtcacgtagcaccaagaagaggaccacacccctgaaccagggagagcgaccgctttctgcacatcatgcagcagcatccagagatgatccagcagatgctgtccacggtgctgaacatcatcatctttgaagactgtaggaaccagtggtctatgtcccgaccactacttggcttgatattgcttaatgaaaagtatttttctgacctaagaaacagtattgtgaacagccagccaccggagaagcagcaggccatgcacctgtgttttgagaacctgatggaaggcatcgagcgaaatcttcttacgaaaaacagagacaggttcacccagaacctgtcagcattccgtcgagaagtcaacgactcaatgaagaattccacttatggcgtgaatagcaatgacatgatgagctgacacctccttggactctacctgtacagagcagcgtccctttggtttggcccagaggggcgaacaattgcaagggagagggcctggctgatcctggctcttttctccaggggtgtggggaaaatggcaaaggtcaactagctgcttccccagggaataggggtgtgagtacactcactagggggcagggcgctgctggttcctgggggactgggtgggaagggtggtgggaggagataagagatacaaactgagactccagcctctcctcctggggccacccaagtggggagaacccctagtgtcctgccacaacctgccttgtataaacatgtacattttttcataacattttgaacaaggtttatattgactcaagtttaaaaacaaaaagtgtgactgaaaaatttttacagagtctagtgcaccaatgctgatgtgaggggttgtgtatgcgagtgaagaaaatgtgtattctggtggcctgaagctttactggacaaggatgtgtgagagtgcagagatatatttagtgacacagtagagaggcaaaaaaaaaagctaaaattccaaatgtatattttttcgtattgccctgtcctcacccaggaaatgatccaattcctgttactgtattaacccttgttattagggaactctaaggccatgccaggaacaccgtccctccccttgggaccgtgtaggattctgccctggggtccctaggccccttggcagtgattaaataactccagctaaaaagtgtttgggtgttcttatctccaccctctttcctactttgcttaccctcatcctcagacagatgcctcttgcttttaaaagttggatttaacgacgtgttgtagggttcttggtctgtgtgaaggcagagaccagagagaaggaagtgagcccactgctctcctgggagcaatgtgggtgagtccaccagaggccctgctgtgtgtggccaataaattttagtcttccccagccctcgaggcagtgtgtgtggatgtatgcgtgtggatatttatatatgtaccctgcactcatgaatgtatgaactggaggaagttactacagtggaagggttcttaataacaaggtctacctagcatgaagtatttaacattctcccatcccttaaaaaatatacatttttataaaatgaaaaccataataaatgttttgaatattaaaaaaaataataacctacagaggaaaattaatggagacagctatttgccttgtactttttccacaattgttgctgctagttgtacacatctctagttcagctcttgcccacgggacactcatcaattaggttttatttttatttctttcctctacccccagaaacaagcctgttaattttttttccttctcctctggcgactgtgtgatgaatcctttcttgcgtgatcaggttgcggatagacttgtaagggtgtttgctgcatacagtgtaagcattgtgaccgccaataaacttcaatggtttctactgaaaaaaaaaaaaaa

SEQ ID NO: 45470 - DNA, 504 bp, Homo sapiens
agcagagtttgtatattgttagaatcctttaaaaagttttttgagtctagggccaaacccagtatgaggcattcatatgcccagctgttaagacacagcagtcctaggaagcaatagctttggagactttcagcttccagataggttatatacttaggtaaaatatgttcaacaatgggagcaatttttgttggagttaataattatggaccatgttaatccaaaagtatccttggaatatttattatagtagtagacactgttcatcttactagcctagaacttattttaaaatagtttaagtaagtaagtccaagcttaatttgttattgacagaaaagtaatacagcctaatctaatctaagcaaaaatgtaagggaataaagtctacatgcatcaactgaacagccttagaatgaggaactgaatggatatattaatttccatggtaaacttgatactggttttcataatggacactaaggaaaataaagagccatattt

SEQ ID NO: 45471 - DNA, 1709 bp, Homo sapiens
tttttttttttgcttgggggagcatggagtttattcaggggtggggacaggcgggcggctcagtagcaggtgccgtccacctccgccatgacaacagacacattgacatgggtgggtttacccgccaagcggtcgatggtcttctgtgtgaaggccagcggcagggcctcgtggcccaccatgcaggagaaggtgtcccccttcttccagtcctcggctgccacgcgcagtatgctggtcacagcgaaggtggtggtgccctggctgggctcctgccgggatgcccaagtcaggtacttctcgcggggcagctcctgtgacccctgcagccagcgaaaccagcacatccttggggctgaagccacgtgccaggcacgtcagcgtcaccagctcgttcagggccagctcctccgacggcggcggcagcaggtggacctcgggccggaatgtgtttccggattttgagagggtggcggttagcggggtcttggactcggggtaggcagcagtgcaagtgaaggtcttcccatggttccatggctcggcacagcccggcaggacactggacacgctgtagcagccacagaggtcacgctcaggtggtccttgaacagcgctcttcccacttgagggcgtccaggtgaaggtgacacctgaggcatctctcaggccggtcagtgtgcacgtgaggttcgcttctgaacctaagagcaggtcctcgagggccggtcggtgcagtgacagtcgggggtggcagcatgagggagatggggtaggtggagttgagggagatggggtaggtggagttgagggaactgggcagggcacagtcacatcctggctgggattcgtgtagtgcttcacgtggcatgtcacggacttgccggctaggcactgtgtggccggcagggtcagctggctgctcgtggtgtacaggtccccggaggcatcctggctgggtgggaagtttctggcggtcacgccctgtccgctttcgctccaggtcacactgagtggctcctgggggaagaagccctggaccaggcaggcgatgaccacgttcccatctggctgggtgctgcagaggctcagcgggaagaccttggggctggtcggggatgctgaggagacggtgaccagggttccctggccccaggagtcatgtggaagggagcgacagcagccgtgagggtcctctcgcacagtaatacacagccgtgtcctcggctctcaggctgttcatttgcagatacagtgagttcttggcgttgtctctggagatggtgaatcggcccttcacagagtctgcgtagtatgtgctaccacccctactactaatgtatgagacccactccagccccttgcctggagcctggcggacccagctcatggcataatcattgaaggtgaatccagaggctgcacaggagagtctcagggaccccccaggctggaccaagcctcccccagactccaccagctgcacctcacactggacaccttctaaaatagcaacaaggaaaacccagctcagcccaaactccatggcgagtcctctgtgttcagtgctgatcaccaagtggaaaggccttggagtccgtcgacgcggccgcgaattccagatctatgaatcgtagatactgaaaaaccccgcaagttcacttcaactgtgcatcgtgcaccatctcaatttctttcatttatacatc

SEQ ID NO: 45472 - DNA, 2859 bp, Homo sapiens
cttcaattctcatttaatattttacctccaactgcagggcagacaattttctgacttgcttttctctaggtggttcattttgaaaggggacagaaatataactaaatgcttccaggagaaaaattccaagagttacaatctggacttggtacctaaatatcattttttaaattcttgatgcctatttggactagaggtaaacatactttcagattggcctgtttttgtcggtaaggcatacagccttcagaagccaacatttttaatcaaaaacttataaaacatgatgatcattgtgaaaattctgagttgaaggttagtttaagataagctaacaataacagtctgtgttttctctaaaataatctgagttttttggaactctttatttaaatatgtgtgtttttcagtattcaaataagatcaggaagccaattttctatgtatgaatatgctttaacctaggatttcagtccactctgactgactttctaaactttaacttgggtttttacagtgactatgcattagtgctgactctttggtataagccataaaatattttccttcctatcaatttatctgaactttggtcttttcactaaattgtacagtattctacttctgtttaaaacggggagatgagaaagggaatactatctaaccaataacttgaacaaaaacactaaactaagcatttaatagaaatgctttttattgaggaggtattatccagagttcatgcttagaacaaatgcatctttgcgtatcctagacttaacaattcatcagtttctgagaccacagaatcaggttttccgtagtagataaagactctctggtgcttcaaattctgttcaagtgttttgactcatcagcttctactctttctattactgcctttgcctggcttgttttgtctctttgcaactgattttgcaaaaaaaaattgtaggctttaaaataacagggtctaaggtattttaaatgtgcctatttcacagctctcttgggtcacaaaaacatgctatttttattggaacttcaaaccaaatccccactgagtgtgtactggttcctgcaggtagcagtctcctattatctcctgtttagcaccaaaagagctaatattattggaaactgaccttttaaaggccactggcagtaggatttaaaaagcagcccactgctcagtttccaggatcagcttcctccttctgtcacttgtgtaagttggcactaccttgtgcctctcagattgctgaagtgctgctggtaagcatgtgcatgctctgcctttcttgtgaaagttttcaatcagcgatatcagcacttacagtaagaagtaaaagtagtgcacagcaaagctaatttgcctttgcctggggtgttcagcttgaaagaataaagctcatttggtttagttaaatgtcttactctactgtgcctatgcttttagctgcgttactaagcaagggaaaaataacagtttctctgagccagagaagacttgatcacagttctccaagcatcgtgatagcaatgcttaaccccaggaagatttcaaggcagggagaagaacatttcaaataagattcttgttaacccatttatgcctagtgttccattattggaatgctaagcttgtgggagtcatttacatcctactgctcaaagtcattgccaaggtctgatttttcacacaaaaaattgcaacccccagcataaatgggttagctactgtcatcagttagcaaattcatccacacaaacacaattagagtttggtttttgtttaagcttttcaaaacttactaaactggcacaattttatatgtatgctatttgttgtatttatgcttaagagcaaaaaagttttgatgggattttaaattcaggcaaagcctacaacgctgagacaatcccctaacaacatggtagtaactaaagaaacttttatactaggcttcttagttttaaaaggaagtggcatcattgtttcagttctagtttgtatttttctctcagatatttttcttctttaaaaatctttcccagaagttggttcctagaaaactcaataccatcatctcttatctctatacagggactaggtaataaaaccttcaaaggttgtcaaaggtcatcaagcagtgttcatttatcctgtcacatgtttctgtttctatagtaatttagaaattgcaaatagttaacttttcatcatgtaaaaagttaacattatcctatttccatagataccatggacggcggtgtggcctgagttgtcagtctttaatcctgagtcatgtggctctcttttcatctttgatgtcagttccaattatttggcatcaaaaaccttcatggtaggtagagttttaggtaaaagtggatctagggttactttctttattaacatttcctaaataactgaattgagagacatactctgctactatgtcctcaggttaatttttgtctgatcttacgatgccctgccttttactagctactttagaaatagaaaatgtgaagagtgactatttacatgtatactcctttggctgctagaactcatctgtagtcctttattatttacactgaattccaatttcatttctgcttccgctaagtaagagcacctcattcctgtgttttctctactattgagctgtagacgaactgtttctctaattataaagcaaactgtttgggatattcagggaaactaccccaatgttatgttgtcatttaatgggaaaggctgggatcatatgtatttctatgttctgtaaagtatttgacttactagttctcaataaaattttattaggactataaaaaaaaaaaaaaaaa

SEQ ID NO: 45473 - DNA, 1234 bp, Homo sapiens
ttgattaccagctatgacatgattacgaatttaatacgactcactatagggaatttggccctcgaggccaagaattcggcacgagagaggagctggtgagaagacagcgaaatggcgcctccggcccccggcccggccgtccggcggctccggggaggtagacgagctgttcgacgtaaagaacgccttctacatcggcagctaccagcagtgcataaacgaggcgcagcgggctgaagctatcaagcccagagagagacgtggagagggacgtcttcctgtatagagcgtacctgggcgcagaggaagttcggtgtggtcctgggatgagatcaagccctccttcggcccctgagctccagggccgtgccgcatgtttgcttgactaccttcgcccacgagagtcggaggggacagcattcgtgggcccgagctggaccgagagatgagcaggagcttggacgtgaccaacaccaccttccttgctcatggccgcctccatctatctccacgaccagaacccggatgccgccctgcgtgcgctgcaccagggggacagcctggagtgcacagccatgacagtgcagatcctgctgaagctggaccgcctggacctcgcccggaaggagctgaagagaatgcaggacctggacgaggatgccaccctcacccagctcgccactgcctgggtcagcctggccacgggtggtgagaagctgcaggatgcctactacatcttccaggagatggctgacaagtgctcgcccaccctgctgctgctcaatgggcaggcggcctgccacatggcccagggccgctgggaggccgctgagggcctgctgcaggaggcgctagacaaggatagtggctacccggagacgctggtcaacctcatcgtcctgtcccagcacctgggcaagccccctgaggtgacaaaccgatacctgtcccagctgaaggatgcccacaggtcccatcccttcatcaaggagtaccaggccaaggagaacgactttgacaggctggtgctacagtacgctcccagcgcctgaggctggcccagagctgtcaggaccatgaagccaggacagaggccaggagccagccctgcagccctccccacccggcatccacctgcatcccctctgggggcaggagcccacccccagcacccccatctgttaataaatatctcaactccagggtgttccacctgaaaaaaaaaaaaaaaaaa

SEQ ID NO: 45474 - DNA, 1303 bp, Homo sapiens
ttttttttttttctcagagaaaatgtagctttattatgacataggagagactacaaagcactgggggggaggaggagtgacacagctcctcaaaatggaaggggaaaggaagagtaaacatcttggtaaataaagtctccaaccacagcacagtcattggaatttttttcttcatttttattttcaaacttacagtaaacaaaacaatcacttaaattgtcaaaagaacagcaattttacacaatgaagagcatacacaccaagccaaaatacaatagcactcaggtctatatgttgcagtggtgctggcgctggagggaatgcccagggaggctgcagtgctcaccacgaagcccaggtccacggagggagccaaggtccacagagggccccggggccagagggaggccgcccacactcccagcacattcacctgcctcaaagcactcccttcaggcatctgaagagggaaaggccatgtgtcttcctgggaggcactgaaaggccagccagcatctccaaaatgcaggccattttaacactgctgtgaatgtgctgggggtcaccaagggggccccttagtggtcagatgcactttgtcacaatgtacacctacatggggtgattactaggcaacgggaggtttcctgaatttcacagccagatggggagctaaaagaaattcctgaacccaacgcgtaaatattttgttctgacaaagtaaattcacaagaacacatcaaacacaagacctaatgcaaggggcagtgcccagggccgccgccgccctcctgtgagcagctcttcagcagcaggcatcaggtaactgcttagaacggcaatgcccacagtggaataagggggacttaacttggatacgaaagttcagaataatgcccaccaaaaatccatgtgactccatctctcttcccagttcttaatgttctcagaacagcagccacccctgaatgcaagtggagacaggaaggggacttaggggttggccggcgggaggggaggcagggtctggccaaacccaggcagctgccagaaagccttctgcactccgcaagacaccccagtaaactggggcgtcccaaggtggcaagccttcatgaaggcactgcccaggctcacaatcctgtgggccaacttcagtcaactctcctttccattagatttgttcctaattaaaagaccactcataggccaggtgcgcgtggctcacgcctataatcccagcactttgggacgctgaggtgggtggatcgcctgaggtcaggagtttgagacatggtgatgc

SEQ ID NO: 45475 - DNA, 924 bp, Homo sapiens
  misc_feature (1)...(924): n = a,t,c or g
tttttttttaagcaaaattgcaatttatagaggacagatgaacatgttaaattatacacatgggatacaaaagcaaaattcaaactatgggaaaacgtgaaagacaaataaccttgtttcttaaacaataaattatgaagaataaaataacagatagagtgggaacttataggaccaaaagaaacataaaagatatatcaatcaaccacaatgtgcagtaccttatttgggatccccgagttttaaaaaaaattgtaacatttgcaattagtagaaatttgaacacatatttaataatttgtgataatggttttgtggctaagtttaaaaaatgaaaggccccaatcttcagaaatctactctgaaatatttacaattacatatttaacaagtatataaaagtataaccntatctgggatttgctttcacttagtaagagatggtagctggagagatgtatggatgagataagattggccacaagctgatggttactagaactaggtgtctgaagtttaaaattctacacgataaaatatcctaaaaaatttgtgtcacagaatttcaatagcaattaaattcaggaaaagatattcaaatgtcttaatagcaattaccagataataaaaagttattgtaaaagaaaacctttgtgttacagattttcactgaattcagacttataaagaattatgcaaatgtatgtaagagtaattattgattaatagattaacagtatttaggaaaaccctatgatgtcataaaagttaatggaaactgtatacgattacagtaagtaataaaattatgtcataaatctttccatactaaaattgttgttttcaaagaagtgaacttcattgttaacattgcgggcacaaagagtttcatcttctgaccaggatggacacctatgtcaatga

SEQ ID NO: 45476 - DNA, 1336 bp, Homo sapiens
cttgtggcccaattcaagcttgattcaggaattcggcacgagccaagatggccgcccccgtggatctagagctgaagaaggccttcacagagcttcaagccaaagttattgacactcaacagaaggtgaagctcgcagacatacagattgaacagctaaacagaacgaaaaagcatgcacatcttacagatacagagatcatgactttggtagatgagactaacatgtatgaaggtgtaggaagaatgtttattcttcagtccaaggaagcaattcacagtcagctgttagagaagcagaaaatagcagaagaaaaaattaaagaactaggaacagaaaaagtcctacctggagccgaagcgttaaggaagctgaggacaacatccgggagatgctgatggcacgaagggcccagtagggagcctctctgggaagctcttcctcctgcccctcccattcctgggtgggggcagaggagtgtctgcagggaaacagcttctcctctgccccgatggatgctttatttggatggcctgggcaacatcacattttctgcatcaccctgagccccatttgcttcccagccctgggaagtttttacccggctttgccctgccacctctgcccaggacacgcttccctctcgggatgtgtgatgaactcccaggagagggaagatgggagccagggcaagatagggaagctctgcctgagctttccactaggcacgccagccagaccaataaaaagcgtctgtcccactctgctaagcctggttttcttgagcagagggatggaacagagggtgagagaggcagtggccgtctccacctcagctcctgctccctctgcatcagagcccttcctttcttgggggatgggccttgccctcttctcttttcccttcctgtacctttgactaacgctcagcttccgggcctgcatgcagtagacagaagaggaagaaagaacagatgttcacagctgaatctcagtgaacagaatagcagtccctggatggcagtctgcctaaagattcctttccctgccttctcccatacattccaaaaggaagttcaacagtaagcagcacctccaagactgtctccttttggccaatatcataagatggacgccataatcctgaggcctcctagaggctgagggggcaacggtgtgatccagctggctcatcccagcccaggtgggccaattattcaattttcaagaattttgttgcaagccagttgtcaaacacagccattataattatgtaaatttgcaaattatgttaaaaacaaggacaataaatattcaaaatgcatccctaattact

SEQ ID NO: 45477 - DNA, 3106 bp, Homo sapiens
  misc_feature (1)...(3106): n = a,t,c or g
aagcttctgatatctatttaactgatttcacccaaatgctttgaacctgggaatgtacctctccccctcccccacccccaacaggagtgagacaagggccagggctattgcccctgctgactcaatattggctaatcactgcctagaactgataaggtgatcaaatgaccaggtgccttcaacctttaccctggtagaagcctcttattcacctcttttcctgccagagccctccattgggaggggacgggcggaagctgttttctgaatttgttttactgggggtagggtatgttcagtgatcagcatccaggtcattctgggctctcctgttttctccccgtctcattacacattaactcaaaaacggacaagatcatttacacttgccctcttacccgaccctcattcccctaacccccatagccctcaaccctgtccctgatttcaattcctttctcctttcttctgctccccaatatctctctgccaagttgcagtaaagtgggataaggttgagagatgagatctacccataatggaataaagacaccatgagctttccatggtatgatgggttgatggtattccatgggttgatatgtcagagctttccagagaaataacttggaatcctgcttcctgttgcattcaagtccaaggacctcagatctcaaaagaatgaacctcaaatatacctgaagtgtacccccttagcctccactaagagctgtaccccctgcctctcaccccatcaccatgagtcttccatgtgcttgtcctctcctcccccatttctccaacttgtttatcctcacataatccctgccccactgggcccatccatagtccctgtcacctgacagggggtgggtaaacagacaggtatatagccccttcctctccagccagggcaggcacagacaccaaggacagagacgctggctaggtaagataaggaggtaagataaggaggcaagatgtgtgagcagcatccaaagaggcctgggcttcagttgtggagagggagagagccaggttggaatgggcagcaggtagggagatccctggggaggagctgaagcccatttggcttcagtgtcccccaaacccccaccaccctcttcctaggccgccctccccactgttaccaacatgaagctgctcgcagcaactgtgctactcctcaccatctgcagccttgaaggtgggtgtgatatggagagggggccaaaagggagaatgtgctggtggttatagctacctatctgcctgtgctcttatatccaggtctggcaaccaaagggctcaaaaggaagatcattccctctctaaagcccagaaagcccatccaaagatctggctggatacctttttggggagggggcagagagctggggtgggtactggcagaggtatggcaggaggccaggattcactgctgtggacccagctgaaaagagtgtgtgtgtgtgtgtgtgtgtgtgtgggcaggagctttggttcggagacaggcaaaggagccatgtgtggagagcctggtttctcagtacttccagaccgtgactgactatggcaaggacctgatggagaaggtcaagagcccagagcttcaggccgaggccaagtaagtctcagggcaaggggttcaggggctgtggaactgtggagagaaagaagggaagatgagaggtcccacagaagtctgaacccaggggtggggattagggcagattaggcttaaattgcagagaaaaagtatttcatcacccaaagatcccacacgtctcttagatagagaggaacagcaagaactgggccttcaatttcagtctctagagtctgtccctctacctagcaaaggtcttgactctattcctacctaggggctttgccatgcgatggaccaggcactagagtttggggacctgagtcagtctgctctgacctcccaccaccaccaaggcccctgccagtgcctagggtccctcagattaaactctaatcccctcacctatccaggtcttactttgaaaagtcaaaggagcagctgacacccctgatcaagaaggctggaacggaactggttaacttcttgagctatttcgtggaacttggaacacagcctgccacccagtgaagtgtccagaccattgtcttccaaccccagctggcctctagaacacccactggccagtcctagagctcctgtccctacccactctttgctacaataaatgctgaatgaatccagctctgagcctggtatgtttgggggactgggaaaagtaggggagtaagggaggagaagaggaaggaaaaggaaaaatctgcttctagaaggagagaggtttgagtgtggaggggtgaagaaaggattgaagacacaactgatgaaaatgacaggatgagggtgccatgattctccaaacccagagtctcctacagcctgggcacgactctgcaggtgaacactaaagaggctttgcattgcacaaggaactaggagaggaaggaaggattcacaaactgaatccctcgatttctggaggtcatagaaaatgagggtaccctnnnnnnnnnnnnnnnnnnnnnnnnnnnnnnnnnnnnnnnnnnnnnnnnnnnnnnnnnnnnnnnnnnnnnnnnnnnnnnnnnnnnnnnnnnnnnnnnnnnnnnnnnnnnnnnnnnnnnnnnnnnnnnnnnnnnnnnnnnnnnnnnnnnnnnnnnnnnnnnnnnnnnnnnnnnnnnnnnnnnnnnnnnnnnnnnnnnnnnnnnnnnnnnnnnnnnnnnnnnnnnnnnnnnnnnnnnnnnnnnnnnnnnnnnnnnnnnnnnnnnnnnnnnnnnnnnnnnnnnnnnnnnnnnnnnnnnnnnnnnnnnnnnnnnnnnnnnnnnnnnnnnnnnnnntgagggtacccctcataatttcctgttagtcattctatgaagaaaagaaagcttcccaaggtgtcacccgtggccctcctttcccttctgagccaggggaacactgtgtttccccctttcccacaataaaagacttgagtttgctcctctccctagaagtgctctaatttctccatttaaaacctcttatctagaccaggca

SEQ ID NO: 45478 - DNA, 1514 bp, Homo sapiens
tttttcattttttcaactaatatttattaaaggtattttaaaactcaggttgatctctcatcttaactgtgattggttcaattttaccataccgaaagaataaattcatttgagcttttacctacgcctttgctttttgttaaaggaagaattcaatgcaatgtgttcagaaagttacatttaaatcgttaataaagagaaaaaggaagagaaagagaggacaccattccgacacaaacgtttatgtgattttagccattacaacagtaattcagaaatatctcaaatgttacattgatgtcatcaatattacaaaaaaggaaaaaaaagtgacaggcaacagtgaagagcaccagagacccagcgcacacctaaagtagaccatgcttctttccttccactgccaggttatcgtcccgggaagccccccaccccctcgctttcctcctccgctttccctaacccgtctcgcgggggcatctacgcctcgtcctcgccctcctcctcctcgaactccccttgttcgtcggccgtggcgtcctggtactgctggtactcggacaccaggtcgttcatgttgctctcggcctcggtgaactccatctcgtccatgccctcgcccgtgtaccagtgcaggaaggccttgcgccggaacatggccgtgaactgctcggagatgcgcttgaacagctcctggatggccgtgctgttgccgatgaaggtggccgacatcttcaggccgcggggcgggatgtcgcacacggccgtcttcacgttgttggggatccactccacgaagtagctgctgttcttgttctgcacattgagcatctgctcgtccacctccttcatggacatgcggccccggaagatggcagccaccgtcaggtagcggccgtggcgcgggtcgcaggcggccatcatgttcttggagtcgaacatctgctgggtgagctcgggcaccgtgagcgcccggtactgctggctgccccggctggtcaggggcgcgaagccgggcatgaagaagtgcaggcgagggaagggcaccatgttcaccgccagcttgcgcaggtctgcgttcagctggcccgggaagcgcaggccaggtggtgaccccgctcatggtggccgaacacccaggtggttgaggtccccgtaggtgggggtggtcagcttcagggtgcggaagcagatgtcatacagggcctcgttgtcaatgcagtaggtttcatctgtgttttccaccagctggtggaccgagagggtggcgttgtagggctccaccaccgtgtctgacaccttgggtgagggcatgacgctgaaggtgttcatgatgcggtctgggtactcttcccggatcttgctgatgagcagggtgcccatcccggaccccgtgccgccccccagagagtgggtcagctggaagccctggagacagtcacagctctctgactccttcctcaccacatccaggaccgagtcgaccagctcggctccctctgtgtagtggccct

SEQ ID NO: 45479 - DNA, 1105 bp, Homo sapiens
aagtactttctgtgccgctactgtctatccgcagccatccgcctttctttcgggctaagccgccccggggactgagagttaaggagagttggaggctttactgggccacagggttcctactcgcccctgggcctccggacaaaatggggtctgcggttggtgtcctggcaaaagcagggtagaagggctgcggggcgggcccagaatccgagcctgcagagatgggagcagttgcagtgttgagggcggaagaggagtgcgtcttgttttgggaactgcttcacaggatccagaaaaggaaatgcccggcgaagccacagaaaccgtccctgctacagagcaggagttgccgcagccccaggctgagacagttgtttctcatctcagggtctggaacagaatctgacagtgatgaatcagtaccagagcttgaagaacaggattccacccaggcaaccacacaacaagcccagctggcggcagcagctgaaatcgatgaagaaccagtcagtaaagcaaaacagagtcggagtgaaaagaaggcacggaaggctatgtccaaactgggtcttcggcaggttacaggagttacttagagtcactatcccggaaatctaagaatatcctctttgtcatcacaaaaccagatgtctacaagagcccctgcttcagatacttacatagtttttggggaagcccaagatcgaagatttatcccagcaagcacaacttagcagctgctgagaaattcaaagttcaaggtgaagctgtctcaaacattcaagaaaacacacagactccaactgtacaagaggagagtgaagaggaagaggtcgatgaaacaggtgtagaagttaaggacattgaattggtcatgtcacaagcaaatgtgtcgagagcaaaggcagtccgagccctgaagaacaacagtaatgatattgtaaatgcgattatggaattaacaatgtaaccatatggaagcaactttttttggtgtctcaaaggagtaactgcagcttggtttgaaatttgtactgtttctatcataaataaagttatggcttcttgttggatgaaaaaaaaaaaaaaaaaaaagtcgacgcgg

SEQ ID NO: 45480 - DNA, 545 bp, Homo sapiens
  misc_feature (1)...(545): n = a,t,c or g
gaannncccntttgaaaacccnttntgacatgatcaccgaatttaataccgactcactatagggaatttggccctcgaggccaagaattcggcacgagattagacaggcagcatcctctcttcagcaggcatcactgatgctgtccgaaatggcatacaaaaagatggcatctgagcgagaaggctctggaagttctggcactggggaacaaaaggaagatcaaaaggaggaaaaacagtaataatagcagaaattttgaagccagaaggacaacatatgaagcttaggagtgaagagacttcctgagcagaaatgggccgaacttcagtctttttactgtgtttttgcagtattctatatataatttccttaatttgtaaatttagtgaccattagctagtgatcatttaatggacagtgattctaacagtataaagttcacaatattctatgtccctagcctgtcntttttcagctgcatgtaaaaggaggtatgatgaaattgatcattataaanatttaactgntttatgctgaantgacc

SEQ ID NO: 45481 - DNA, 580 bp, Homo sapiens
gcactcttgagtcctacagtaactgagtgtttgtttagacagcacaagaaggggtgagagtgcgtctcctagccttaatgtgggagggtagtttcagtcactcatcggctttcattattgtgcagaaatattagaaaacctcattgatcaattttatgtatttgaatatcagcaaattgaaattttccataattatcattaatttgtaaccacatccagtgtcatgcttactccttagagttcagatgaattcttaaaattaaaaaaaaactccatagtactaattttgtttctttatatagtttgcgtttgatattagtgcttgcaattgtattaaagtcaaaagctgatttttatggcatacacaagaatgccactttttcttttatttcataccaataatttaaagattgatatgctaaaaacaatttgcacagcactaaagcatgagctactttcatctaaacctgtaaaaatatgaaagatttttatattttttcactgggaagaaattcttcctggatgaaattacaaatatgtgtagaatatatttaataaaagacttataaaatacctaact

SEQ ID NO: 45482 - DNA, 1336 bp, Homo sapiens
ccttcaggtcacgcagccctgtactgtatccagcaccacagaaacctcagtgtttttcctctgctggtttggggcacaaggaagccttagggtatggggaaaggctgttattacctagagtttactcccaggccagggggctgccatcttcttcacagacatccctgaaaggaagcccctttggggcagggaggtgaggacttcatctcaacatcggctggtggttggtaggggagctttttcttttctttcctttttttttgtttttgtttttgtttttgtttttggtaacatgttaggagttaatgttgcaaagagtagtttacatcttcactttctgaagacacttgaatttaggaccgatgtatctgtgacaagcatgccagaagtggcaggggccatcagggctaaccacttcacacctaccatcgtcccatggggatccaagacctgagataaagcaacagcctgcccagatccctctgttcatcctatcccttccaaggttggtccatgccaacataacctctgggcatcagacatcagcaggtctgtgtggcctcagcccctgttaagggggcaggtttctctttagccctcttcctgcacttggggagcaaaggcactaccagtagagaagggccatccagccgtgcccccagccctgggacccctggggcttcagatagaggtgctgagcccctgtgtcaaagttgttaaatgtttttgttttgttccattgtagctcttttttttttttttttccctttcctggtgattgattttacaaaagaaagtaagctgcttagaaggccctggaagggaagtgaggaggagggacaaggaagatgactagttacggagggtgagggttgttttttgccaaaaagcctgggtagagtgatctgaattatctggcaccctcctgaatggaaccccagagtacctcctgtgtggaagggtccctggattttccctaacacccaccctctcccccttcagccatgctgatggcagagaagataagaacttggagcccatttctcactggagaggaaaacttgtcatctggctttgcggagaaggttccaccttacgctcgtagtacattatctttactatgtgctaggatatcatatttaaaaggacaaaaaaatgtaaaatacttgaatgagcttgtattataacattaatattattgagagtatctgctttccaggctgaagtgattcattcattattctagtcctgctttagtcctttgtaatttgtggtaattatgcttttctttttaatacaaaaaaatgtataaaaataaacacttgaaaaggcaaaa

SEQ ID NO: 45483 - DNA, 575 bp, Homo sapiens
  misc_feature (1)...(575): n = a,t,c or g
tnnnntttnnnnnntttgganaacngntatgacatgattacgaatttaatacgactcactatagggaatttggccctcgaggccaagaattcggcacgagcacagtgaaccacgacctctaggccagtgggagagtcagtcacacaaactactcagagagaacccaccatggtgctgtctcctgccgacaagaccaacgtcaaggccgcctggggtaaggtcggcgcgcacgctggcgagtatggtgcggaggccctggagaggatgttcctgtccttccccaccaccaagacctacttcccgcacttcgacctgagccacggctctgcccaggttaagggccacggcaagaaggtggccgacgcgctgaccaacgccgtggcgcacgtggacgacatgcccaacgcgctgtccgcctgagcgacctgcacgcgcacaagcttcgggtggacccggtcaacttcaagctcctaagccactgctgctggtgaccctggccgccactncccgccgagttccccctgcggtgcacgcctcctggacaagttcctggcttctgtgagcaccgtgctgac

SEQ ID NO: 45484 - DNA, 3137 bp, Homo sapiens
cgaggcgaggcgaggagggggagccgagacgcagcggccgaggcgggggcgcgggcgcaccgaggcgagggaggcggggaagccccgccgccgccgcggcgcccgccccttcccccgccgcccgcgccctctccccccgccgcgctcgccgccttcctccctctgccttccttccccacggccggccgcctcctcgcccgcccgcccgcagccgaggagccgaggccgccgcggccgtggcggcggagccctcagccatggcctcgggcgacaccctctacatcgccacggacggctcggagatgccggccgagatcgtggagctgcacgagatcgaggtggagaccatcccggtggagaccatcgagaccacagtggtgggcgaggaggaggaggaggacgacgacgacgaggacggcggcggtggcgaccacggcggcgggggcggccacgggcacgccggccaccaccaccaccaccatcaccaccaccaccacccgcccatgatcgctctgcagccgctggtcaccgacgacccgacccaggtgcaccaccaccaggaggtgatcctggtgcagacgcgcgaggaggtggtgggcggcgacgactcggacgggctgcgcgccgaggacggcttcgaggatcagattctcatcccggtgcccgcgccggccggcggcgacgacgactacattgaacaaacgctggtcaccgtggcggcggccggcaagagcggcggcggcggctcgtcgtcgtcgggaggcggccgcgtcaagaagggcggcggcaagaagagcggcaagaagagttacctcagcggcggggccggcgcggcgggcggcgggcggcgccgacccggcgccaacaagaagtgggagcagaagcaggtgcagatcaagaccctggagggcgagttctcggtcaccatgtggtcctcagatgaaaaaaaagatattgaccatgagacagtggttgaagaacagatcattggagagaactcacctcctgattattcagaatatatgacaggaaagaaacttcctcctggaggaatacctggcattgacctctcagatcccaaacaactggcagaatttgctagaatgaagccaagaaaaattaaagaagatgatgctccaagaacaatagcttgccctcataaaggctgcacaaagatgttcagggataactcggccatgagaaaacatctgcacacccacggtcccagagtccacgtctgtgcagaatgtggcaaagcttttgttgagagttcaaaactaaaacgacaccaactggttcatactggagagaagccctttcagtgcacgttcgaaggctgtgggaaacgcttttcactggacttcaatttgcgcacacatgtgcgaatccataccggagacaggccctatgtgtgccccttcgatggttgtaataagaagtttgctcagtcaactaacctgaaatctcacatcttaacacatgctaaggccaaaaacaaccagtgaaaagaagagagaagacccttctcgaccacggggaagcatcttccagaagtgtgattgggaataaatatgcctctcctttgtatattatttctaggaagaattttaaaaatgaatcctacacacctaagggacatgttttgataaagtagtaaaaattaaaaaaaaaaaactttactaagatgacattgctaagatgctctatcttgctctgtaatctcgtttcaaaaacacagtgtttttgtaaagtgtggtcccaacaggaggacaattcatgaacttcgcatcaaaagacaattctttatacaacagtgctaaaaatgggacttcttttcacattcttataaatatgaagctcacctgttgcttacaatttttttaattttgtattttccaagtgtgcatattgtacacttttttggggatatgcttagtaatgctacgtgtgatttttctggaggttgataactttgcttgcagtagattttctttaaaagaatgggcagttacatgcatacttcaaaagtattttcctgtaaaaaaaaaaaagttatataggttttgtttgctatcttaattttggttgtattctttgatgttaacacattttgtataattgtatcgtatagctgtattgaatcatgtagtatcaaatattagatgtgatttaatagtgttaatcaatttaaacccattttagtcactttttttttccaaaaaaatactgccagatgctgatgttcagtgtaatttctttgcctgttcagttacagaaagtggtgctcagttgtagaatgtattgtaccttttaacacctgatgtgtacatcccatgtaacagaaagggcaacaataaaatagcaatcctaaagcaagaatatggcagaacaagatctgtaagcacagtcttattttcttttgttgtccagaatacttataattcttgagcctcccagaaattggaagctaaataaagcaactcaagtttcctttattttgcactcaattacagtgattattgatgaaagcgatgcatggatattttaatacttcctacatgtcctgacttctgaaagagagtaggtaacaggcatcccgagttcaggaactacctcagaacaccccagggccaggttggtcataggctgtgattttagcccccggcaagtgtgagtgaagcatctgtaccaccgcgcaggcttgagcgcctgcgcagggtaaggtgccacctgggcagtgggggcacacagagggaagaccaggcctgtccatcagccgcgtgccttcagaggcagctccagcaggaccttggcttgtctgacaggaaatgcttgtggtcgttggttatttggtttgagagcccttgttcctccatctagtggagtccttattaaatgctagcaatgtggcaattgagtgccagtagcttaatttcatgtttctaaatggacactgggtgcaaatcggcaaggtgattagattattagaaaattctgctcaatgagtacctctcacattgtaacctcttaaatgtacgattataatgttggatcttaggtcaaataacagacttgagaatactttataaactgccatgatacagcaaaatctcatttattcaaagtgcaaaaaaaaa

SEQ ID NO: 45485 - DNA, 1705 bp, Homo sapiens
ttttgtgtgcaatacaaataaaatttttatatttattttttattcctacagagaagaagaaacacattcgtacaagggttcatttcccagtggttaaatgtactgagaaaaatacattaacaaagtaactcaaggatacaactgctgtgaattcaaaagacagactactacaggaaaagtgagtgcacttactttcatattttgcagctgttaatagaagtcttaaacatttaaaatttaactaattcacacaacctccaccaagtatcagtaaataaacttctaaacaataaaaatggataaacatggtcaggttgttaggttaagagctaaaaatttcattttgcttccatggttgcaaccatgagtcttaaggccttcaaagcataaacatcacagaacacctatcacaaaccacaaaccaaccacaggaaaaccctttttatactgtgtatcttctgtatttcattaaatctaataagccatcagttgtaagatgcatcctaattcagagatgtcacaaagtgaaataagtatctctggatcaataaaatatggtatgtatatatacccgagatatgagaggaaactatttaccagtttgaattacttccatactattgtgccaaacaacaattaagtgtcaaaacattgaaattttatgtaggtaagctttttattattgttttctttacaggaacaataatccaaacaaatcttgaaccaatctataaacagaaaacctgttatataaattattatctatttttgcaatacatcaaaatactgtattgatgaaaataaatagataacaaaaaacaatatacatcatttctatgtttgctatcagaccccacaagtatgtttgtttttacaattcattataggtgaaaaacaaactgaaacacaacaggtacgtacaattacgccactgttaaggactgcagattacacgtgttaaagcttttcttaataaaatgggaacacattgctaggtacacagaaacatgattttgccctaaagaacagctgaactgttgagagaagcaagggcttcctagcggccttccagtgtagcagataatattaccctgtgtaacagagtattacagagttttgcattttccaagtctgtaagtctaaccataaacaaaacaaagacaaacccaaacattaagatatactgacaatcttgttcccatatatgatagaatagttctcatacactgttaagattgatttacttttttattaggagcacttctcaggtttttggcatttcacatgtctacactcagtgtccattggctccttctgagagtatccttgaaggttcggtaaattttgcagtgaacaagtaaaaaagggctggtgtaggtaccaaagccaaaaggggcaaatcttgctcaagtttatccactctggaaatggagattattccataggcatgaagtaaccagtggctgaagagaacaataagtcttttctttctgaccagaagatcatagcagttctctatttcagaagcagacatgtacacagccagagtaaccaaagataacactaatataatgtatgggaaggcgtaatataaaaggcctccaccaactgcctgaagcacggttaaaattgggaagaagtaaagtgcagcataaatacttttaaatcgatcagatttccctaacccacatgcaatcttcttcac

SEQ ID NO: 45486 - DNA, 4347 bp, Homo sapiens
tttttttttctccttcctcgcagccgcgccagggagctcgcggcgcgcggcccctgtcctccggcccgagatgaatcctgcggcagaagccgagttcaacatcctcctggccaccgactcctacaaggttactcactataaacaatatccacccaacacaagcaaagtttattcctactttgaatgccgtgaaaagaagacagaaaactccaaattaaggaaggtgaaatatgaggaaacagtattttatgggttgcagtacattcttaataagtacttaaaaggtaaagtagtaaccaaagagaaaatccaggaagccaaagatgtctacaaagaacatttccaagatgatgtctttaatgaaaagggatggaactacattcttgagaagtatgatgggcatcttccaatagaaataaaagctgttcctgagggctttgtcattcccagaggaaatgttctcttcacggtggaaaacacagatccagagtgttactggcttacaaattggattgagactattcttgttcagtcctggtatccaatcacagtggccacaaattctagagagcagaagaaaatattggccaaatatttgttagaaacttctggtaacttagatggtctggaatacaagttacatgattttggctacagaggagtctcttcccaagagactgctggcataggagcatctgctcacttggttaacttcaaaggaacagatacagtagcaggacttgctctaattaaaaaatattatggaacgaaagatcctgttccaggctattctgttccagcagcagaacacagtaccataacagcttgggggaaagaccatgaaaaagatgcttttgaacatattgtaacacagttttcatcagtgcctgtatctgtggtcagcgatagctatgacatttataatgcgtgtgagaaaatatggggtgaagatctaagacatttaatagtatcgagaagtacacaggcaccactaataatcagacctgattctggaaaccctcttgacactgtgttaaaggttttggagattttaggtaagaagtttcctgttactgagaactcaaagggttacaagttgctgccaccttatcttagagttattcaaggggatggagtagatattaataccttacaagagattgtagaaggcatgaaacaaaaaatgtggagtattgaaaatattgccttcggttctggtggaggtttgctacagaagttgacaagagatctcttgaattgttccttcaagtgtagctatgttgtaactaatggccttgggattaacgtcttcaaggacccagttgctgatcccaacaaaaggtccaaaaagggccgattatctttacataggacgccagcagggaattttgttacactggaggaaggaaaaggagaccttgaggaatatggtcaggatcttctccatactgtcttcaagaatggcaaggtgacaaaaagctattcatttgatgaaataagaaaaaatgcacagctgaatattgaactggaagcagcacatcattaggctttatgactgggtgtgtgttgtgtgtatgtaatacataatgtttattgtacagatgtgtggggtttgtgttttatgatacattacagccaaattatttgttggtttatggacatactgccctttcattttttttcttttccagtgtttaggtgatctcaaattaggaaatgcatttaaccatgtaaaagatgagtgctaaagtaagctttttagggccctttgccaataggtagtcattcaatctggtattgatcttttcacaaataacagaactgagaaacttttatatataactgatgatcacataaaacagatttgcataaaattaccatgattgctttatgtttatatttaacttgtatttttgtacaaacaagattgtgtaagatatatttgaagtttcagtgatttaacagtctttccaacttttcatgatttttatgagcacagactttcaagaaaatacttgaaaataaattacattgccttttgtccattaatcagcaaataaaacatggccttaacaaagttgtttgtgttattgtacaatttgaaaattatgtcgggacataccctatagaattactaaccttactgccccttgtagaatatgtattaatcattctacattaaagaaaataatggttcttactggaatgtctaggcactgtacagttattatatatcttggttgttgtattgtaccagtgaaatgccaaatttgaaaggcctgtactgcaattttatatgtcagagattgcctgtggctctaatatgcacctcaagattttaaggagataatgtttttagagagaatttctgcttccactatagaatatatacataaatgtaaaatacttacaaaagtggaagtagtgtattttaaagtaattacacttctgaatttatttttcatattctatagttggtatgacttaaatgaattactggagtgggtagtgagtgtacttaaatgtttcaattctgttatattttttattaagtttttaaaaaattaaattggatattaaattgtatggacatcatttattaattttaaactgaatgccctcaataaggtaatactgaagcacattcttaaatgaagataaattatctccaatgaaaagcatgacatgtgtttcaataggaggaatcttaagttgggctaaattcaaagtgcttgacatcaaaatgttctagagtgattagctactagattctgaatcagacatcacatctgactagagaccagtttctttcgaatgattcttttatgtatgtagatctgttcttctgaggcagcggttggccaactatagcccaaaggccaaatttggacttctttttataaatgcagattgtctatggctgctttcccactactccagcctaaggtaaacagctgcaatagaagccaaatgagaatcgcaaagcccaaaatgtttattaacctgccctttacacaaaatcacacaaaaagtttcctgatctctgttctaagaaaaggagtgtgccttgcatttaaaaggaaatgttggtttctagggaagggaggaggctaaataattgatacggaattttcctcttttgtcttcttttttctcacttaagaatccgatactggaagactgatttagaaaagtttttaacatgacattaaatgtgaaattttaaaaattgaaaagccataaatcatctgttttaaatagttacatgagaaaatgatcactagaataacctaattagaagtgttatcttcattaaatgttttttgtaagtggtattagaaagaatatgtttttcagatggttctttaaacatgtagtgagaacaataagcattattcacttttagtaagtcttctgtaatccatgatataaaataattttaaaatgattttttaatgtatttgagtaaagatgagtagtattaagaaaaacacacatttcttcacaaaatgtgctaaggggcgtgtaaagaatcaaaagaaactattaccaataatagttttgataatcacccataattttgtgtttaaacattgaaattatagtacagacagtattctctgtgttctgtgaatttcagcagcttcagaatagagtttaatttagaaatttgcagtgaaaaaagctatctctttgttcacaaccataaatcaggagatggagattaattctattggctcttagtcacttggaactgattaattctgactttctgtcactaagcacttggtatttggccatctccattctgagcaccaaacggttaacacgaatgtccactagaactctgctgtgtgtcacccttaaatcagtctaaatcttccagacaaaagcaaatggcatttatggatttaagtcattagattttcaactgacattaattaatccctcttgattgattatatcatcaagtatttatatcttaaataggaggtaggatttctgtgttaagactcttatttgtaccctataattaaagtaaaatgttttttatgagtatcccttgttttcccttcttaaattgttatcaaacaatttttataatgaaatctatcttggaaaattagaaagaaaaatggcaaggtatttattgttctgtttgccataatttagaactcacacttaagtattttgtagttttacattcctttttaacccattcagtggagaatgtcagcttttctcccaagttgtatgttaagtctattctaatatgtactcaacatcaagttataaacatgtaataaacatggaaataaagtttagctctattaaaaaaaaaaaaaa

SEQ ID NO: 45487 - DNA, 1722 bp, Homo sapiens
ctatagtacaagccactatccctcctcttagaacctctcgtttcctttccattgtggaaatctatccccaaggaaataacttctcagtgttccatctgctattctactactcctcagggattattcaggccccctcccttccctacacatcaagctcggagatttgcccctacccagggactggcaaattggctttactcaacatgccccgagtcagaaaacaaaaatacctcttagtctaagtagacactttcactggataggtagaggcctttcctacagggtctgagaaggccaccgcagtcatttcttcccttctgtcagacataattcctcagtttagccttcccacctctatacagtctgataacagaccagcctttattagtcaaatcagccaagcagtttttcaggctcttagtattcagtgaaacctttatatcccttacggtcctccgtcttcaagaaaagtagaatggactaaaggtcttttaaaaacacacctcaccaagctcagccaccaacttaaaaaggactggacaatacttttaccactttcccttctcagaattcaggcctgtcctcagaatgctacaaggtacagcccatttaagctcctgtatagacgctcctttttattaggccccagtctcattccagacaccagaccaacttagactgtgcccccaaaaaaacttgtcatccctactatcttctgtctagtcatactcctattcaccgttctcaactactcatacatgccctgctcttgtttacactgccggtttacactgtttctccaagccatcacagctgatatctcctggtgctatccccaaactgccactcttaactcttgaagtaaataaataatctttgctggcaggactatgctgaatctccttaggcactctctaattggatgtcctgggtcgtcccaattcttagtcctttaatacctgtttttctccttctgttattcggactgtgtgtcttctgtttagtttctcaattcatacaaaaccgtatccaggccatcaccaatcattctatatgacaaatgctccttctaacatccccacaatatcaccccttaccacaagacctcccttcagcttaatctctcccactctaggttcccacgctgcccctaatcccacttgaagcagccctgagaaacatcgcccattctctctccctaccacccctcaaaaattttcgccgccccaacacttcaacactattttgttttatttttcttattaatataagaaggcaggaatgtcaggcctctgagcccaagcctgcacgtatacatccagatggcctgaagcaactgaaggatccacaaaagaagtgaaaatagccagttcctgccttaactgatgacattccaccattgtgatttgttcctgctccaccctaactgatcaattgatcttgtgacaatacaccttccccacccttgagaaggtgctttgtaatattctccccacccaccccacgcccgcacccccgcacccttaagaaggtattttgtaatattctctccgccattgagaatgtgctttgtaagatccaccccctgcccacaaaaaattgctcctaactccaccgcctatcccaaacctacaagaactaatgataatcccaccaccctttgctgactctttttggactcagcccacctgcacccaaggtgattaaaaagctttactgatc

SEQ ID NO: 45488 - DNA, 606 bp, Homo sapiens; identical to SEQ ID NO: 10621

SEQ ID NO: 45489 - DNA, 3512 bp, Homo sapiens
ttttttttttttttttttatggctgttatgcttttaatggaagcagatacaaaattcatcaatgcaaaagaatgttttacatactcattaacatagtgattaatgtaaattatattttgacttgtaaaatacagtgtgtttggcctcaagaaactacagagctgcaactcaagataactgggaaaggctccttacattgtttttgcccaccacctttatataatactcctaaatgatatctggggagggaattaaaaaataatacaaagctcttttcagctgtggttcaaaggaactctagtgaagctgtatggccaatgacattttgggaccatgaagtttcccccagaagtatttcccggtaagaggcagttaagaagcttaatagtttccaaagtctggaaagcagcaaagatatcttagagaaaacattataaaccccacttctctcctacacagacattttaaagcatggacgtaactttaaggagactgagaaaacatcagtagttttcacaaagcttcaatgaacaccccaaggcacaagtgttgaaaacggcctgttcactaaaacgtcacttttggaggtacaggtatgctgtgcttgcagtgagaggatgactttatccctacttaaaagcaccaggtgtcaagctcagcttccatttacacaggatgcaccaattatccctatgatagtgactgtttcaagtactatactacatttccaacatgtcttttgcctatttgcttagtcggtactggggttcttttaagccccgtaggtctgtagaatattttaaaaggctagaattacctcaaaaatagtcttgaaataatactgagtccttctaaagagctcactggatattttaataacatttacagaaagacaaaatttgcagtagctgagtttaagtgaagaataatgtagaactaacgtgggctaaaatgtttcataattaatgtcaaaaattgccaagattattaatatatattttggtaatcactattgaccaggttaatttttttgtgcaaaatacactatgtattaatagaacaggaaaataattatttcagaccactaacaaaagaaaacccacagcaagagaagcatctgtagggcaattaaacgttagggaagtttactagctttagaatacatcaatatacttcgataaacaagagtgttttaatgtacttttagtaacgacccaatctaaggagccttggaggcttgtgaaaaagacgtccccacaaagatgctgcatttcctagtgtggggtgaattaaaatacttctgtaagaaggagggaactgaatcaccctcagcatgaataaacagcatttttcttttaaacagtaactcataatctgatgactcactttgctttactagttcaaaattaggcaggagaagaactaagctaattggtcagacccagaaacacaaagatttggcaagctgcagtcactcagctcatgatgtgtgataatcagcagaaaggctgctcaactcttgtccattccttcacatctgtagaggagttcgatataaccacttctctttatcaactttaagctgcatacaggcaaagagatcacaaactgcagggaggccataatggtctggggggaagttatgttcctcctgtagaggtgaattaagtaatacttcctgggccttctttcgaagcagccacttgtcttctccagaagataactggctgaggttgcccatcttctttcctggcaggacccagtcagctgtgttaaaggaacaccaggaagtattcatggggcttttaaacttctgtttgccagctctgtcttcagtaccaggcacttccttgggacttccttctttgtatgggggcctgataagccactccgacaaggggctgttctttatgacttggaaggaatcagcaattctagaaggagtcattgcctttggtgctttagtttgttctattacttcttttctaggacagagccacatattcagggaatctttatgcttctcaggctcaggtttgggttccacaggcatcccatttttatcctttccttctttcttcagaagccacttatacagagcctccttctcacaattctcatcacacacacactctgcaaagcttgtgcagggctcattggctctgcacacctcctctaccttacatgggtcctgatggttctggacaagccaatcctctgtaaccatgctgggggtggacaatggtttcttggcctccaagtggtcattcaggcacttcagattgcccaggttttcaatctccacacctttgggctggtttccctgacagttggtacaggagtcagtcttgacaagccaatcattcacattataggactggaataagagcttaaacttctcactggtttcacgactgccattctcaggcttccgcagcttatgggattcctggggagtcactagccaatctgataggtccatctcatcttgatcaggaagctcttgatctccaaccttttccatttcaatggagaaagaactagtagtggaatggctgttacacttttgataacttgatttttcactcttgaggagccagttttctaagccctttaggtttcccccgacattattgaagaaattgcaggctctggaagaagtctgactgttctccaaggtctgcttttgggtaagccagtcctgggggtcggtgctgggtatgtaaggagcttgataaccactggcaggtttgcttccaaggagccattcgctgaaagggacagctacaataccggatgctgacttctgctctggcatggagatacagcctctcttctccaggaagggcccaatatttgctgaactagcatgagccatcaagtgctcaggaatttgaatggttttgagagacccaaatgtggtgatggtctggcgcagagtaattgtgtcagcttcaaagagcaggacagttgaatcttcaggcttaagggtcaaactgcccagtctctccaggcacacagagacttgattggctagatctttgttttgggtacactccagttgatgagtaagacaattgaactggcccaataacgagtagagctgctgagcctgctgttgaagtgtctcctctttaagctgataaataaggtccacctgttcatacagccatacctcacggcttctaagacattccaggtgacggcttatgcaactgtgaatctgagctttgacctctcgcaagttatctttaatttgctgttcagcccggagaactccaccaatagcaagctccaagtccctccgtgcatcactacacctcaaaaggggttctctattactggagctgccactctggtcttggaaggtattcattctcctcactgctccaggtccgagtgcctctccaggcgatccgaggagaccttgggtggactgagacacggccccacactaacctacggcccaaaggcagagttcaattgtcttactctttaagctgatgtcgacg

SEQ ID NO: 45490 - DNA, 1609 bp, Homo sapiens
gcagctggaagatggcggcgtccgtggtctgtcgggccgctaccgccggggcacaagtgctattgcgcgcccgccgctcgccggccctgctgcggacgccagccttgcggagtacggcaaccttcgctcaggcgctccagttcgtgccggagacgcaggttagcctgctggacaacggcctgcgtgtggcctccgagcagtcctctcagcccacttgcacggtgggagtgtggattgatgttggcagccgttttgagactgagaagaataatggggcaggctactttttggagcatctggctttcaagggaacaaagaatcggcctggcagtgccctggagaaggaggtggagagcatggggggcccatcttaatgcctacagcacccgggagcacacagcttactacatcaaggcgctgtccaaggatctgccgaaagctgtggagctcctgggtgacattgtgcagaactgtagtctggaagactcacagattgagaaggaacgtgatgtgatcctgcgggagatgcaggagaatgatgcatctatgcgagatgtggtctttaactacctgcatgccacagcattccagggcacacctctagcccaggctgtggaggggcccagtgagaatgtcaggaagctgtctcgtgcagacttgaccgagtacctcagcacacattacaaggcccctcgaatggtgctgggcagcagctggaggagtggagcaccagcaactgttagacctcgcccagaagcacctcggtgggcatcccatggacatatgcagaggacgctgtgcccactcttactccatgccgcttcactggcagtgagatccgccaccgtgatgatgctctaccttttgcccacgtggccattgcagtagagggtcctgggctgggccagcccggacaatgtggccttgcaagtggccaatgccatcatcggccactatgactgcacttatggtggtggcgtgcacctgtccagcccactggcttcaggtgctgtggccaacaagctatgccagagtttccagaccttcagcatctgctatgcagagacgggcttgctgggtgcacactttgtctgtgaccgaatgaaaatcgatgacatgatgttcgtcctgcaagggcagtggatgcgcctgtgtaccagtgccacggagagtgaggtggcccggggcaaaaacatcctcagaaatgccctggtatctcatcttagatggcactactcctgtgtgtgaggacatcggacgcagcctcctgacctatggccgccgcatccccctggctgaatgggaaagccggattgcggaggtggatgccagtgtggtacgtgagatctgctccaagtacatctatgaccagtgcccagcagtggctggatatggccccattgagcagctcccagactacaaccggatccgtagcggcatgttctggctgcgcttctaggcgggaagcctatgtaagcaagagggcagggccggggtttgtggtcccccccccaccacaaacacagcacttcggctcctctaacctgtgccacaggtgaccaccaataaaatcctctgctgagaagtgaaaaaaaaaaaaaaaaaaacc

SEQ ID NO: 45491 - DNA, 2821 bp, Homo sapiens
ttttttttttttttctggctaacagaattttattgttaaatcacagaaactttagtgcaaaacaaaaatcacgaagtccatttaatagcaacttcatgtcctgctggctttgcttgctgtctcctggcaaccagaagtggacagaagcgtgggtgcccaagtgggccacagacagcttccaacccccacaccccagcatccaatccacacccagcagacccttcggcatgccgccctctaccaggaagccagaggcctaggagctcgccatccatatttatttgaaaaggtcaaaaggagcatctatgagacaacgggaggggtgcaggctgaaagcagcgccttcaacagcccagggacatgtaggcaacacgagcaggcacagcgcggccaccactgtccacacgctcacacaagccaggcccgcagggcccttcggagagctagcaggttacattcaggcagatggccctcttcccacccaaacccacagaaccccaaacaaggcatcaccaggaaagacacggggaaagccaaatcacagttgaaccagggacagagaacccttggcccccacttgatgtccccaagccaccagcagctgctttccaaaatccctatgctatttacagtgggaattacatcattttaaaaagcctgattattccaggcttctaatctttcatataaaactgcctttgttttgctgctttgttcaactgagaggcccaggaaagcggggagggtccctgatcagggcaggaggccacctcagaagcccaggcccaccagtgcccaagcacatgtcagggctcagaacaaggcctcaaccaagagggttgatggcctccagtcaagaaactgtggctcatgccagcagagctctctcctcctccagcaggcgccatgcaagggcaggctaaaagacctccagtgcatcaacatccatctagcagagagaaaaggggcactgaagcagctatgtctgccaggggctaggggctaggggctcccttgcagacagcaatgctacaataaaggacacagaaatgggggaggtgggggagccctatttttataacaaagtcaaacagatctgtgcgttcattcccccagacacacaagtagaaaaaaaccaatgctgtggtttctgccaagatggaatattcctcctcctagttccacacatggcgtttgcaatgctcgacagcattgcactgggctgctgtctctggtgttctggcaccagtagcttgggcccccatatacacttctcagttcccaacaagggcttatgggccgaggggcaggctccaattttcaagcacacgaaggaaggatccatcacctccaccaggatctcgatcagcacgggctcgtactctgccacaaactgatcagcactgcttctggtaagggtctggcaggaagctgcagcctttctcaagagcagcccaggatctcctgcttggtgctgtttttctcccaggttgcgatccaaataacccaccagcttcttgcacacttcgcagaagccaccgtcctttggctgagtcacgtgaacggtcagtgcaggcagccgcgtgccagagcagaggtgcagcatgctgcacaccagctcagggctgacctcctccagcaggatggacaggatggagctgccgtacgtgtccaccacctcctggcactcttccgacagggacttcggcagcttcgagcacattttgtcaaaagcgtcgagtatttctttctcagtcttgttgttgtcaatcagcttggtcacctccttcaccaggaattcacacacctcacagtaaacatcagactttgctgggacctcgtgcttcttaatgggctccaccagttccagggcagggatgacattcttggaggccactttggcggggaccagagtctgcatgggcatctctttcacctcatcacagaacccaaccagcgcacagatctccttgggttgctgatcctgcatgtgcatcatcatctggatagcaatttcagaatactggctgatatagttcttgcatatgtcggccatgcccagggccccaggcggtcacactcctccttgacatgttccaccaaggcctggacaaaggtggagttggtccgtacagcagtctggatgtcagtcaccatctgaatgcagtcctggcaaacgtccccattatcctttggctggggcttgctgcgggggccgtcctgagggtagaggaggagagggatgttggccatgaagggggccacccacctcagtcatgtccagctctgggatcttattggactccagctgcttctggtgattcagctctgctaggtgcttctggagagactcgcagaggttgagagcagagcacacctccccaggacggctcatttctcctttaatgatgtccaggatgacagggaggtaggagtccactatctccttgcatgaagcagacatgttcggtttcggaagccagtcacaggtcttctccaagtaaacaaggatctcctcctcagtggcattgtccttcagcatatcaccagctgcggtgacaacgtctttgcatatgtcgcagggaagggatttcactgttggcttgttccaaacggtctgcaggcagtgcttcactgccccgcagtcggacgccgtcttcacattctggcaccacactgccgagcccctggtgcattctttcagtccaaggaccgggccggctagagccgcgcccaggaggctggccaggaggaagagggcgtacatagcgccgtctgactccgcagtctgcaatgcggagcgtcagctgatcccccgcag

SEQ ID NO: 45492 - DNA, 1056 bp, Homo sapiens
gtattactggatgtgttttgtgctctacatggaccaagagaaaaatgtgttgaaattctgaggagtggccacttgttagctatctcaccaggtggagttcgagaagccctaattagtgatgaaacttataacatcgtatggggtcatcgcagaggctttgctcaggttgcaattgatgcaaaagtgcccattattcctatgtttacacaaaatattcgagaaggatttagatcacttggaggaacaaggttatttaggtggctttatgaaaaattccgctatccatttgctccaatgtatggaggttttccagtgaagttacggacctatttaggcgaccccattccgtatgacccacagataacagcggaagaattagctgaaaagaccaagaatgctgttcaagctttgattgataagcaccaaagaataccaggaaacattatgagtgctttgttagaacgttttcattgataacaaagggtcaactagaagatgatttagtacatttatattaaatgtttgtatctaaggtactgtcttctgaattttgtaggtcctataattagtattttttaaaaaaatcagttaatagcatctttcacagaattcgtttctttaaaatagtcaattttgtttttgcaattgtgtcaaatactaacaaattacacacctagtaattcagaaaaagatgtcttatttgtaaattcctaacaatttatgctaaacatatagattcttaagtttattaataacagcagtttaggttaaacaaacattcctggataatgcgttaaatttctgtatctgtcgccctgagctgattttgaaagatggtataagctaggggttagtatagttgtttaagttagaaaaaacatgctgttgtctgcccctcattcccttcatgaccttgggcaagtcacgtaatgtttttgtgcctcaacaattcactttttaaaaacatgatcgtatgatgaatgatattattttgttatttatatttactgtgattgataactgttgaaccaaaataataaaataattaatttaaac

SEQ ID NO: 45493 - DNA, 1089 bp, Homo sapiens
ctgaaggcaataagctgggctcaccgctgcagcagagttctgtgctagccgggcataggggcgagagaaggcccagaggcgacgtcagagagaagcaactgcgccccggtgaagagaagctcgcccatcaccggctgggagccagctttcagtgaagatgggcagggccagaactgttgcttgactccaacatctgcctctgggtggtcctacccatcgttatcactcttcgtagacatgatccgccactacgtgtccatcctgctggagagcgacaagaagctcacccagggaacaagtatctgacaggggacgaggcacccacagtccctctcccataagcctgccaagaagattgatgtggcccgtgtaacgtttgatctgtacaagctgaacccacaggacttcattggctgcctgaacgtgaaggcgactttttatgatacatactccctttcctatgatctgcactgctgtggggccaagcgcatcatgaaggaagctttccgctggggccctcttcagcatgcaggccacaggccacgtactgcttggcacctcctgttacctgcagcagctcctcgatgctacggaggaagggcagccccccaagggcaaggcctcatccctcatcccgacctgtctgaagatactgcagtgaaagcccaagccctagctttccccagtgaaggactagactaggggccccacgctcaactggtagtggccacaagcctggcagctgtagagccgctaacctcccgacacctccctcaccacacaggaccctgagtgaggaggaggggctggaaacctgggatgggttggccaaaggagaacctcaggctcctggcctggcccagctccttcctgcccaaggcagcttagcccatccagactggtcctgaagtctgtccctccattggcatgaagtctgccccttagcaatccggcctcgcaggctgtactttcatggtgctctctaccttctggcccccatcccggaacattcgtgagtgaattcgcaagcgcactagcatgtgatattagggagtttgcaataaattattgatgctgatgtaaaaaaaa

SEQ ID NO: 45494 - DNA, 1103 bp, Homo sapiens
tttttttttgaaaaaataaaatttactgtttatttctttgttacacaaaggtggtccaagacatcttagtccatctcctatgtccttttggccataattacacacacaataatggcaagctagattaggagtctagctcagggtcaagtttttccactttaatgactatctctggagctaaagcggcacgaccagcttgttggttctctgcctctgactccgacaacacttcttcctttatttttacaggcttattactggcctcctcctcttcatctgaagactcatcgagctcccattcatcatctatgtccatttcaaatactctcacatgacgaagatttgagcttaacacacaggacacttttcgaaaaccattcccagcaacatactgtgctttcatactttccagtaatctccagtgcttctcaaaatgcatggtacgggtgggaatagcactacactgttcatctagccttgtagaataagtcccagtgaactgatattctgcagaatcttcactgttatatactaaagacaaaggcagctggaccaagagtctatctcttccttcacgtcctacagtgtctttaagaactactgttacagtttcatcatcataaaactgtgcatctaaacaactgtagatgcttcttctgactttttctgttgtggcatatgtaaagctcccaaatttaatagcaattagtccattactcacagattgagaaatatcagtatgtctccttaagatgcacattttataaagtgaatcttctagaatagtaaaaagaagataatgtagatttgaagttttattattccacagaaaaggaaatttgaacaatctacgtgtagaatcctcacttctggtatctctatacaatggaatacagattgcttgattcatcgattttccaattacatctgctggcttttgcaaacactgatcaataatattctccatccgccttttcacaaaatgcaatgattttcgaggataataaggaaacagcaaaggactttctttaaggtggctgctattttgaagaaagtcataccactggtttccttctgtgttagggggtgacacaagatcatca

SEQ ID NO: 45495 - DNA, 2083 bp, Homo sapiens
tctatggtggggccgcgttagtggctgcggctccgcgggactccagggcgcggctgcgaggtggcggggcgccccgcctgcagaaccctgcttgcagctcaggtttcggggtgcttgaggaggccgccacggcagcgcgggagcggaagatgttggagctgaggcaccggggaagctgccccggccccagggaagcggtgtcgccgccacaccgcgagggagaggcggccggcggcgaccacgaaaccgagagcaccagcgacaaagaaacagatattgatgacagatatggagatttggattccagaacagattctgatattccggaaattccaccatcctcagatagaacccctgagattctcaaaaaagctctatctggtttatcttcaaggtggaaaaactggtggatacgtggaattctcactctaactatgatctcgttgtttttcctgatcatctatatgggatccttcatggctgatgcttcttgttctgggcatccaagtgaaatgcttccatgaaattatcactataggttatagagtctatcattcttatgatctaccatggtttagaacactaagttggtactttctattgtgtgtaaactactttttctatggagagactgtagctgattattttgctacatttgttcaaagagaagaacaacttcagttcctcattcgctaccatagatttatatcatttgccctctatctggcaggtttctgcatgtttgtactgagtttggtgaagaaacattatcgtctgcagttttatatgttcgcatggactcatgtcactttactgataactgtcactcagtcacaccttgtcatccaaaatctgtttgaaggaatgatctggttcattgtccccatatcttgtgtgatctgtaatgacatcatggcctatatgtttggctttttctttggtcggaccccactcatcaagctgtccccgaagaagacctgggaaggcttcattgggggcttctttgctactgtggtgtttggccttctgctgtcctatgtgatgtccgggtacagatgctttgtctgccctgtggagtacaacaatgacaccaacagcttcactgtggactgtgagccctcggacctgtttgcgcctgcaggagtacaacattcctggggtgatccagtcagtcattggctggaaaacggtccggatgtaccccttccagattcacagcatcgctctctccacctttgcctcgctcattggcccctttggaggattcttcgcaagtggattcaaacgagcctttaaaatcaaagactttgccaataccattcctggccatggaggcatcatggatcgctttgattgtcagtatttgatggcaactttgtcaatgtatacatcgccagttttataaggggcccaaatcccagcaaagtgctacagcagttgttggtgcttcaacctgaacagcagttaaatatatataaaaccctgaagactcatctcattgagaaaggaatcctacaacccaccttgaaggtataactggatccagagagggaaggactgacaagaaggaattattcagaaaaacactgacagatgttttataaattgtacagaaaaatagttaaaaatgcaataggttgaagttttggagatatgtttctctctgaaattactgtgaatatttaacaaacacttacttgatctatgttatgaaataagtagcaaattgccagcaaaatgtcttgtaccttttctaaagtgtattttctgatgtgaacttccttccccttacttgctaggtttcataatttaaaagactggtatttaaaagagtcaaacactataaaatgagtaagttgacgatgttttaagattgcacctggcagtgtgcctttttgcacaaatatttacctggcagtgtgcctttttgcacaaatatttacttttgcacttggagctgcttttaattttagcaaaatgttttatgcaaggcacaataggaagtcagttctcctgcacttcctcctcatgtagtctggagtactttctaaagggcttagttggatttaaaaaaaaaaaaaaa

SEQ ID NO: 45496 - DNA, 7754 bp, Homo sapiens
atagatttttgacaaactaaagaaatctaacgcacactacaacctgcagaatgcatttaatctggcagaacagcacctcggcctcactaaactgttggaccccgaagacatcagcgtggaccatcctgatgagaagtccataatcacttatgtggtgacttattaccactacttctctaagatgaaggccttagctgttgaaggaaaacgaattggaaaggtgcttgacaatgctattgaaacagaaaaaatgattgaaaagtatgaatcacttgcctctgaccttctggaatggattgaacaaaccatcatcattctgaacaatcgcaaatttgccaattcactggtcggggttcaacagcagcttcaggcattcaacacttaccgcactgtggagaaaccacccaaatttactgagaaggggaacttggaagtgctgctcttcaccattcagagcaagatgagggccaacaaccagaaggtctacatgccccgggaggggaagctcatctctgacatcaacaaggcctgggaaagactggaaaaagcggaacacgaaagagaactggctttgcggaatgagctcataagacaggagaaactggaacagctcgcccgcagatttgatcgcaaggcagctatgagggagacttggctgagcgaaaaccagcgtctggtgtctcaggacaactttgggtttgaccttcctgcagttgaggccgccacaaaaaagcacgaggccattgagacagacattgccgcatacgaggagcgtgtgcaggctgtggtagccgtggccagggagctcgaggccgagaattaccacgacatcaagcgcatcacagcgaggaaggacaatgtcatccggctctgggaatacctactggaactgctcagggcccggagacagcggctcgagatgaacctggggctgcagaagatattccaggaaatgctctacattatggactggatggatgaaatgaaggtgctagtattgtctcaagactatggcaaacacttacttggtgtggaagacctgttacagaagcacaccctggttgaagcagacattggcatccaggcagagcgggtgagaggtgtcaatgcctccgcccagaagttcgcaacagacggggaaggttacaagccctgtgacccccaggtgatccgagaccgcgtggcccacatggagttctgttatcaagagctttgccagctggcggctgagcgcagggcccgtctggaagagtcccgccgcctctggaagttcttctgggagatggcagaagaggaaggctggatacgggagaaggagaagatcctgtcctcggacgattacgggaaagacctgaccagcgtcatgcgcctgctcagcaagcaccgggcgttcgaggacgagatgagcggccgcagtggccactttgagcaggccatcaaggaaggcgaagacatgatcgcggaggagcacttcgggtcggagaagatccgtgagaggatcatttacatccgggagcagtgggccaacctagagcagctctcggccattcggaagaagcgcctggaggaggcctccctgctgcaccagttccaggcagatgctgatgacattgatgcctgggatgctggacatcctcaagattgtctccagcagcgacgtgggccacgatgagtattccacacagtctctggtcaagaaacacaaggacgtggcggaagagatcgccaattacaggcccacccttgacacgctgcacgaacaagccagcgccctcccccagggagcatgccgagtctccagacgtgaggggcaggctgtcgggcatcgaggagcggtataaggaggtgggcagagctgacgcggctgcggaagcaggcactccaggacactctggccctgtacaagatgttcagcgaggctgatgcctgtgagctctggatcgacgagaaggagcagtggctcaacaacatgcagatcccagagaagctggaggatctggaggtcatccagcacagatttgagagcctagaaccagaaatgaacaaccaggcttcccgggttgcagtggtgaaccagattgcacgccagctgatgcacagcggccacccaagtgagaaggaaatcaaagcccagcaggacaaactcaacacaaggtggagccagttcagagaactggttgacaggaagaaggatgccctcctgtctgccctgagcatccagaactaccacctcgagtgcaatgaaaccaaatcctggattcgggaaaagaccaaggtcatcgagtccacccaggacctgcgcaatgacctggctggcgtcatggccctgcagcgcaagctgaccggcatggagcgggacttggtggccattgaggcaaagctgagtgacctgcagaaggaggcggagaagctggagtccgagcaccccgaccaggcccaggccatcctgtctcggctggccgagatcagcgacgtgtgggaggagatgaagaccaccctgaaaaaccgagaggcctccctgggagaggccagcaagctgcagcagttcctacgggacttggacgacttccagtcctggctctctaggacccagacagcgatcgcctcggaggacatgccaaacaccctgaccgaggctgagaagctgctcacgcagcacgagaacatcaagaacgagatcgacaactacgaggaggactaccagaagatgagggacatgggcgagatggtcacccaggggcagaccgatgcccagtacatgtttctgcggcagcggctgcaggccctggacactggatggaacgagctccacaagatgtgggagaacagacaaaatctcctatcccagtcacatgcctaccagcagttcctcagagacacgaagcaagccgaagcctttcttaacaaccaggagtatgttctggctcacactgaaatgcctaccaccttggaaggagctgaagcagcaattaaaaagcaagaggacttcatgaccaccatggacgccaatgaggagaagatcaatgctgtggtggagactggccggaggctggtgagcgatgggaacatcaactcagatcgcatccaggagaaggtggactctattgatgacagacataggaagaatcgtgagacagccagtgaacttttgatgaggttgaaggacaacagggatctacagaaattcctgcaagattgtcaagagctgtctctctggatcaatgagaagatgctcacagcccaggacatgtcttacgatgaagccagaaatctgcacagtaaatggttgaagcatcaagcatttatggcagaacttgcatccaacaaagaatggcttgacaaaatcgagaaggaaggaatgcagctcatttcagaaaagcctgagacggaagctgtggtgaaggagaaactcactggtttacataaaatgtgggaagtccttgaatccactacccagacaaaggcccagcggctctttgatgcaaacaaggccgaacttttcacccagagctgtgcagatctagacaaatggctgcacggcctggagagtcagattcagtctgatgactatggcaaacacctgaccagtgtcaatatcctgctgaaaaagcaacagatgctggagaatcagatggaagtgcggaagaaggagatcgaagagctccaaagccaagcccaggccctgagtcaggaagggaagagcaccgacgaggtagacagcaagcgcctcaccgtgcagaccaagttcatggagttgctggagcccttgaacgagaggaagcataacctgctggcctccaaagagatccatcagttcaacagggatgtggaggacgagatcttgtgggttggagagaggatgcctttggcaacttccacggatcatggccacaacctccagactgtgcagctgttaataaagaaaaatcagaccctccagaaagaaatccaggggcaccagcctcgcattgacgacatctttgagaggagccaaaacatcgtcactgacagcagcagcctcagcgctgaggccatcagacagaggcttgccgacctgaagcagctgtggggtctcctcattgaggagacagagaaacgccacaggcggctggaggaggcgcacagggcccagcagtactactttgacgctgctgaggccgaagcctggatgagcgagcaggagctgtacatgatgtcagaggagaaggccaaggatgagcagagtgctgtctccatgttgaagaagcaccagatcttagaacaagctgtggaggactatgcagagaccgtgcatcagctctccaagaccagccgggccctggtggccgacagccatcctgaaagtgagcgcattagcatgcggcagtccaaagtggataaactgtacgctggtctgaaagaccttgctgaagagagaagaggcaagctggatgagagacacaggttattccagctcaaccgggaggtggacgacctggagcagtggatcgctgagagggaggtggtcgcagggtcccatgaactgggacaggactatgagcatgtcacgatgttacaagaacgattccgggagtttgcccgagacaccgggaacattgggcaggagcgcgtggacacggtcaatcacctggcagatgagctcatcaactctggacattcagatgccgccaccatcgctgaatggaaggatggcctcaatgaagcctgggccgacctcctggagctcattgacacaagaacacagattcttgccgcttcctatgaactgcacaagttttaccacgatgccaaggagatctttgggcgtatacaggacaaacacaagaaactccctgaggagcttgggagagatcagaacacagtggagaccttacagagaatgcacactacatttgagcatgacatccaggctctgggcacacaggtgaggcagctgcaggaggatgcagcccgcctccaggcggcctatgcgggtgacaaggccgacgatatccagaagcgcgagaacgaggtcctggaagcctggaagtccctcctggacgcctgtgagagccgcagggtgcggctggtggacacaggggacaagttccgcttcttcagcatggtgcgcgacctcatgctctggatggaggatgtcatccggcagatcgaggcccaggagaagccaagggatgtatcatctgttgaactcttaatgaataatcatcaaggcatcaaagctgaaattgatgcacgtaatgacagtttcacaacctgcattgaacttgggaaatccctgttggcgagaaaacactatgcatctgaggagatcaaggaaaaattactgcagttgacggaaaagaggaaagaaatgatcgacaagtgggaagaccgatgggaatggttaagactgattctggaggtccatcagttctcaagagacgccagtgtggccgaggcctggctgcttggacaggagccgtacctatccagccgagagataggccagagcgtggacgaggtggagaagctcatcaagcgccacgaggcatttgaaaagtctgcagcaacctgggatgagaggttctctgccctggaaaggctgactacattggagttactggaagtgcgcagacagcaagaggaagaggagaggaagaggcggccaccttctcccgagccgagcacgaaggtttcagaggaagccgagtcccagcagcagtgggatacttcaaaaggagaacaagtttcccaaaacggtttgccagctgaacagggatctccacggatggcagaaacggtggacacaagcgaaatggtcaacggcgctacagaacaaaggacgagctctaaagagtccagccccatcccctccccgacctctgatcgtaaagccaagactgccctcccagcccagagtgccgccaccttaccagccagaacccaggagacaccttcggcccagatggaaggcttcctcaatcggaaacacgagtgggaggcccacaataagaaagcctcaagcaggtcctggcacaatgtttattgtgtcataaataaccaagaaatgggtttctacaaagatgcaaagactgctgcttctggaattccctaccacagcgaggtccctgtgagtttgaaagaagctgtctgcgaagtggcccttgattacaaaaagaagaaacacgtattcaagctaagactaaatgatggcaatgagtacctcttccaagccaaagacgatgaggaaatgaacacatggatccaggctatctcttccgccatctcctctgataaacacgaggtgtctgccagcacccagagcacgccagcatccagccgcgcgcagaccctccccaccagcgtcgtcaccatcaccagcgagtccagtcccggcaagcgggaaaaggacaaagagaaagacaaagagaagcggttcagcctttttggcaaaaagaaatgaactcctttccttcacctcctgcccttctcttaccttttcagtgaaattccagcatgcaagctcagaaccaacacattactctctgtgcctaatgttcctcaatgtggttgatttttttttttttttaatttatagagcatttcggggggggtgggggaaacacacctaaacactttatctccaagttacaaaagtttgaggtgcagagggaaggccagattttttttttaatgaaattatatagattagatctcagtatttaaactgttcctcaattttgtgaggctgtgttggaaataacccgcctctagtgctgttggtatgcaaggcagcggtgcttaatcaatatttcctgtgctcaccagaggcaaaatgtaccaatatcctgacaccattctctctccatttacttctggtggttaccctgactcttgactcttagaagtgcccgagatggggctaacctttattaaacagatcgcatattatgatcttgctgcagccacagtgcagctccacattaactctacagaccaaaccatttgtatctggcatcacttactaacacacgacatgcggcttttctgcatcaactgctatgacggttaagaatgtcagtatacaagaaggaatagaaaactgatactgttttaaataatctgtaatttcaatttttttttttttttgctgaaatacattatattgtacgtttgagataattctagtacaaagtataataaaactagatgtataataaaccctttaaatcattggtaagtgtaccaagtggtggaactgaagcatttactggacaaagtaatgttactctaatggttacttgctcgtgcgttgcccacactgtgttataatttgcttcatttccttgctatttgatacatagtgtgcatttctctgtcactgtaactattgtaatgacaaattttcatcttactgcacaatcaaaatgacattgataggaatgaactccagaggctgggcctgaacagggaggtggtcgctcaggcctggtgctcagtcgtacgacctgtacctctcaacttttgccctatctgttaaatatatgctatgtcattaaatgcttttaaatctagcacggtgactagttgttgttcttcctctgtctgcgtgtgcatgcccagtagggaaactgcaaagggagaaatgacaaacaagaaacattttacaaccagtctgggctcacttttgcattttttatgcatgtctggtgcacaagctttgaaaactacagcaaacagtaataaatgtgactgttttgtagttataaaaaaaa

SEQ ID NO: 45497 - DNA, 338 bp, Homo sapiens
gctgtgtccctgaagttccatattttatctttatgcttgtgttatgttttagtgtctataatgttgtggtgggaatcatttcatttggtttaaaagagtttgccttggaaaaactgaattaaccttcataaatacattttgagagatttcagtgtgagtaattttctggacataatattattgtataaaatatcaaaatggtgggccaggcgtggtagctcacgcctgtaattccagcactttgggaggctgaggcgggtgaatcacgaggtcaggaattcgagaccagcctggccaacatggtcaaaacccgctctactaaaaatacaaaaaattag

SEQ ID NO: 45498 - DNA, 3455 bp, Homo sapiens
  misc_feature (1)...(3455): n = a,t,c or g
gtgggctggctgcagtctgtctgagggcggccgaagtggcctggctcatttaagatgaggcttctgctgcttctcctagtggcggcgtctgcgatggtccggagcgaggcctcggccaatctgggcggcgtgcccagcaagagattaaagatgcagtacgccacggggccgctgctcaagttccagatttgtgtttcctgaggttataggcgggtgtttgaggagtacatgcgggttattagccagcggtacccagacatccgcattgaaggagagaattacctccctcaaccaatatatagacacatagcatctttcctgtcagtcttcaaactagtattaataggcttaataattgttggcaaggatccttttgctttctttggcatgcaagctcctagcatctggcagtggggccaagaaaataaggtttatgcatgtatgatggttttcttcttgagcaacatgattgagaaccagtgtatgtcaacaggtgcatttgagataactttaaatgatgtacctgtgtggtctaagctggaatctggtcaccttccatccatgcaacaacttgttcaaattcttgacaatgaaatgaagctcaatgtgcatatggattcaatcccacaccatcgatcatagcaccacctatcagcactgaaaactcttttgcattaagggatcattgcaagagcagcgtgactgacattatgaaggcctgtactgaagacagcaagctgttagtacagaccagatgctttcttggcaggctcgttgtacctcttggaaaacctcaatgcaagatagtgtttcagtgctgggcatattttggaattctgcacattcatggagtgcaataatactgtatagctttcccccacctcccacaaaatcacccagttaatgtgtgtgtgtgtgttttttttaaggtaaacattactacttgtaactttttttcttagtcatatttgaaaaagtagaaaattgagttacaatttgattttttttccaaagatgtctgttaaatctgttgtgcttttatatgaatatttgttttttatagtttaaaattgatcctttgggaatccagttgaagttcccaaatactttataagagtttatcagacatctctaatttggccatgtccagtttatacagtttacaaaatatagcagatgcaagattatgggggaaatcctatattcagagtactctataaatttttgtgtatgtgtgtatgtgcgtgtgattaccagagaactactaaaaaaaccaactgctttttaaatcctattgtgtagttaaagtgtcatgccttgaccaatctaatgaattgattaattaactgggcctttatacttaactaaataaaaaactaagcagatatgagttaaatttaaaagtttcaatttattgctcagtgtacctgttaacattatatttaacaattgcttaaatttttgtttttgatttatggataatttcttaagagtacacactttagatacacaaataatcgttcatttaccatctttaggatcattgaaactcatctcactaaagaaagttcacttgaacctctttatagcattgatactaggtgaacagaaattacctgactaataatttgtctaacatcatatatcagaattttattgtatatgatgaacaaaacttaaaattttttaaatttaattcttaaatactgtttcagagttctaaaaaggcagttttttaaaaaacttaagttgataaaaactgtaagaataatttagcagaaatagaaccagaatgtagaagagtagtcatgtaacagcagtaataacatacttcagcttccatataggaatagaagtggtagagccaaaagtgatttaggaaaagttataaggtacaggttgagtatcccttttccaaaaatgcttgggacaagaagtatttcagatttcataatttttttcaaagnnnnnnnnnnnnnnnnnnnnnnnnnnnnnnnnnnnnnnnnnnnnnnnnntctgaaatgttccnnnnnnnnnnnnnnnnnnnnnnnnnnnnnnnnnnnnnnnnnnnnaacattgagtccacttaacacttaggtgttagaagacctaactttctgtaacaattaaccttatactttgtttgtcatcgaatatttgttgaatgcatgtcaggtaatggtcttgattgtgatagcttcaaggtgggaacatactgtaatctccagatgctagggaagttagtctaataattcactgcagaaaattgattaagtggctgtccttttaattaagagtgtggagtcataaacttaagttcttcatatagtgacaagagtccttagagattgttattcaagttccttagaaattgttatttaggtataatatcatcttgtctttgactagagcttgaaaccttgttatctggattgtgtacccactcccaaattccctgccttctgcaagttgaatgtcttgctgaatgtgtctaggggttcatcttcagtaatcgacattccactagtgccatagttaacttcatgacatgtagacattcaaaacttgagccttggatgttcctgtggacctgacagttaaaaatataaagaacctaggattcaattccaactttctctgtttgccttgggttgaataacttatcttttggagaatagctttaagtggcttagacactgataaaattcagctgtgttgttgacgctcatctcttttgtcttacgcttagcccatatttaaatcttgaatttaatagagtctagtgaaaaaaatgagtggggaagaatgaatataaaagtaataatataaggaaaaagggaaagtaaactatttagaatgtagttttgttatattcccagcatttcaatatttattagttacttgtaaattactgtggctgtgtagtttataaatgtctgtgcactatattaattagaagaccatagaacatgccagcaggttggctaatgctatgggggtttttaccacagttgccattgtggaagaaattatttggtacattaataaaaaaagttggtaaaacatggttttatacctcagtgtataagatgtgcaagacaaatatgcttatttccttttctagaatataagtgatattatttgcttatgacactaacactattaatgaccaggagtcaatccagccctttacagctatcaaaatataatgagatccccaatgatgattcttttttactttgaatgttaattagtttgggactttgattggctggcaaacattttatcattgtcagaatttaatttagatttcaaaaatagcttacaggattttaaacatggtgtggtattctaaagccttttttttaaaaaaagagatctttttgagagaaacaaatgaggattgtaaagtttggggacttacctctgtagcattgtgaaaataaactttgatt

SEQ ID NO: 45499 - DNA, 1923 bp, Homo sapiens
cggacgcgtgggagcacggtgagccacagtctgttggtagaatttggcgtcttgatagttgagaaaatggcgatgacactgttggaagactggtgccgggggatggatgtgaactcccagagagctctgttagtctggggcatcccagtgaactggtgatgaggctgaaatcgaagagaccctccaggctgcgatgccccaggtctcctaccgaatgcttgggagaatgttctggagggaagaaaatgcgaaagcagccttattagagctcactggcgctgtagattacgccgcgatccccagggagatgccgggcaaaggaggggtctggaaagttttatttaagcccccaacttctgatgctgaatttttagaaagattgcacctcttcctagctagagaggggtggaccgtgcaagatgttgcccgtgtccttgggtttcagaaccctactccgaccccggggcccagagatgccagcagagatgctaaactatattttggataatgttattcagcctcttgttgagtccatatggtacaagaggctgacacttttctcggggagggacatcccagggcctggagaggaaacctttgatccctggctggagcacactaatgaggtcctagaggagtggcaggtgtccgatgtagaaaagaggcggcggttgatggagagtcttagaggccccgccgctgatgttattcgcatccttaagtccaacaaccccgcgataaccactgccgaatgcctgaaggcgcttgagcaggtgtttgggagcgttgagagctctagggatgcccagatcaaatttctgaacacttatcagaacccgggagaaaaattgtctgcttatgtcattcgtctggagcctctgctacagaaggtggtagagaagggggccattgataaagataatgtgaaccaggcccgcctagagcaggtcattgccggggccaaccacagcggggccatccgaaggcagctgtggcttaccggggctggggaagggccagccccaaacctctttcagttgctggtgcagatccgtgaggaggaagccaaggaggaggaggaggaggctgaggccacccttctgcagttaggcctggaagggcacttctgagtgccaggaaaggcagctttagtgcagacctagatcacagctacttttcttgtccctgtggggtcttacagatgtgtctctgagtagtaaaggcttagccttgttctgttttgttgttttttggaggggaaggttagtcaggcctgagtattcatgtaacattctaaaattgtgccagcgagcaccgtgaacgactgcaatgcaagcgggtcttgctggctaaggtaaagggttggttggacacagcgcttagtgcacgctgtcatcatggacatcataatcagttgtgaaaaacacgcgaacctatgacacttcttattccacactgaatgtgaaattgcatgttcagatgtttactacgaggcctggctcacaggaagtgttcagtaaaagtatgcactgttagattactgataacgcggatagatttttgtttaccataaattgttccagatttatattaatggaaggaagtgtgcatttattagctattactcaactttacaatgcaaacatcttatttctcatctttaaacatgtcgaccagtttaattgaaaagtattctgagactgcaaaatggggtgttaaaaaatactgcagttacggagctgtgtaaaccagtttctcattgcataagatacagatgtaaattgcatggagaggttgatatgcacctgtacagtaattcactcccccatttcacatctttgtcagagaatagttcttgttcatactgagtgttctaaatttgaagttatatatacaaattaaaatattttaaaaattcaaaaa

SEQ ID NO: 45500 - DNA, 3778 bp, Homo sapiens
gtcctcctcctagccggactggagggagacaaagcagcgcccgtctgcttcgggcctctggaatttagcgctcgcccagctagccgcagaaatgactgctgtccatgcaggcaacataaacttcaagtgggatcctaaaagtctagagatcaggactctggcagttgagagactgttggagcctcttgttacacaggttacaacccttgtaaacaccaatagtaaagggccctctaataagaagagaggtcgttctaagaaggcccatgttttggctgcatctgttgaacaagcaactgagaatttcttggagaagggggataaaattgcgaaggagagccagtttctcaaggaggaagcttgtggctgctgtagaagatgttcgaaaacaaggtgatttgatgaaggctgctgcaggagagttcgcagatgatccctgctcttctgtgaagcgaggcaacatggttcgggcagctcgagctttgctctctgctgttacccggttgctgattttggctgacatggcagatgtctacaaattacttgttcagctgaaagttgtggaagatggtatcttgaagttgaggaatgctggcaatgaacaagacttaggaatccagtataaagccctaaaacctgaagtggataagctgaacattatggcagccaaaagacaacaggaattgaaagatgttggccatcgtgatcagatggctgcagctagaggaatcctgcagaagaacgttccgatcctctatactgcatcccaggcatgcctacagcaccctgatgtcgcagcctataaggccaacagggacctgatatacaagcagctgcagcaggcggtcacaggcatttccaatgcagcccaggccactgcctcagacgatgcctcacagcaccagggtggaggaggaggagaactggcatatgcactcaataactttgacaaacaaatcattgtggaccccttgagcttcagcgaggagcgctttaggccttccctggaggagcgtctggaaagcatcattagtggggctgccttgatggccgactcgtcctgcacgcgtgatgaccgtcgtgagcgaattgtggcagagtgtaatgctgtccgccaggccctgcaggacctgctttcggagtacatgggcaatgctggacgtaaagaaagaagtgatgcactcaattctgcaatagataaaatgaccaagaagaccagggacttgcgtagacagctccgcaaagctgtcatggaccacgtttcagattctttcctggaaaccaatgttccacttttggtattgattgaagctgcaaagaatggaaatgagaaagaagttaaggagtatgcccaagttttccgtgaacatgccaacaaattgattgaggttgccaacttggccctgttccatctcaaataatgaagaaggtgtaaagcttgttcgaatgtctgcaagccagttagaagccctctgtcctcaggttattaatgctgcactggctttagcagcaaaaccacagagtaaactggcccaagagaacatggatctttttaaagaacaatgggaaaaacaagtccgtgttctcacagatgctgtcgatgacattacttccattgatgacttcttggctgtctcagagaatcacattttggaagatgtgaacaaatgtgtcattgctctccaagagaaggatgtggatggcctgggaccgcacagctggtgcaattcgaggccgggcagcccgggtcattcacgtagtcacctcagagatggacaactatgagccaggagtctacacagagaaggttctggaagccactaagctgctctccaacacagtcatgccacgttttactgagcaagtagaagcagccgtggaagccctcagctcggaccctgcccagcccatggatgagaatgagtttatcgatgcttcccgcctggtatatgatggcatccgggacatcaggaaagcagtgctgatgataaggacccctgaggagttggatgactctgactttgagacagaagattttgatgtcagaagcaggacgagcgtcccagacagaagacgatcagctgatagctgggccagagtgcccgggcgatcatgggttcagcttccccaggagcaaaaagcgaagattgcggaacaggtggccagcttccaggaagaaaagagccaagctggatgctgaagtgtccaaatgggacgacagtggcaatgacatcattgtgctggccaagcagatgtgcatgattatgatggagatgacagactttacccgaggtaaaggaccactcaaaaatacatcggatgtcatcagtgctgccaagaaaattgctgaggcaggatccaggatggacaagcttggccgcaccattgcagaccattgccccgactcggcttgcaagcaggacctgctggcctacctgcaacgcatcgccctctactgccaccagctgaacatctgcagcaaggtcaaggccgaggtgcagaatctcggcggggagcttgttgtctctggggtggacagcgccatgtccctgatccaggcagccaagaacttgatgaatgctgtggtgcagacagtgaaggcatcctacgtcgcctctaccaaataccaaaagtcacagggtatggcttccctcaaccttcctgctgtgtcatggaagatgaaggcaccagagaaaaagccattggtgaagagagagaaacaggatgagacacagaccaagattaaacgggcatctcagaagaagcacgtgaacccggtgcaggccctcagcgagttcaaagctatggacagcatctaagtctgcccaggccggccgcccccacccctcggggctcctgaatatcagtcactgttcgtcactcaaatgaatttgctaaatacaacactgatactagattccacagggaaatgggcagactgaaccagtccaggtggtgaattttccaagaacatagtttaagttgattaaaaatgcttttagaatgcaggagcctacttctagctgtattttttgtatgcttaaataaaaataaaaattcataaccaaagagaatcccacattagcttgttagtaatgctctgaccaagccgagatgcccattctcttagtgatggcggcgttagggtttgagagaagggaatttggctcaacttcagttgagagggtgcagtccagacagcttgactgcttttaaatgaccaaagatgacctgtggtaagcaacctgggcatcttaggaagcagtccctggagaaggcatgttcccagaaaggtctctggagggacaaactcactcagtaaaacataatgtatcatcatgaagaaaactgattctctatgacatgaaatgaaaattttaatgcattgttataattactaatgtacgctgctgcaggacattaataaagttgcttttttaggctacagtgtctcgatgccataatcagaacacactttttttcctctttctcccagcttcaaatgcaaattcatcattgggctcacttctaataactgcagtgtttcccgccttgggcttgcagcagaaaaacctgacaacatagtgtttgctaaggcagtaatttagactttaccttatttgtgattactgtagtgattgattgattgattactattaactacaaggtataatttactatcaccttatttaaattttatgaattaatttgaatgttttttacactaactaacttttcccaataaagtccactatgaaaccacgacaaaaaaaaaaaa

SEQ ID NO: 45501 - DNA, 3232 bp, Homo sapiens
tttttttttttttccaaatgtacaattttattttaacagatttcaagagtccattttttaaaaaatgagcaataaagaacctctatcagtgagacttctcattttatagcaaatacatttttgcagcttaaattttcttgaattcatatacgcttctgtcatttaaacaaacttccagagaaaactggtctctatatatttaagtaacaaatttgacaaaatacatatttatacatatatagatctctaatataaatattaaatttgaaaaaatcaaatgtgaagcagaaactgctatacaagtatattgtataatatttattttatacattaaagtatttggttgaatatacttcaattaggtttctaaaaaacaccattatctgcttcttagtaattgcgacattcttgaaaagcatgtgaaacgggtataaacttcaactctgtgcttaattcagaattcctgtttgttctcctcaaacttttatcttcctaaagcatcttgccagagactacaaaggaaaggaacatttacagagcactataaacatgtctttggacagtaaaacagtatttattcttctacactcttgattttccaatcatatcttcctcaaggcaatgtttctttggcccaatttgtgcaactaaacataaaatttcaaaacacaacttttaacagtgtgatatgaaatgcagtggcagtccctgcttttcgcctgctggcttctttgaaagaaactgcttggctaagggactcagtagagggctgagatctgcctgagtataaagtgctacctgagctatatttacttcttccatcccttggtacaatcaacagcaaatagacaaaatgaagttaccttcctgagatacatggcttactttgtactctgccttttaggagatgaggtaagacatatacatagatggcttttactagccaaggcaatgtaaatggactaagattctcatgtgacttgaggttatctgatgaatttattctcttcaaaaccacctacttttagagggcatgtttaacccctctctttatttaaggagggagagaaaaacacatgtaaccagaattcagagtgggttactcaacctaagagaacatacggagttctctttgggaaaacaacaagactacagtgttcacttcgcaccatgaagtggcactcctgttatggctgtcagagtcctctcacttcttatgaaaggatgcatctgattctgaaattactgatatattcgatcagttagggatgttttaaaaagtgaaaacaaatgcccacacatacactttcctagctttctgaaatcacccgaacacattacaaaaaatagagaatttacccctattaacttttagagaattttcccaataatattccttggttaaagaagcccaagtttgtgcatattcccaattttcagtgttcttgtttttatgcacaagagccaaagtagtatacacatatttttaagggctttttacaatgaacgatatataaaatacattctatagttggtgaaagaataatcttaagagttggcattaatctttgaacaaaaaagatttcaagccactttctttacaaagaaaatataatttcattgtgaactatatttctctaattttgccaattttataaaatacagcatatccctgctttaatacaaccaggcatgctgtgctgactggtccaataaatctaagtgttatttaagggaaagcaggcaatctgttcatacccaaattcatacaagtttcaaagaagcatcaaaggatgctacctacattcaagccacattgcaatattagctaagccacagttgcactcatgagagtgaaactacagaataacaactattgaagattttaatagagtcaaaagatgaactggcaaaccaggttgtggaatctattcagcctctctgctctgctggagtggttgatttagtctggtaagtggcatattcagctccaccatctgctttccctttcttcttcctcctttgaagatatctgtacgggacaacacaaattactgcaactccaacaactatggcaataacaatcacagcaatgacccaaacatccaaactgtcaagtattccttcctcaggtttaggatatcctggataatttgagactggaggcttgtaagtaggcctaggacctgaggcactggacgctggagattttgtagtggaagaagtcgacactttaagacactttggaactgggggatcccaagtactgttactgtcacagacaattgtgtcgctgccatcgaggtaaaaacccttatcgcattcaaacataactgttgctttgtagtaaaatttttttccaaatcctgatatctgttttccattttcgactactggaaatcgacatttgaccactttacactctggagcagcacgactccacactgaattgtcaccacaataaatcgtgctctctccaataagtgaaaatggatctggtccaggtgcaggatcacaactataagttactgcatcaagatactcaaatacttctacttcactaaaggtgtgttttccattttttatttttggaggtggtgtacacaaaaccttttcacatattgggggcttaccgctccaaattgctactgatcctttaagttcacaatatagaatttcttcaccaattaagtaataaccctcattacaaataaagtgcatctgataaccaaactcgtaagtcccatttgcagggactgcttggccatttaaaggatcccgtatatatggacatgtttctctataacaggcgtcatctgagacaggtagccatgtatgattccgatcacaaatagtatgggtggcaagaggaggtatatagaagtatccttttttacacttataatctactcgttcaccaatctcatagtagggttttggtttaccaatgagctccatagcttcaaatgttggtggctcctcacaggcatcggagaaggagtacagcagcaacaccatggccgccagaagcaacccaggaaagcgccaggaaggaaagggacactcgcggcggccgggaggctccatgcgcggcgcggaagacgctgttatttctccggaggaaagcagagaaaccgagagccagccgagcagggaagtcccttctgggtccagatatgggacgcaacaatccccaactcacaaagcatccagtgctgcaggacaggtgggc

SEQ ID NO: 45502 - DNA, 3370 bp, Homo sapiens
ttttttttttttttgctcctccaagaatgtatttatttacatgaaaacaccattttatacaaattgaagacacatcttaaaagaagggtttgtccaggcatgccttcctcatccccttatattgccacttccattttcatcttcttttgtatcataaatgaaacttcagactggttaaagaaaattgaatctgcctcttctccccacccaaaattacttcgattatttaatgtctgtagtcatccttcaaagaaaagtcttgcccggggttattttatttaatttatttatgtaatacagtgtagaaagcgatcatgtcataagcaatgattctgtacaatcatcctgcagaaaattgttttggagaattcttggtaattgaagaccagcagagcacccctccccacccgccccgtaaaagtgcttacaatgaacagggattcttttctttatcaaagacccaaagatacgtggacaaaaaaagaaaagcttgaagtctcaatgcctaatgtgtgcacataaaacaggcacgaagaaacaaacgtgtgtatcctcttaattcctatatcacaaatatagcagaagcagcaatctgtacagtaaaatgcagtcatggaaaaaaaatctctctaaagcatctgaaatacttaaaaatgtttaactttaaaatgcatagtgatcaggaaaggaatacttaggcaagagaagcagctgaactcccacgttcacatgaagcatccccccatcgattcttaaagcatatgtaaagtaggacttaattgggtcacaaaccacaagaataatatacaactggctaaggggctatgtgataaataatcaggagagaatctattcatgcactagtttgatacagctaaattctttacagtacacaaaacccattaataatgtagtatagagaccaaaatgtaaagagagatagaatacattactgatgtgtggattaattcaagttcaggcatctacttgtgttacagcacagctgtcaaaaggcgataatgagtaaatcataaaacgggtttgtttcttcccacattattctataaatggacaccgatgggtagtgaagcaatggttttgctgtccaacttcagaggctgctgtggcgggggtctagttctgcatctgctcaaagaacttgtaggttggattttcgtagccgttctgctgcatcttggacaggtggcgctcctctggggtgacagcggcgtcaacctccaccacaccatgatgaatggatgtgtactgtttcttcttcagcatcaccaaggtgatgacgatcactgtcgctatgacaacaccgcccaccatgagtcccaatgattgcacctttgtttgaacccacatcttctgcaaagaacaccaatttttgatgatgaacttcatatcctgagtcatgtcggaattctgcatccatcttcacttcagagatctcctccgtcttgatatttgtcaacccagaacctggtcgagtggtcagtcctcggtcggcagcagggcgggcatcaacaggctcaacttcgttttctgtgttggctggcacagagtcagccccaaaagaatgccacggctggagatcgtccaggctgaactctccattcacgggaaggagctccacggtggttttcgtttcggtcaaagatggcatgagagcatcgtttccgtaactgatccttggttcactaatcatgttggccaagacgtcatctgaatagttttgctctttctgaagcagctcatcaacttcatcctgaatctcctcggccactgcaggcacgttgtagagcagggagagagactgattcatgcgctcataaatcacacggaggtgtgtcataacctgggaccggatctgagcggctttcttgggatccaccatgcgcacatgctcgaaatgctttagggtgtgctgtctgtccttctgttctgcgcggacatacttctttagcatattgaacacgtgacgaggccgaggaggaacagcctgcagagcggtgatgtagttctccagggccaggcggcggcggtcattgagcatggcttccactctggccatgtgtgtctccaccagctgctgtctctcgttggctgcttcctgttccaaagattccactttctcctggaaatgctggataactgccttcttatcagctttaggcaagttctttgcttgacgttctgcctcttcccattctctcatgacctgggacattctctctcggtgcttggcctcaagcctctctttggctttctggaaatgggcatgttcattctcatccccaggtgtctcgagatacttgtcaacggcatcaggggtactggctgctgttgtaggaactcgaaccacctcttccacagactctgtggtggtggtggtggtggtggcaatgctggtggttctctctgtggcttcttcgtagggttcctcagcctcttcctctacctcatcaccatcctcatcgtcctcgtcatcatcggcttcttcttcttccacctcagccacttcttcctcctctgctacttctactactttgtcttcactcccatctgcatagtctgtgtctgctccgccccaccagacatccgagtcatcctcctccgcatcagcagaatccacattgtcactttcttcagccagtgggcaacacacaaactctacccctcggaacttgtcaattccgcagggcagcaacatgccgtagtcatgcaagttggtactcttctcactgcatgtctctttggcgacggtgtgccagtgaagatgagtttcgcaaacatccatcctctcctggtgtaagaatttgcacttgtcaggaacgagaagggcatcacttacaaactcaccaactaagcagcggtagggaatcacaaagtggggatgggtcttgcactgcttgcggccccgcttgcaccagttctggatggtcactggttggttggcttctaccacattggtgatctgcagttcagggtagacttcttggcaatactgcaggatgccttccttggtatcaatgcaggttttggtccctgatggatctgaatcccacttcccattctggacattcatgtgcatgttcagtctgccacagaacatggcaatctggggttcagccagcaggccagcattaccatcagtgggtacctccagcgcccgagccgtccaggcggccagcaggagcagtgccaaaccgggcagcatcgcgaccctgcgcggggcaccgagtgcgctgctgtgcgagtgggatccgccgcgtccttgctctgcccgcgccgccaccgccgccgtctcccggggcccccgcgcacgctcctccgcgtgctctcgcctaccgctgccgaggaaact

SEQ ID NO: 45503 - DNA, 1830 bp, Homo sapiens
tccaggccagccaggcggaggctgaccagcagcagactcgcctcaaggagctggagtcccaggtgtcgggtctggagaaggaggccatcgagctcagggaggccgtcgagcagcagaaagtgaagaacaatgacctccgggagaagaactggaaggccatggaggcactggccacggccgagcaggcctgcaaggagaagctgcactccctgacccaggccaaggaggaatcggagaagcagctctgtctgattgaggcgcagaccatggaggccctgctggctctgctcccagaactctctgtcttggcacaacagaattacaccgagtggctgcaggatctcaaagagaaaggccccacgctgctgaagcacccgccagctcccgcggagccctcctcggacctggcctccaagttgagggaggccgaggagacgcagagcacactgcaggccgagtgtgaccagtaccgcagcatcctggcggagacggagggcatgctcagagacctgcagaagagcgtggaggaggaggagcaggtgtggagggccaaggtgggcgccgcagaggaggagctccagaagtcccgggtcacagtgaagcatctcgaagagattgtagagaagctaaaaggagaacttgaaagttcggaccaggtgagggagcacacgtcgcatttggaggcagagctggaaaagcacatggcggccgccagcgccgagtgccagaactacgccaaggaggtggcagggctgaggcaacttctcctagaatctcaatctcagctcgatgccgccaagagcgaagcccagaaacagagcgatgagcttgccctggtcaggcagcagttgagtgaaatgaagagccacgtagaggatggtgacatagctggggccccagctttcctccccagaggcgcccccagccgagcaggaccccgttcagctgaagacgcagctggagtggacagaagccatcctggaggatgagcagacacagcggcagaagctcacggccgagtttgaggaggctcagacctcgggcatgtcggttacaagaagaattggagaagcttccgcacagccggccccctagagtctttcagaaacagaggaggccttcacagcttgaaggagagacttagaaaaagagaagaagttaacaagtgacctggggcgcgccgccacgagactgcaggagcttctgaagacgacccaggagcagctggcaagggagaaggacacggtgaagaagctgcaggaacagctggaaaaggcagaggacggcagcagctcaaaggagggcacctctgtctgagtttcctctttggaaaaagaagttattgttcaacttaccaaaatgccttacacattccttacaaataaaccaaccaacctacacagcgttatccaggcccaacttccggtagctccgagagaagccatgagagacaagtctcttagagccacagaagtagaccttccagagccccagtttgtaaatgaacctgtgtcacatttgataaacactatcctgggcgcagccccgggccaccgccgagtgacgccaaagccctggttgactctgacagccccgtgggtgtgtgggaggccgggcgctctggggtctgtctgtcagtgcaatcgtttagtgttttttcagtggggcggggcgggaagcgggtgggaccgggcagccagttctcaaaggctgtggggccgactggaggccacagcccctcacccctagacgttgccaaccagaactgacgtgtgacctcctgggtgttgatgccattaaaaccaacgttggtgcccggtaaaaaaaaaa

SEQ ID NO: 45504 - DNA, 2204 bp, Homo sapiens
atttaccacttcacttttatttccattttaacaactagtacattatccttggccttaggaaaagcctccatcagttctatgtgttcccaaaatataagctcatgtgataacgaggtcaggcaattcagttttttaattcataaagtgcattcttcagacagcttcaaataatgtctaattaagtagccactagaagatcagaaattattagaatggactacagctatggaaaactaataccaatctcttaaattcaataaacaaaaattaaataccattaggtatttagttacatagttttttagcctatgtaagtaaatagggctgtgaatagtctgccttctgccaaagtggaaaccataatgcctatccaccatgggattacgtctaaggttttcatattctttaccctgattatgaatagaacctttcctttttaataacttgtcttttaatataaattccaatgaccgaatcccagaataaaaatgtttaccattagtaaactcaattgtttatatatattttttttacaagttttaaccttttggaaaaacagaagcagatatgataaaataatttcttgaagtacttttttaatccaattaagctgataataatcacttcgaattttaatacaatacaatcatgttcccaaatttcctaggctcataacaatacagtctcaatacaaaagacgtaataatctatttttattcattttaaatcaaagagaccattccatttcctaacaaacaggtaagttacaaaagtagtccattttacttttcatcagtctttccctgttttgaacaagtttttttgagaattcttagttttagtttttgtttagcttacacactgaaaattttgagaagcatctaaaaaaatccacaattagtgcaaaaagaggggacaatactttaagtcattccttctataaaaagaattaaggttactaaatgccaatttttaagcaaatatatagtttcctatttgccttctgaaagacagcagatataaaaatagttcaatattaggtttaacaaggtttgaacaacacatgtactatcagctttattttacctgcaaaaatattttagctacacttggaaaaaaataaacttgagaatataacttcacatttctaaggccagatgcaagaatacttattcttttccttttaaatagaagacatgccataaaatttatgaaagttaatttgtaggaatgaatacatttaaaaaatactggttaatctgtgaggaattccacatttgcctatttaacaaaatttcatccatttcataaggctttggtataagtgattcccagcacttcatcatttatctttcttctttgcctcctttacttccttcgtctgctcatccttctcccctctcacgttgacatttgctgctccttcttgattttccctctgagaattatcaactatctgatagtcctcaaggagagtgtgtcctgtttgtgttgcagttttcttcaccattgctttgataccaatgttgttaatattgtaggcagttacgccaacattgaccgcagaatccaccgcatggtgggtagcttctcctgcattatatccgtatctggtttttatttaaattccatgaatttgtatctgacagtttgtacagtttctgctgaaacattgttaacgatgcatttagctgcacattccaatccttgccagacagttgaaaatccttgaacactactcgctgctacaaccatagcaccatccagaggagatttcccatctttgtcttttttaagagattctggaacaagtttgcttccatgcttcttgacatgtggagctagttcttttccaacgcaatttgctacagtgcaaactccatcaaccaggaactgactgacttttgctgctcctcctgtagcttgcttcgctatataaagtcccttggtgacagctggactaacttccacgggtttttcttctggttgaatccgctctcggagtttagaagcacctttctggattgccttaccagtaatctcagcacctttgactaaaccccaactcacccaggaagcacctgacaaaatgttgtgagccactttttcactccattcaggtaattcttttggcttttcttctggaactggctcacatggtacaatgtgactcaggttaacttcttcacttgaagtatctttac

SEQ ID NO: 45505 - DNA, 1169 bp, Homo sapiens
cacggaaaggatttttcatagacggaatttccagaagtgaatcataactactgttagagcataagcatgcatgattgtgctgtgtagatcagttttgttgaaagtttagattgttgtgtttgtcaattataatttaatgtttcagtttttatatgaaatgttgtaaatgtatacctttttaaaaacttgaagttccaataacttaaagcattgaaatataaaatgaggtaaaaggtgttttgaatttagtaaaactgttatttaatgcttaaaacttaattgaattgtataattctcaacattaagttgcatagatatgtgttcttaagttgttgaattcttaatgcatcctgtgttcagcaagttttttttaatatatactgtaccatgggtgtgttaagaatagttatactttataataatggaacttcatattattgcaatgcatatttaaagagtacttgttgaaagcataccattcacctaaagttaaaaattctggtttatttaaagctataagaagaatcatttctgggcttgtgatgttaatattgcccccctactggggttatttgtccttgggttgaagggttggaaatcgtgccaaatgggataacattgccggtggacttccaggggaggagtacgggggaggccttcgtgcagtttgcttcacaggaaatagctgaaaaggctctaaagaaacacaaggaaagaatagggcacaggtggggatggatggttggttggatatgtcacttttcttatggtaaacaattaaatccatattctctctgcttaaaagaagaaattaatgttttgtagtcctaggtaattgatgttttgccatgatttccaaacttgtgtcagtcccacgttacacgcaaactaaattttaggtttgaaatttgtccctagttaattggtctgcttgacaattttgtgagtcttattaaccccaatcaatagagttgagagactatggctttaaaaaattaatgcaaacctggctttagctgtaataacacccacctagaataaattaatattaccataaggaaaatgtgatactttctgatcttgtttttaaagttgaaatgcaacaaactttttcttgctgtatataaatattctggcatagtattaataaggcatagctttcaagaaat

SEQ ID NO: 45506 - DNA, 1185 bp, Homo sapiens
acttcttcgcaccagggaagccccacccaccagaagccaagatgtccagacaagccgggccaaagccaagaccaccaagaagcggccacagcgggccacatccaatgtcttcgcaatgtttgaccagtcccagatccaggagtttaaggaggctttcaacatgattgaccagaaccgtgatggcttcattgacaaggaggacctgcacgacatgctggcctcgctggggaagaaccccacagacgaatacctggagggcatgatgaggcgaggccccggggcccatcaacttcaccatgttcctcaccatgtttggggagaagctgaacggcacggaccccgaggatgtgattcgcaacgcctttgcctgcttcgacgaggaagcctcaggtttcatccatgaggaccacctccgggagctgctcaccaccatgggtgaccgcttcacagatgaggaagtggacgagatgtaccgggaggcacccattgataagaaaggcaacttcaactacgtggagttcacccgcatcctcaaacatggcgccaaggataaagacgactaggccaccccagccccctgacaccccagcccccgccagtcacccctccccgcacacacccgtccataccagctccctgcccatgaccctcgctcagggatccccctttgaggggttagggtcccagttcccagtggaagaaacaggccagggagaagtgcgtgccgagctgaggcagatgttcccacagtgaccccagagccctgggctatagtctctgacccctccaaggaaagaccaccttctggggacatgggctggagggcaggacctagaggcaccaagggaaggccccattccggggctgttccccgaggaggaagggaaggggctctgtgtgccccccaggaggaagaggccctgagtcctgggatcagacaccccttcacgtgtatccccacacaaatgcaagctcaccaaggtcccctctcagtccccttccctacaccctgaccggccactgccgcacacccacccagagcacgccacccgccatgggagtgtgctcaggagtcgcgggcagcgtggacatctgtcccagagggggcagaatctccaatagaggactgagcactgctaaaaaaaaaaaaaaaggaaaaggaggtgcgtaaaaaaaaaagtcgac

SEQ ID NO: 45507 - DNA, 701 bp, Homo sapiens
gttcctaaaggccgcggagtcggcggtgttgtaggtagcggtaccttgagtggcaacagaattcgattaaattacaatgggaaacatttttgaaaagctctttaaaagtctacttgggaaaaaaaagatgcggattcttatattgagtttggatacagctggaaaaaccaccatcttgtataaattgaagctgggggagactgtgcctgccgtccctacagtaggtttctgtgtggagactggagaatataaaaataacaccttcgctgtctgggatgttggcagccacttcaaaatcagacctctgtggcagcattttttccagaacacaaaaggtgccagaagcccaggaagcacacatcaaggctcccttgccagcagggtgctgccaataaaaggtagtcacgtggaatttggaatgtggaaaggaggtagaagtcatcctttcctcccctgtagcagcaggcgtgcaggctctggtggtcagctggactccatactcccccaccagtcaccagcctggggaccgtggggctgcaaggacctcagcagcggtgtcccaagtttcctgacttcttccatcctctggaaatcagctgtggtaaagtagcctgaaagccagtggtacaacccccgccccaccaagagctcctgagccccctgcccccagagcaataaagtcagctggctttctcacctaa

SEQ ID NO: 45508 - DNA, 892 bp, Homo sapiens
  misc_feature (1)...(892): n = a,t,c or g
ggcgcgcagctggaacctccggctgtcagtgcgcttacagttcctaaccccgaccctgcgcgcagcccgcagctatggcagccccgccgcagctaagggctctgctcgtagtcgtcaacgcactgctgcgcaagcgccgctaccacgctgcgttggccgtgcttaagggcttccggaacggggctgtctatggagccaaaatccggggcccctcacgcgctggtcatgacctttctcttccggaatggcagcctccaggagaagctgtgggccatactggcagggccacatatatccactcctgggaacctgggcacggtttgtgtttcacctacaagggtctccgtggccctggcagttcctacatacaaggcaagacctacccaggcacacgcatttcctggggcgggcctttccttcgggggtattctgggtgttttggagaaaacaattaacattcaacagccagatcaaacatgtacctgttgtcacgcgtccctgtttgccctgaagccgccctggctgtaagaagaaagggcctacatccctgaaaccccaggtgggacccgtttcccgctgcctcactgcggtggtgtgggggctggtgctgtggctctttgagtatcaccgatccacncctgagccctcgctgcagtcctccatgacctacctctatgaggacagcaatgtatggcacgacatctcagacttcctcgtctataacaagagccgtccctccaattaatgcagccctgaggtgtctggctgtggctcaagatttggccccatgcagaccctcccaaaggatactgccttctcaagatcataggcctcagactccaactggtgttatcccagggttctgtttgctgaagtaaaaacactgattttt

SEQ ID NO: 45509 - DNA, 1476 bp, Homo sapiens
tatgactgattacgaatttaatacgactcactatagggaatttggccctcgaggccaagaattcggcacgaggtggagtttcccagcgcccctcgggtccgaccctttgagcgttctgctccggcgccagcctacctcgctcctcggcgccatgaccacaaccaccaccttcaagggagtcgaccccaacagcaggaatagctcccgagttttgcggcctccaggtggtggatccaatttttcattaggttttgatgaaccaacagaacaacctgtgaggaagaacaaaatggcctctaatatctttgggacacctgaagaaaatcaagcttcttgggccaagtcagcaggtgccaagtctagtggtggcagggaagacttggagtcatctggactgcagagaaggaactcctctgaagcaagctccggagacttcttagatctgaagggagaaggtgatattcatgaaaatgtggacacagacttgccaggcagcctggggcagagtgaagagaagcccgtgcctgctgcgcctgtgcccagcccggtggccccggccccagtgccatccagaagaaatccccctggcggcaagtccagcctcgtcttgggttagctctgactgtcctgaacgctgtcgttctgtctgtttcctccatgcttgtgaactgcacaacttgagcctgactgtacatctcttggatttgtttcattaaaaagaagcactttatgtactgctgtcttttttttttttcttttgaagaacaggtttctctctgtccttgactcttgggtctgtggggccatggcatgaagtgttttctagtagtagattggagggaaagctttgtgacacttagtactgtgtttttaagaagaaataatttggttcccagatgtgttagaggatcttttgtactgaggtttttaacactttacttgggtttaccaagcctcaactggacagaccataaacagtccacaggcaccgttcctgccaggccccaacccacagggagtctctccgcagagccttcttggtgttgccctaacttgccagtggcctttgctcagagcctcctcctgtgacatgtgaacaatgaagaggcctgcgcctcctgccttgccgcctgcaaagcaaagaaactgccttttattttttaaccttaaaaagtagccagatagtaacaagactggctggctgatgagcaaagcctttgctctcacgcagaggaaggcttggatgtacaatgaaactgcctggaactaaaagcagtgaagcaagggaggcaatcacactgaagcgggtcttcctccaggaacggggtcccacaggcgtgttgttttaaataacctgatgctgtgtgcatgatgctggtgcttgaccatgaaaggaaagtctcatccttaaaatgtgttgtacttcacaatcctggactgttgcttcaagtaaacaatatccacattttgaaaaaa

SEQ ID NO: 45510 - DNA, 794 bp, Homo sapiens
ctgctttggcttcagactttaaaagagcttttgctgtttcctcttctgcagttaaacacagtgggaatatcacttttgatgagattgtcaacattgatcgacagatgcggcaccgatccttagccagagaactctctggtaagagcaggacaacatgtaaccgccataactgtagttgtgtttttcactgagtgataacattcttcttacttgaagggtgctcagtgagacccaagatggggtgcagttttctgggactgaaaggatggatcgtaaattggatgtgtttaatctgggcatcaaggacccatggaagctttgcattccgggttatggaactagatggaactctatattctatattaggggagcaggaacctcattccttccattgcctgctatgaaccccttcagtattccccagtatctgcagattgtgagggactgagccagcacctccaatgccaccatttctttacttaaaggaaccattaaagagatcctggggactgcccagtcagtgggctgtaatgttgatggccgccatcctcatgacatcatcgatgacatcaacagtggtgctgtggaatgcccagccgtaagtgacattttcattgttacagtaggggtgaaaggggggccacccagtgtattcacagagataagctgggaagttttggaaatggttactggtggggtgggataatccttttaaactttttactgattttttttttctttcccacagagttaagcacaaaggaaaacatttcaataaaggatcatttgacaac

SEQ ID NO: 45511 - DNA, 3031 bp, Homo sapiens
  misc_feature (1)...(3031): n = a,t,c or g
gccagcgcaggggcttctgctgagggggcaggcggagcttgaggaaaccgcagataagtttttttctctttgaaagatagagattaatacaactacttaaaaaatatagtcaataggttactaagatattgcttagcgttaagtttttaacgtaattttaatagcttaagattttaagagaaaatatgaagacttagaagagtagcatgaggaaggaaaagataaaaggtttctaaaacatgacggaggttgagatgaagcttcttcatggagtaaaaaatgtatttaaaagaaaattgagagaaaggactacagagccccgaattaataccaatagaagggcaatgcttttagattaaaatgaaggtgacttaaacagcttaaagtttagtttaaaagttgtaggtgattaaaataatttgaaggcgatcttttaaaaagagattaaaccgaaggtgattaaaagaccttgaaatccatgacgcagggagaattgcgtcatttaaagcctagttaacgcatttactaaacgcagacgaaaatggaaagattaattgggagtggtaggatgaaacaatttggagaagatagaagtttgaagtggaaaactggaagacagaagtacgggaaggcgaagaaaagaatagagaagatagggaaattagaagactttagtgtcagtcaccaaagaaggcctggaacttccagaggatgaagaagagaaaaagaagcaggaagagaaaaaaacaaagtttgagaacctctgcaaaatcatgaaagacatattggagaaaaaagttgaaaaggtggttgtgtcaaaccgattggtgacatctccatgctgtattgtcacaagcacatatggctggacagcaaacatggagagaatcatgaaagctcaagccctaagagacaactcaacaatgggttacatggcagcaaagaaacacctggagataaaccctgaccattccattattgagaccttaaggcaaaaggcagaggctgataagaacgacaagtctgtgaaggatctggtcatcttgctttatgaaactgcgctcctgtcttctggcttcagtctggaagatccccagacacatgctaacaggatctacaggatgatcaaacttggtctgggtattgatgaagatgaccctactgctgatgataccagtgctgctgtaactgaagaaatgccaccccttgaaggagatgacgacacatcacgcatggaagaagtagactaatctctggctgagggatgacttacctgttcagtactctacaattcctctgataatatattttcaaggatgtttttctttatttttgttaatattaaaaagtctgtatggcatgacaactactttaaggggaagataagatttctgtctactaagtgatgctgtgataccttaggcactaaagcagagctagtaatgctttttgagtttcatgttggtttattttcacagattggggtaacgtgcactgtaagacgtatgtaacatgatgttaactttgtgtggtctaaagtgtttagctgtcaagccggatgcctaagtagaccaaatcttgttattgaagtgttctgagctgtatcttgatgtttagaaaagtattcgttacatcttgtaggatctactttttgaacttttcattccctgtagttgacaattctgcatgtactagtcctctagaaataggttaaactgaagcaacttgatggaaggatctctccacagggcttgttttccaaagaaaagtattgtttggaggagcaaagttaaaagcctacctaagcatatcgtaaagctgttcaaaaataactcagacccagtcttgtggatggaaatgtagtgctcgagtcacattctgcttaaagttgtaacaaatacagatgagttaaaagatattgtgtgacagtgtcttatttagggggaaaggggagtatctggatgacagttagtccaaaatgtaaaacactaggcgctcagacggagatggttaaacactagctgctccaagggttgacatggtcttcccagcatgtactcagcaggtgtggggtggagcacatgtaggcacagaaaacaggaatgcagacaacatgcatcccctgcgtccatgagttacatgtgttctcttagtgtccacgttgttttgatgttattcatggaataccttctgtgctaaatacagtcacttaattccttggccttacagtgtctcaaagttctttacaaatctacttaaagccatccnnnnnnnnnnnnnnnnnnnnnnnnnnnnnnnnnnnnnnnnnnnnnnnnnnnnnnnnnnnnnnnnnnnnnnnnnnnnnnnnnnnnnnnnnnnnnnnnnnnnnnnnnnnnnnnnnnnnnnnnnnntcagcccaataggtaagagtccctctgggactgggggtggtaatggctaaataaaagtcttcacttctgaaatttggtggttctagagacaaaacttggttagatagcatataggatttgcattctgagcctaacgccatatataaaaatgataggaaatgcctgggacttggatatgtgacagtgtctaagggggcagtgcacaggcagggagagaccttgtctcagtctcgtgctaagcaggtattgaatgcttggtaaatggcaatcacgtttagtcctttaaattctctgaaaagttcttaatccccttcgataatatacaggaggaattacgtaaattgaggtcttagtagtggctgaatttaaatttaactccaaagccccattttattctgctaagttttgttgcgtactgaaaggtgttagaagaaaggtttacggtgttaaactaggaagtgaatggcaaaaagggtaaaaagtcaattttgttttttcccaggtctagcaagagaatattaaatcttaagatttctttcaattaaaaacataaggcacttgagggaatcaagtcaatatagaacctctataaatgatctcccaaagtaactcatcctcctggagttactgggaaagcattt

SEQ ID NO: 45512 - DNA, 1103 bp, Homo sapiens
gctcgactttttttgtttttgtagtcagctatttaattaggttcttaagacatttagaacaccaatttgtgaggataaattccattcgtcagagcaaacacagatcgcaggtagccctggagctgaggaatagctttgatttttggtaaaatttgtgagtccacagctttctgatcaatcttgcgctgctcccgtaatctcatatttctctttttctgtgtcgaagatctcaccttcctggtgtctgggcttccgcagcttcttcttcttgaagtaagcatcagtaagatgttttgggatttttacattgctgatatcgattttggttgaagtggcaatgacaaatttctggtgtgttcttcgtagaggaactcgatttgaggaccagaggtcaagtcacaagtaataagccactaagccagctgcttcagggaaaaccaccctcttgcccctgtggcggtccagtgaggatgatcagaatggtcccggggggtaatgctgggctcgcagttttctcacgtgctgactgaaagggtttttttgccgtggctcaacagctttcgaggcacatcttccagtagggataatatctaggcattttgcgaagtttaaccacccgggtaccgccgttcttgtcaccaccaactggttttgtaacagttgcgagaaccttctccttctttttcttttcaaccttggatttagcggctgagtacttcctcttgtacatggcctttctggaatacatggcagatcgggaatacctgccaattcctctgacaaggacagggttgcggctgcaaatggggcttccccttcttgggctttttagctttgaggttaccctttttcaccttgccaccagcatcaaccttcttggcttcgggtttcttctctttagtatctggcttctcaactttttcacccgccatcctctttgtgccctgccgcaaacccaaacaacaaaaatgaagcgtctggaaggcctctcagttagccttggacatgtccgacccctgtaggtgtcgactggatgccctccaggttcggatggcgaaggattgggagtcctgaactcaagtcttgcagacaggcccgcgatt

SEQ ID NO: 45513 - DNA, 948 bp, Homo sapiens
agccagccctttgtatagaaattttgcttttttttccctcattctactttagaactgcaagcttgtgcactgtggatgcgtgaatattttagtgtgaaacgtgtttttgtcatagtattgaaataaaacttcaacatagtttggttgtggaaggtatagcagatagttcagaaaaaatattcaggaaacaaaaatcactcaaacggaatcgaagccttttaacaaagaaaatgaaatacagatgatgatgatgatgatgaagatgatgctaagtaaacagaaatcagtactccgcatgcgctcctctcctaaggtacaaagcagcaagaggttagggtggcaaggctgcctctgggtccattctgtgggccactctccccaacgttctgacacttctgcagtctgatcagtggcgatgctagattataatttcaaactgtgaagaataatgggtcttgtcatttgcccaatgtgggggttatgttgcattttctcagctcctggggatggaaatggaggatcccagaacacacagccctggcccctttgattctagggcctgcacagatctctggttcaaatgcacaggccctcagaatagaggaacatgaagagagatcttagagcacacagtagaatgtgagagcctgggtgtctgagaccgggagggcccagcagtgaggggcaggctcttctggtcaccaggctgttcagtggactcagttcttcatcttgtaatgtcgatggctttgccacaccaggccaagcccatgccataccttgtcaagactgtcaaagtgttctgagctggaggaggagctgaagaatgtcaccaacaacctcaagtctcttgaggctcaggcggagaagtactctcaaaaagaagataaatatgaggaagaaatcaagattcttactgataaaatcaaagagggagtcattttattc

SEQ ID NO: 45514 - DNA, 1055 bp, Homo sapiens
gcagaggcaggcaggattttggagctggaagaatctgctctccggtggctgccctgtgaacagagggctcccggtcagcttcccaggcccttcgccctatgcccagagggcagactgcctctccctgggccggggtggcctgggtgccaggaggaggggagcataccccacacccttcctgccaccgttgccgttccaaaacctcggtcagtgtttccctgtctgggggcagggccagcagcgagcacgcgtctggcggctgctgtcgttgtgttctaccccgtactgacccaacaccacaagggctttctctggtcccctgtccctaagacaataatcgctttctgacaaaggagcctgcacatttgggtgagcagacccaagctgtttacagctctttcttgtcctgccatccagtagcagttagtcttcatccccacgtgaacaaaatgggaaggagccgtgaggagaggagtgaggcaacaggcacccgaagtccctcgtccttccctctgtgtgctctgaatatgtccttgtccttcctgacccatctctgaccagctgggaacctgcttggggtccccctcaaacctgtgtctggggtgtgggctcacagatccctatcagcctggttcgtgggagggctcttcctaaagggacccccatctctaagtcactctgaaagggagttgtggagaggagacgcctccagactctcagaagttttgaggactgaactgggtcactcgggatctgtgttcgaatcctccccacccctttctttgtggagtttcctaacctgctgctgaagcacaatgttttggtgctttcttttctcatttgttaaaggcagtgtccaaaagccattccagatgccaagaccaggggcttatttctagggaaggtaggtcggtttccatggtttccctcccgttatttttattttttactttttgcctgagacaagccgagtatgaggtggtttgatttaagaaaaatcaatgaaattgtttactactgttttaaaataaaaccgtaaactctggaaaaaaaaa

SEQ ID NO: 45515 - DNA, 1227 bp, Homo sapiens
gcgaccgccaactggacggcgggcttcggcgcgggcacacgccgcccggcgttgtgggcatccggcccgcgcggcgcggcgcgcgccgctcctcgtgctggaagaattcaagacggagaagaagctgtgcaagatgttctacgccgtcacgctgctcttcctgctcctctgggggccctacgtcgtggccagctacctgcaggtcctggtgcggcccggcgccgtcccccaggcctacctgacggcctccgtgtggctgaccttcgcgcaggccggcatcaaccccgtcgtgtgcttcctcttcaacagggagctgagggactgcttcagggcccagttcccctgctgccagagcccccggaccacccaggcgacccatccctgcgacctgaaaggcattggtttatgaggggaggccccggcacatagacccccaacccagcctttccctttggctcggacggtgacgttgtatcttttccttctggcccctgtttaattttctaagctgccttcaaaatgactcgaagtggacagacacttggattgtactgactcctttgggggtggggtgggtgaggagtaggatgctcagcccactccagctccgcacattcgtcctcctaactcgactttcttcctgacaataggccctgcagtctttttgtagcggtactgacgtcttttattccatgtgtggttcctttttttctttttctataaaggctgtactaattttcttcatgcaacgtttcctaaagaccatggccagttttctacagaagctatttttgacaacctcaagtggcattacattttgcagtgaagtagaggaacctagggggacttcttcacaagttagatttcttgaggatcttctgttggaagcaggagaaagtggggggtggggggaagttgtccgaaatgccctctgaattgccggctgcagggtccttgtgcctgcgctggttctttgaaagtctcagtgttgatattgaacttaaagagcagagatggagatcagtagcaaggcagtcatttttttaaagcagtaagtaacaagtaagatttggttcccggtttactttctgctgctaaaaaccacgtcagtgacaactgctctctgtattatagcaatcttgaatggaaacatttctgtcaagttgtaagttttaaaagaagtaaagtgttttggttagtaatgatgtggagaaaaatacagtattg

SEQ ID NO: 45516 - DNA, 569 bp, Homo sapiens
gcgaccgccgctttcggccagaagtcagccgtggccaaacaccagtgggttcatcggcccggggcgagggcacaggggccggcgtcgccgggcgtctgtctgtgaccctgacccctggccacggagacctggacccgcccgtgggcttccagctgtacccggagatattccaggagtgtgggtgacggccttaaaagtgactatctagacattacgggaggcccgagatgggctcaggggcccgaacctctgcggcggcctgcagggaggtcccagaatctagggcaagagctggccctggggtgcggacagtctgatcttgggcccttagcagcctcctctgccagcaccttgctccccactgcccagggctctccaaggccccctctactgaggcagggctgagttgagaacccccagacctacataaggggaaccaaaagctgtttctcagcccagaggtgctaagaggactgaggtagaggagaaccttgttttacccattgtctttttaaattttttatcattatttttattcttgtgaccctcccagaacacaatactcattg

SEQ ID NO: 45517 - DNA, 849 bp, Homo sapiens
ttttttttttttttttttgtctttgtacaaaattttattaaaggtctttagagagcaacatccagactccagaatacagctgccaaggagaccctgttatgctgtggggactggctggggcatggcaggcggctctggcttcccacccttctgttctgagatgggggtggtgggcagtatctcatctttggggttccacaatgctcacgtggtcaggcaggggcttcttagggccaatcttaccagttgggtcccaagggcagcatgatcttcaccttgatgcccagcacaccctgtctgagcaacacgtggcgcacagcagtgtcaacgtagtagttaaacaggggtctccgctgtggatcatcagggccattccacaaactttcatgggatttaagccctctgtcctcggagtttcccagacaccacaacctcgcagcctttggccccactctccatgatgaaccgcagcacaccatagcaggcccttccgcacagcaagccctcctaggagtttgtaacgcagagactctgcctgggcaatggcacacagacctctaagtggccaccttttcagcataaagctctacactgccctctggaaagccaaacctcttctgaactacagcagtcagttcccgaatccgccggcccttctcaccaagaacattctgtgttctggtggctaagataatgatttctgtcctggttggtgtaactcgcacctcaactccagagtagccatcttcagccagctcccgagtaagaaactcattcagttcagctttgaagatgccatgcagcgacaaacttcctcttcttggatatttgcactgccatcttgccgcc

SEQ ID NO: 45518 - DNA, 733 bp, Homo sapiens
  misc_feature (1)...(733): n = a,t,c or g
aagggaatgtgttcaaaaacaagcggattatcctggaacacatccacaagctgaaagcagcaaggcctacaagaagctcctggctgaccagcggaggcccgcaggtctaagaccaaggaagtgtgggcagaggattacccaggtgccgaggcaagagactgaaggcacagacggtttcagtataataaagaaaatagttagaataagaatagtcataatacaaagtagatatagagatgatcatggataattatcaatcattattataaacattattaatcattagcttttaatattactctttgttgcattactaatataacctaggaataaccggcgggtatagggtcaggtgcttaagggacattgtgagaagtgacctagaaggcaagagnnnnnnnnnnnnnnnnnnnnnnnnnnnnnnnnnnnnnnnnnnnnnnnnnnnnnnnnnnncccagtgcctgggaaggacccgttacttagcagaccgtgaaagggagtctcctttccttagaggagtcagggaacactctgctccaccagcttcttgtgggaggctggatattctccaggcctggcccgcagtcatccggaggcctaaccccctccctgtggtgcttgaatgatcacactccttatccactttcatgctcctcccgtactcctggctcctctttgaagttcgtagtagatagcggtagaagaaatagtgaaagtaaagtctttgaatctt

SEQ ID NO: 45519 - DNA, 804 bp, Homo sapiens
gttatgacatgattacgaatttaatacgactcactatagggaatttggccctcgaggccaagaattcggcacgagagatgacatagtttgtaaatgtaccacagatgaaaataaggtgccttatttcaatgctcctgtttacttagaaaacaaagaacaaattggaaaagtggatgaaatatttggacaactcagagatttttatttttcagttaagttgtcagaaaacatgaaggcttcatcctttaaaaaactacagaagttttatatagacccatataagctgctgccactgcagaggtttttacctcgacctccaggtgagaaaggacctccaagaggtggtggcaggggaggccgaggaggaggaagaggaggaggtggcagaggtggtggcagaggcggtggttttagaggtggaagaggaggtggaggtgggggcttcagaggaggaagaggtggtggtttcagagggagaggacattaagtgaaacagttgacagacatcaccagttgacttctgcattaacctgcatgatctgtttctactatggattggaaacttgtttcttgaacaagtcttgaagatcttggtcattttatgacaatggatctaaaatgtcagcatcatgcaaagtgcaacggaatagtgaattttgctctaaaagagcatgaacaagtctttctaatgttttgtacagtgcctggcactctgtgggtgctcaataaatggataggagttttcatttgaagcatatttgaatttttaaaataaagtgttttattcccttaaaaaaaaaaaaa

SEQ ID NO: 45520 - DNA, 1292 bp, Homo sapiens
  misc_feature (1)...(1292): n = a,t,c or g
atcgccgccatcatgggtcgcatgcatgctcccgggtgagctcggggcatcaagccggattgcngggcggggggtgggaggaagacagggagtgtgggcagcgggccgaggggatgatgttctgggctgctctggcactagccgccacctcacctcgagactgcttctctcccccgggaagggcctgtcccagtcggctttaccctatcgacgcagcgtccccacttggttgaagttgacatctgacgacgtgaaggagcagatttaccaaactggccaagaagggccttactcccttcacagatcggtgtaatccctgagagattcacatgggtgttgcacaaagtacgttttgtgacaggcaataaaattttaaagaattcttaagtcttaaggggacttgctccctgatcttccctgaagatctctacccatttaattaagaaagcagttgctgttcgaaagcatcttgagaggaacagaaaggataaggatgctaaattccgtctgattctaatagagagccggattcaccgtttggctcgatattataagaccaagcgagtcctccctcccaattggaaatagtaagtatcaactcttttgtcgttgttatcaagaataggagtcagccagtagtaaaagtcctagtagtaaatatgttcagccttgggggctagtagtaaatatgttcagccttgggggctattttgttaactgctctttgagctctggcctggtagtgggaaagcagccacaggcaatacataatcgaatgggtgtggctgcttgtctttaataaagacaagcagagggccatagttgcagaccccagatttagaccatgaataagccctttgactctcttttagatagtaggtagattttcctttcatacctctactcccaggagtttgaattaattttcacatgaattgctcactatgatgattggttgccagacattcgcagtttccaccagaaatgtttttccttatgttggccagttcttccttggatgtctgagtgagcatcttcattcattgtgcttgaacacaatgagttggttcaggtattcagaagtttggtgcactttatatagtttggatttattaactgtttgagaatagcaccattagtggggagattctgttaatgaatgtggagggactagtattaatcctgattttctttctttccccctttttctttttcagtgaatcatctacagcctctgccctggtcgcataaatttgtctgtgtactcaagcaataaaatgattgtttaacta

SEQ ID NO: 45521 - DNA, 624 bp, Homo sapiens
cgaacattttcaacctcagcatcccgatttcagtcagacaaatactcatttcagagattctatacttcatggaatcaagaagcaacgagccataaatctgaaagacagcaacagaacaaagaaaaatgccccccttcagccggacagacttactctcaaaggttctttgttcctcccactttcaagtcggttggcaatccagtggaagcacgcagatggctaagacaagccagagcaaacttctcagctgccaggaatgaccttcataaaaatgccaatgagtgggtgtgctttaaatgttacctttctaccaagttagctttgattgcagctgactatgctgtgaggggaaagtctgataaagatgtaaaaccaactgcacttgctcagaaaatagaggaatatagtcagcaacttgaaggactgacaaatgatgttcacacattggaagcttatggtgtagacagtttaaaaacaagataccctgatttgcttccctttcctcagatcccaaatgacaggttcacttctgaggttgctatgagggtgatggaatgtactgcctgtatcataataaaacttgaaaattttatgcaacaaaaagtgtgaagatatttaacgaaa

SEQ ID NO: 45522 - DNA, 1801 bp, Homo sapiens
gatttttttttttaagaagaaagaaaatgcaagctagttttgagaaaggaaggccaaattgggtcgggggagggtgggagtgaggaagttaaaatcactatagggagaaaaaacttttttcaagatttccaaagagatgaaattttcttaatccttttaagttttcatagtaaacagtatggcagattgggttggttgtcctacctggtctatttttaaaagtcaccttttaaagtgacattattagatacacttaaatgtttccaaggcactctctacattacccttgtttttctctttggatactgtcctgggactaagtgtagatttctgcttcaagcacttctggcattgtgtgtttttgtatgcactccccttcatgccacttcagatgtttatttggatgtggttggggacgagagcagacaccaaggaaagggagttggagagaatgtaagtcctgacctggaaggtcttttgtgatggcatgtataggatttgccctgacacacaccctcctttcttgggattataccagccatcttcctgagagttttggagccctctaggatattttttctagtaccccaccccccacccctaaagaaagaccttaatatgttaaaacagcattgcttgggagaaggtgtcattgaattccgggacgagccggagcctttaaatggggtgcttccaccactacaggctcctgacacgagtaacaggcactgttgcttagaagaacacacgaagttgccgaacacagggtaaaatttccaaggcgctgatcgttgccctggccagggcctgatgagagccagtcagtacattctttttttcctacagttcttgggtttcaaacttcagtttcagggaatttcaagtcaacaacaggtagaatgaataaacttggttaccagcctaataatgtgaattgctacagaattattcttattatgtaagaaaacaaaaactttatgcagatactttagctataaattgatgtaaaatactgatttttttaaaggaaggagagaacagtatcttgttcaattattatgcaatcaatcagtaaatgtttttaaaatgatactacaggagagcttagtaaggagagggcatggatgggccagtttggcatagttgggagaaatcagtctggtttccatcccagtcggggaagagagaggtgagagggaatcagaacgtacctagttgattccttggtgacaagtgcaatggggtatgggtagaatttattttcagagccaagaggacttgatggttataaataaagttgcctttagcaatggaatttacagatcgatcatgttgttccgaaagatgtgaataggatccacaataacaagttgattcagactaatgtagatatttagattagcaagtattgaacatttgatttcttagactgaggttttaaatgaatttcattatttctcccggtaatacacagagcatcgggattaggaaattagccattttggattctgtctgccacaaacagacctattctaaacagtgctattaaattttagactgttgttcaaatattttattttctcctaaactactttttatggtgatgaataattaagaccatttaaaacacgggagtacaagtatttttttgaattaaattaacttgcaaaaaccaaatttgcagtggttgggttgtttctagacagactttggtatcaatttaaaaccaagataatttttatattctttccaatagaatttcatgacaactcctgcagttttcttaacctacaaaaaaaaa

SEQ ID NO: 45523 - DNA, 927 bp, Homo sapiens
tttttttttttttttttttggcttcacctcgaccttttttatttgcattttttaaaaacaattaaattagaatacaaatattagaaaacagcggccttcagctgcccgtgcggcgcggaggggccgagctgcgcacgggctgcgggctctgcagtgagactgaactgccctcggccagatgcacgtccctttctttagacctgaaatgatattgcttcctgactaggagttctgtttatacaaaggaaaattctgggctggggaggacaaaagcaaaacagaccgcaggcagcgtgtttggagaaccagggtgaggccggtgccccgcctgcgccccggtctcctggggggcaaggggggtgcccagctgtgggctcctgaaggcagagcctgggtagctcccccagttgttggaccctgaggccaagggccatgggtggggcctgcaaggggccgggaacgcctggggacaggaagaagccccctggtctggtcctgctggaaaagtgaggctcccgggggaacagggtgccgggcccagcctcgtacccgtcggaaaaccaagagcaaaaaggagaggaatcaacccaaaccgagagccggggtggccggggtccctgctgccccttgggaagcgaccgcaacccatgccccaaggaccggggtatggtggcggcggcggcggcggcagctgtggacatctgtggacatctgtgctgttccgtagggaagttaacctgaattggaattaccgaggtagctggctagaaaactgagacccccccacgccacacggtgccgcaccctgggcccccgccttccccgggggttcctgaccacacgccgggtcttcaaaataccaaattattgcactttcaaaaaatacaacacatctgtggctaaaccctccccagccgcccactgtac

SEQ ID NO: 45524 - DNA, 1202 bp, Homo sapiens
tgggaggctgcgcggcgatgctgcagttcgtccgggccggggcgcgggcctggcttcggcctaccggcagccagggcctgagcttccctggcggaagaggcagcgcgtgcgaccgagaacccggagcaggtggcgagcgagggtctcccggagcccgtgctgcgcaaagtcgagctcccggtacccactcatcgacgcccagtgcaggcctgggtcgagtccttgcggggcttcgagcaggagcgcgtgggcctggccgacctgcaccccgatgttttcgccaccgcgcccaggctggacatactgcaccaggttgctatgtggcagaagaacttcaagagaattagctatgccaagaccaagacgagagccgaggtgcggcggcggtggccggaagccttggccgcagaaaggcactgggcgggcccggcatggcagcatccgctctccgctctggcgaggaggaggtgttgcccatggcccccggggccccacaagttactactacatgctgcccatgaaggtgcgggcgctgggtctcaaagtggcactgaccgtcaagctggcccaggacgacctgcacatcatggactccctagagctgcccaccggagacccacagtacctgacagagctggcgcactaccgccgctggggggactccgtactcctcgtggacttaacacacgaggagatgccacagagcatcgtggaggccacctctaggcttaagaccttcaacttgatcccggctgttggcctaaatgtgcacagcatgctcaagcaccagacgctggtcctgacgctgcccaccgtcgccttcctggaggacaagctgctctggcaggactcacgttacagacccctctaccccttcagcctgccctacagcgacttcccccgacccctaccccacgctacccagggcccagcggccaccccgtaccactgttgatgtgaagcacctcttctgagccaggccgagcccctggccgacttgggagcctcaggcccacgcccacccttcgaggaaggtgtcacctggaccccttcattccacggaggaagctgaggccacagggagcggccatcgccattgggaaggggcgactccacggaaagcccagacgggcttctgcatccattccctctttttgtttttaaaataaattgtatttttgaatcaaggaggaaaaaaaaaa

SEQ ID NO: 45525 - DNA, 4213 bp, Homo sapiens
  misc_feature (1)...(4213): n = a,t,c or g
gtctcttcaaggcaaaattgggtgaccaaggaaacctctctgaactggttaatctcatcttgacggtggctgatggagacaaagatggccaggtttccttgggagaagcaaagtcggcatgggcacttcttcaactgaatgaatttcttctcatggtgatacttcaagataaagaacatacccccaaattaatgggattctgtggtgacctctatgtgatggaaagtgttgaatatacctctctttatggaataagccttccttgggtcattgaactttttattccatctgggttcagaagaagcatggatcagctgttcacaccatcatggccaagaaaggccaaaatagccataggacttctagaatttgtggaagatgttttccatggcccctacggaaatttcctcatgtgcgatactagtgccaaaaacctaggatataatgataagtatgatttgaaaatggtggatatgagaaaaattgtgccagagacaaacctgaaagaacttattaaggatcgtcactgtgagtctgatttggactgtgtctatggcacagattgtagaactagctgtgatcagagtacaatgaagtgtacttcagaagtgatacaaccaaacttggcaaaagcttgtcagttactcaaagactacctactgcgtggtgctccaagtgaaattcgtgaagaattagaaaagcagctttattcttgtattgctctcaaagtcacagcaaatcaaatggaaatggaacattctttgatactaaataacctaaaaacattattgtggaagaaaatttcctacactaatgactcttagttcatttggacataattaccattttaagaaacctgccacttttaaagaacaattttgagcattaaaaaaaaatggcttcaaattcctgccagttacacaaaactccttccccccaggcctgagaagccatcagtatgtgattactgaagtaatggcaggtgtaggatcaacaggtccccaagatgtcattcctgcccttttagaagccctgttacatctccgaagtacattcattgtgtaactattttgactgactttaaaaaccaatgctgtgaaaagcttcattccataaacatcaacagtgagtgatttgtagatttaccttagccaaaataccaatgctggaagcattgtgtttgcattgaagctgctgttcaacaagaaaatttataaatttactaatgtcttagcatggtaaagtttgcacattaacagaaattaagactgcaaagcaggttaaacttgcttctttataaaacagatgttgggttaatagcatggtttactgtattaaagacttatacacccatttttaacctcattcagacatcaagttatgtgtagcttcacaatggttcaagtggcttacttcaagaaatcttatacttgacagtacaccaattttattgactaaaaatggatgaactttcctaaagattcaaagggcccatcttagtatcacgcagctgactgagcccttcaaaactgacatcttaaggcccaatcaagatccacatatcctgattttgaactatgtgaaagtgggactgtaagtgcaagactaaaataaattatagcagactttttagtaataactttccattttcaaacagtatatcctgtgggccaaagggctatttcttaaagaggcatgtaaatgtatttatttatctaatgtttttttccccatgtaaacttgatatacaaggtttagtatttgctcctctttcatattattttcacacgtatactcagatttggcatgtacctttcaacatctccataaaattaaacaccttttggagaaaagatccactattttctgctcaaaggtttcgcctacctaaagtggaacatgttaaaaatctatgtgaccatcactggacagctttctctcaaaactttccttcaacgccatggattagcaccagttttgtttactttaaggtacttttcccattcatcatctggttataataaatggatggaagaaatatttcccactgatggttggtctgttgcttgccaaatttttagggagagctgttcatcatacaacataagggataatgactcctgtcaggtaaaacagaagcccaagaaataacaactttttttcttaaaaagttagttacacttgttttcttggagaaaaaaacctgtcaactcctttgcttttccaaaatatttcagggtatttcctataaggttcataagaataagagcttaacacagaaatagttgctgttcataagtttattatctatatctgaaaaaatcatagaaaattgctgggtttagctctcagcagcccgctcctgagctctgaggaagcttgccttcttttgagctacccgatccttcttctgagcaagggacattttgggacggttccacctacaaaagataggaatatatattttttaaactataactgaagagaatagaatatttaatttaaaattttaataaaatttaattttgatagagaatatttaagactttgcaatcagaaggttaaataatccaagttcaaatacatttacttatgtatgatcttaagctaactttcccaaaccccaacttctgtgatgtcctactaccatagggccaaaagtcaaatagaagacatgttagattcagtaataccacttctaggtatttgcccaaatgttttgaaatcagtttgtccaagagagtggcactcccatgttcattgcagcactatatattaatagcaacagataaatggataaaggaaatgtggtatacatatacataatggattattacccagtctttaaaaatgatggaaattctgtcatttgcaacatgaatgaattggagaatattgtgctcagtgaaataacccggcacaaaaagacaaatacttcatattcatatagaatctaaaacaatggaactcacagaagcagagagcagaatggtggttacagaggctggtgggtgcaaagaatgggcagatgatagtcaagtataaaatctccaacaggaggagtagggaggagtatgattttgtttttagttctattgcacagcatgatgaatatagaatatcgtacatttcacaattaagagaataaatttcaaatgttgttgccacaaagtgttaagtatttgaggtgaatatgttaaatacattgatttaattactatacattgtatttgtgggccatcacatcactttatgcttacatgttcattaagtattactttctattccatttaaagattcaaaacatgaaaattcaacaaaaagcaacttgtcagccaataaaaaaatgcagtaaccagtacttagactgtactaagatagaaagaaccacctcagtagtgtctgaggctaacacatttccatcaccacagttacttttgcaaacctggttcccttcgcttctgccacatcacgcagagctagtgatcgagtttgcacaattacaccaacagtctgccccacgtgggaaccattcccaacctgttttcttgaaaagacaaaaaaaaagacgacatacctcttctttttaacttctttcttgggcttcttttcatanactggattctctcgtatagcagcatgagctttcttatacatctcctccatctgaaacaaaggaaagcaaacagtacttggtttcatttcatgtgccctactatattaatgcaaccataacttactcttgtccttctaagccagattctcaaaaggaactaaactaaatcaatgttggtaaacactttaacttctaaatgtaactcaccttttcctaacaaattcccaattttcaccttatgcaatgtgaattatcactacagaactccatcttactccagaaaaaatcaggccannnnnnnnnnnnnnnnnnnnnnnnnnnnnnnnnnnnnnnnnnnnnnnnnnnnnnnnnnnnnnnnnnnnnnnnnnnnnnnnnnnnnnnnnnnnnnnnnnnnntgtctccataaaaaaactaattagccaggtggcaattattannnnnnnnnnnnnnnnnnnnnnnnnnnnnnaggactacacgtgagtccaggaggtcaaggctgcagtggcacaatcacagctcactggaccccagcctagatgacagaatgagacctcatctctaccaaaaattaaaaaaaaaaaaaaaaaattagcaggg

SEQ ID NO: 45526 - DNA, 2927 bp, Homo sapiens
ctgcagagcgcgcccaggcaaccccgaaaggccggtcggggaccccggctgggagtcaggactctagctcccgggcgcgacccgagaaccctgaatccattccgcgcacacccggcacgcgtgacccctgccgaccggctggcgcgccacccattccccgcggcccgcggattagtcagcagttgttctagtccgggtcccttcccccagccctcccgccgatctccgtctccctgcagggccgactcttcagcgaccgtccctagagccagcggacggaaccattccaaacagcctagtctcgtgctgagagcctctccggtttcacgctgagacccgctcacccccgctctggccccttagatgctattttggcccgagtgtcacgtcgggcgctctttagagaggactgggacaagagttgcggacgcgaagaacgagtaagcggtggttcatccctcctgaccccacccccgtggcctggcccgatggtcgcgcccggggttgcgagatttgcgcctgcgcagtgcggcgcctagagggaaagcgagagggagacggacgttgagagaacgaggaggaaggagagaaaatggcgtccacggattacagtacctatagccaagctgcagcgcagcagggctacagtgcttacaccgcccagcccactcaaggatatgcacagaccacccaggcatatgggcaacaaagctatggaacctatggacagcccactgatgtcagctatacccaggctcagaccactgcaacctatgggcagaccgcctatgcaacttcttatggacagcctcccactggttatactactccaactgccccccaggcatacagccagcctgtccaggggtatggcactggtgcttatgataccaccactgctacagtcaccaccacccaggcctcctatgcagctcagtctgcatatggcactcagcctgcttatccagcctatgggcagcagccagcagccactgcacctacaagaccgcaggatggaaacaagcccactgagactagtcaacctcaatctagcacagggggttacaaccagcccagcctaggatatggacagagtaactacagttatccccaggtacctgggagctaccccatgcagccagtcactgcacctccatcctaccctcctaccagctattcctctacacagccgactagttatgatcagagcagttactctcagcagaacacctatgggcaaccgagcagctatggacagcagagtagctatggtcaacaaagcagctatgggcagcagcctcccactagttacccaccccaaactggatcctacagccaagctccaagtcaatatagccaacagagcagcagctacgggcagcagagttcattccgacaggaccaccccagtagcatgggtgtttatgggcaggagtctggaggattttccggaccaggagagaaccggagcatgagtggccctgataaccggggcaggggaagagggggatttgatcgtggaggcatgagcagaggtgggcggggaggaggacgcggtggaatgggcagcgctggagagcgaggtggcttcaataagcctggtggacccatggatgaaggaccagatcttgatctaggcccacctgtagatccagatgaagactctgacaacagtgcaatttatgtacaaggattaaatgacagtgtgactctagatgatctggcagacttctttaagcagtgtggggttgttaagatgaacaagagaactgggcaacccatgatccacatctacctggacaaggaaacaggaaagcccaaaggcgatgccacagtgtcctatgaagacccacccactgccaaggctgccgtggaatggtttgatgggaaagattttcaagggagcaaacttaaagtctcccttgctcggaagaagcctccaatgaacagtatgcggggtggtctgccaccccgtgagggcagaggcatgccaccaccactccgtggaggtccaggaggcccaggaggtcctgggggacccatgggtcgcatgggaggccgtggaggagatagaggaggcttccctccaagaggaccccggggttcccgagggaacccctctggaggaggaaacgtccagcaccgagctggagactggcagtgtcccaatccgggttgtggaaaccagaacttcgcctggagaacagagtgcaaccagtgtaaggccccaaagcctgaaggcttcctcccgccaccctttccgcccccgggtggtgatcgtggcagaggtggccctggtggcatgcggggaggaagaggtggcctcatggatcgtggtggtcccggtggaatgttcagaggtggccgtggtggagacagaggtggcttccgtggtggccggggcatggaccgaggtggctttggtggaggaagacgaggtggccctggggggccccctggacctttgatggaacagatgggaggaagaagaggaggacgtggaggacctggaaaaatggataaaggcgagcaccgtcaggagcgcagagatcggccctactagatgcagagaccccgcagagctgcattgactaccagatttattttttaaaccagaaaatgttttaaatttataattccatatttataatgttggccacaacattatgattattccttgtctgtactttagtatttttcaccatttgtgaagaaacattaaaacaagttaaatggtagtgtgcggagtttttttttcttccttcttttaaaaatggttgtttaagactttaacaatgggaaccccttgtgagcatgctcagtatcattgtggagaaccaagagggcctcttaactgtaacaatgttcatggttgtgatgttttttttttttttttaaataaaattccaaatgtttataaagagtca

SEQ ID NO: 45527 - DNA, 1831 bp, Homo sapiens
ccaggcgtcggtgctcagcggtgttggaacttcgttgcttgcttgcctgtgcgcgcgtgcgcggacatggcctcaaacgattatacccaacaagcaacccaaagctatggggcctaccccacccagcccgggcagggctattcccagcagagcagtcagccctacggacagcagagttacagtggttatagccagtccacggacacttcaggctatggccagagcagctattcttcttatggccagagccagaacacaggctatggaactcagtcaactccccagggatatggctcgactggcggctatggcagtagccagagctcccaatcgtcttacgggcagcagtcctcctatcctgggctatggccagcagccagctcccagcagcacctcgggaagttacggtagcagttctcagagcagcagctatgggcagccccagagtgggagctacagccagcagcctagctatggtggacagcagcaaagctatggacagcagcaaagctataatccccctcagggctatggacagcagaaccagtacaacagcagcagtggtggtggaggtggaggtggaggtggaggtaactatggccaagatcaatcctccatgagtagtggtggtggcagtggtggcggttatggcaatcaagaccagagtggtggaggtggcagcggtggctatggacagcaggaccgtggaggccgcggcaggggtggcagtggtggcggcggcggcggcggcggtggtggttacaaccgcagcagtggtggctatgaacccagaggtcgtggaggtggccgtggaggcagaggtggcatgggcggaagtgaccgtggtggcttcaataaatttggtggccctcgggaccaaggatcacgtcatgactccgaacaggataattcagacaacaacaccatctttgtgcaaggcctgggtgagaatgttacaattgagtctgtggctgattacttcaagcagattggtattattaagacaaacaagaaaacgggacagcccatgattaatttgtacacagacagggaaactggcaagctgaagggagaggcaacggtctcttttgatgacccaccttcagctaaagcagctattgactggtttgatggtaaagaattctccggaaatcctatcaaggtctcatttgctactcgccgggcagactttaatcggggtggtggcaatggtcgtggaggccgagggcgaggaggacccatgggccgtggaggctatggaggtggtggcagtggtggtggtggccgaggaggatttcccagtggaggtggtggcggtggaggacagcagcgagctggtgactggaagtgtcctaatcccacctgtgagaatatgaacttctcttggaggaatgaatgcaaccagtgtaaggcccctaaaccagatggcccaggagggggaccaggtggctctcacatggggggtaactacggggatgatcgtcgtggtggcagaggaggctatgatcgaggcggctaccggggccgcggcggggaccgtggaggcttccgagggggccggggtggtggggacagaggtggctttggccctggcaagatggattccaggggtgagcacagacaggatcgcagggagaggccgtattaattagcctggctccccaggttctggaacagctttttgtcctgtacccagtgttaccctcgttattttgtaaccttccaattcctgatcacccaagggttttttttgtgtcggactatgtaattgtaactatacctctggttcccattaaaagtgaccattttagttaaaaaaaaaaaaaaaaaa

SEQ ID NO: 45528 - DNA, 3986 bp, Homo sapiens
aatctatcagggaacggcggtggccggtgcggcgtgttcggtgcggctctggccgctcaggccgtgcggctgggtgagcgcacgcgaggcggcgaggcggcagcgtgtttctaggtcgtggcgtcgggcttccggagctttggcggcagctaggggaggatggcggagtcttcggataagctctatcgagtcgagtacgccaagagcgggcgcgcctcttgcaagaaatgcagcgagagcatccccaaggactcgctccggatggccatcatggtgcagtcgcccatgtttgatggaaaagtcccacactggtaccacttctcctgcttctggaaggtgggccactccatccggcaccctgacgttgaggtggatgggttctctgagcttcggtgggatgaccagcagaaagtcaagaagacagcggaagctggaggagtgacaggcaaaggccaggatggaattggtagcaaggcagagaagactctgggtgactttgcagcagagtatgccaagtccaacagaagtacgtgcaaggggtgtatggagaagatagaaaagggccaggtgcgcctgtccaagaagatggtggacccggagaagccacagctaggcatgattgaccgctggtaccatccaggctgctttgtcaagaacagggaggagctgggtttccggcccgagtacagtgcgagtcagctcaagggcttcagcctccttgctacagaggataaagaagccctgaagaagcagctcccaggagtcaagagtgaaggaaagagaaaaggcgatgaggtggatggagtggatgaagtggcgaagaagaaatctaaaaaagaaaaagacaaggatagtaagcttgaaaaagccctaaaggctcagaacgacctgatctggaacatcaaggacgagctaaagaaagtgtgttcaactaatgacctgaaggagctactcatcttcaacaagcagcaagtgccttctggggagtcggcgatcttggaccgagtagctgatggcatggtgttcggtgccctccttccctgcgaggaatgctcgggtcagctggtcttcaagagcgatgcctattactgcactggggacgtcactgcctggaccaagtgtatggtcaagacacagacacccaaccggaaggagtgggtaaccccaaaggaattccgagaaatctcttacctcaagaaattgaaggttaaaaagcaggaccgtatattccccccagaaaccagcgcctccgtggcggccacgcctccgccctccacagcctcggctcctgctgctgtgaactcctctgcttcagcagataagccattatccaacatgaagatcctgactctcgggaagctgtcccggaacaaggatgaagtgaaggccatgattgagaaactcggggggaagttgacggggacggccaacaaggcttccctgtgcatcagcaccaaaaaggaggtggaaaagatgaataagaagatggaggaagtaaaggaagccaacatccgagttgtgtctgaggacttcctccaggacgtctccgcctccaccaagagccttcaggagttgttcttagcgcacatcttgtccccttggggggcagaggtgaaggcagagcctgttgaagttgtggccccaagagggaagtcaggggctgcgctctccaaaaaaagcaagggccaggtcaaggaggaaggtatcaacaaatctgaaaagagaatgaaattaactcttaaaggaggagcagctgtggatcctgattctggactggaacactctgcgcatgtcctggagaaaggtgggaaggtcttcagtgccacccttggcctggtggacatcgttaaaggaaccaactcctactacaagctgcagcttctggaggacgacaaggaaaacaggtattggatattcaggtcctggggccgtgtgggtacggtgatcggtagcaacaaactggaacagatgccgtccaaggaggatgccattgagcacttcatgaaattatatgaagaaaaaaccgggaacgcttggcactccaaaaatttcacgaagtatcccaaaaagttctaccccctggagattgactatggccaggatgaagaggcagtgaagaagctgacagtaaatcctggcaccaagtccaagctccccaagccagttcaggacctcatcaagatgatctttgatgtggaaagtatgaagaaagccatggtggagtatgagatcgaccttcagaagatgcccttggggaagctgagcaaaaggcagatccaggccgcatactccatcctcagtgaggtccagcaggcggtgtctcaggggcagcagcgactctcagatcctggatctctcaaatcgcttttacaccctgatcccccacgactttgggatgaagaagcctccgctcctgaacaatgcagacagtgtgcaggccaaggtggaaatgcttgacaacctgctggacatcgaggtggcctacagtctgctcaggggagggtctgatgatagcagcaaggatcccatcgatgtcaactatgagaagctcaaaactgacattaaggtggttgacagagattctgaagaagccgagatcatcaggaagtatgttaagaacactcatgcaaccacacacaatgcgtatgacttggaagtcatcgatatctttaagatagagcgtgaagggcgaatgccagcgttacaagccctttaagcagcttcataaccgaagattgctgtggcacgggtccaggaccaccaactttgctgggatcctgtcccaggggtcttcggatagccccgcctgaagcgcccgtgacaggctacatgtttggtaaagggatctatttcgctgacatggtctccaagagtgccaactactgccataccgtctcagggagacccaataggcttaatcctgttgggagaagttgcccttggaaacatgtatgaactgaagcacgcttcacatatcagcaagttacccaagggcaagcacagtgtcaaaggtttgggcaaaactacccctgatccttcagctaacattagtctggatggtgtagacgttcctcttgggaccgggatttcatctggtgtgaatgacacctctctactatataacgagtacattgtctatgatattgctcaggtaaatctgaagtatctgctgaaactgaaattcaattttaagacctccctgtggtaattgggagaggtagccgagtcacacccggtggctctggtatgaattcacccgaagcgcttctgcaccaactcacctggccgctaagttgctgatgggtagtacctgtactaaaccacctcagaaaggattttacagaaacgtgttaaaggttttctctaacttctcaagtcccttgttttgtgttgtgtctgtggggaggggttgttttggggttgtttttgttttttcttgccaggtagataaaactgacatagagaaaaggctggagagagattctgttgcatagactagtcctatggaaaaaaccaagcttcgttagaatgtctgccttactggtttccccagggaaggaaaaatacacttccacccttttttctaagtgttcgtctttagttttgattttggaaagatgttaagcatttatttttagttaaaaataaaaactaatttcatactatttagattttcttttttatcttgcacttattgtcccctttttagttttttttgtttgcctcttgtggtgaggggtgtgggaagaccaaaggaaggaacgctaacaatttctcatacttagaaacaaaaagagctttccttctccaggaatactgaacatgggagctcttgaaatatgtagtattaaaagttgcatttgaaattcttgactttcttatgggcacttttgtcttccaaattaaaactctaccacaaatatacttacccaagggctaatagtaatactcgattaaaaatgcagatgccttctctaaaaaaaaaa

SEQ ID NO: 45529 - DNA, 458 bp, Homo sapiens
  misc_feature (1)...(458): n = a,t,c or g
gtgnnnnnnattgaanttgganancgttatgacatgattacgaatttaatacgactcactatagggaatttggccctcgaggccaagaattcggcacgagagaagaatcatgaatttgcaacagacctaatttttgggtactttttgtcttattgatggatttgaaaatgaaagatttaataaggcaaagcagaatctgttgtccttaattatatttgcaatttggaatttgtgtgagttgatttagtaaaatgttaaaccgttgttgtgactggtgtgttccagttattgtgcccgtgagtcacaggtcttaagtcggcttctgcagtcccaggatgtgggggcagggcagtccatccccctcaacccccaccctgctcccacaactccttggatgctccacagtgttcactgcaacctgggtgggtgtgggccatctgctggccccagtggtttgt

SEQ ID NO: 45530 - DNA, 2078 bp, Homo sapiens
cctcgaagcacctactccacaggtccagccggccggtgagcgcctggggaccgcagaggtgagagtcgcgcccgggagtccgccgcctgcgccaggatggagttcgtgaaatgcctcggccaccccgaagagttctacaacctggtgcgcttccggatcgggggcaagcggaaggtgatgcccaagatggaccaggactcgctcagcagcagccctgaaaacttgctacaagtatctcaatcagaccagtcgcagtttcgcagctgttatccagggcgctggatggggaaatgcgcaacgcagtgtggcatattttatctggttctccgagctctggacacacttggaagatgacatgaccatcagtgtggaaaagaaggtcccgctgtttacacaacttttcactctttcctttaccaaccagactggcggttcatggagagcaaggagaaggatcgccaggtgctgggaggacttcccaacgatctccctttgagtttagaaatctggctgagaaataccaaacagtgattgccgacatttgccggagaatgggcattgggatggcagagtttttggataagcatgtgcacctctgaacaggagtgggacaagtacttgccactatgttgctgggctggtcggaattggcctttcccgtcttttctcagcctcagagtttgaagaccccttagttggtgaagatacagaacgtgccaactctatgggcctgtttctgcagaaaacaaacatcatcccgtgactatctgggaagaccagcaaggaggaagagagttctggcctcaagaggtttggagcaggtatgttaagaagttaggggattttgctaagccggagaatattgacttggccgtgcagtgcctgaatgaacttataaccaatgcactgcaccacatcccagatgtcatcacctacctttcgagactcagaaaccagagtgtgtttaacttctgtgctattccacaggtgatggccattgccactttggctgcctgttataataaccagcaggtgttcaaaggggcagtgaagattcggaaagggcaagcagtgaccctgatgatggatgccaccaatatgccagctgtcaaagccatcatatatcagtatatggaagagatttatcatagaatccccgactcagacccatcttctagcaaaacaaggcagatcatctccaccatccggacgcagaatcttcccaactgtcagctgatttcccgaagccactactcccccatctacctgtcgtttgtcatgcttttggctgccctgagctggcagtacctgaccactctctcccaggtaacagaagactatgttcagactggagaacactgatcccaaatttgtccatagctgaagtccaccataaagtggatttactttttttctttaaggatggatgttgtgttctctttatttttttcctactactttaatccctaaaagaacgctgtgtggctgggacctttaggaaagtgaaatgcaggtgagaagaacctaaacatgaaaggaaagggtgcctcatcccagcaacctgtccttgtgggtgatgatcactgtgctgcttgtggctcatggcagagcattcagtgccacggtttaggtgaagtcgctgcatatgtgactgtcatgagatcctacttagtatgatcctggctagaatgataattaaaagtatttaatttgaagcaccatttgaatgttcgtaatagtagaaaatgatgtgaattttctttctgttcggctcctatttttctcatcattttgttttctttaattgggttgaatggagtagatagaaatatttatggtttaggtaacagttagatgtttcctaagaatgcaaactgccttttccacacaaaggctgggaataaaattctgggtattctcgtattctcatttaaaggagtttagctttcagagagaaacagcaggattgcttttgaccttttagaagattggtctccagtaaaggtggacatttttgagatttttataataaagaatttaattgctctgcatttgtcaagtaaaaaaaaaaaaaaaaa

SEQ ID NO: 45531 - DNA, 4157 bp, Homo sapiens
aggaaggaaggagcagttggttcaatctctggtaatctatgccagcaattatgacaatgttagcagaccatgcagctcgtcagctgcttgatttcagccaaaaactggatatcaacttattagataatgtggtgaattgcttataccatggagaaggagcccagcaaagaatggctcaagaagtactgacacatttaaaggagcatcctgatgcttggacaagagtcgacacaattttggaattttctcagaatatgaatacgaaatactatggactacaaattttggaaaatgtgataaaaacaaggtggaagattcttccaaggaaccagtgcgaaggaataaaaaaatacgttgttggcctcattatcaagacgtcatctgacccaacttgtgtagagaaagaaaaggtgtatatcggaaaattaaatatgatccttgttcagatactgaaacaagaatggcccaaacattggccaacttttatcagtgatattgttggagcaagtaggaccagcgaaagtctctgtcaaaataatatggtgattcttaaactcttgagtgaagaagtatttgatttctctagtggacagataacccaagtcaaatctaagcatttaaaagacagcatgtgcaatgaattctcacagatatttcaactgtgtcagtttgtaatggaaaattctcaaaatgctccacttgtacatgcaaccttggaaacattgctcagatttctgaactggattcccctgggatatatttttgagaccaaattaatcagcacattgatttataagttcctgaatgttccaatgtttcgaaatgtctctctgaagtgcctcactgagattgctggtgtgagtgtaagccaatatgaagaacaatttgtaacactatttactctgacaatgatgcaactaaagcagatgcttcctttaaataccaatattcgacttgcgtactcaaatggaaaagatgatgaacagaacttcattcaaaatctcagtttgtttctctgcacctttcttaaggaacatgatcaacttatagaaaaaagattaaatctcagggaaactcttatggaggcccttcattatatgttgttggtatctgaagtagaagaaactgaaatctttaaaatttgtcttgaatactggaatcatttggctgctgaactctatagagagagtccattctctacatctgcctctccgttgctttctggaagtcaacattttgatgttcctcccaggagacagctatatttgcccatgttattcaaggtccgtttattaatggttagtcgaatggctaaaccagaggaagtattggttgtagagaatgatcaaggagaagttgtgagagaattcatgaaggatacagattccataaatttgtataagaatatgagggaaacattggtttatcttactcatctggattatgtagatacagaaagaataatgacagagaagcttcacaatcaagtgaatggtacagagtggtcatggaaaaatttgaatacattgtgttgggcaataggctccattagtggagcaatgcatgaagaggacgaaaaacgatttcttgttactgttataaaggatctattaggattatgtgaacagaaaagaggcaaagataataaagctattattgcatcaaatatcatgtacatagtaggtcaatacccacgttttttgagagctcactggaaatttctgaagactgtagttaacaagctgttcgaattcatgcatgagacccatgatggagtccaggatatggcttgtgatactttcattaaaatagcccaaaaatgccgcaggcatttcgttcaggttcaggttggagaagtgatgccatttattgatgaaattttgaacaacattaacactattatttgtgatcttcagcctcaacaggttcatacgttttatgaagctgtggggtacatgattggtgcacaaacagatcaaacagtacaagagcacttgatagaaaagtacatgttactccctaatcaagtgtgggatagtataatccagcaggcaaccaaaaatgtggatatactgaaagatcctgaaacagtcaagcagcttggtagcattttgaaaacaaatgtgagagcctgcaaagctgttggacacccctttgtaattcagcttggaagaatttatttagatatgcttaatgtatacaagtgcctcagtgaaaatatttctgcagctatccaagctaatggtgaaatggttacaaagcaaccattgattagaagtatgcgaactgtaaaaagggaaactttaaagttaatatctggttgggtgagccgatccaatgatccacagatggtcgctgaaaattttgttccccctctgttggatgcagttctcattgattatcagagaaatgtctcagctgctagagaaccagaagtgcttagtactatggccataattgtcaacaagttagggggacatataacagctgaaatacctcaaatatttgatgctgtttttgaatgcacattgaatatgataaataaggactttgaagaatatcctgaacatagaacgaactttttcttactacttcaggctgtcaattctcattgtttcccaggcattccttgctattccacctacacagtttaaacttgttttgggattccatcatttgggctttcaaacatactatgaggaatgtcgcagatacgggcttacagatactttttacactcttacaaaatgttgcacaagaagaagctgcagcttcagagtttttatcaaacttatttttgtgatattctccagcatatcttttctgttgtgacagacacttcacatactgctggtttaacaatgcatgcatcaattcttgcatatatgtttaatttggttgaagaaggaaaaataagtacatcattaaatcctggaaatccagttaacaaccaaatctttcttcaggaatatgtggctaatctccttaagtcggccttccctcacctacaagatgctcaagtaaagctctttgtgacagggcttttcagcttaaatcaagatattcctgctttcaaggaacatttaagagatttcctagttcaaataaaggaatttgcaggtgaagacacttctgatttgtttttggaagagagagaaatagccctacggcaggctgatgaagagaaacataaacgtcaaatgtctgtccctggcatctttaatccacatgagattccagaagaaatgtgtgattaaaatccaaattcatgctgttttttttctctgcaactccgttagcagaggaaaacagcatgtgggtatttgtcgaccaaaatgatgccaatttgtaaattaaaatgtcacctagtggccctttttcttatgtgtttttttgtataagaaattttctgtgaaatatccttccattgtttaagcttttgttttggtcatctttatttagtttgcatgaagttgaaaattaaggcatttttaaaaattttacttcatgcccatttttgtggctgggctggggggaggaggcaaattcaatttgaacatatacttgtaattctaatgcaaaattatacaatttttcctgtaaacaataccaatttttaattagggagcattttccttctagtctatttcagcctagaagaaaagataatgagtaaaacaaattgcgttgtttaaaggattatagtgctgcattgtctgaagttagcacctcttggactgaatcgtttgtctagactacatgtattacaaagtctctttggcaagattgcagcaagatcatgtgcatatcatcccattgtaaagcgacttcaaaaatatgggaacacagttagttatttttacacagttctttttgtttttgtgtgtgtgtgctgtcgcttgtcgacaacagctttttgttttcctcaatgaggagtgttgctcatttgtgagccttcattaactcgaagtgaaatggttaaaaatatttatcctgttagaataggctgcatctttttaacaactcattaaaaaacaaaacaactctggcttttgagatgacttatactaatttacattgtttaccaagctgtagtgctttaagaacactacttaaaaagcaaaataaacttggtttacatttaaaaaaaaaaaaaa

SEQ ID NO: 45532 - DNA, 2155 bp, Homo sapiens
  misc_feature (1)...(2155): n = a,t,c or g
agagcccgtcccggagccagcggttctccaagcacccagcatcctgctagacgcgccgcgcaccgacggaggggacatgggcagagcaatggtggccaggctcgggctggggctgctgctgctggcactgctcctacccacgcagatttattccagtgaaacaacaactggaacttcaagtaactcctcccagagtacttccaactctgggttggccccaaatccaactaatgccaccaccaaggcggctggtggtgccctgcagtcaacagccagtctcttcgtggtctcactctctcttctgcatctctactcttaagagactcaggccaagaaacgtcttctaaatttccccatcttctaaacccaatccaaatggcgtctggaagtccaatgtggcaaggaaaaacaggtcttcatcgaatctactaattccacaccttttattgacacagaaaatgttgagaatcccaaatttgattgatttgaagaacatgtgagaggtttgactagatgatggatgccaatattaaatctgctggagtttcatgtacaagatgaaggagaggcaacatccaaaatagttaagacatgatttccttgaatgtggcttgagaaatatggacacttaatactaccttgaaaataagaatagaaataaaggatgggattgtggaatggagattcagttttcatttggttcattaattctataaggccataaaacaggtaatataaaaagcttccatgattctatttatatgtacatgagaaggaacttccaggtgttactgtaattcctcaacgtattgtttcgacagcactaatttaatgccgatatactctagatgaagttttacattgttgagctattgctgttctcttgggaactgaactcactttcctcctgaggctttggatttgacattgcatttgaccttttatgtagtaattgacatgtgccagggcaatgatgaatgagaatctacccccagatccaagcatcctgagcaactcttgattatccatattgagtcaaatggtaggcatttcctatcacctgtttccattcaacaagagcactacattcatttagctaaacggattccaaagagtagaattgcattgaccgcgactaatttcaaaatgctttttattattattannnnnnnnnnnnnnnnnnnnnnnnnnnnnnnnnnnnnnnnnnnnnnnnnnnnnnnnnnnnnnnnnnnnnnnnnnnnnnnnnnnnnnnnnnnnnnnnnnnnnnnnnnnnnnnnnnnnnnnnnnnnnnnnnnnnnnnnnnnnnnnnnnnnnnnnnnnnnnnnnnnnnnnnnnnnnnnnnnnnnnnnnnnnnnnnnnnnnnnnnnnnnnnnnnnnnnnnnnnnnnnnnnnnnnnnnnnnnnnnnnnnnnnnnnnnnnnnnnnnnnnnnnnnnnnnnnnnnnnnnnnnnnncaaaatgctttttatttctgcatatgtttgaatactttttacaatttaaaaaaatgatctgttttgaaggcaaaattgcaaatcttgaaattaagaaggcaaaaatgtaaaggagtcaaaactataaatcaagtatttgggaagtgaagactggaagctaatttgcattaaattcacaaacttttatactctttctgtatatacattttttttctttaaaaaacaactatggatcagaatagccacatttagaacactttttgttatcagtcaatatttttagatagttagaacctggtcctaagcctaaaagtgggcttgattctgcagtaaatcttttacaactgcctcgacacacataaacctttttaaaaatagacactccccgaagtcttttgttcgcatggtcacacactgatgcttagatgttccagtaatctaatatggccacagtagtcttgatgaccaaagtcctttttttccatctttagaaaactacatgggaacaaacagatcgaacagttttgaagctactgtgtgtgtgaatgaacactcttttgctttattccagaatgctgtacatctattttggattgtatattgtgtttgtgtatttacgctttgattcatagtaacttcttatggaattgatttgcattgaacacaaactgtaaataaaaagaaatggctgaaagagcaaaaa

SEQ ID NO: 45533 - DNA, 1259 bp, Homo sapiens
ctagaattcagcggccgctgaattctagaacgggctgcaggagaagatggcggtctccacaggagttaaagttcctcgtaattttcgcttgttggaagaacttgaagaaggacaaaaaggagtaggcgacggtacagttagctggggccttgaagatgatgaagatatgacacttacaaggtggacaggcatgattattgggccaccaaggacaaattatgaaaacagaatatatagcctgaaagtagaatgtggacctaaatacccagaagctcctccgtcagttagatttgtaacaaaaattaatatgaacggaataaataattccagtgggatggtggatgcccggagcataccagtgttagcaaaatggcaaaattcatatagcattaaagttgtacttcaagagctaagacgtctaatgatgtccaaagaaaatatgaagcttccacagccaccagaaggacaaacatacaacaattaattttagtggatctcaaacttgtcttaaatcaacaaccttctactcatgttaatgtcttgattaaatatcacaatgcaaaatacacattaagtaaaagaattccagctggtaaacatgacctggacatttgtaagaatatatttaatatatgtacacccattatgttttcaggtaacaggaggaaaaatgcagcacaattttttttctcttgaaaggcactgtcatttaaacataaacctggagtactcgaaatagaattcaggtttacaagatgaaagcgtgtggagaagtgtcagatggcagtggaagcatgtgtgtttctaaaaagtaaaaatctcaagaaaacagaaatggcatgctttacccatcttacttagtgaaagagagctgcagttgaaattgtttaaaaagtagcaggtacaatgaatattgtcacagatgtgttaatttttgaagcaatgtgggtgctgactactagtagtatcaaaaatatgttcaggattgttttgatacctgtatttataataaaaaatgttggggggagttgatgaattcctgttaaaagctgttcttgtgtgttacatgtaacagacatggtaaatatttgtttacagtctttgtttaacaaaccatgcatttaagtttaagtgaagtcaacaaaaaggaaataggtgtatggatatgtgattttgagattaaagttagtcttaaaatgtaaataaaatgtgaaacgtgtcctcagagactgtgccatttcaaaacaaaaaaaaaaaaa

SEQ ID NO: 45534 - DNA, 1866 bp, Homo sapiens
gagctgggaggctgcgagatccctaccgcagtagccgcctctgccgccgcggagcttcccgaacctcttcagccgcccggagccgctcccggagcccggccgtagaggctgcaatcgcagcggcgagcccgcagcccgcgccccgagcccgccgccgcccttcgagggcgccccaggccgcgccatggtgaaggtgacgttcaactccgctctggcccagaaggaggccaagaaggacgagcccaagagcggcgaggaggcgctcatcatcccccccgacgccgtcgcggtggactgcaaggacccagatgatgtggtaccagttggccaaagaagagcctggtgttggtgcatgtgctttggactagcatttatgcttgcaggtgttattctaggaggagcatacttgtacaaatattttgcacttcaaccagatgacgtgtactactgtggaataaagtacatcaaagatgatgtcatcttaaatgagccctctgcagatgccccagctgctctctaccagacaattgaagaaaatattaaaatctttgaagaagaagaagttgaatttatcagtgtgcctgtcccagagtttgcagatagtgatcctgccaacattgttcatgactttaacaagaaacttacagcctatttagatcttaacctggataagtgctatgtgatccctctgaacacttccattgttatgccacccagaaacctactggagttacttattaacatcaaggctggaacctatttgcctcagtcctatctgattcatgagcacatggttattactggatcgcattgaaaacattgatcacctgggtttctttatttatcgactgtgtcatgacaaggaaacttacaaaactgcaacgcagagaaactattaaaggtattcagaaacgtgaagccagcaattgtttcgcaattcggcattttgaaaacaaatttgccgtggaaactttaatttgttcttgaacagtcaagaaaaacattattgaggaaaattaatatcacagcataaccccaccctttacattttgtgcagtgattattttttaaagtcttctttcatgtaagtagcaaacagggctttactatcttttcatctcattaattcaattaaaaccattaccttaaaatttttttctttcgaagtgtggtgtcttttatatttgaattagtaactgtatgaagtcatagataatagtacatgtcaccttaggtagtaggaagaattacaatttctttaaatcatttatctggatttttatgttttattagcattttcaagaagacggattatctagagaataatcatatatatgcatacgtaaaaatggaccacagtgacttatttgtagttgttagttgccctgctacctagtttgttagtgcatttgagcacacattttaattttcctctaattaaaatgtgcagtattttcagtgtcaaatatatttaactatttagagaatgatttccacctttatgttttaatatcctaggcatctgctgtaataatattttagaaaatgtttggaatttaagaaataacttgtgttactaatttgtataacccatatctgtgcaatggaatataaatatcacaaagttgtttaactagactgcgtgttgtttttcccgtataataaaaccaaagaatagtttggttcttcaaatcttaagagaatccacataaaagaagaaactattttttaaaaattcacttctatatatacaatgagtaaaatcacagattttttctttaaataaaaataagtcattttaataactaaaccagattctttgtggatactattaaggtaacatttaagcctcaaaaaaaaaaaaaa

SEQ ID NO: 45535 - DNA, 3566 bp, Homo sapiens
caggtctcgacttcactgctctgtgtcctctgctccaggaggcccagcctgtgtggccctgtgacctgcaggtattggaagagccacagctaagatgccaggaacccctggaagcctagaaatgggactgttgacatttagggatgtggccatagaattctctccggaggagtggcaatgtctggacactgcacagcagaatttatataggaatgtgatgttagagaactacagaaacctggccttcctgggtattgctctctctaagccagacctgattacttatctggagcaaggaaaagagccctggaatatgaagcaacatgagatggtggatgaacccacaggtatatgtcctcattttcctcaagacttttggccagagcagagcatggaagattcttttcaaaaagtattactgagaaaatatgaaaaatgtggacatgagaatttacagttaagaaaaggttgtaaaagtgtggatgagtgtaaggtgcacaaagaaggttataataaacttaaccagtgtctcacaactgcccagagcaaagtatttcaatgtgggaaatatttgaaagtcttctataaatttttaaattcaaacagacatacgataagacataccggaaagaaatgcttcaaatgtaaaaaatgtgtcaagtcattttgcatccgtttacacaaaacccaacataaatgcgtttatattacagagaagtcctgtaaatgtaaagaatgtgaaaaaacctttcattggtcctcaacccttactaatcataaggaaattcatactgaagataaaccctacaaatgtgaagaatgtggcaaagcttttaagcagctctcaacccttactacacataaaataatctgtgctaaagagaaaatctacaagtgtgaagaatgtggcaaagcatttctatggtcctcaaccctaactagacataagaggatacacactggagagaagccctacaaatgtgaagaatgtggcaaagcttttagccattcttcaacccttgctaaacataagagaattcatactggagagaaaccctacaaatgtgaagaatgtggcaaagcttttagccattcttcagcccttgctaaacataagagaattcatactggagagaaaccctacaaatgtaaagaatgtggcaaagcttttagcaattcctcaaaccttattgtacataagagaattcatactggagagaaaccctacaaatgtaaagaatgtgacaaaacttttaagcgactctcaacccttactaaacataaaataatacatgctggagagaaactctacaaatgtgaagaatgtggcaaagcttttaatcgatcttcaaatcttactatacataagagaattcatactggagagaaaccttacaagtgtgaagaatgtggcaaagcatttaactggtccacaaaccttactaaacataaaagatttcatactagagagaaacccttcaaatgtaaagaatgtggcaaaggatttatatggtcttcaaccctaactagacataagaggatacacactggagagaagccctacaaatgtgaagaatgtggcaaagcttttaggcaatcctcaacccttactaaacataagataattcatactggagagaaaccctacaaatttgaagaatgtggcaaagcttttagacaatccttaacccttaataaacataagataattcatagtagagagaaaccctacaaatgtaaagaatgtggcaaagcttttaagcaattctcaacccttactacacataaaataattcatgctggaaagaaactctacaaatgtgaagaatgtggcaaagcttttaatcattcctcaagtctttctacacataagataattcatactggagagaagtcttacaagtgtgaagaatgtggcaaagcatttctatggtcctcaaccctaagaagacataagaggatacacactggagagaaaccctacaaatgtgaagaatgtggcaaagcttttagccattcttcagcccttgctaaacataagagaattcatactggagagaaaccctacaaatgtaaagaatgtggcaaagcttttagcaattcctcaacccttgctaatcataagataactcatactgaagagaaaccctacaaatgtaaagaatgtgacaaaacttttaagcgactctcaacccttactaaacataaaataatacatgctggagagaaactctacaaatgtgaagaatgtggcaaagcttttaatcgatcttcaaatcttactacacataagtttattcatactggagagaaaccctacaagtgtgaagaatgtggcaaagcatttaactggtcctcaagccttactaaacataaaagaattcataccagagagaagccctatgaatgtaaagaatgtggcaaagcatttatatggtcttcaaccctaactagacataagaggatacacactggagagaagccctacaaatgtgaagaatgtggcaaagcttttagccgttcctcaacccttactaagcataagacaattcatactggagagaaaccctacaaatgtaaagaatgtggcaaagcttttaagcactcctcagcccttgctaaacataaaataatacatgctggagagaaactctacaaatgtaaagaatgtggcaaagcttttaatcaatcttcaaatcttacgacacataagataattcatactggagagaaaccttccaagagtgaagaatgtgacaaagcatttatctggtcctcaacccttactgaacataagagaattcataccagagaaaaaccctacaaatgtgaagaatgtggcaaagcatttagccagccttcacaccttactacacataagaggatgcacactggagagaaaccctacaaatgtgaagaatgtggcaaagcttttagccaatcctcaacccttactacacataagataattcatactggagagaaaccctacaaatgtgaagaatgtggcaaagcttttaggaaatcttcaactcttactgaacataagataattcatactggagagaaaccctacaaatgtgaagaatgtggcaaagcatttagccaatcctcaaccctaactagacatcatcgaattcatactggagagaaaccatacaaatgtgaagaatgtgggaaagcttttaatcgatcctcaaagcttactacacataagataattcatactggagagaaaccttacaagtgtgaagaatgtggcaaagcatttatatcatcctcaaccctaaatggacataagagaattcatactagagagaaaccctacaaatgtgaagaatgtggcaaagcatttagccaatcttcaaccctaactagacataagaggttgcacaccggagagaaaccctacaaatgtggagaatgtggcaaagcctttaaagagtcctcagctcttactaaacataagataattcacactggagagaaaccctacaaatgtgaaaaatgttgcaaagcctttaaccagtcttcaatccttactaaccataagaaaattcatacta

SEQ ID NO: 45536 - DNA, 3087 bp, Homo sapiens
gaggacacgggctgcaacctgcagacatcagcgaccgggagaacatagacgatttgaacatggaattcaatccttcagatcatcctcgggccagcacaatattcctcagtaaatctcagacagacgtgagagaaaaacgcaagagtctcttcattaaccatcatcctccaggacaaatagcaaggaaatacagttcctgctccaccattttcctagatgatagcacagtcagtcaaccaaacctcaagtatacaattaaatgtgtcgctcttgcaatatattatcacatcaaaaacagggacccagatggaaggatgctcttagatatttttgatgaaaatcttcaccctctttcgaaatccgaagtgccaccagattatgacaaacacaacccagagcagaagcagatttaccggttcgttcggacactgttcagtgctgctcagctgacggctgaatgtgccatcggtcaccctggtgtaccttgaaagacttttaacatacgcagagatagatatctgtccggccaactggaagcggattgttttaggggcgatcctgctggcctccaaggtgtggggatgaccaggctgtatggaatgtggattactgccagatcctgaaagacatcacggtggaggacatgaacgagctagagcgacagtttcttgaattgctgcagttcaacatcaatgttccttccagtgtctatgccaagtattattttgatcttcgttctctggcagaagcgaacaacctgagctttcccttggagcccctgagcagggagagggctcacaagcttgaggccatctctcgcctctgcgaggacaagtacaaggacctaagaagatccgcgaggaagcgctcagccagtgcagacaacctgactctgccccggtgggtccccagccatcatcttttaactacggaggcccgccggaggccacaccatcccttagtttctcctttagtttgagaaaagacagacttggggtgggtttgtttttgttttttctttccttttctttttttacgcatagctccgtcaagctgcctggatgagcgcccatgcagcaaggcttggaggaagcgtcagtgccctggagatcccagctcgctctccccactgtcagcaacagcacttccttcgtggaggaagtggactcgaatcctggaggaggaaataaagggaaagggaagtcgtggagaggcagggaaaatggttaagcagcccggccctctggagtccccatgggggcggtagctgaagttggcgagcgcagcggtggatgcagagctggctgcacccagggctgggccagtgtgtcctgtaagacttcttgcattccttctgctgcttttttgggatgggggtatttttgttcatttgtttttgccctgttttgattttggtcccacagagcaggggatgtagtttgtacccaccatggcgcagacttccaaataaatagtactggtcatttctctccgcactatttctgcgcgctgtcttctgagctttcttcctcaccagtgggctgtgcttgttccatttctgtacacccttattttataccgtttttcttcaacaatggcgaaattgactgtagtgctgaaccaaaagtatccctttccctccttattcctcaccccaagaacattctagatcacatgggtgcttgtgccttccgattttcttgcatttgtttttttcctgacctgaagttgttgttacaaaatcagtcagactttgtgggctgaaggacacggtgcagcagagggtgtccctgtgagagttctgcagagtgctgggcatgtgcctggaactaccgagtaggagccatttctttgtacccctgcctaatccattcctctccttccaagtccattgttgcaagcaatattcttctcaatttttatatgtttactttaaatcaaagttagtctatttgtataaaatttttaaaaaatctaaaagaaaaagaaaaaaaacaagggtgggttgggtattccagtgggaagatcattgaagggaaaaatgttactatttactgaggtatttttcacagaatgattgaattaaaaaaaactcaacttgcattttcattgtgggtgcttagagaagttctacaaaattcaaactgtgaaggtttatgcttcattaattatgaccatactttttcattttctgacgatccctgatttccttatggactcaataagaatcttttatatcaagtaaaatgaaagttgatgatagaatatcaaatagtgaatttgatatgaaatctaagagtgtgagtcacttgcatatgtaatgctttgggtttttgcatattttcttaggtcacagtgaccaggtttctgagttgtttcccttttcaagtctctgggaggccagtggcagcagcaggtctgtgtttcaccttcttcccatgtgagcttggaaaactttggcatcttaattagtcttgaatcatacacctgatccccaaacattgcctgctctcaatgaaacatgctttggaaatggaagggactcagaaagtcgaaatcccaagaactccaagccaaaagtgttaggttttagtgaaatttgtgtcaggtataagcatacctgtttgggccagaattattatcacagcctttctgacccaaactttcaaaagcaaataaacagcatataaaacgttaattatctttccattgtaattgtgatgatctactctgtatgggtaccaaaatcaccttctctcttcaagtcaaagttgaatttagaactttgaatacaggtcaaaaaatgtagaaaatatcattttatattccctaatctatatagctgaaaaagggttgtattttcttagctgaatatgaatacctcttaaacataaattagttcctctccagtgaagtatcttattttaccaatccatttcaggaaagaggttctgctgccgtaaaggcagaaattttatttttatcccttttatttgaatgagagatttgaaaatcgaattatgtaaatatttcaatgcatctgctattattttgtggagtttattaaactactttaaaaaaaaaaaa

SEQ ID NO: 45537 - DNA, 4268 bp, Homo sapiens
aggcaaggatgccggctctggacggacagatggatggaggcgcaggcggactcaggggctccttccttggttgggggagtcggcagccgccctgctcctgcagggccgttcctgtggctcgctgggacctgacaccgccccccgccccccccgccctgttctgagtcactcgctgtcggagagtgtctcgtactgcgagcagagcagtggcttgggctcctcgtcccaggcgtggtgggcgccagcgaggggcccgctgcccgcggggaggcccggtgggggtggggaagccatgacacccgcctgcagccgcatgatcagggggttgtaggggaatggcgtggaacctgcggacgagggcctgtcctcccacacgcggttggtgagcggcgtccggcggttgcagtctccctccgagtgcactgaggagacagagggtggccggtccccagatgccaggcccggggccggggacttggcttttcggctgctgggtctgccagagaccttggccttcccgccgccacccatgagtgcctttctaattatggcctccagccccatgttggtgctggcatgttcctgcaccgcctggcttctataggtcataaggcctgttccggtgatggcgggcatattgaagatctccgtcccaggctggctgatattgtattcaggctcattccggttgtgggtgttcagcttcttgttgatctcttgcttcttggacttgaccatggcggagttgctctcggtcagcttgctgaagaaggctggcggctggctggtgttgcctggagacttggagcccatcctgctgggctccgtctgttccccatcccggtacagcagcgggtacacagcactccgggagtgcccctggctccgtcatggcctccggtggggacacaggttcaataccgtcctcaccaccacccaagaccgacgtcttgtttggctctggagacctcttgcccccttcgctgtggggggagccacgggccggggcaccatggtccgggggcgggaggtagaggtcactgggtgggcggcggaggtccaggacggggcagctggccccagggaaggagtagaggggggcgggcaggggtgcgctgagctgctgtgggtggtgccgggtgtagtcctgtgtgatgacctcactgatgtgctgggccagggtgacccacccgctggtgacctttgacccctggggcggtctggagcagcgggctggacgagggctggctctcaggcagcggccgcaggtgtgggaggtgggcggcctccccgccaagcttcacggggcctggctgcttgggccgcagctccccctccaggtggctcttgtcgagctcttccaggtgcttggggagccccttgtcgtgggtcagactgggtgagctcacagggctgacgggctccaccccttcggggctgtagctgctgccgtggtaacccagagaacggagttccagttcctggatggaaaagggtttactttgagtcttttcccggtgcgggtccgaggccgaggcaggtggcgccggcgggtccgggctggcgtggtgaggtgcgaggttcttcgcaggggtgcgggcgatggtggcgtggccagagacaggaggcactaggggccggggctccgagcccttgctgggggaggaggcgggctccagcccggagcgggctgggggcttggcgaggaaggcatggccggtgtctgctcggggccgctctggccgggcgacccggggggcctccttgggcagcaagacgggctccatgagggtagggtagaccccatcgagggttgccgcccagtgtgcagtgggtggcaggtgggaatgtggcagctgggcgaacgggtgaggaggtggaggtggacctcaagaaccgtgggcgtgctgggctcaaaagcggtgatgatacccttcatgcctgtgttgtgaagcacactgggtctctgctggagggcatcctgggtccgaggggagatgggcgagtgctggtgggcatgggagtgggaggcggggcggctgctgctgcccccacccccgccgctgctgccgctgctgccgctgctctgctctgtaccaggtctccagatgggtgcgtgctccaccgtcgtggtggacgtgaggatggacttttcccgctcccgatcccggtcccgctctcgatcccggtctcgctcccgctcggacgaggacgtggtggttggttttgtcaagtgtgttggacctcctggggagagtggggagctgctgtggcggctgctgaagggctggggcgcggtggggaggtaggcaaggcggtccatggcggtggctggggtgcctggtgtcgggggcacgagcacaggcaggtgtggcacttgggacaggtcgatgatgcctcggggacccgcagcgtagttgagtgccagcgaggactcgcggggcgagaggcccctcagcatatcagctcgctgggccatggcggtggccgcgttgtggtgcatctgctgcgaggtgatgtagtcattgatgatggtctgccggttctccagcgccgccgtgtcggggtagccgcggatgaggtagggtgggtacaggtgcgggtaggtggggttgggggccaggtgtcggggcaggtagtaggcagcggctgcgtccagagggatgccgcggggtatggaggtggggtcgaaggccagggggatgtggctgcgatacaggtccacgccactcacgccccgaagcaggtgctcatagggcgagatggggtgtgggtggtgctcgggcacggtgctgtgcgtgggtgagccaagaaaatactaattaataatagtaagttgttagtgttggttaagttgttgcttggaagtgagaagttgcttagaaactttccaaagtgcttagaactttaagtgcaaacagacaaactaacaaacaaaaattgttttgctttgctacaaggtggggaagactgaagaagtgttaactgaaaacaggtgacacagagtcaccagttttccgagaaccaaagggaggggtgtgtgatgccatctcacaggcaggggaaatgtctttaccagcttcctcctggtggccaagacagcctgttttcagagggttgttttgtttggggtgtgggtgttatcaagtgaattagtcacttgaaagatgggcgtcagacttgcatacgcagcagatcagcatcccttcgctgccccttagcaacttaggtggttgatttgaaactgtgaaggtgtgattttttcaggagctggaagtcttagaaaagccttgtaaatgcctatattgtgggcttttaacgtatttaagggaccacttaagacgagattagatgggctcttctggatttgttcctcatttgtcacaggtgtcttgtgattgaaaatcatgagccgaagtgaaattgcattgaatttcaagggaatttagtatgtaaatcgtgccttagaaacacatctgttgtcttttctgtgtttggtcgatattaataatggcaaaatttttgcctatctagtatcttcaaattgtagtctttgtaacaaccaaataaccttttgtggtcactgtaaaattaatatttggtagacagaatccatgtacctttgctaaggttagaatgaataatttattgtatttttaatttgaatgtttgtgctttttaaatgagccaagactagaggggaaactatcacctaaaatcagtttggaaaacaagacctaaaaagggaaggggatggggattgtggggagagagtgggcgaggtgcctttactacatgtgtgatctgaaaaccctgcttggttctgagctgcgtctattgaattggtaaagtaataccaatggctttttatcatttccttcttccctttaagtttcacttgaaattttaaaaatcatggttatttttatcgttgggatctttctgtcttctgggttccatttttttaaatgtttaaaaatatgttgacatggtagttcagttcttaaccaatgacttggggatgatgcaaacaattactgtccgttgggatttagagtgtattagtcacgcatgtatggggaagtagtctcgggtatgctgttgtgaaattgaaactgtaaaagtagatggttgaaagtactggtatgttgctctgtatggtaagaactaattctgttacgtcatgtacataattactaatcacttttcttcccctttacagcacaaataaagtttgagttctaaactcattaaaaaaataaaaaaaa

SEQ ID NO: 45538 - DNA, 2534 bp, Homo sapiens
gtcatgcagtgcgccggagaactgtgctctttgaggccgacgctaggggcccggaaggtaaactgcgaggcgaaggtgaccggggaccgagcatttcagatctgctcggtagacctgggtgcaccaccaccatgttggctgcaaggctggtgtgtctccggacactacccttctagggtgtttccacccagctttcaccaaggcctcccctgttgtgaagaattccatcacgaagaatcaatggctgttaacacctagcagggaatatgccaccaaaacaagaattgggatccggcgtgggagaactggccaagaactcaaagaggcagcattggaaccatcgatggaaaaaatatttaaaattgatcagatgggaagatggtttgttgctggaggggctgctgttggtcttggagcattgtgctactatggcttgggactgtctaatgagattggagctattgaaaaggctgtaatttggcctcagtatgtcaaggatagaattcattccacctatatgtacttagcagggagtattggtttaacagctttgtctgccatagcaatcagcagaacgcctgttctcatgaacttcatgatgagaggctcttgggtgacaattggtgtgacctttgcagccatggttggagctggaatgctggtacgatcaataccatatgaccagagcccaggcccaaagcatcttgcttggttgctacattctggtgtgatgggtgcagtggtggctcctctgacaatattagggggtcctcttctcatcagagctgcatggtacacagctggcattgtgggaggcctctccactgtggccatgtgtgcgcccagtgaaaagtttctgaacatgggtgcacccctgggagtgggcctgggtctcgtctttgtgtcctcattgggatctatgtttcttccacctaccaccgtggctggtgccactctttactcagtggcaatgtacggtggattagttcttttcagcatgttccttctgtatgatacccagaaagtaatcaagccgtgcagaagtatcaccaatgtatggagttcaaaaatatgatcccattaactcgatgctgagtatctacatggatacattaaatatatttatgcgagttgcaactatgctggcaactggaggcaacagaaagaaatgaagtgactcagcttctggcttctctgctacatcaaatatcttgtttaatggggcagatatgcattaaatagtttgtacaagcagctttcgttgaagtttagaagataagaaacatgtcatcatatttaaatgttccggtaatgtgatgcctcaggtctgcctttttttctggagaataaatgcagtaatcctctcccaaataagcacacacattttcaattctcatgtttgagtgattttaaaatgttttggtgaatgtgaaaactaaagtttgtgtcatgagaatgtaagtcttttttctactttaaaatttagtaggttcactgagtaactaaaatttagcaaacctgtgtttgcatatttttttggagtgcagaatattgtaattaatgtcataagtgatttggagctttggtaaagggaccagagagaaggagtcacctgcagtcttttgtttttttaaatacttagaacttagcacttgtgttattgattagtgaggagccagtaagaaacatctgggtatttggaaacaagtggtcattgttacattcatctgctgaacttaacaaaactgttcatcctgaaacaggcacaggtgatgcattcctcctgctgttgcttctcagtgctctctttccaatatagatgtggtcatgtttgacttgtacagaatgttaatcatacagagaatccttgatggaattatatatgtgtgttttacttttgaatgttacaaaaggaaataactttaaaactattctcaagagaaaatattcaaagcatgaaatatgttgctttttccagaatacaaacagtatactcatgattgctaagtgtttttttatttttgcatatttattgaactgtctaattgaatacagcttgctcttgtcacctcttcaagctttcaagcctttatagaaaagcttctttgtggcttacactggaaattatgaaagcagtttttctcctaagacttttggtttctcgcattgcctctcagactaagcactaaaaagcaaagcaaaacagaactagttctgtcttaatgaaatatatcaacccaaaagtgtaatgaggaaaatgcttcattagtttcccctagcagacttttacttctcttacactgctacaccattactttcttgagacatttgtaagtcctttgatacagaagagttatatttagaagtctttaatgaagggaaagaagtctgtatgatgactgaggtgattgctctttttgacaaatgtttattacagtaatgcagaaatactgttaatcatctcaaagtacataggaggcttatttctgaaacaaaggtttcagccagatgttgattagtctaatttttccaag

SEQ ID NO: 45539 - DNA, 456 bp, Homo sapiens
  misc_feature (1)...(456): n = a,t,c or g
ggtgntnnnnnntttgantcgttgacagcttgactgattcgaatttaatacgactcactatagggaatttggccctcgaggccaagaattcggcacgaggcattaattgacagctgacccaggtgctacacagaagtggattcagtgaatctaggaagacagcagcagacaggattccaggaaccagtgtttgatgaagctaggactgaggagcaagcgagcaagcagcagttcgtggtgaagataggaaaagagtccaggagccagtgcgatttggtgaaggaagctaggaagaaggaaggagcgctaacgatttggtggtgaagctaggaaaaaggattccaggaaggagcgagtgcaatttggtgatgaaggtagcaggcggcttggcttggcaaccacacggaggaggcgagcaggcgttgtgcgtagaggatcctagaccacatgccagtg

SEQ ID NO: 45540 - DNA, 1838 bp, Homo sapiens
  misc_feature (1)...(1838): n = a,t,c or g
tgaataaccctatgacatgattacgaatttaatacgactcactatagggaatttggccctcgaggccaagaattcggcacgagagcgcattatctcagctacttaaacaacctccgtgtccaagatgttttcagttcaacacacagtctcctccattattttgatcgtctgattcttaccggagccgaaagcaaaagtaatggggaagagggctatggccggagcttgagatacgccgctctgaatcttgccgccctgcactgccgcttcggtcactatcaacaggcagagctcgccctgcaggaggcaattaggattgcccaggagtccaacgatcacgtgtgtctccagcactgtttgagctggctttatgtgctggggcagaagagatccgatagctatgttctgctggagcattctgtgaagaaggcagtacattttgggttaccgtacctcgcctccctggggaatacagtcccttgttcaacagagagcttttgctgggaagacggcaaacaagctgatggatgccctaaaggactccgacctcctgcactggaaacacagcctgtcagagctcatcgatatcagcatcgcacagaaaaccggccatctggaggctgtatgggccgcagcaccatggcactgcaacaggcccagatgttgctgagcatgaacagcctgggaggcggtgaatgcgggcgtgcagcagaacaacacagagtcctttgctgtcgcactctgccacctcgcagagctacacgcggagcagggctgttttgctgcagcttctgaagtgttaaagcacttgaaggaacgatttccgcctaatagtcagcacgcccagttatggatgctatgtgatcaaaaaatacagtttgacagagcaatgaatgatggcaaatatcatttggctgattcacttgttacaggaatcacagctctcaatagcatagagggtgtttataggaaagcggttgtattacaagctcagaaccaaatgtcagaggcacataagcttttacaaaaattgttggttcattgtcagaaactgaagaacacagaaatggtgatcagtgtcctactgtccgtgggcagagctgtactggcgatcttcctcccctaccatcgcgctgcccatgctcctgcagggctctggccctctccaaggagtaccggttacagtacttggcctctgaaacagtgctgaacttggcttttgcgcagctcattcttggaatcccagaacaggccttaagtcttctccacatggccatcgagcccatcttggctgacggggctatcctggacaaaggtcgtgccatgttcttaagtggccaagtgccaaggtggcttcagcagcttccctacgatcagccgaagaaagcagaagctctggaggctgccatcgagaacctcaatgaagccaagaactattttgcaaaggttgactgcaaagagcgcatcagggacgtcgtttacttccaggccagactctaccataccctggggaagacccaggagaggaaccggtgtgcgatgctcttccggcagctgcatcaggagctgccctctcatggggtacccttgataaaccatctctagagaggacatccctgctgggctgctgtgcagagtataagattttggacttgttcatgtcccctctctccctataaatgatgtatttgtgacaccctatcttgtcaataaacagcattctgattagtttgtcttattttgttgctagtaactacgtatttgttttantccccttttcttcccttttggtagcaaaggacaccaactttttcttaataaatgggtattttgctaac

SEQ ID NO: 45541 - DNA, 1650 bp, Homo sapiens
tacggccgaaaagatggcggtcttggcacctctaattgctctcgtgtattcggtgccgcgactttcacgatggctcgcccaaccttactaccttctgtcggcccctgctctctgctgccttcctactcgtgaggaaactgccgccgctctgccacggtctgcccacccaaccgcgaagacggtaacccgtgtgactttgactggagagaagtggagatcctgatgtttctcagtgccattgtgatgatgaagaacccgcagatccatcactgtggagcaacatataggcaacattttcatgtttagtaaagtggccaacacaattcttttcttccgcttggatattcgcatgggcctactttacatcacactctgcatagtgttcctgatgacgtgcaaaccccccctatatatgggccctgagtatatcaagtacttcaatgataaaaccattgatgaggaactagaacgggacaagagggtcacttggattgtggagttctttgccaattggtctaatgactgccaatcatttgcccctatctatgctgacctctcccttaaatacaactgtacagggctaaattttgggaaggtggatgttggacgctatactgatgttagtacgcggtacaaagtgagcacatcacccctcaccaagcaactccctaccctgatcctgttccaaggtggcaaggagggcaatgcggcggccacagattgacaagaaaggacgggctgtctcatggaccttctctgaggagaatgtgatccgagaatttaacttaaatgagctataccagcgggccaagaaactatcaaaggctggagacaatatccctgaggagcagcctgtggcttcaacccccaccacagtgtcagatggggaaagcaagaaggataaataagatcctcactttggcagtgcttcctctcctgtcaattccaggctctttccataaccacaagcctgagactacagccttttatttatgttttccctttggctgtgactgggtggggcagtgcgcagcttctgattttaaagaggcatctagggaattgtcaggcaccctacaggaaggcctgccatgctgtggccaactgtttcactggagcaagaaagagatctcataggacggagggggaaatggtttccctccaagcttgggttagtgtgttaactgcttatcagctattcagacatctccatggtttctcccatgaaactctgtggtttcatcattccttcttagttgacctgcacagcttggttagacctagatttaaccctaaggtaagatgctggggtatagaacgctaagaattttcccccaaggactcttgcttccttaagcccttctggcttcgtttatggtcttcattaaaagtataagcctaactttgtcgctagtcctaaggagaaacctttaaccacaaagtttttatcattgaagacaatattgaacaaccccctattttgtggggattgagaaggggtgaatagaggcttgagactttcctttgtgtggtaggacttggaggagaaatcccctggactttcactaaccctctgacatactccccacacccagttgatggctttccgtaataaaaagattgggatttccttttgaaaaaaaaaaaaaa

SEQ ID NO: 45542 - DNA, 498 bp, Homo sapiens; identical to SEQ ID NO: 21793
  misc_feature (1)...(498): n = a,t,c or g

SEQ ID NO: 45543 - DNA, 1979 bp, Homo sapiens
agccactgtgcccaaccaggatccagtatcttaaaggcccatactgtaaaggtcagcctgcctaggaattctgccacatttacacacacccctgggccaaagtaatattttttttttccatgtagaacaaattatgggcagaaagtaaagttagttttagaagtgctgtttgtggttggagaattgtaaaaatcttttaaagggataagggaattagtggcttttaatataaccactgcttcagcccgaaacacaaaatcactgttacatggaaaactggttattaggccagatttatattcatctctgtctagagtatttcatgtgtgtatgtgttgcttacgttgtctgtctccaaagtctctcatctcttttaatcactgcaaataaagcaatactgaaaacttgagagaatgcaccttaggggaaggggctatttcaagacagaaaacaaaggaaatacctgccttttgaataagatcccgcttttgagtcttacctatgactttaccagggtagattagaaatacacatcctcctgctgaccctctgccttcaatagctatctatcttaaaagctgaagtttgaactgcagcatctgcttgacagatgccaggttccttcggcagggggacgatcactctatatatcttccgttgcctcagattcctgtggcccaaggatcccaccaatcctcgttccccctaaacatgctaacaaaaatcccttatcgtgggtattaaaataataacagttacactgtatgcatatttatgtgctccttttgtctggtttttcttttcatcatgtataagctgaattcagcattagtttctcacatcttcccccaggtatccccaacagaatttttatgtcccagcttgtattaaatagaagtgaaatattaaggaaaataaggaacttgtgcaactttttttatgcattgttctcaaccatttaatttattgaaaggagatgctgcaacagttcttgatttagcagcagttattctcttgtttacatagttatgtttttttgttgttgttttgctctgtactggaaacaaaaataaagttttctacattattttcagccttgggttatggtatggtttctttgtgtttgtcgtaatatgcacattgtccttctaggacctgtcaccccaccatggagaaaagagtcttttggttctttttaacataagtgattagtttaagagtatgctgaggagccactgggcttaaagaaggatgtaaataagacccaaatacatagggaccaggcgctgctttctcatgttcacaaaagcagtcctcccaccactgaactccattctctcagggggctcaatgaaggctaaccaatccgatgcatgtgtaggtaacagtcccatggactggcacttgtaaacagccaatgccaaacccatcaggttcccaatgagatagaccaaaccctgaagaaacttctggcttgaactttctaacatcttgaaagtggctgaaatggccataagtgcctgaatgggtcgcccaggcccatcatacacaccatcatagtagggaagatggagatagtattgcctgccatgtacatgatgaagagattcatgggaatctgtttgaggggacccaaggcgatgtccccagcagcgcttctccaccaggatccggtctgtctcttgcacggctggtatcaggcacttgcttgtccaagtaaccgactgggtagagcgagtctccctggccactgccccggtcacttcgacccctaaaaaaccaaaccaagaaactgctgcctcctccaggcccgcttagctcaatggcccacttgaagcgccggcctcggttagccacccaagcccccctgggccgtcatggcaacagctgcgtcctatagcctcgatgcttctcagtccaaagcgtactccacaacaggcccaccagcgttctccgctttgtctcactctgcaaatgcc

SEQ ID NO: 45544 - DNA, 1357 bp, Homo sapiens
taatttactacgactcactatagggaatttggccctcgaggccaagaattcggcacgagcgcagccatggctcgtggtcccaagaagcatctgccagcgggtggcagctccaaagcattggatgctggataaattgaccggtgtgtttgctcctcgtccatccaccggtccccacaagttgagagagtgtctccccctcatcattttcctgaggaacagacttaagtatgccctgacaggagatgaagtaaagaagatttgcatgcagcggttcattaaaatcgatggcaaggtccgaactgatataacctaccctgctggattcatggatgtcatcagcattgacaagacgggagagaatttccgtctgatctatgacaccaagggtcgctttgctgtacatcgtattacacctgaggaggccaagtacaagtttgtgcaaagtgagaaagatctttgtgggcaccaaaaggaatccctcatctggtgactcatgatgccccgcaccatccgctaccccgatccccctcatcaaggtgaatgataccattcagattgatttagagactggcaaagattactgatttcatcaagttcggacactggtaaccctgtgtaatggtgacctggaggtgctaacctaggaagaattggtgtgatcacccaacagagagaggcacccctggatcttttgacgtggttcacgtgaaagatgccaatggcaacagctttgccactcgactttccaacatttttgttattggcaagggcaacaaaccatggatttctcttccccgaggaaagggtatccgcctcaccattgctgaagagagagacaaaagactggcggccaaacagagcagtgggtgaaatgggtccctgggtgacatgtcagatctttgtacgtaattaaaaatattgtggcaggattaatagcattttggttttgtgggttgtttttttttttaattcagtttcctgctattttactgtataacatgaacagtgattaagttctcaggcaggcttaggcagtctgttattggctgggcttagttagtggtgggaagtagaagataccagacttgggaaaggaacagcaactaaccaaggagtagaaagagccaagaaatcccggagtatttatctcccccgccttgacttggccaagaacttctctacacagtggacccctctgccctgttaagttcccttggctttctaaaaatctgccctcattttcttctccagtctgtattgcactagcccatccacaagcctggctcatctgtttttcccactcctgtgcccatcttggccaaacgcaggatgaaaatctccagttgcattaaagtgg

SEQ ID NO: 45545 - DNA, 1746 bp, Homo sapiens
gtggtaactcaggcgccgggcgcactgtcctagctgctggttttccacgctggttttagctcccggcgtctgcaaaatgaagattgaggaggtgaagagcactacgaagacgcagcgcatcgcctcccacagccacgtgaaagggctggggctggacgagagcggcttggccaagcaggcggcctcagggcttgtgggccaggagaacgcgcgagaggcatgtggcgtcatagtagaattaatcaaaagcaagaaaatggctggaagagctgtcttgttggcaggacctcctggaactggcaagacagctctggctctggctattgctcaggagctgggtagtaaggtccccttctgcccaatggtggggagtgaagtttactcaactgagatcaagaagacagaggtgctgatggagaacttccgcagggccattgggctgcgaataaaggagaccaaggaagtttatgaaggtgaagtcacagagctaactccgtgtgagacagagaatcccatgggaggatatggcaaaaccattagccatgtgatcataggactcaaaacagccaaaggaaccaaacagttgaaactggaccccagcatttttgaaagtttgcagaaagagcgagtagaagctggagatgtgatttacattgaagccaacagtggggccgtgaagaggcagggcaggtgtgatacctatgccacagaattcgaccttgaagctgaagagtatgtccccttgccaaaaggggatgtgcacaaaaagaaagaaatcatccaagatgtgaccttgcatgacttggatgtggctaatgcgcggccccaggggggacaagatatcctgtccatgatgggccagctaatgaagccaaagaagacagaaatcacagacaaacttcgaggggagattaataaggtggtgaacaagtacatcgaccagggcattgctgagctggtcccgggtgtgctgtttgttgatgaggtccacatgctggacattgagtgcttcacctacctgcaccgcgccctggagtcttctatcgctcccatcgtcatctttgcatccaacccgagggcaacttgtgtcatcaagaggcacttgaggacatcacatcccctcacggcatccctctttgaccttctggaccgagtgatgataatccggaccatgctgtatactccacaggaaatgaaacagatcattaaaatccgtgcccagacggaaggaatcaacatcagtgaggaggcactgaaccacctgggggagattggcaccaagaccacactgaggtactcagtgcagctgctgaccccggccaacttgcttgctaaaatcaacgggaaggacagcattgagaaagagcatgtcgaagagatcagtgaacttttctatgatgccaagtcctccgccaaaatcctggctgaccagcaggataagtacatgaagtgagatggctgaggttttcagcagtaagagactccccaggtgtgcctggcctgggtccagcctgtgggcgccttgccccctgggcttggggctgccgtccccactcaggcgtggtctgcagcgctgtcagttcagtgtggaaagcatttctttttaagttatcgtaactgttcctgtggttgctttgaaagaacccttccttacctggtgtgttttctataaatcttcataggttattttgattctctctctctctctctctaagttttttaaaaataaacttttcagaacagaaa

SEQ ID NO: 45546 - DNA, 340 bp, Homo sapiens; identical to SEQ ID NO: 21804

SEQ ID NO: 45547 - DNA, 2446 bp, Homo sapiens
tgcggccgccggtcctccctccacctcctcctcggccccccctcgcttccctcctcccacttcccgagctccggcgtcgtcccggccacgctcgacgctgctgcaggaacaaaggaagaccccgcggcggcgcggcgccacctccgcctgctgctccgacccgctcccggcccgcggcggcggcaccagggcgcccggctcagccttcccggaggcctcggcccggcctcatcgtgccggcttcgcgcgcgaacccggctttcgcatttgggaccctgcaggcagaaaaatatggctcaggagactaaccagaccccggggcccatgctgtgtagcacaggatgtggcttttatggaaatcctaggacaaatggaatgtgttcagtttgctacaaagaacatcttcagaggcagcaaaatagtggcagaatgagcccaatggggacagctagtggttccaacagtcctacctcagattctgcatctgtacagagagcagacactagcttaaacaactgtgaaggtgctgctggcagcacatctgaaaaatcaagaaatgtgcctgtggctgccttgcctgtaactcagcaaatgacagaaatgagcatttcaagagaggacaaaataactaccccgaaaacagaggtgtcagagccagttgtcactcagcccagtccatcagtttctcagcccagtacttctcagagtgaagaaaaagctcctgaattgcccaaaccaaagaaaaacagatgtttcatgtgcagaaagaaagttggtcttacagggtttgactgccgatgtggaaatttgttttgtggacttcaccgttactctgacaagcacaactgtccgtatgattacaaagcagaagctgcagcaaaaatcagaaaagagaatccagttgttgtggctgaaaaaattcagagaatataaattacttcttgtgaagagactgaaactttgtttttattttaatatatcgtaggaaaacattaaagagcagatgcatggccatttttctttgatgttctccagagttttacattacacttgtctgtcttataattgatattttaggatgtttgggtgtttgttacaggcagaattggatagatacagccctacaaatgtatatgccctcccctgaaaaaaattggatgaaaatctgcacagcaaagtgaaacacacagataataggaacaaaatgtagttcccatgtgccaaacaaaataaatgaaatctctgcatgtttgcagcatatctgccttttgggaatgtaatcaaggtataatctttggctagtgttatgtgcctgtatttttttaaaatggtacaccagaaaaggactgggcagtctacttctaccatagttaaacttcaccctctttaatttcacaacatattctttggaagcaggaagaaatgctcataaagaggatcagaccttctttcccgtggaaaccagtatttggcgccatatataagcctgggttaaattggtcatctaaagctgtcaaataagacattctgtgaaaggtaaacatcgaaactggttataagtaaaaccatcaagccaacaacagggtcttgagataacctttgaagcttattgtactggcctgcaccagaagatgtctgcattactcattgctaaaaatgtgtagcacagaactgcactaggattaatttgtttacaagaagaaatttaaactctacgtttggttttcacatacagcagctctattgaataacatgcatctgaattttaagttgcaaaggtatctgaataatttttcatgtgcatcttttgtcgaatgttttggttcaagaaagaatgtttaaagctttttaaaagacttcagttcttaatgtaactgtacccttctgcatggaaaatcataaccaacatggctgcagtagacttcttagtggtatccagcgccacttgcagagggctgctttatcatattgtacttgggtgtaggactctagtgttcttgggtgtattgcatgggctgcattatctacagcattgtacaataacaactagaaaaggcagtatacttcactgatgcttgtctggtaataatcacttctgtgttataatggaaggttttttgtgatgtatgaaacttgtgttttttatatataaatgagtatagttagtgttgtggtaatgcctgttttcatctgtaaatagttaagtatgtacacgaggcactacttctgatttattgcaatgttcagtcctagtttttacttttattcttaaagcattcagttttgctttcaattttatgtaccttagttctgagttagacctgcagatgtgtacagatagttcatatttatgtattgcacataatcatgctattcagcattgatgctatattgtattatgtaaataataaaagccatgtacagagggaaaaaaaaaaaaaaaaaa

SEQ ID NO: 45548 - DNA, 2463 bp, Homo sapiens
tgtcaaatatttattgatgttaaatccacagttacaccagcacaacaatccaaagtagtatgattgattgatagtactttttttttataaatacaatataaaggtggcaaaataatgctagttaatcccaaacccagcaaatcagcaaaaaaaggtcacattcagaaaaatttgccaagtaagacataagtcataattctacaatagagataggtccatgagagactgtgtatggtatcttaaattccatattagcaatgcatataagtgcggtcaaagaaacttgaaccacactgcatagaacatctgccacccggtgctcaagcctattaatcacttaaaccttggttggttggtgttcttacaaagaagtagaaagctgtacatgtgaaacagtaatatgaaatatatggggtggtacacagatataaaattattttaaaaaatactacgtatgaattgagtaactgagctaagagaggccacttataaataatgaaagatacatgtgttttgcataaggaatacagtgttttcttttcatagcaaagtaccattaaagcctcatgttttatactactaggtcaaattattttttctcctttttaaaatttatcggttccgacttaaaaccatcaagtctggtcagaatcaactcagtctagctgatgcaaaatcatatgcattcaaaaagcagtctttaccgagatgcctttacaaaccttggaatccagcaccttcttaaggcaaagtttcatggcagcagggaagtgaactaataattttcatttaccacatcttggtgtctttgaaaaaatactttatggcacaaacctgtttttgtctctccttatgtctccacttccttcaagtagactagatgctacaggcaatttctcatttatgccaccatgcagtctcaatccattttcaacttgctctacatacctaaaatcttccactactacacaaacctcagacacactgcaatctccacagcatgtgtgctccacagcatgtgtgctccacacttccagctggccctgggttccttgacttgtgaatggcagtgtttttttcacctatgtttgaagaaaaccaaagaaaagcctggcctttgctacctctcctgtgccttctacttttatctaaatgaacacactataatcatgctggttgcattttccttcattctcctccctactccttccaaacccctgattcctccaaatactatatatgccttggtcatttgggtggtttggatgctttctgtggaatgaactgtaatatatttctgctttattcagagcactttatattatttatatttaaattagccttttaatatggtttgtaaataagtttcctaccaaggtagcatgaaaacactacacataaagaaaaaaaatgttaagaactaaggtattaaccttgttagaaaactcttttgatattaacatttaaggcaagtagttccttccttatgatttaatataaaaacatttgcaaagacaaggcatttacttggatttctttgtcatctcttcttctttcatccttacatattgcacttggttcactgtatctgtctgaatacactgtgcttcagaatcattgtagtactgtttgtggtacaactccctcattaaacatttccactgaacccatacttcatgagtttaaaacaaccaaaacagttcactttgttggcaaaggccatctctacccaagtaagattatttactcgttattcaatttagtaccgacacctccatccataacctacactattgtccactaaacactccctacctgtgtaaattccgtatcaagggtaaaaccttataagatttttcagacaactggcatttaagtgacttgtttataaattttaaaataaaccatgttctttgcagtatcctgccaggcaacacatcaaatatttcaaaaggcagccatacatttgctttaatgcttgctaaaacagcttaaggtctaatataattttaaaatagtcaaacaaatttgttttcactcttcatttcacaactatagagcagagaataagcccaatagtggccacttttactaactcatcaccatattcataaaactttcctctgcaattcattctacttcacatatcaatgcacttggtaagaaaataacaaaatgacaagcagtaaaatctaattcatgccagaacactggagaagttacatgggaagcaaaaacatacacaactttacaaaagttgggaatactgttttcaaataagcaataatcaaagtgggactttcatgctagaagtctcactcagtcaaaatcacgatttgtaagaacaagtggtgccacgagtgtccaaacatacagcacgatgccaatccaactggaagagattttcacccagacagctgtccactgacttttcatctcacgagagggttcatacctgtacca

SEQ ID NO: 45549 - DNA, 2748 bp, Homo sapiens
cgcgccagagagaagcagcctccggccccggcggcccctgtctcccgaccccggaaggcgaagcaggctgcccggggaccccgcgcgtgggcgcttgaagccgagaccagcctgcccgggcctgggcaggcggagcagggccttggaccccgcggcgcccctcggcctcggagcaacgagcgcagcgccgcctctgaagagccaatccattcaggatgggaaaccacgcaggcaaacgagaattaaatgccgagaaggccagtacgaatagtgaaactaacagaggagaatctgaaaaaaagagaaacctgggtgaactttcacggacaacctcagaggacaacgaagtgttcggagaggcagatgcgaaccagaacaatgggacctcctctcaggacacagcggtgactgactccaagcgcacagcggacccgaagaatgcctggcaggatgcccacccagctgacccagggagccgcccccacttgatccgcctcttttcccgagatgccccggggagggaggacaacaccttcaaagacaggccctctgagtccgacgagctccagaccatccaagaagacagtgcagccacctccgagagcctggatgtgatggcgtcacagaagagaccctcccagaggcacggatccaagtacctggccacagcaagtaccatggaccatgccaggcatggcttcctcccaaggcacagagacacgggcatccttgactccatcgggcgcttctttggcggtgacaggggtgcgcccaagcggggctctggcaaggactcacaccacccggcaagaactgctcactatggctccctgccccagaagtcacacggccggacccaagatgaaaaccccgtagtccacttcttcaagaacattgtgacgcctcgcacaccacccccgtcgcagggaaaggggagaggactgtccctgagcagatttagctggggggccgaaggccagagaccaggatttggctacggaggcagagcgtccgactataaatcggctcacaagggattcaagggagtcgatgcccagggcacgctttccaaaatttttaagctgggaggaagagatagtcgctctggatcacccatggctagacgctgaaaacccacctggttccggaatcctgtcctcagcttcttaatataactgccttaaaactttaatcccacttgcccctgttacctaattagagcagatgacccctcccctaatgcctgcggagttgtgcacgtagtagggtcaggccacggcagcctaccggcaatttccggccaacagttaaatgagaacatgaaaacagaaaacggttaaaactgtccctttctgtgtgaagatcacgttccttcccccgcaatgtgcccccagacgcacgtgggtcttcagggggccaggtgcacagacgtccctccacgtttcacccctccacccttgggactttcttttcgccgtgggttgcggcacccttgcgcttttgctggtcactgccatggaggcacacagctgcagagacagagaggacgtgggcggcagagaggactgttgacatccaagcttcctttgtttttttttcctgtccttctctcacctcctaaagtagacttcatttttcctaacaggattagacagtcaaggagtggcttactacatgtgggagcttttggtatgtgacatgcgggctgggcagctgttagagtccaacgtggggcagcacagagagggggccacctccccaggccgtggctgcccacacaccccaattagctgaattcgcgtgtggcagagggaggaaaaggaggcaaacgtgggctgggcaatggcctcacataggaaacagggtcttcctggagatttggtgatggagatgtcaagcaggtggcctctggacgtcaccgttgccctgcatggtggccccagagcagcctctatgaacaacctcgtttccaaaccacagcccacagccggagagtccaggaagacttgcgcactcagagcagaagggtaggagtcctctagacagcctcgcagccgcgccagtcgcccatagacactggctgtgaccgggcgtgctggcagcggcagtgcacagtggccagcactaaccctccctgagaagataaccggctcattcacttcctcccagaagacgcgtggtagcgagtaggcacaggcgtgcacctgctcccgaattactcaccgagacacacgggctgagcagacggcccctgtgatggagacaaagagctcttctggaccaaaacccttccttaaaaaaccggctggcaatctccctttcgcgcctccctccctaacctactgacccaccttttgattttagcgcacctgtgattgaataggccttcccaaagagtccccacgctggcatcacccctccccgaggacggagatgaggagtagtcagcgtgatgccaaaacgcgtcttcttaatccaattctaattctgaatgtttcgtgtgggcttaataccatgtctattaatatatagcctcgatgatgagagagttacaaagaacaaaactccagacacaaacctccaaatttttcagcagaagcactctgcgtcgctgagctgaggtcggctctgcgatccatacgtggccgcacccacacagcacgtgctgtgacgatggctgaacggaaagtgtacactgttcctgaatattgaaataaaacaataaacttttaatggtaaaaaaaaaaa

SEQ ID NO: 45550 - DNA, 1761 bp, Homo sapiens
tgtctcacacacagtaagagtccaagacagaatagctatgtggggtgctcactgcagtgctccataaatatagggtacaaaccactctaagcagaaaataagtcctcggtgctggcccagagagacttgcaaacaaactgatgccagagactctatatcatggggctggcgggataattacatgagattacacgaaaaacgtttaaaactgccgttggctagtagtaaatgttcagtaaatgcactggcctttattattgggcatgggcgctctgaagggataggatccccccaccccacgcccaaacccgtttgccccgccgctcacccggggccccagggtgcgggctgcatccccgcagcgtagagacatttcctctttaggactagcgcagtgcaggggttgagggatcgctaactcccgggaaaggacaggtcgaaattacgtcgctccatttatgacaagcagccaagctgctccacgattggctgctttagccttacgtgcgtcgcgcactcatgacgcaatacgcaggccccttacgcgatacaagtacgtaatgacgacagacgttctttctttgctgcgtctactgcgaggtaaggatgtttctgtgctcgtgggggtactgggaatctgaaaccatctgctctgggaaaggctgcggcgcggctcccactctcggaaccttgtcctgtttgtcccccagctcggcaagcgccatatgagcctggcggcgccagatgcgaatcctgttgtgggctttttggcctattcccgcccctcagtcttgccgggatggcaccgcccgcataggacttccagggttgggctgagtgggagttcgactgctgggcctcgtaattctcgctttggggctgctccttccaggctgggacacactggggcccgctgtcggtctcccgtcctccgacatcttgtctggaacttccgcctggcagtctccagtaggagtggagctctgtgcggcgtagtttggtggaaaaacgggccttgcgtcggcctcacccccagtgtttgtgtttcagaatgaagactattctcagcaatcagactgtcgacattccagaaaatgtcgacattactctgaagggacgcacagttatcgtgaagggccccagaggaaccctgcggagggacttcaatcacatcaatgtagaactcagccttcttggaaagaaaaaaaagaggctccgggttgacaaatggtggggtaacagaaaggaactggctaccgttcggactatttgtagtcatgtacagaacatgatcaagggtgttacactggggcttcccgttaccaagatgagggtctgtgtatgcttcacttcccccatcaaccgttgttatccagggagaatggggtctcttgttgaaatcccgaaatttcttggggtgaaaaatacatcccgcagggttccggatgagacccaggtgttgcttgttcagtatctcaagcccagaaagatgaattaatccttgaaggaaatgacattgagcttgtttcaaattcagcggctttgattcagcaagccacaacagttaaaaacaaggatatcaggaaatttttggatggtatctatgtctctgaaaaaggaactgttcagcaggctgatgaataagatctaagagttacctggctacagaaagaagatgccagatgacacttaagacctacttgtgatatttaaatgatgcaataaaagacctattgatttggaccttcttcttaaaaaaaa

SEQ ID NO: 45551 - DNA, 425 bp, Homo sapiens; identical to SEQ ID NO: 21834
  misc_feature (1)...(425): n = a,t,c or g

SEQ ID NO: 45552 - DNA, 336 bp, Homo sapiens
  misc_feature (1)...(336): n = a,t,c or g
gacattccagaaaatgtcgacattactctgaagggacgcacagttatcgtgaagggccccagaggaaccctgcggagggacttcaatcacatcaatgtagaactcagccttcttggatgagaccaggtgttgcttgttcagtatctcaagcccagaaagatgaattaatccttgaaggaaatgacattgagcttgtttcaaattcagcggctttgattcagcaagccacaacagttaaaaacaaggatatcaggaaatttttggatggtatctatgtctctgaaaaaggaactgttcagnaggctgatgaataagatctaagagttacctggctac

SEQ ID NO: 45553 - DNA, 862 bp, Homo sapiens
  misc_feature (1)...(862): n = a,t,c or g
ggaagggcagaaagggagagtgctgggcgggcttagtcggagattgaggactgggaatccgcttccgggagggcactgtctagtgcacaggcaacctggccttcgcctcctagcccgagaagccgaatctccctaatccctgtgacctgtgtcaacctctgcatcgcgaggagggggataagtggggagaagtctggtgtcagatgggatggcgccggaagagggtgccacagcggggacggaaggcgcccccaccccaactccacgggaatataaacaatttgtattttccgatcaggtggcgggacaggcttcattgggacagccctaacccagctgctgaatgccagaggccacgaagtgacgttggtctcccgaaagcccgggcccggccggattcacgtgggatgagctcgctgcatcggggctgccgagctgcgatgccgccgtcaacctgggccggagagaacatcctcaaccctctccgaagatggaatgaaaccttccaaaaagaggttctcgggcagccgcctagagaccacccaattactggctaaagccattcaccaaagccccacaaccccccaaggcctgggtcttagtcacaggtgtagcttactaccagcccagtctgactgcggagtatgatgaagacagcccaggaggggactttgactttttctccaacctcgtaaccaaatgggaagctgcagccaggcttcctggagattctacacgccaggtggtggtgcgctcaggggttgtgctgggccgtgggggtggtgccatgggccacatgctgctgccctttcgcctgggcctggggggccccatcggttcaggccaccanttcttcccctgg

SEQ ID NO: 45554 - DNA, 1472 bp, Homo sapiens
  misc_feature (1)...(1472): n = a,t,c or g
tagagtcgttgggcccggcgcgacccgcaggagcgtagagagcgcggtactagagtgcagantccgggacgtggatcggagccggcgcgatgggcggagagcaggaggaggagcggttcgacggcatgttgctggccatggctcagcagcacgagggcggcgtgcaggagcttgtgaacaccttcttcagcttccttcgacgcaaaacagactttttcattggaggagaagaagggatggcagagaagcttatcacacagactttcagccaccacaatcagcctggcacagaagacccggcgggagaagagagcccccgcaggaggccgagcggcgggagaaggcggagcgggcggccagactggcccaaggaagccaagtcagagacctcagggccccagatcaaggagctaactgatgaagaggcagagaggctgcagctagagattgaccagaaaaaggatgcagagaatcatgaggcccagctcaagaacggcagccttgactccccagggaagcaggatactgaggaagatgaggaggaagatgagaaggacaaaggaaaactgaagcccaacctaggcaacggggcagacctgcccaattaccgctggacccagaccctgtcggagctggacctggcggtccctttctgtgtgaacttccggctgaaagggaaggacatggtggtggacatccagcggcggcacctccgggtggggctcaaggggcagccagcgatcattgatggggagctctacaatgaagtgaaggtggaggagagctcgtggctcattgaggacggcaaggtggtgactgtgcatctggagaagatcaataagatggagtggtggagccgcttggtgtccagtgaccctgagatcaacaccaagaagattaaccctgagaattccaagctgtcagacctggacagtgagactcgcagcatggtggaaaagatgatgtatgaccagcgacagaagtccatggggctgccaacttcagacgaacagaagaaacaggagattctgaagaagttcatggatcaacatccggagatggatttttccaaggctaaattcaactagcccctgttttttcctccctgaactcttggggctgagctgcaaccacccaactttctttcccactcttctctgggacttgtgggcctcagggcttggggcaggcatgggactggcccaggcacacaggtcccggggcatcaggagaaaggctgggtcttgggaccttgtcctccccagttggcctactgttacacattaaaacgatttgccccagctccttctgtgtcctctcttcgctctggcctttctctggggcacaggcctcttacggctgctgctgggaactgggagtttggcttctagcccagattctgccatgtgacctagggcacatccttgcccctctctgggcctcagtttctcattacttaaagattaaaacaa

SEQ ID NO: 45555 - DNA, 3022 bp, Homo sapiens
ttttttttttttccaatgctttgatctcattataaaatgaaaacttgttaactttaatattaaagcaaagacaaaatacaattttatcattattttaatcaagtaacttagctgtttaaacaaatccttaagacagttcaatagagcaaagtgaagaattactctattaggataacctgtgaacaaagttcagattatgtgaatttgtattccattcgaagtttggcaccagactgaacactggtttaagccaaattttttagtgttctagaagccctgaacatgttttccctcagattaaaagtagaacctttataatagaacctcattagcttgacactgagtatgctgagtgcaacttagcttaggtcacccagtatctcctacagaattccagttaatggaaagcagatcagccttgcggcaaagaatttgaaaccctaggcaacatacaagtttgaagaaaaaaaaatcctctttggtgtgacaaagcacattccctccaggtatatggctcctgctccacttgcacccgaatcttgatcaaaggcagctggagaccaattcttgtctctccaataagattgctaggtttcaattccttaaaatatcaagccaaccaagttttattacatcaaatgtttctatcatttcaatgtgaaaatttttttacgcctatttgttattaaggtctcattatctgtgaaataatcacaaaaaaacagaggtgaatggtataagccactgctccaaaattaaccctatcgattctcgattcccactgtgcactttgtgaaaagggtaactgccaagaggtttaaccttgaagatgattactcaaacagtcagaacccataatatgagtttagatcaggcaaggagttcatgaggaagttatcaactcttgtgtgtccaaatctaaagccctgcatgggctctgtcaggtccttgtcacctgcactcaggtggccatcagacttcttgggtgccctggctatattcaatgtgaagtaaaaaatatcccaagtcttacacccaaaatagaggctctgacttagaagtatgcttttagctttctttttaaataagacattctggaagaaaaaaaaaagaaaaaggaaagaaaatcaagtttgaaacacagttaacacttattttggcaagaaagcaaccaaaatctaaaaagcataaactatgtgtccaaatgtaaaaggcattacagaacaaactgcaagaggggaaaattaaagccacactgaacgaaaaaatacagtatgtctaacattttggaattgtaatttaaaccctaagggcaaaagctgaaaaatcatgcttaggttgctagttaagtgcacccttccttgtttctcccaaataaaatcagtttattgtttaattgcaccccaaagcaagttctctcagtacaaagtaactactacgtacacacaaaatgcttgttaatgtaataatttccctggctcatccaacgtgcaatgcacacgacttcaaagacaatttggggcaagtgtacatgaaatgagaaaacagctctccaagtttcaaatcctgctcttacattatttataggacactgaggtcatatttacttcttggttaagatgttgcactgtcatttcattatcagtctacctcacaatgtacattaccagatgccaatttgaggaactacagagataaaactttagtactttcttaatgggctgaataaattaattacaattaagtttgctttacatcctgttgaggacctctttgcagccccaggacctaacaatatctggcaggctccaagaatgctcatcaggtgaaatgatggcagaacatttaaagtaaggagccagttacttcagcttaagtcattcagagccaaacatctgaagaacgaccaaaatcaaacctttatttttataactgtataaatgtgatccaaatgtgtccaccactagtttttcaaaaagaaacatgctataaataagcaaactacatctgctcactgatgtgtatggactccctagatgtctcattgggcttaataacagaccactcacagtaatagatttttagtgtaaagtgtagcatgatgttaagccattttagcttttgcacatacatgttgcacttctggctgataatggaggaaaatttgcagcattatactgttaagctaggttgcatccatccctttaaatggcatcaatatcgatgtcgtcatccttgttgtctgactttacagtctcaactttcggtacactggcagccttcgaatacaccacctcaatgttctcatcttcatcttcttcttcgccaccagaagattcttcctctgcctccttcaaccattttataaatggttctgctttgacacgaatctctttggcaagttctttggagacatatttcttagaggccttttccgaccagctgatgatgacctcttcttctaaaaggtctgcatcgtacatctccttcaagatatgtggaatcttggagataagctgagcttgatgcattgctaccacacactccaaaccatgaagaaggtaccgttgggcttttttgttgttgtgacaaaatcgtaggaaatggcgcctgtatttcttaatctgttctctaatcttctcattaaaaagaacttcagttagaacaagagggcccatggcttttacatccagtctttctgcttcagcaacgatttctttgtcagatgaatcaataacaccctcttctttctttttcttaacaaaatcaaagaggatattgaccctctcctcaattgttctttccaaatcatcactgagtgtcagaacttttgcatggtcactgatttcatccattcgacgcctttgagcttcctcagttgtatcttctccccagtcatcatcctcctcttcttccattgtatgtggaggaggattaatttcatttggtggtggtggtggtggtggtgtctcactgctggatacggagccattttccttgtctttgccctttctgtttttct

SEQ ID NO: 45556 - DNA, 1113 bp, Homo sapiens
agcgcaggcgcaaggagcaagcgcagattgtgggcggctgtgtcagctgacccaaggggccttcgaggtgccttaggccgcttgccttgctctcagaatcgctgccgccatggctagtcagtctcaggggattcagcagctgctgcaggccgagaagcgggcagccgagaaggtgtccgaggcccgcaaaagaaagaaccggaggctgaagcaggccaaagaagaagctcaggctgaaattgaacagtaccgcctgcagagggagaaagaattcaaggccaaggaagctgcggcattgggatcccgtggcagttgcagcactgaagtggagaaggagacccaggagaagatgaccatcctccagacatacttccggcagaacagggatgaagtcttggacaacctcttggcttttgtctgtgacattcggccagaaatcccatgaaaactacccgcataaatggatagaagagagaagcacctgtgctgtggagtggcattttagatgccctcacgaatatgaagcttagcacagctctagttacattcttatgatatggcattaaattatttccatatattatataataggtccttccactttttggagagtagcaaatctagcttttttgtacagacttagaaattatctaaagatttcatctttttacctcatatttcttaggaatttaatggttatatgttgtctttttttcctatgtcttttggctcaagcaacatgtatatcagtgttgactttttctttcttagatctagtttaaaaaaaaaaaaaaccacataacaattctttgaagaaaggaagggattaaataatttttttccctaacactttcttgaaggtcaggggctttatctatgaaaaagtagtaaatagttctttgtaacctgtgtgaagcagcagccagccttaaagtagtccattcttgctaatggttagaacagtgaatactagtggaattgtttgggctgcttttagtttctcttaatcaaaattactagatgatagaattcaagaacttgttacatgtattacttggtgtatcgataatcatttaaaagtaaagactctgtcatgcatttttccccaaaaaa

SEQ ID NO: 45557 - DNA, 1083 bp, Homo sapiens
tcccaccccctccccctccatgtgaagatttgggtgcttaacatatcatttttttccctgccggaattttagcattgatatgaaccatggacaagtatattctgctgccacaaagactgtaaagtgcttcatttcaacagctgaggcaagccaagtgatcattaataaagcttttcttggttccttcagtggtgttggtagtaaaatggtaggtaaaagttaggctgcaagttcaataaatcatgagatttcccatcgttacacccttgtgtattcacatttcttggatcaaacattttgagtgaactaggggtttttattaaagacatttgttgtatttatggttgtaactgtacatgcttatcaggatgagactgaaagaaggtagggcaaaaatggttgaatctattttcagatagtagttcatacttgagtgaagtgtcttgtctgcattatgaagcctgggtatgtatccagtactaaataggtgggttaaatgtggtaattctagttcagtgtcttaccctgaagagaaagttgtaggttggctgttgaaattcattccttagatatgatcagtttgattgcccggctttattgcctttacaggaatgtgatactcagggcttactctatacaccaatgagtcttctttgatcctaagaccaccactgaagttgtttaggttcttttggacaaacatgataaacttcttcagatactttttttttcctttggcaggaaggtgtcttgctgcaggtaactaatgaagaagtggtcaaccacagagtcttcaagaaataagaaattctgtaccatctgaaagtagttcttgttggtgccttcatttaaaaagcactctttaaaataaaagggaaatgttttctgataaaacaaacatttagttgaggttcttgatataaaacaattacaaaatgagtgttgtttgtaaaacagtaacatcaaattggctagagagataaatgtatcatgttttaaattaggttttgtgagtagacagattacaattctattttaaatataaagtttataaaataaatactttttgtatccaaaaaaaaa

SEQ ID NO: 45558 - DNA, 2881 bp, Homo sapiens
gcgaccgctgcgccgaatcatcagtgtgggacgcaccgctccagccgcccgcggccagctgcaccggtcccccagcggcacgcgagcccgcccgcgcgccgttcgtgccctcgtgaggctggcatgcaggatggcaggacagcccggccacatgccccatggagggagttccaacaacctctgccacaccctggggcctgtgcatcctcctgacccacagaggcatcccaacacgctgtcttttcgctgctcgctggcggacttccagatcgaaaagaagataggccgaggacagttcagcgaggtgtacaaggccacctgcctgctggacaggaagacagtggctctgaagaaggtgcagatctttgagatgatggacgccaaggcgaggcaggactgtgtcaaggagatcgggcctcttgaagcaactgaaccacccaaatatcatcaagtatttggactcgtttatcgaagacaacgagctgaacattgtgctggagttggctgacgcaggggacctctcgcagatgatcaagtactttaagaagcagaagcggctcatcccggagaggacagtatggaagtactttgtgcagctgtgcagcgccgtggagcacatgcattcacgccgggtgatgcaccgagacatcaagcctgccaacgtgttcatcacagccacgggcgtcgtgaagctcggtgaccttggtctgggccgcttcttcagctctgagaccaccgcagcccactccctagtggggacgccctactacatgtcaccggagaggatccatgagaacggctacaacttcaagtccgacatctggtccttgggctgtctgctgtacgagatggcagccctccagagccccttctatggagataagatgaatctcttctccctgtgccagaagatcgagcagtgtgactaccccccactccccggggagcactactccgagaagttacgagaactggtcagcatgtgcatctgccctgacccccaccagagacctgacatcggatacgtgcaccaggtggccaagcagatgcacatctggatgtccagcacctgagcgtggatgcaccgtgccttatcaaagccagcaccactttgccttacttgagtcgtcttctcttcgagtggccacctggtagcctagaacagctaagaccacagggttcagcaggttccccaaaaggctgcccagccttacagcagatgctgaaggcagagcagctgagggaggggcgctggccacatgtcactgatggtcagattccaaagtcctttctttatactgttgtggacaatctcagctgggtcaataagggcaggtggttcagcgagccacggcagccccctgtatctggattgtaatgtgaatctttagggtaattcctccagtgacctgtcaaggcttatgctaacaggagacttgcaggagaccgtgtgatttgtgtagtgagcctttgaaaatggttagtaccgggttcagtttagttcttagtatcttttcaatcaagctgtgtgcttaatttactctgttgtaaagggataaagtggaaatcatttttttccgtggagtggtgattctgctaacatttttatctacgttttataacttggtgagtgacgatgagagccctgcacctggccagagtgtcacaggcaaaaggcatcgggaagcaggagcatcttcttggcagccaggctgggccatcttctcctggacacctgctgtgtaccaggaacttcgtcacctccttgaatgctggcggttcatttcatgatcagtgttaagcattttcctccatgggaaggaagcatgggatatagaaaagcgaagggctgtcctttacaaattctggttctgcaacttcctagcgtgactttgggcttgggcaagtttcttagccgttctgagccttcatttcctcatctgtacaatgagattaatagtacctatcatctaccttcaggattgctgacagacagaatttgaaataaaatatgcaagttagctaatacaaaaagtagatgatccaaaaatggtagccactcacccttcacaaactgaagtccatggaccacggaagtcgagaattaatgtacacctgtatcatgtgtaggaaaccagaaatgtgttccttatttcttgttcccaaacaggattaactgtgaagactaatttataaatgtgaacctaagaaaactccacctctgaaggaaatcatttgaattttgtttttgtacgtaaagttaaccttccaattgtctgagctgtcgtcactgacttcatgacagtctggccctccagacaagagcagcgctggcatcgggcaggtgattcctgacacctgctgcctgcaggcattcactgaccaggcctttcctggaggaaacacccagggccgggcggctgctgtttccacacgtggactcggatctgctgtgacaccgtcagcccgacagtctctccatatgcagcctttcctctgtacttttctccatggttgaaataaaacagggtgactgggagttacttagaattcatgaagattttaaaatggctttggagattttgcttttaaaccagtagattcaaaacttaaacagcgtctgcagcacaatttcttgaggaaccttgaaaaacacaacttcccaggccccattcagtaatcccaggatttctttaagctccccaaataattttgaaactcatcagccgagtttctgccctcatgaggtaattccatcgttctccccagtctgccctggcagctgtaacacaggagctggcctgagagcagattcaccctggaatgttctctccacagaacaatcaagtacctgtcgcctgcctagtgcttaccacttcac

SEQ ID NO: 45559 - DNA, 460 bp, Homo sapiens
  misc_feature (1)...(460): n = a,t,c or g
gnnatgtgntnnnncctttganaccnttatgacatgattacgaatttaatacgactcactatagggaatttggccctcgaggccaagaattcggcacgagatcatcacagaaagctctttcagacagtgctgctctagacagcttcaacaatgataggttctggtaaccataaagttgctatgcatactactcatttggaacaccagtttctgagaactgaaatagaataaaacacatctttgcagtataactatgttgggtgtaactgagtcacctgaaaaagtttggaagctggggaataacatgtggtgtagggcagttagtctttccacaggagtatgcagataagggagtcttgatccttattaaaatgctgattctcagagccttgagatactgatttagaaagtctgtgctaggtcaggtatccgcatttgaaaagctgccccatgtaattct

SEQ ID NO: 45560 - DNA, 1875 bp, Homo sapiens
  misc_feature (1)...(1875): n = a,t,c or g
aagtgctatcctgaggtgcggcaccactgtcccaacactcccatcatcctagtgggaactaaacttgatcttagggatgataaagacacgatcgagaaactgaaggagaagaagctgactcccatcacctatccgcagggtctagccatggctagaggagattggtgctgtaaaatacctggagtgctcggcgctcacacagcgaggcctcaagacagtgtttgacgaagcgatccgagcagtcctctgcccgcctcccgtgaagaagaggaagagaaaatgcctgctgttgtaaatgtctcagcccctcgttcttggtcctgtcccttggaacctttgtacgctttgnnnnnnnnnnnnnnnnnnnnnnnnnnnnnnnnnnnnnncaacggtggagccttcgcactcaatgccaactttttgttacagattaatttttccataaaaccattttttgaaccaatcagtaattttaaggttttgtttgttctaaatgtaagagttcagactcacattctattaaaatttagccctaaaatgacaagccttcttaaagccttatttttcaaaagcgccccccccattcttgttcagattaagagttgccaaaataccttctgaactacactgcattgttgtgccgagaacaccgagcactgaactttgcaaagaccttcgtctttgaggaagacgggtagctttctgcagttagggagggtgcagacacttgctctcctatgtaggttctcaggatgcgtaaagcaggaacagcctcccgaatgaaggcgttggccattggaactcaccagtgagttaggcaggcacgtgtttccccgacataacattgtactgtaatgggagtgaggcgtagaggcttcagcttctttgggatcagtctttgtggattttcataggcgagtttttcttgaccagcttttgcgggagattttgaacagaactgctatttcctctaatgaagaattctggtttagctgtgggtgtgccgggtggggtgtgtgtgatcaaaggacaaagacagtattttgacaaaatacgaagtggaagatttacactacattgtaccaaggaatgaaagtgtcacgggtaaaaactcctaaaagggttaatttctgtcaaatgcagtagatgatgaaagaaaggttggtattatcaggaaatgttttcttaagcttttcctttctcttacacctgccatgcctcccccaaattggggcatttaattcatctttaaactggttgttctgttagtcgctaacttagtaagtgcttttcttatagaaccccttctgactgagcaatatgcctccttgtattataaaatctttctgataatgcattagaaggtttttttgtcgattagtaaaagtgctttccatgttactttattcagagctaataagtgctttccttagttttctagtaactaggtgtaaaaaatcatgtgttgcagctttatagtttttaaaatattttaggataattcttaaactatggaaccttcttaacatcactgtcttgccagattaccgacactgtcacttgaccaatactgaccctctttacctcgcccacgcggacacacgcctcctgtagtcgctttgcctattgatgttcctttgggtctgtgaggttctgtaaactgtgctagtgctgacgatgttctgtacaacttaactcactggcgagaatacagcgtgggacccttcagccactacaacagaattttttaaattgacagttgcagaattgtggagtgtttttacattgatcttttgctaatgcaattagcattatgttttgcatgtatgacttaataaatccttgaatcatacaactggtaaaaaaaaaaaaaga

SEQ ID NO: 45561 - DNA, 1239 bp, Homo sapiens
  misc_feature (1)...(1239): n = a,t,c or g
gactccgaatttaatacgactcactatagggaatttggccctcgaggncaagaattcggcacgagatttcttcaatcccacctagctgcatttcaagtgctcaacagccacatgtggctccatattggtcagcaaagagaatgtttgcatcatcacagaaagctctttcagacagtgctgctctagacagcttcaacaatgataggttctggtaaccataaagttgctatgcatactactcatttgggaacaccagtttctgagaactgaaatagaataaaacacatctttgcagtataactatgttggggtgtaactgaggtcacctgaaaaagtttggaagctggggaataacatgtgggtgtagggcagttaggtctttccacaggagtatgcagataagggagtcttgatccttattaaaatgctgattctcagagccttgagatactgatttagaaagtctgtgctaggtcaggtatccgcatttgaaaagctgcccccatgtaattctgacggaagcagcaatgtgcttgtctaggttcgctattgtgagaatcaagttgatatttacctaacctatatcctccacaaaagccagacagtctggctctgggtcttctttcctccatccttagcccacagcacagaaactggcacattgcaggtgctttttgctatgtcagttcctcacctgcttaaagaggtcagggaggacagtcttcctgggcgactcctggcctcaggaactcagatgtgtgagcctcgccccataagaaacaaggtggaggaccctgtagggcaggaaaatcatgttaacagctttggcgtggggcactccccaggataggcacaggagctgtgcaggcaagtagaaaagagcactgggagaacggcccagttcacagaagaggaggcagcaagtctgcacactttgtactatgctgaaattgttcaatcactcgacagttcagaaataaatataggaagattttgaaaatcctacctctctgctctgctccacagcactcctggaagcctgcactttccgtagaccttaaaatctcagaggtagggctgccaccaaggtgaagatgggaacgcagatgatccatgagtttgccctggtttcactggcccaagtggtttgtgctaaccacgtctgtcttcacagctctgtgttgccatgtgtgctgaacaaaaaataaaaattattattgattttaaaaaaaaaaaaaa

SEQ ID NO: 45562 - DNA, 1552 bp, Homo sapiens; identical to SEQ ID NO: 12821

SEQ ID NO: 45563 - DNA, 1912 bp, Homo sapiens
gcgctaccgcacccaggttcggcccgtagcgtctggcagcccggcgccatcttcatcgagcgccatggccgcagcctgcgggccgcggagcggccgggtactgcttgctcctcggcttgcatttgtttctgctgaccgcgggccctgccctgggctggaacgaccctgacagaatgttgctgcgggatgtaaaagctcttaccctccactatgaccgctataccacctcccgcaggctgggatcccatcccacagttgaaatgtgttggagggcacagctgggttgtgattcttataccccaaaagtcatacagtgtcagaacaaaggctgggatgggtatgatgtacagtgggaatgtaagacggacttagatattgcatacaaatttggaaaaactgtggtgagctgtgaaggctatgagtcctctgaagaccagtatgtactaagaggttcttgtggcttggagtataatttagattatacagaacttggcctgcagaaactgaaggagtctgggaaagcagcacggctttgcctctttctctgattattattataagtggtcctcggcggattcctggtaacatgagtggattgattaccatcgtggtactccttgggatcgcctttgtagtctataagctgttcctgagtgacgggcagtattctcctccacccgtactctggagtatcctccattttcccaccgttaccaagagattcaccaactcagcaggacctcctcccccagggctttaagtctgagtttcacagggaccacagaatactgggccatgggtgcaacttctggttttgggcagtgcttttacagggacaacaaggatatgaaaattcaggaccagggttctggacaggcttgggaactggtggaatactaggatatttgtttggcagcaatagagcggcaacacccttctcagactcgtggtactacccgtcctatcctccctcctaccctggcacgtggaatagggcttactcaccccttcatggaggctcgggcagctattcggtatgttcaaactcagacacgaaaaccagaactgcatcaggatatggtggtaccaggagacgataaagtagaaagttggagtcaaacactggatgcagaaattttggatttttcatcactttctctttagaaaaaaagtactacctgttaacaattgggaaaaggggatattcaaaagttctgtggtgttatgtccagtgtagctttttgtattctattatttgaggctaaaagttgatgtgtgacaaaatacttatgtgttgtatgtcagtgtaacatgcagatgtatattgcagtttttgaaagtgatcattactgtggaatgctaaaaatacattaatttctaaaacctgtgatgccctaagaagcattaagaatgaaggtgttgtactaatagaaactaagtacagaaaatttcagttttaggtggttgtagctgatgagttattaccctcatagagactataatattctatttggtattatattatttgatgtttgctgttcttcaaacatttaaatcaagctttggactaattatgctaatttgtgagttctgatcacttttgagctctgaagctttgaatcattcagtggtggagatggccttctggtaactgaatattaccttctgtaggaaaaggtggaaaataagcatctagaaggttgttgtgaatgactctgtgctggcaaaaatgcttgaaacctctatatttctttcgttcataagaggtaaaggtcaaatttttcaacaaaagtcttttaataacaaaagcatgcagttctctgtgaaatctcaaatattgttgtaatagtctgtttcaatcttaaaaagaatcaataaaaacaaacaaggggtttaaaaaaaaaaagtcgac

SEQ ID NO: 45564 - DNA, 476 bp, Homo sapiens; identical to SEQ ID NO: 21958
  misc_feature (1)...(476): n = a,t,c or g

SEQ ID NO: 45565 - DNA, 6938 bp, Homo sapiens
gcggcacgagcggcacgagggattgttgtgtccactaaccggactcagaagggacttccctgctcggctggctttcggtttctctgctcacctccggataaatcacggggtctcccgcgccgctcatggcgcctcccgtccgtctcgagcgtcccttttccttcccggcgctttcctgggttgcttctggcggccctggtgttgctgctgtcctccttctccgatcaatgcaatgtcccggaatggcttccatttgccaggcctaccaacctaactgatgactttgagtttcccattgggacatatctgaactatgaatgccgccctgggttattccggaagaccgttttctatcatctgcctaaaaaactcagtctggactggtgctaaggacaggtgcagacgtaaatcatgtcgtaatccttccagatcctgtgaatgggcattggcacatgtgatcaaagacatccagttcggatcccaaattaaatattcttgtactaaaggataccgactcattggttcctcgtctgccacatgcatcatctcaggtgatactgtcatttgggataatgaaacacctatttgtgacagaattccttgtgggctaccccccaccatcaccaatggagatttcattagcaccaacagagagaattttcactatggatcagtggtgacctaccgctgcaatcctggaagcggagggagaaaggtgtttgagcttgtgggtgagccctccatatactgcaccagcaatgacgatcaagtgggcatctggagcggccccgcccctcagtgcattatacctaacaaatgcacgcctccaaatgtggaaaatggaatattggtatctgacaacagaagcttattttccttaaatgaagttgtggagtttaggtgtcagcctggctttgtcatgaaaggaccccgccgtgtgaagtgccaggccctgaacaaatgggagccggagctaccaagctgctccagggtatgtcagccacctccagatgtcctgcatgctgagcgtacccaaagggacaaggacaacttttcacctgggcaggaagtgttctacagctgtgagcccggctacgacctcagaggggctgcgtctatgcgctgcacaccccagggagactggagccctgcagcccccacatgtgaagtgaaatcctgtgatgacttcatgggccaacttcttaatggccgtgtgctatttccagtaaatctccagcttggagcaaaagtggattttgtttgtgatgaaggatttcaattaaaaggcagctctgctagttactgtgtcttggctggaatggaaagcctttggaatagcagtgttccagtgtgtgaacaaatcttttgtccaagtcctccagttattcctaatgggagacacacaggaaaacctctggaagtctttccctttggaaaagcagtaaattacacatgcgacccccacccagacagagggacgagcttcgacctcattggagagagcaccatccgctgcacaagtgaccctcaagggaatggggtttggagcagccctgcccctcgctgtggaattctgggtcactgtcaagccccagatcattttctgtttgccaagttgaaaacccaaaccaatgcatctgactttcccattgggacatctttaaagtacgaatgccgtcctgagtactacgggaggccattctctatcacatgtctagataacctggtctggtcaagtcccaaagatgtctgtaaacgtaaatcatgtaaaactcctccagatccagtgaatggcatggtgcatgtgatcacagacatccaggttggatccagaatcaactattcttgtactacagggcaccgactcattggtcactcatctgctgaatgtatcctctcgggcaatgctgcccattggagcacgaagccgccaatttgtcaacgaattccttgtgggctaccccccaccatcgccaatggagatttcattagcaccaacagagagaattttcactatggatcagtggtgacctaccgctgcaatcctggaagcggagggagaaaggtgtttgagcttgtgggtgagccctccatatactgcaccagcaatgacgatcaagtgggcatctggagcggcccggcccctcagtgcattatacctaacaaatgcacgcctccaaatgtggaaaatggaatattggtatctgacaacagaagcttattttccttaaatgaagttgtggagtttaggtgtcagcctggctttgtcatgaaaggaccccgccgtgtgaagtgccaggccctgaacaaatgggagccggagctaccaagctgctccagggtatgtcagccacctccagatgtcctgcatgctgagcgtacccaaagggacaaggacaacttttcacccgggcaggaagtgttctacagctgtgagcccggctatgacctcagaggggctgcgtctatgcgctgcacaccccagggagactggagccctgcagcccccacatgtgaagtgaaatcctgtgatgacttcatgggccaacttcttaatggccgtgtgctatttccagtaaatctccagcttggagcaaaagtggattttgtttgtgatgaaggatttcaattaaaaggcagctctgctagttattgtgtcttggctggaatggaaagcctttggaatagcagtgttccagtgtgtgaacaaatcttttgtccaagtcctccagttattcctaatgggagacacacaggaaaacctctggaagtctttccctttggaaaagcagtaaattacacatgcgacccccacccagacagagggacgagcttcgacctcattggagagagcaccatccgctgcacaagtgaccctcaagggaatggggtttggagcagccctgcccctcgctgtggaattctgggtcactgtcaagccccagatcattttctgtttgccaagttgaaaacccaaaccaatgcatctgactttcccattgggacatctttaaagtacgaatgccgtcctgagtactacgggaggccattctctatcacatgtctagataacctggtctggtcaagtcccaaagatgtctgtaaacgtaaatcatgtaaaactcctccagatccagtgaatggcatggtgcatgtgatcacagacatccaggttggatccagaatcaactattcttgtactacagggcaccgactcattggtcactcatctgctgaatgtatcctctcaggcaatactgcccattggagcacgaagccgccaatttgtcaacgaattccttgtgggctacccccaaccatcgccaatggagatttcattagcaccaacagagagaattttcactatggatcagtggtgacctaccgctgcaatcttggaagcagagggagaaaggtgtttgagcttgtgggtgagccctccatatactgcaccagcaatgacgatcaagtgggcatctggagcggccccgcccctcagtgcattatacctaacaaatgcacgcctccaaatgtggaaaatggaatattggtatctgacaacagaagcttattttccttaaatgaagttgtggagtttaggtgtcagcctggctttgtcatgaaaggaccccgccgtgtgaagtgccaggccctgaacaaatgggagccagagttaccaagctgctccagggtgtgtcagccgcctccagaaatcctgcatggtgagcataccccaagccatcaggacaacttttcacctgggcaggaagtgttctacagctgtgagcctggctatgacctcagaggggctgcgtctctgcactgcacaccccagggagactggagccctgaagccccgagatgtgcagtgaaatcctgtgatgacttcttgggtcaactccctcatggccgtgtgctatttccacttaatctccagcttggggcaaaggtgtcctttgtctgtgatgaagggtttcgcttaaagggcagttccgttagtcattgtgtcttggttggaatgagaagcctttggaataacagtgttcctgtgtgtgaacatatcttttgtccaaatcctccagctatccttaatgggagacacacaggaactccctctggagatattccctatggaaaagaaatatcttacacatgtgacccccacccagacagagggatgaccttcaacctcattggggagagcaccatccgctgcacaagtgaccctcatgggaatggggtttggagcagccctgcccctcgctgtgaactttctgttcgtgctggtcactgtaaaaccccagagcagtttccatttgccagtcctacgatcccaattaatgactttgagtttccagtcgggacatctttgaattatgaatgccgtcctgggtattttgggaaaatgttctctatctcctgcctagaaaacttggtctggtcaagtgttgaagacaactgtagacgaaaatcatgtggacctccaccagaacccttcaatggaatggtgcatataaacacagatacacagtttggatcaacagttaattattcttgtaatgaagggtttcgactcattggttccccatctactacttgtctcgtctcaggcaataatgtcacatgggataagaaggcacctatttgtgagatcatatcttgtgagccacctccaaccatatccaatggagacttctacagcaacaatagaacatcttttcacaatggaacggtggtaacttaccagtgccacactggaccagatggagaacagctgtttgagcttgtgggagaacggtcaatatattgcaccagcaaagatgatcaagttggtgtttggagcagccctccccctcggtgtatttctactaataaatgcacagctccagaagttgaaaatgcaattagagtaccaggaaacaggagtttcttttccctcactgagatcatcagatttagatgtcagcccgggtttgtcatggtagggtcccacactgtgcagtgccagaccaatggcagatgggggcccaagctgccacactgctccagggtgtgtcagccgcctccagaaatcctgcatggtgagcataccctaagccatcaggacaacttttcacctgggcaggaagtgttctacagctgtgagcccagctatgacctcagaggggctgcgtctctgcactgcacgccccagggagactggagccctgaagcccctagatgtacagtgaaatcctgtgatgacttcctgggccaactccctcatggccgtgtgctacttccacttaatctccagcttggggcaaaggtgtcctttgtttgcgatgaagggttccgattaaaaggcaggtctgctagtcattgtgtcttggctggaatgaaagccctttggaatagcagtgttccagtgtgtgaacaaatcttttgtccaaatcctccagctatccttaatgggagacacacaggaactccctttggagatattccctatggaaaagaaatatcttacgcatgcgacacccacccagacagagggatgaccttcaacctcattggggagagctccatccgctgcacaagtgaccctcaagggaatggggtttggagcagccctgcccctcgctgtgaactttctgttcctgctgcctgcccacatccacccaagatccaaaacgggcattacattggaggacacgtatctctatatcttcctgggatgacaatcagctacacttgtgaccccggctacctgttagtgggaaagggcttcattttctgtacagaccagggaatctggagccaattggatcattattgcaaagaagtaaattgtagcttcccactgtttatgaatggaatctcgaaggagttagaaatgaaaaaagtatatcactatggagattatgtgactttgaagtgtgaagatgggtatactctggaaggcagtccctggagccagtgccaggcggatgacagatgggaccctcctctggccaaatgtacctctcgtgcacatgatgctctcatagttggcactttatctggtacgatcttctttattttactcatcattttcctctcttggataattctaaagcacagaaaaggcaataatgcacatgaaaaccctaaagaagtggctatccatttacattctcaaggaggcagcagcgttcatccccgaactctgcaaacaaatgaagaaaatagcagggtccttccttgacaaagtactatacagctgaagaacatctcgaatacaattttggtgggaaaggagccaattgatttcaacagaatcagatctgagcttcataaagtctttgaagtgacttcacagagacgcagacatgtgcacttgaagatgctgccccttccctggtacctagcaaagctcctgcctctttgtgtgcgtcactgtgaaacccccacccttctgcctcgtgctaaacgcacacagtatctagtcaggggaaaagactgcatttaggagatagaaaatagtttggattacttaaaggaataaggtgttgcctggaatttctggtttgtaaggtggtcactgttcttttttaaaatatttgtaatatggaatgggctcagtaagaagagcttggaaaatgcagaaagttatgaaaaataagtcacttataattatgctacctactgataaccactcctaatattttgattcattttctgcctatcttctttcacatatgtgtttttttacatacgtacttttccccccttagtttgtttccttttattttatagagcagaaccctagtcttttaaacagtttagagtgaaatatatgctatatcagtttttactttctctagggagaaaaattaatttactagaaaggcatgaaatgatcatgggaagagtggttaagactactgaagagaaatatttggaaaataagatttcga

SEQ ID NO: 45566 - DNA, 2848 bp, Homo sapiens
tttttttttttaattacctggtaacctttattcgggaagtgaaagtaactgtgaaacagtgcttcataaggcgtggcatacaaggccttggtttccaacgccggcgaggatgaggcccagtcccacactccctcgcaggcacccttgctaagatgtcctcctgggtgaccaaaacggtggtaacatagccaaggttacttttacttgggtaggatgactgcagaaggaatggctacacagagcttccagacctttccatgcgttgtgctctccagaggatgcgccaggtgtatcagatttgcatgcacaaagacaggtgtgcgccccacccaccctgggctgggcagcaagaggtctgctcacctactgcaccagactttcctagcctccttccacactccgaatcttcaagcaggatgaaaagagaccacagaaactgaagcaagactaggatgctgcaaagaaagatgctctgatacacaaaagccaaaacataagacaaggagggaagagtaaaatgagggagacagacaggaagttaaactatgcagttacactgccgatttagaaagatgttaagacacacactagatacaaatgaaacccatcctgctcccttcctccagaagacgttgtaatgcagaaagccaaaatactacatccttcttgtagtcagcactgttagtattcaacactttaatatttatggtgtatcacataaaaaacaaagtcatatacttttgcattaatcaaaaaatagcaaatccatataatggcaaaatcaggaaaaaaattctagtatttccacaaaatacataatgtcttacagatgattatgtgaactttaaatgtctgcagccctacagagcttttgttgccaattgaaaaacaaaaaaatcccaacacaggatgttcaaaaagcctaattcataaaaagacaatttattccatgtttaatatagtgttttttaggatggtaacataagtcatgcaacagctctgtaaaacaaaacaaaacaagaaactacgatgtcggctgcgggttaaataaaaagaaaaccacacatacaaaaaagaatgtaaggaatggttagtggtgctgccaattaaaaaaaaaactgtaaatcatcttaccacccaaaagtgatatggaaaactgtttgaatcgtgagcatggacatggttgtagtcatcttttggaattataagtgaaagtgataggtaactccttgtgttccatttctcagagtagattgctatatccaaatgatcatgaacacccctcccatcccacactcagatggaaagcagccagaacccctgccactggattcttcagcacccttgggacagtctccaactgacacttcccagcaggggaggagggcaggcacctttggtgactcttcagtgagactccatcgacattcagaatcttaaaatgttggtaatgaaaaccatggacctccaagtcatcccttacccaaccttaaatgtagtgttgtgacatcccaacgaaggacttccacgtcacgtgggaataaatttgaacagatacatcccaattgaacatagtgtctcagatttcaaacaaatacagctcatcttttgccaaaaaataaatatagtggaatgcaagtttgagggatggaagaatatataatctatcaactgtcaaggagtacaatttcattgcagacacaaagacttaagagtttcaaagaattttttaaaataaaaaaaaaatttgcacttattcctcacaaaatcttcacttttggaactatcccaattgaagctacacactgaatttattaatacagcattaagtttctttgtgtaaaaaaatctttgtacacagtaataaaaaaagataaggcaagatgcattaaacagaaaccttctggctcttttcctctgcgtttttacagagccactgatgactatctgcaacaaaagagttaagtttctgattttccgtatcaagcatcttatgcctttgctgtggtaagaattctgtccgagcaccctgaaggacagatgctggtgatggtctttggcacttatgctggcaaactgagcttctttcccttgagtacttttgtaatgtacaagtagaagaagtcacagtataggatggtctggactacgccggccaccacagcaatgaggtcaaagaagccctcaaagtagaagcgccagatccagttgacaagatacaaagcacgatagaggcccaggaagaacaggtagtgggtggtgatggtctcggcctccccagtcttgctgatcataaacagctgcggaaggatagccacggactccaggtagatggagaaggtccagaggatctcaagaggagagaaatcgtgattaactaaaaatgagaggcctcccacagggaccaccagaaactccactcggaaggtatcatgatttccatcgtaggttgccttaaatttcaggtagatcaggtacactgtggcataggagcaggcaaggtagataaccttcatagatgtgttatacaatgaaataaatgaagtaaaaagatccaggtaacgagttgtgaagaccagtgcaaacagaagctggcttttcccagaaatacctagagaaacagaagggaagtattagaagggcctgaagagctttgggattcctgtggatcacactgtgcagggagtgcagacagggaaggaggggtgcgtggggtcaaggcccaggtctagggatggctctgaatgaacaagagcagttgtagtttttctatcccttcccattcccaaacatgctccttttgggaggctctaacaggcttttctgtctcactataaagggcgaccac

SEQ ID NO: 45567 - DNA, 3623 bp, Homo sapiens
cccacctctgggatttggaactttagcctctaccccattctccatgcaaatctgagttctaggctcttcctaaagttgtcacccatacatgccctccagagttttatagggcatataatctgtaacagatgagaggaagccaattgccctttagaaatatggctgtgattgcctcacttcctgtgtcatgtgacgctcctagtcatcacatgacccatccacatcgggaagtcggaattacttgcagggctaacctagtgcctatagctaaggcaggtacctgcatccttgtttttgtttagtggatcctctatccttcagagactctggaacccctgtggtcttctcttcatctaatgaccctgaggggatggagttttcaagtccttccagagaggaatgtcccaagcctttgagtagggtaagcatcatggctggcagcctcacaggattgcttctacttcaggcagtgtcgtgggcatcaggtgcccgcccctgcatccctaaaagcttcggctacagctcggtggtgtgtgtctgcaatgccacatactgtgactcctttgaccccccgacctttcctgcccttgggtaccttcagccgctatgagagttacacgcagtggggcgacggatggagctgagtatgggggcccatccaggctaatcacacgggcacaggcctgctactgaccctgcagccagaacagaagttccagaaagtgaagggatttggaggggccatgacagatgctgctgctctcaacatccttgccctgtcaccccctgcccaaaatttgctacttaaatcgtacttctctgaagaaggaatcggatataacatcatccgggtacccatggccagctgtgacttctccatccgcacctacacctatgcagacacccctgatgatttccagttgcacaacttcagccttcccagaggaagataccaagctcaagatacccctgattcaccgagccctgcagttggcccagcgtcccgtttcactccttgccagcccctgggacatcacccacttggctcaagaccaatggagcggtgaatgggaaggggtcactcaagggacagcccggagacatctaccaccagacctgggccagatactttgtgaagttcctggatgcctatgctgagcacaagttacagttctgggcagtgacagctgaaaatgagccttctgctgggctgttgagtggataccccttccagtgcctggggcttcacccctgaacatcagcgagacttcattgcccgtgacctaggtcctaccctcgccaacagtactcaccacaatgtccgcctactcatgctggatgaccaacgcttgctgctgccccactgggcaaaggtggtactgacagacccagaagcagctaaatatgttcatggcattgctgtacattggtacctggactttctggctccagccaaagccaccctaggggagacacaccgcctgttccccaacaccatgctctttgcctcagaggcctgtgtgggctccaagttctgggagcagagtgtgcggctaggctcctgggatcgagggatgcagtacagccacagcatcatcacgaacctcctgtaccatgtggtcggctggaccgactggaaccttgccctgaaccccgaaggaggacccaattgggtgcgtaactttgtcgacagtcccatcattgtagacatcaccaaggacacgttttacaaacagcccatgttctaccaccttggccacttcagcaagttcattcctgagggctcccagagagtggggctggttgccagtcagaagaacgacctggacgcagtggcactgatgcatcccgatggctctgctgttgtggtcgtgctaaaccgctcctctaaggatgtgcctcttaccatcaaggatcctgctgtgggcttcctggagacaatctcacctggctactccattcacacctacctgtgggcgtcgccagtgatggagcagatactcaaggaggcactgggctcagcctgggcattaaagggacagagtcagctcacacgctgtctgtgactaaagagggcacagcagggccagtgtgagcttacagcgacgtaagcccaggggcaatggtttgggtgactcactttcccctctaggtggtgcccagggctggaggcccctagaaaaagatcagtaagccccagtgtccccccagcccccatgcttatgtgaacatgcgctgtgtgctgcttgctttggaaactgggcctgggtccaggcctagggtgagctcactgtccgtacaaacacaagatcagggctgagggtaaggaaaagaagagactaggaaagctgggcccaaaactggagactgtttgtctttcctggagatgcagaactgggcccgtggagcagcagtgtcagcatcagggcggaagccttaaagcagcagcgggtgtgcccaggcacccagatgattcctatggcaccagccaggaaaaatggcagctcttaaaggagaaaatgtttgagcccagtcagtgtgagtggctttattctgggtggcagcaccccgtgtccggctgtaccaacaacgaggaggcacgggggcctctggaatgcatgagagtagaaaaaccagtcttgggagcgtgaggacaaatcattcctcttcatcctcctcagccatgcccagggtccgggtgcctggggcccgagcaggcgttgcccgctggatggagacaatgccgctgagcaaggcgtagcccaccatggctgccagtcctgccagcacagataggatctggttccggcgccggtatggctcctcctcagtctctgggcctgctggtgtctggcgttgcggtggtacctcagctccatcccaggggaagtagagactgagaatgtgggtacaataggcacagaggttgtgcagcccacgcaggtggacctgcagcttcccactgggcagcttttgctgcagcagcagggccaagtagctgaagacgaaggcgtccaaggaggcaggggcatctccaaagaagaacttttgagagcccaggcgctgagagagcagggtcagacactcccgagcctctcggtacagctccttctccagctcttcctcgtcctcaggcctgtgctccccagtcagcagctgtagccgttccatgtactgccgctgcatgcggccaggcaggaagaagttgaggggaaagggcatagcctctgcataccacttccgggtcacttccacgtagttcttggtgtctatccaaaaagtatgtaccagcaccgggagcaacttctcctccaggagagacatgaaggccagggtgtctgccccttgccgagctgacagatcataatcagcattgtacttctcttttcgaaggtgggtgatgatcttgtgtggaactgagatgacctctccatgactggtccgaagggcaggcagagttcctgaagggctctgccaggggttgctgatcttgtgtaccttcagtggagcaccagtaaatctggcataggtcagcacggccaggctgtccaggtccactgacggcagcccccagccccctgaccagcagaacagctccatgggcgccgccatcttgcccaccc

SEQ ID NO: 45568 - DNA, 1743 bp, Homo sapiens
agccgactgctgaaggctggtttgcgtcgacatggcggttaccctgagtctcttgctgggcgggcgcgtttgcgccgccgtcactcgctgtgggttcgcgacccggggggtggcgggcccaggccctattggccgggagccggaccccgattccgactgggagccggaggaacgggagctgcaggaggtggagaggtaccggcttctccccgggccctcagcttgaagcagggcctcgtgccccggcgctccaggccgcgcccccttggcgccgggtgtcctgccgctgcttgcgcagcggcccttgtttcttcttacccgttgttaggggcgcagcgtcaggtgttcagctcccctgggaccactggtcccttcattagtgacgtatttcatcatcagtttagagagttcggcatgcttacaggcagttattgttctaggtgttagctttctgggtgtaacggagcagctctaagccggcaacatggcccggttgcccttgcgatcaaagagaagagggctgggcgctccatgatttagcctgaggctcttcaaacatccattctgcttccacgcatggcttctgccattggttctcttcccccagcaccctgaaacgacagaaacaagcaatccgattccagaaaattcggaggcaaatggaggcgcctggtgccccgcccaggaccctgacgtgggaagccatggagcagatacggtatttacatgaggaatttccagagtcctggtcagttcccaggttggctgaaggctttgatgtcagcactgatgtgatccgaagagttttaaaaagcaagtttttacccacattgggagcagaagctgaagcaggatcaaaaagtccttaagaaagctgggcttgcccactcgctgcagcacctccggggctctggaaatacctcaaagctgctccctgcaggccactctgtatcaggctctttgcttatgccagggcatgaagcctcatctaaagacccaaatcacagcacagctttgaaagtgatagagtcagacactcacaggacaaatacaccaaggagaaggaagggaagaaataaagaaatccaggacctggaggagagctttgtgcctgttgctgcacccctaggtcatccaagagagctgcagaagtactccagtgattctgagagccccagaggaactggcagtggtgcgttgccaagtggtcagaagctggaggagttgaaggcagaggagccagataacttcagcagcaaagtagtgcagaggggccgagagttctttgacagcaacgggaacttcctgtacagaatttgagtcggggcttggcttatggagatgcctcgtgaaacacagctgggcaagtattaatgtatatggaacagcctggatttctgcatatggataagccaccttggaataggaagaggtgttgagcctggactgtgggaggaaagagctgcgtggatagattcaaacttcctgtggtagtgctcccagtctgacctctgtagaccttcagtactcactcttcttgcttaggctctctgtgtgttgaaagccatcccgtgttgcatgtgttgttacaattttctgtgatacttgcaatttatgtttgagaagaagtgaaaagtttgccttctgacctcatttccttcttgatcagtgaacactaacattttggggacaacttagtcaattggttttccttacaacaaaataaagtaaaatgtagcagtc

SEQ ID NO: 45569 - DNA, 329 bp, Homo sapiens; identical to SEQ ID NO: 21995
  misc_feature (1)...(329): n = a,t,c or g

SEQ ID NO: 45570 - DNA, 2874 bp, Homo sapiens
  misc_feature (1)...(2874): n = a,t,c or g
caacggcccgagggggtgggcgtggcggccgcgaaacaaaaccccctctgttccctctcttcgcggacgcgccgcgtacgttccatccgccagctgccatgagcgagcgcctccgtcccaggaaaaggagaaggaatggcaacgaagaagacaaccatcttcccccccagaccaaaagaagtagcagaaaccctgtctttcaggattcctgggacacagagacagtacctgtaatgagaaacagtaaagaaaacagactaagaggaaacaaagcgttctgcgcgtcttcaggcagtgacagtggtgggagcagcagcagcagcagcagcagcatcaacagcccggacagggccagcgggccggaaggcagcttgagccagaccatggccggatccagccctaacacgcctcagcccgtgcccgagcagtccgcgctgtgccaaggcctctacttccacatcaaccagaccctgagggaggcccacttccacagcctacagcaccgagggcggcctctgacatgatgtgccggcagtttcttgccttctgtgaagggacagcgctgtgcagatttgatatttcaacttacaacttgttttaaaagaaaaattgcacacgaaaaatgcctgttggcttttcagtctatatttgaaataacaggttaacaggcagttgtttacttgtggttttgctgcactattgcaatttcaaaggggctttgaagcaattttttataggattcttttgagggagggtatcaaatctatgtcaaggtagtggtttgaggaaaactcattctgtgtgttgaatccatagtatgtcccattcagactgatttccaaatctgtcaactagaaactctactttatgtaaagggccttttaaaaatgcgggatcttcaattttttttattcaataaactagtaaagagtatctagtttccatgaaaaaacataagtttttttccaaaatataggaagcttgattcagtcttgcactgaaattaactgccatactacctctcagtatgtagatgttctattgaaagtactctctcctgtgtaacaggagnaacaatcagatccaattcagactgtcagtgaagcacactccctaataatagtctctactctttgttatatatttgtatttccagagagaatgtcttttagattcttgtatacccagataacttctgtgtcactattccaccagagtctggcacctcagactttagtaggaaacatggcacagttctgcaagtaaagtaatatgtaatgactttttgtcctacaaacttggtcagtcagcagcttacatgatctcattgacaattccaccttgtagtgtcaacaattaaggtgttgttgaacgctgataaaatgtaagctacctgaactgatgtctaaagcaacaagtattgtgaaattttgggacaaggattaacttgatgcttaaagtaacccccaacagtaactagggggccacattccatcagtgaaactggaaagattggtgtggctgagaatcagatgagcagaggcacctttagaagaaataatgtggtagtatttatttagggagagacagatgtgttgccatgttacttagtcatactagagagccagccaagtttgaataatgaaggtgcagacgtgttgtcttcttcactgacaagctgtctgaacaaggagccaggaactgtcgggtcaccagctgtggagcgtgccggggggacaacctgccattggatgtagagaaaagtgccttagagttggcctgagccctcctgcccactcgccctccgcgcgacgccactcggagtccacacggcacacacaagcggagctgagaagcacgatggctctagtcagaggactttgctgtcggtccagatttgaagaggacacggaacagcatgagcctttgtgacaaaactagaatttggaaatgaggactgtcttgggaaaagggtagacacaggcacttctctccacagcctgctaacctaatgtgggcagaactgaaagatcactgcagtggaaactgttctggaagaggctgcaacatagcccatgcttagggactggatggtttttgcaagagctttttttttttttaaactaccatctcccaacttttaaagccagatacttgacaaggattttagatcttaatgggttcgatggtagggaatacggaaaggatacactgctaatattgtgtctaacaataaagcaaacaactcgatgctgtaagaagacaagctgtttgagctttcaaacacacatgcacacagcacaattcagaaatacccaggaggattcctgcaggcttaacagttggcatcgtactgaaatgaaacgtgtattaacaagaaaatgtcaaacttttggggaaacaaattttctgttacttcccacccaactaaaagggaagataaaaccatcatcaccagaacaaaacagattttctccaaacaagtacaatgatagtgccgggttggcagttaactctttcaccctactaaattcaagagctcatctccaccctgtcctgtatattttctacatttctattaagaggctacttggtagtgtcagcgggcatcttttacaccttctagtagctcaagctagtaaaaccttgtacttctctattgcgccgccattaaaagcagcattagtgcattttgtcattcagttcttaatcagttatttaaaagggagctgatcatgggtggctcggtgggaggtggggacccatccacggatgagcctcttgctcttggcaccaacctgagcttttgtttcgatgtttctggttgatttagcctttcgagtgcttgtcatgctcagtgggagaagtccaaac

SEQ ID NO: 45571 - DNA, 5824 bp, Homo sapiens
  misc_feature (1)...(5824): n = a,t,c or g
gctgcccgaggcgcaggtcaaccagaatcaagatgtctgggactgaggaagcaattcttggaggacgtgacagccatcctgctgctggcggcggctcagtgttatgctttggacagtgccagtacacagcagaagagtaccaggccatccagaaggccctgaggcagaggctgggcccagaatacataagtagccgcatggctggcggaggccagaaggtgtgctacattgagggtcatcgggtaattaatctggccaatgagatgtttggttacaatggctgggcacactccatcacgcagcagaatgtggattttgttgacctcaacaatggcaagttctacgtgggagtctgtgcatttgtgagggtccagctgaaggatggttcatatcatgaagatgttggttatggtgttagtgagggcctcaagtccaaggctttatctttggagaaggcaaggaaggaggcggtgacagacgggctgaagcgagccctcaggagttttgggaatgcacttggaaactgtattctggacaaagactacctgagatcactaaataagcttccacgccagttgcctcttgaagtggatttaactaaagcgaagagacaagatcttgaaccgtctgtggaggaggcaagatacaacagctgccgaccgaacatggccctgggacacccacagctgcagcaggtgacctccccttccagacccagccatgctgtgataccggcggaccaggactgcagctcccgaagcctgagctcatccgccgtggagagcgaggccacgcaccagcggaagctccggcagaagcagctgcagcagcagttccgggagcggatggagaagcagcaggttcgagtctccacgccgtcagctgagaagagtgaggcagcgcctccggcccctcctgtgacgcacagcactcctgtaactgtctcagaaccactcctggagaaagacttccttgcaggagtgactcaagaattaatcaagactcttgaagacaactctgaaaagtgggctgtgactcccgatgcaggggatggtgtggtcaagccctcgtctagagcagacccagcccagacctctgacacattagccttgaacaaccagatggtgacccagaacaggactccacacagcgtttgccaccagaaaccacaagcaaaatctggatcttgggacctccaaacttatagcgctgaccaacgcacaacaggaaactgggaatctcataggaagagccaggacatgaagaaaaggaaatatgatccatcttaactgaggctcaggccacataattggactctgtcacaaagggactttggaaaactactttttggtcatgaaattgttcatcgctgctggagaatgaacgtcattgcaatttatcttgcttcattctgaaccttatcaagaggatctgactgagagcccactgcagttagagctgagcacttttgaaaagcttgtccatcactctagtagggagaggctctggacagatgaataccttttcttcggcttgtgaggcttcccactatttattactgaactattatgttaatgaagatggacattttaggaatcaccaatggctccttgccctcaagcaatataggccagacttggtcctaagcacctgcctcagcaattgtctacattcagttgttttgcataacgtctgccttctttcctttacggtccatgcctttaatgttgcccacattaagcactgtggatcacgacaggaaaaaggttggagcagtgcttttcactactttgtatcaatccaggctacaatcttcatttaatataaataatttatggatttatgacattacaatcctgcattgtttcaagactgacattttttcctaaggaaggaaataatcatctaagaccacgaaaaaaggctgnnnnnnnnnnnnnnnnnnnnnnnnnnnnnnnnnnnnnnnnnnnnnnnnnnnnnnnnnnnnnnnnnnnnnnnnnnnnnnntctccacaacctctnnnnnnnnnnnnnnnnnnnnnnnnnnnnnnnnnnnnnnnnnnnnnnnnnnnnnnnnnnnnnnnntgtctggccagaaaaggcatttttgagaaagcaaatcgtataccttattaacaaaatagaatatatatatatattgcttatctgaaatgcttgaaaccagaattgttttgcattttttgaatatttgtatacacataatgagaccttggggatgggacccaagtctgaacgtggaattcacctgtgtttcgtgtatatgcctcatacacataattttgtgcatgaaacagagtttttgtataagaagatacactgcagctgaagagggctgggtttttttttctcttagggtcgctgcataaactgttgtatgcctggtgctttgcgacttgtcacacgaggtcacgtgtggaattttccacttctggcatcacgtcagtgctcagaaattttctgatctcagagcatttcaattagggatgctcaaacgcaactgtttctacttccccatttcaggtgtgagatgtaacccaccttgaccataaattggcttttcatagtgctcagatgtttcataattcttcccccaaaataatgaagtttgcagtttaacaactttttttttgagagggggggtctggctctgtagcgcaggctggagtgcagcggtgccatnnnnnnnnnnnnnnnnnnnnnnnnnnnnnnnnnnnnnnnnnnnnnnnnnnnnnnnnnnnnnnnnnnnnnnnnnnnnnnnnnnnnnnnnnnnnnnnnnnnnnnnnnnnnnnnnnnnnnnnnnnnnnnnnnnnnnnnnnnnnnnnnnnnnnnnnnnnnnnnnnnnnnnnnnnnnnnnnnnnnnnnnnnnnnnnnnnnnnnnnnnagtaaaaaggtactagaattataggcatgagccattgccccagcccaatttaataattttttaaacgtattattttgggctgggctgtggctaatcttgaagcagtgacttcctattttttggctcagacccatttgggaagctgtgaacctgagataaggaagtctgaaagtactagccggcagccgaccgtttctattcctttcgaagttaaggagacagcaaaggagctcccaggaattagggatccagttataaattgcacttaactcaaaatagtgccaatgagaatgtgaaggaatcttctggaaatgaaaccccacagctcaacaaaagcaagtttggtttatttgaatggtttcattaaataagtctacaaaggtaacaaactgaagcacaaagcgcaatcttacaagaagcgcaacacccagagttagtgcaaaatgtacaattaacggctgctgagaaacccccaaagtttgaatttttatttttatttttaacagtgtacattgttaaataatgtaaggaaaacatttataattcagaaagtttttaatgtggaaaaagatactcaaagtgtactattaacacaaaaataatttaaacagttcagtagcactagttcattcctctaggcttgttatttcatacacaggaggatgaaatcaacagtaaataacaccagttctgactttttttgtgtatgagtgaaaagatgtcaaaattattattaaacccaaataacaaatgataatgtgctgcatgaggctccactgctcctctggtataaagtatgtttcactcttgggtggcccctttctcagctactcagccccttgttggttctatccttactctctccacaagaaatacaagcagagaataaataaatcattttaaagcaggggtggaagcccttgcccttttcctttctaccttttaaaaaccttcagctctcatttgcatatttagggccgtagaccaacttacttacttattaagggaagcagggcccttaaggaatgaacagggtacaggagcctccagcctctttctgtggtagtggtggtggtggtggtgattcccagaatatgccattgacgtgggtaaaaggttggaaatattttcagtttcccaactaagagtcaagaagcaccccaaaattaagagtcctagcttctttctttgtcttcagagataacaaagatcctaaacatagccagttaggacagtatttccggaaagctctgaaaataattaataactacccattacaaggaggcatagcactgaataacactgattggttgcagttattacttacggggagtattatttatttgaaaatgtgaacatattagttgtacttctagaaataaaggtggcacaatagattatgatcctgcaaccatttggacatcataaaggaaatgagtaggaataagtattctttcctagaatgattaattcagatgtggaaagatagatagattaactttccacaaaatgtagtaccccaagctgagaaatgcatggtacatgtgcaacaagaggaaagcaatccaaacagtttttctgagagcaattttctccatctgtgacttttcactatcaggttccccaacttgaaaactagccccccacccccttctctttatgttcagtttcttctaggtcacgtctgttcaagcctagctcaaataagaaaggtttatatgacagtcactggccaggcatcacgtttgtttcctcattctttagtctttgtctttcacccagcacacaccattcttttaagttgtccaattttgttacaacaccccctcctcactattcccgaaacagaactttctgtttttaaccactgatgccaacctaacttcccaccctactcatcttacacctgctctagacaaagttgttgaatgacttaaaaaaatactttttcaatttccctttggcataaccactgctggactgctggggtcacatggacctacgatttccttccacatgccctttattgatctggggtctggtaagttgatgctaatggcagaagcaatagaagtccaaggcactaaaatgtccagcaagcaacactgggaaacagaagtattcaagtacagtaatttatacaattttacattcacatttatttatctaatacaatggaaatacaaaggaaaaagttaaagtgtctcaataagtaaaggacagagctagctttttttggaactttttaaacgtttcatattttactcttaaaactactgttgtccaacaacattttatatatcacagtgtttccacatcaaaactgatggcaaagttacatgtccgcagggaacttaatttttttttttttcctaattgctaatgctgcagtcaaagctgctaatatcttttgcttaaagcactaatgacctatcataagaaagagttgcaccccagtaccctggtatttttcactgggttctaaagagcaaagaaaaaataaaaaagagaggggtaaaaaaaagggaggagggcagggtaggagagagcccagtaggtggtttttgtcctgtggttcggattcttgagggagtgagggattcagggcatgtaccaaaagcaagagctccacccactcgaaattacagatgggtttgattttacattgagttctccagcttccttatgaacaagactttcctagccctcatcctcattactgagtatagataaacaggaaagcatggtctgaagctgccccttgacaaaaaagctgttctttccttcctctcccattccaataactggagcgggggagactctccattctgagggctcaatgcagtattaaaaacattcccctctggcaagaaataaccagttaaatgcagcactagtagttagtatataggctacttcccac

SEQ ID NO: 45572 - DNA, 475 bp, Homo sapiens
  misc_feature (1)...(475): n = a,t,c or g
ttgaacacccttngnnncnccctttgaaaacnntatgactgattacgaatttaatacgactcactatagggaatttggccctcgaggccaagaattcggcacgagggggcacaaaataactggtgtcttgtaaatgttctgtttttttaaataaaatttctctactttagtctttactttaaaaatatgtactgtttccttttttgttgtttttttgtttgtttttttttcttttgtactgagctcagcatagactaatactaccttaatgttaaaatctgaatttcttttagcattttgcttaaaagcaatatgctatttgcttattccgtgccctgacatagataatttttgaattctgatagaatacaagtgtggtaaatgccatgtttgtactttatctaacatcttctctttcagtagtcttgttttttttatatcatgtgattgatngtgtgtcccctttcctcttctt

SEQ ID NO: 45573 - DNA, 2383 bp, Homo sapiens
  misc_feature (1)...(2383): n = a,t,c or g
cgctgagaaggagcagacaagatggcgacgtccgtggggcaccgatgtctgggattactgcacggggtcgcgccgtggcggagcagcctccatccctgtgagatcactgccctgagccaatccctacagcccttacggaagctgccttttagagcctttcgcacagatgccagaaaaatccacactgcccctgcccgaaccatgttcctgctgcgtcccctgcccattctgttggtgacaggcggcgggtatgcagggtaccggcagtatgagaagtacagggagcgagagctggagaagctgggattggagattccacccaaacttgctggtcactgggaggtggctttgtacaagtcagtgccaacgcgcttgctgtcacgggcctggggtcgcctcaatcaggtggagctgccacactggctgcgcaggcccgtctacagcctgtacatctggacgtttggggtgaacatgaaagaggccgctgtggaggacctgcatcactaccgcaacctcagcgagttcttccggcgcaagctgaagccgcaggcncggcctgtttgtggcctgcacagcgtgattagcccatcggatggaaggttcctcaactttgggcaggtgaagaactgtgaggtggagcaggtaaagggggtcacctactccctggagtcgttcctgggcccgcgtatgtgcacagaggacctgcccttcccaccagccgcgtcgtgtgactccttcaagaaccagctggtcacccgggaagggaatgagctctatcactgtgtcatctacctggcccctggggactaccactgcttccactcccccaccgactggactgtgtcccaccggcgccacttcccaggctccctgatgtcagtgaaccctggcatggctcgctggatcaaagagctcttctgccataacgagcgggtggtcctgacgggggactggaaacatggcttcttctcactgacagctgtgggggccaccaacgtgggctccattcgcatctactttgaccgggacctgcacacaaacagcccaaggcacagcaagggctcctacaatgacttcagcttcgtgacgcacaccaatagagagggcgtccccatgcgtaagggcgagcacctgggcgagttcaacctgggctccaccatcgtgctcatcttcgaggcccccaaggacttcaatttccagctgaaaacaggacagaaaatccgctttggggaagccctgggctcgctctagagtctctttcctgattatggctgctaagggatcttttccaaacagagtgagggtcttttcaagagggaggcccatgaggccatccaggtaagggcctgcctcagcgtggttgggagtctgaccaggtaggacttgaatgattcggctaccacctgttccagaggtgcagacaagaggtggcgagagcccccatcatgcccctcaacctatcccgttccttctgcctacaaataaaaagtgcaggctggaatgatctcagtcacatttggatctttttaaacactgtatagacggaagagcctgcattcctgaccgaaccttcagttggtctcggttgtcgttttttcttgctgctcctccccccatcacctgagctgttttctgttggccccttttgttttttggccttaacgctcctgctgcacagggtgaggtacctccttggcacaggactgtggatgcctctcccccaggcagagccacacagccttcgtgacaactgctttccgttcccacattcacctcatcctgctctttagaaaaagcagtctttgtgcttgtggctgaacgcatcaccctggactctgctagtgtcttctgaggacactgatgacactgattaatgatacagacctttgcaggacctgatgagtgacccttctggagctggccaggtcctctgcagcaggcaagaccaatcaatcactgaacctgcctcatggcaccagagtgaacagggcaggcaggtagtaggcccagctggggaaatgggagagttcctgtccccctccacatatccctacatgaaatatgggaaagttgctgctattgattcagggtctgtcttggaggcagaggacccttggtggatagttggtcagtgcctggaaaacctgtcccagtttatcaggaacgcaggcctggggagcccccagtggcggggacagggccagatttcatgttgaccctggggatgctgtgaatttctcctgcaggagagacatcattgaattttttcaactgtatcagtagcacagtatttttgtatgaaaagtgggagacttctgaacagtaattcatttaattgcaaagcattttgaaataaaaaaaatcaaacttaaaaaaaaaaaaa

SEQ ID NO: 45574 - DNA, 659 bp, Homo sapiens
tgaagaccgtttgacatgattacgaatttaatacgactcactatagggaatttggccctcgaggccaagaattcggcacgagcgagaagtcaggcacgtagctcagcggcggccgcggcgcgtgcgtctgtgcctctgcgcgggtctcctggtccttctgccatcatgccgatgttcatcgtaaacaccaacgtgccccgcgcctccgtgccggacgggttcctctccgagctcacccagcagctggcgcaggccaccggcaagcccccccagtacatcgcggtgcacgtggtcccggaccagctcatggccttcggcggctccagcgagccgtgcgcgctctgcagcctgcacagcattcggcaagatcggcggcgcgcagaaccgctcctacagcaagctgctgttgcggccctgctggccgagcgcctgcgcatcagcccggacagggtctacatcaactattacgacatgaacgcggccaatgtgggctggaacaactccaccttcgcctaagagccgcagggacccacgctgtctgcgctggctccacccgggaacccgccgcacgctgtgttctaggcccgcccaccccaaccttctggtggggagaaataaacggtttagagactaaaaaaaaaaaaaaaaaaaagtcgacg

SEQ ID NO: 45575 - DNA, 1820 bp, Homo sapiens
gaccgcgtccgccccgcgagcacagagcctcgcctttgccgatccgccgcccgtccacacccgccgccagctcaccatggatgatgatatcgccgcgctcgtcgtcgacaacggctccggcatgtgcaaggccggcttcgcgggcgacgatgccccccgggccgtcttcccctccatcgtggggcgccccaggcaccagggcgtgatggtgggcatgggtcagaaggattcctatgtgggcgacgaggcccagagcaagagaggcatcctcaccctgaagtaccccatcgagcacggcatcgtcaccaactgggacgacatggagaaaatctggcaccacaccttctacaatgagctgcgtgtggctcccgaggagcaccccgtgctgctgaccgaggcccccctgaaccccaaggccaaccgcgagaagatgacccagatcatgtttgagaccttcaacaccccagccatgtacgttgctatccaggctgtgctatccctgtacgcctctggccgtaccactggcatcgtgatggactccggtgacggggtcacccacactgtgcccatctacgaggggtatgccctcccccatgccatcctgcgtctggacctggctggccgggacctgactgactacctcatgaagatcctcaccgagcgcggctacagcttcaccaccacggccgagcgggaaatcgtgcgtgacattaaggagaagctgtgctacgtcgccctggacttcgagcaagagatgggccacggctgcttccagctcctccctggagaaagagctacgagctgcctgacggccaggtcatcaccattggcaatgagcggttccgctgccctgaggcactcttccagccttccttccttgggcatggagtcctgtggcatccacgaaactaccttcaactccatcatgaagtgtgacgtggacatccgcaaagacctgtacgccaacacagtgctgtctggcggcaccaccatgtaccctggcattgccgacaggatgcagaaggagatcactgccctggcacccagcacaatgaagatcaagatcattgctcctcctgagcgcaagtactccgtgtggatcggcggctccatcctggcctcgctgtccaccttccagcagatgtggatcagcaagcaggagtatgacgagtccggcccctccatcgtccaccgcaaatgcttctaggcggactatgacttagttgcgttacaccctttcttgacaaaacctaacttgcgcagaaaacaagatgagattggcatggctttatttgttttttttgtttcgctctggttttttttttttttttggcttgactcaggatttaaaaactggaacggtgaaggtgacagcagtcggttggagcgagcatcccccaaagttcacaatgtggccgaggactttgattgcacattgttgtttttttaatagtcattccaaatatgagatgcgttgttacaggaagtcccttgccatcctaaaagccaccccacttctctctaaggagaatggcccagtcctctcccaagtccacacaggggaggtgatagcattgctttcgtgtaaattatgtaatgcaaaatttttttaatcttcgccttaatacttttttattttgttttattttgaatgatgagccttcgtgcccccccttcccccttttttgtcccccaacttgagatgtatgaaggcttttggtctccctgggagtgggtggaggcagccagggcttacctgtacactgacttgagaccagttgaataaaagtgcacaccttaaaaatgaaaaaaaaaaaaaa

SEQ ID NO: 45576 - DNA, 389 bp, Homo sapiens
  misc_feature (1)...(389): n = a,t,c or g
agagaacccaccatggtgctgtctcctgccgacaagaccaacgtcaaggccgcctggggtaaggtcggcgcgcacgctggcgagtatggtgcggaggccctggagaggatgttcctgtccttccccaccaccaagacctacttcccgccacgtggacgacatgcccaacgcgctgtccgccctgagcgacctgcacgcgcacaagcttcgggtggacccggtcaacttcaaggtcgacgcggccgcgaattccnnnnnnnnnnnnnnnnnnnnnnnnnnnnnnnnnnnnnnnnnnnnnnnnnnnnnnnnnnnnnnnnnnnnnnnnnnnnnnnnnnnnnnnnnnnnnnnnnnnnnnnnnnnnnnnnnnnnnnnnnnnnnnnnnnnnnnnn

SEQ ID NO: 45577 - DNA, 423 bp, Homo sapiens
ctgaaaataagtgcttggagtgttcgtacccttatttttttttaagattcctagaaggaatctttggttaattcagattgagcagttaaagtttttgctatttacctttgtgcaggctggcatatgctaatttgggggtggtaaccaaccgattttatctcatgtaagcattacattttgaagactgaatatacttcacagcagatcaaacacatttatggcatgcactgacctcttcttggagcccagaactttatagagttgcctaccagggttactgtaatggaatttatgatcttaagaaattactagttgtattatttatcctatgattcattcattcaataagcttttactgcataaactttacatccagcactgtagttaaagacccaaaattgaataaaaataatggcttttgaa

SEQ ID NO: 45578 - DNA, 234 bp, Homo sapiens
gacggttacactagtgcagggtattggggaggctctttgggtgtggaggctgtcacttgtatttattgtgactctaaatctttgatagtaaaacaaatgtaaaaagaaatgtttgccaccagatgggaatagaagttccaataagcaggctggaatgggtggctatacgttgtatcacgaggaagttttagactctgaaggataataaatggatgatgtgaaaaaaaaaaaaaa

SEQ ID NO: 45579 - DNA, 473 bp, Homo sapiens
aatatgagtgatccagaactggcccaaacacctcagctctggtccctttttgcccttcttggccttactctgttgttcaaagccactttggattgcttggatgcttcgaacagccatgaaaagtagcctgcctgtggcatttagaggccaagcaattgacagaaagggtttcttctacctctgttatctaagcagagggaagtaaacctctcaccgccccccacccctcactgcccccgattacactagaattgctttcgccaaattgtagttgaagctaaggaaggggaatctggcccctgctgggagagggaactggaatgccacacaaggcaaggcctgcttccttccttcccctctgctgctgctgcctcggaacgctgcagcccaggcttcctcccacagtggcccttggaagcaggccgcagagtagacagctgctccttttggaagagcaagcccctgggtttctt

SEQ ID NO: 45580 - DNA, 652 bp, Homo sapiens
gcgcggacagcgttcggtgctgtgtgccggcgcctctggcagggattggggaatttttctgtaaacacttctaagggcaatacagccaaaaatggtggcttgcttctcagtaccaatatgaagtgggtacagttttcaaacctacacgttgatgttccaaaggatttgaccaaacctgtggtaacaatctctgatgaaccagacatattatataagcgcctctcggttttggtgaaaggtcacgataaggctgtattggacagttatgaatattttgctgtgcttgctgctaaagaacttggtatctctattaaagtacatgaacctccaaggaaaatagagcgatttactcttctccaatcagtgcatatttacaagaagcacagagttcagtatgaaatgagaacactttacagatgtttagagttagaacatctaactggaagcacagcagatgtctacttggaatatattcagcgaaacttacctgaaggggttgccatggaagtaacaaagttttgtttctttatttttttagacacaattagaacagttccagaacacatcaaggaccaatctgggaaacactatcagaagaaaaagaagaaagcaagtcataaagcctcagggaggcatttttgcctaaatttga

SEQ ID NO: 45581 - DNA, 12852 bp, Homo sapiens
  misc_feature (1)...(12852): n = a,t,c or g
ggatccccggggctctgggcggtgtgggcgtagtgaagccccacgcagccgccctcctccccggtcactgactggtcctgcaggctcttcacggtgtaccccagcaccaaggtctacttcccgcacctgagcgcctgccaggacgacgcagctgctgagccacgggagcgcatctgcggctgtggcgcggcggtgcagcacgtggacaacctgcgcgcctgagcccgctggcggacctgacgctcgttgcgcgtggacccagccaactttccggtgaggcctttccggccggggcaatggtgcatcgcctagccgggatgggggggctctgggggtccctagcggggcagaccccgtctcaccggccccttctcctgcagctgctaatccagtgtttccacgtcgtgctggcctcccacctgcaggacgagttcaccgtgcaaatgcaagcggcgtgggacaagttcctgactggtgtggccgtggtgctgaccgaaaaatacgctgagccctgtgctgcgaggccttggtctgtgcatgtcaataaacagaggcccgaaccatctgcccctgcctgtgtggtctttggggagctagcaaagcgaggtcactattgttggccagtaagctcagggacctaaagggagcctcctagaactctcaaatgcgccccacccccggaggtttgtcctcccatggcgaggagtgcgatggggcagagggagcagtgtgatatggcgggggtagagagggtggccttcgacttcaaacccttgactcgggcttcgaaccatactcgttcgcaaagcagttccccattcatgcatttattcagttcattccttccctccatccccatttcctgctgggacctgtagatgctaatcctggccctttttgcagagagatgcagaaactgaggtcccagagccaaatgtgcaacctaattcgttggccagagcagagggccgcagacctgttcctttccccttccttcccccatggacacttcctcagtggcaaacctgcgctagcctggttagccctccctgtgaccctgcagccctggggatgaggtcgggaggaagacctcagtggccacaatttggcagacagagaggtttagtcttccagcctgctcaatgacaagctgtgcgaccctgggctgtcccagagctctaggcctttacctatcgaatagaaaaacagcgtccaactcatgagatttttgaaataatttttgaaatcataacacagggtgggtgcctgcagggacgttgccaccccacccctccacccagccccagctgccgtgtctcaatctctgcaggtgcccaggccaaggcattcccttccccaggctccctcttctccctccccaaggattgggaagggaatcttagggctccaccccaggcttttcagacaaagaataggggctcaggaaagattgggaccttggagttctccaatccctaatagggttgggtgtgggttgggcatcctgggtgtgtgtggggagcacctggaccaggcctggcacccaggtctgacctggcagtcagcaatgaggtctgaagagagctgctggaagtggagccctgactgtgagtcggccaaactccccccagcagtcagtgccacagacctgttgccctgcactgcctgggaccccagcccggtagtttggagaacttggcccctcgttatctacatcccccaagtgtttttttgtttttgggggnnnnnnnnnnnnnnnnnnnnnnnnnnnnnnnnnnnnnnnnnnnnnnnnnnnnnnnnnnnnnnnnnnnnnnnnnnnnnnnnnnnnnnnnnnnnnnnnnnnnnnnnnnnnnnnnnnnnnnnnnnnnnnnnnnnnnnnnnnnnnnnnnnnnnnnnnnnnnnnnnnnnnnnnnnnnnnnnnnnnnnnnnnnnnnnnnnnnnnnnnnnnnnnnnnnnnnnnnnnnnnnnnnnnnnnnnnnnnnnnnnnnnnnnnnnnnnnnnnnnnnnnnnnnnnnnnnnnnnnnnnnnnnnnnnnnnnnnnnnnnnnnnnnnnnnnnnnnnccgcaactgtttacatggataattaacaagctttttgtcccaggcagagtttggtgtgaaagcagcttatgtttcactttggaaaaactgtgctcttctccccatccaggaagctgcctgggtctgggccatatgtggataccttatgggtataagctgctcaggaccctgtgtggaagctcaggacaatgccagcgggaaggctaccatgtggagagctgtctctgtttgggcaggactaagagacgcagggaaccttgggaacctgtctactctcactcactcctcctcccctttccttccaggcacctctgcaacttgccagccaatgaccctgcatcccaggcataagagctcctactctcccccacctttcacttttgagcttacacagactcagaaattaagctgccgtggtgctgtctcctgaggacaaggctaacaccaaggcggtctgggagaaagttggcgaccacactgctggctatgccacggaggccctggagaggcaagaaccctcctctccctgctcacaccttgggtccaacgcccactccagggctccactggccacccctaactattcttaccctggacccagcccccagcccctcactctttgcttccccctgaagcatgttcctgaccttcctctcacttggccctgagttatggctcagcccagatcaagaaacaatgcaagtaggtggccgacacgctgaccaatgccgtggtccacttagatgacatgcccaatgatgtgtctgaggtgaggaagctgcatgtccacgagctgtgggtggacccaggcaacatcagggagagctttgggctgggaggaatctagggtgtgggggcagctggccttcctcataggacagaccctcccacgcgttcagggaggtggagcacaggtggcagtagtatctgcatcccctgactctctctccacagttcctgggtaaatgcctgctggtgacctaggcctgccacacccttcccggtttacccatgtggtgcctccatggacaaattatttgcttttgtgagtgctgtgttgacctaaaaacaccattaagctagagcattggtggtcatgccccctgcctgctgggcctcccaccaggcccgcctcccctccctgccccagcacttcctgatctttgaatgaagtccgagtaggcagcagcctgtgtgtgcctgggttctctctgtcccggaatgtgccaacagtggaggtgtttacctgtctcagaccaaggacctctctgcagctgcatggggctggggagggagaactgcagggagtatgggaggggaagctgaggtgggcctgctcaagagaaggtgctgaaccatcccctgtcctgagaggtgccaggcctgcaggcagtggctcagaagctggggaggagagaggcatccagggttctactcagggagtcccagcatcgccaccctcctttgaaatctccctggttgaacccagttaacatacgctctccatcaaaacaaaacgaaacaaaacaaactagcaaaataggctgtccccagtgcaagtgcaggtgccagaacatttctctcattcccaccccttcctgccagagggtaggtggctggagtgagggtgctggccctactcacacttcctgtgtcatggtgaccctctgagagcagcccagtcagtggggaaggaggaaggggctgggatgctcacagccggcagcccacacctagggagactcttcagcagagcaccttgcggccttactcctgcacgtctcctgcagtttgtaaggtgcattcagaactcactgtgtgcccagccctgagctcccagctaattgccccacccagggcctctgggacctcctggtgcttctgcttcctgtgctgccagcaacttctggaaacgtccctgtccccggtgctgaagtcctggaatccatgctgggaagttgcacagcccatctggctctcagccagcctaggaacacgagcagcacttccagcccagcccctgccccacagcaagcctccccctccacactcacagtactgaattgagctttgggtagggtggagaggaccctgtcaccgcttttcttctggacatggacctctctgaattgttggggagttccctccccctctccaccacccactcttcctgtgcctcacagcccagagcattgttatttcaacagaaacactttaaaaaataaactaaaatccgannnnnnnnnnnnnnnnnnnnnnnnnnnnnnnnnnnnnnnnnnnnnnnnnnnnnnnnnnnnnnnnnnnnnnnnnnnnnnnnnnnnnnnnnnnnnnnnnnnnnnnnnnnnnnnnnnnnnnnnnnnnnnnnnnnnnnnnnnnnnnnnnnnnnnnnnnnnnnnnnnnnnnnnnnnnnnnnnnnnnnnnnnnnnnnnnnnnnnnnnnnnnnnnnnnnnnnnnnnnnnnnnnnnnnnnnnnnnnnnnnnnnnnnnnnnnnnnnnnnnnnnnnnnnnnnnnnnnnnnnnnnnnnnnnnnnnnnnnnnnnnnnnnnnnnnnnnnctatccatgctnnnnnnnnnnnnnnnnnnnnnnnnnnnnnnnnnnnnnnnngtgttactaaagtaggagagtgtctctctttcctgtctcctcacacccacccccagaagagaccaaaatgaagggtttggaactcacgccatgggccccatcccatgctgagggaacacagctacatctacaactactgccacagcgtctctttttggacacccctaccatcatactgtagatacccgtgtacaaccttcctattctcagtgaagtgtctcccctgcatccctttcagccagttcattcagctctgctcgcccattccacagtctcactgattattactatgtttccatcatgatccccccaaaaaatcatgacnnnnnnnnnnnnnnnnnnnnnnnnnnnnnnnnnnnnnnnnnnnnnnnnnnnnnnnnnnnnnnnnnnnnnnnnnnnnnnnnnnnnnnnnnnnnnnnnnnnnnnnnnnnnnnnnnnnnnnnnnnnnnnnnnnnnnnnnnnnnnnnnnnnnnnnnnnnnnnnnnnnnnnnnnnnnctacagcgccccccactagtcgtnnnnnnnnnnnnnnnnnnnnnnnnnnnnnnnnnnnnnnnnnnnnnnnnnnnnnnnnnnnnnnnnnnnnnnnnnnncnnnnnnnnnnnnnnnnnnnnnnnnnnnnnnnnnnnnnnnnnnnnnnnnnnnngcccggccttatatannnnnnnnnnnnnnnnnnnnnnnnnnnnnnnnnnnnnnnnnnnnnnnnnnnnnnnnnnnnnnnnnnnnnnnnnnnnnnnnnnnnnnnnnnnnnnnnnnnnnnnnnnnnnnnnnnnnnnnnnnnnnnnnnnnnnnnnnnnnnnnnnnnnnnnnnnnnnnnnnnnnnnnnnnnnnnnnnnnnnnnnnnnnnnnnnnnnnnnnnnnnnnnnnnnnnnnnnnnnnnnnnnnnnnnnnnnnnnnnnnnnnnnnnnnnnnnnnnnnnnnnnnnnnnnnnnnnnnnnagcctggccaaaccatcacttttcatgagcagggatgcacccactggactcctggacctcccaccctccccctcgccaagtccaccccttccttcctcaccccacatcccctcacctacattctgcaacacaggggccttctctcccctgtcctttccctacccagagccaggtttgtttatctgtttacaaccagtatttacctagcaagtcttccatcagatagcatttggagagctgggggtgtcacagtgaaccacgacctctaggccagtgggagagtcagtcacacaaactgtgagtccatgacttggggcttagccagtacccaccaccccacgcgccaccccacaaccccgggtagaggagtctgaatctggagccgcccccagcccagccccgtgctttttgcgtcctggtgtttgttccttcccggtgcctgtcactcaagcacactagtgactatcgccagagggaaagggagctgcaggaagcgaggctggagagcaggaggggctctgcgcagaaattcttttgagttcctatgggccagggcgtccgggtgcgcgcattcctctccgccccaggattgggcgaagccctccggctcgcactcgctcgcccgtgtgttccccgatcccgctggagtnnnnnnnnnnnnnnnnnnnnnnnnnnnggggcgggggtgcgggctgactttctccctcgctagggacgctccggcgcccgaaaggaaagggtggcgctgcgctccggggtgcacgagccgacagcgcccgaccccaacgggccggccccgccagcgccgctaccgccctgcccgggcgagcgggatgggcgggagtggagtggcgggtggagggtggagacgtcctggcccccgccccgcgtgcacccccaggggaggccgagcccgccgcccggccccgcgcaggccccgcccgggactcccctgcggtccaggccgcgccccgggctccgcgccagccaatgagcgccgcccggccgggcgtgcccccgcgccccaagcataaaccctggcgcgctcgcggcccggcactcttctggtccccacagactcagagagaacccaccatggtgctgtctcctgccgacaagaccaacgtcaaggccgcctggggtaaggtcggcgcgcacgctggcgagtatggtgcggaggccctggagaggtgaggctccctcccctgctccgacccgggctcctcgcccgcccggacccacaggccaccctcaaccgtcctggccccggacccaaaccccacccctcactctgcttctccccgcaggatgttcctgtccttccccaccaccaagacctacttcccgcacttcgacctgagccacggctctgcccaggttaagggccacggcaagaaggtggccgacgcgctgaccaacgccgtggcgcacgtggacgacatgcccaacgcgctgtccgccctgagcgacctgcacgcgcacaagcttcgggtggacccggtcaacttcaaggtgagcggcgggccgggagcgatctgggtcgaggggcgagatggcgccttcctctcagggcagaggatcacgcgggttgcgggaggtgtagcgcaggcggcagtagtatctgggccctcggccccactgaccctcttctctgcacagctcctaagccactgcctgctggtgaccctggccgcccacctccccgccgagttcacccctgcggtgcacgcctccctggacaagttcctggcttctgtgagcaccgtgctgacctccaaataccgttaagctggagcctcggtagccgttcctcctgcccgctgggcctcccaacgggccctcctcccctccttgcaccggcccttcctggtctttgaataaagtctgagtgggcggcagcctgtgtgtgcctgggttctctctgtcccggaatgtgccaacaatggaggtgtttacctgtctcagaccaaggacctctctgcagctgcatggggctggggagggagaactgcagggagtatgggaggggaagctgaggtgggcctgctcaagagaaggtgctgaaccatcccctgtcctgagaggtgccaggcctgcaggcagtggctcagaagctggggaggagagaggcatccagggttctactcagggagtcccagcatcgccaccctcctttgaaatctccctggttgaacccagttaacatacgctctccatcaaaacaaaacgaaacaaaacaaactagcaaaataggctgtccccagtgcaagtgcaggtgccagaacatttctctcattcccaccccttcctgccagagggtaggtggctggagtgagggtgctggccctactcacacttcctgtgtcatggtgaccctctgagagcagcccagtcagtggggaaggaggaaggggctgggatgctcacagccggcagcccacacctagggagactcttcagcagagcaccttgcggccttactcctgcacgtctcctgcagtttgtaaggtgcattcagaactcactgtgtgcccagccctgagctcccagctaattgccccacccagggcctctgggacctcctggtgcttctgcttcctgtgctgccagcaacttctggaaacgtccctgtccccggtgctgaagtcctggaatccatgctgggaagttgcacagcccatctggctctcagccagcctaggaacacgagcagcacttccagcccagcccctgccccacagcaagcctccccctccacactcacagtactgaattgagctttgggtagggtggagaggaccctgtcaccgcttttcttctggacatggacctctctgaattgttggggagttccctccccctctccaccacccactcttcctgtgcctcacagcccagagcattgttatttcaacagaaacactttaaaaaataaactaaaatccgannnnnnnnnnnnnnnnnnnnnnnnnnnnnnnnnnnnnnnnnnnnnnnnnnnnnnnnnnnnnnnnnnnnnnnnnnnnnnnnnnnnnnnnnnnnnnnnnnnnnnnnnnnnnnnnnnnnnnnnnnnnnnnnnnnnnnnnnnnnnnnnnnnnnnnnnnnnnnnnnnnnnnnnnnnnnnnnnnnnnnnnnnnnnnnnnnnnnnnnnnnnnnnnnnnnnnnnnnnnnnnnnnnnnnnnnnnnnnnnnnnnnnnnnnnnnnnnnnnnnnnnnnnnnnnnnnnnnnnnnnnnnnnnnnngcccccacatcttatcttttttttttccttcaggctgtgggcagagtcagaaagtcagaagagggtggcagacagggaggggaaatgagaagatccaacgggggaagcattgctaagctggtcggagctacttccttctctgcccaaggcagcttaccctggcttgctcctggacacccagggcagggcctgagtaagggcctggggagacagggcagggagcaggctgaagggtgctgacctgatgcactcctcaaagcagatcttctgccagacccccaggaaatgacttatcagtgatttctcaggctgttttctcctcagtaccatccccccaaaaaacatcacttttcatgcacagggatgcacccactggcactcctgcacctcccacccttccccagaagtccaccccttccttcctcaccctgcaggagctggccagcctcatcaccccaacatctccccacctccattctccaaccacagggcccttgtctcctctgtcctttcccctccccgagccaagcctcctccctcctccacctcctccacctaatacatatccttaagtctcacctcctccaggaagccctcagactaaccctggtccccttgaatgcctcgtccacacctccagacttcctcagggcctgtgatgaggtctgcacctctgtgtgtacttgtgtgatggttagaggactgcctacctcccagaggaggttgaatgctccagccggttccagctattgctttgtttacctgtttaaccagtatttacctagcaagtcttccatcagatagcatttggagagctgggggtgtcacagtgaaccacgacctctaggccagtgggagagtcagtcacacaaactgtgagtccatgacttggggcttagccagcacccaccaccccacgcgccaccccacaaccccgggtagaggagtctgaatctggagccgcccccagcccagccccgtgctttttgcgtcctggtgtttattccttcccggtgcctgtcactcaagcacactagtgactatcgccagagggaaagggagctgcaggaagcgaggctggagagcaggaggggctctgcgcagaaattcttttgagttcctatgggccagggcgtccgggtgcgcgcattcctctccgccccaggattgggcgaagccctccggctcgcactcgctcgcccgtgtgttccccgatcccgctggagtnnnnnnnnnnnnnnnnnnnnnnnnnnnggggcgggggtgcgggctgactttctccctcgctagggacgctccggcgcccgaaaggaaagggtggcgctgcgctccggggtgcacgagccgacagcgcccgaccccaacgggccggccccgccagcgccgctaccgccctgcccgggcgagcgggatgggcgggagtggagtggcgggtggagggtggagacgtcctggcccccgccccgcgtgcacccccaggggaggccgagcccgccgcccggccccgcgcaggccccgcccgggactcccctgcggtccaggccgcgccccgggctccgcgccagccaatgagcgccgcccggccgggcgtgcccccgcgccccaagcataaaccctggcgcgctcgcggcccggcactcttctggtccccacagactcagagagaacccaccatggtgctgtctcctgccgacaagaccaacgtcaaggccgcctggggtaaggtcggcgcgcacgctggcgagtatggtgcggaggccctggagaggtgaggctccctcccctgctccgacccgggctcctcgcccgcccggacccacaggccaccctcaaccgtcctggccccggacccaaaccccacccctcactctgcttctccccgcaggatgttcctgtccttccccaccaccaagacctacttcccgcacttcgacctgagccacggctctgcccaggttaagggccacggcaagaaggtggccgacgccctgaccaacgccgtggcgcacgtggacgacatgcccaacgcgctgtccgccctgagcgacctgcacgcgcacaagcttcgggtggacccggtcaacttcaaggtgagcggcgggccgggagcgatctgggtcgaggggcgagatggcgccttcctcgcagggcagaggatcacgcgggttgcgggaggtgtagcgcaggcggcggctgcgggcctgggccctcggccccactgaccctcttctctgcacagctcctaagccactgcctgctggtgaccctggccgcccacctccccgccgagttcacccctgcggtgcacgcctccctggacaagttcctggcttctgtgagcaccgtgctgacctccaaataccgttaagctggagcctcggtggccatgcttcttgccccttgggcctccccccagcccctcctccccttcctgcacccgtacccccgtggtctttgaataaagtctgagtgggcggcagcctgtgtgtgcctgagttttttccctcagaaacgtgccagcatgggcgtggacagcagctgggacacacatggctagaacctctctgcagctggatagggtaggaaaaggcaggggcgggaggaggggatggaggagggaaagtggagccaccgcgaagtccagctggaaaaacgctggaccctagagtgctttgaggatgcatttgctctttcccgagttttattcccagacttttcagattcaatgcaggtttgctgaaataatgaatttatccatctttacgtttctgggcactcttgtgccaagaactggctggctttctgcctgggacgtcactggtttcccagaggtcctcccacatatgggtggtgggtaggtcagagaagtcccactccagcatggctgcattgatcccccatcgttcccactagtctccgtaaaacctcccagatacaggcacagtctagatgaaatcaggggtgcggggtgcaactgcaggccccaggcaattcaataggggctctactttcacccccaggtcaccccagaatgctcacacaccagacactgacgccctggggctgtcaagatcaggcgtttgtctctgggcccagctcagggcccagctcagcacccactcagctcccctgaggctggggagcctgtcccattgcgactggagaggagagcggggccacagaggcctggctagaaggtcccttctccctggtgtgtgttttctctctgctgagcaggcttgcagtgcctggggtatcagagggagggttcccggagctggtagccataaagccctggccctcaactgataggaatatcttttattccctgagcccatgaatcacccttggtaaacacctatggcaggccctctgcctgcgtttgtgatgtccttcccgcagcctgtgggtacagtatcaactgtcaggaagacggtgtcttcgttatttcatcaggaagaatggaggtctgacctaaaggtagaaatatgtcaaatgtacagcagagnnnnnnnnnnnnnnnnnnnnnnnnnnnnnnnnnnnnnnnnnnnnnnnnnnnnnnnnnnnnnnnnnnnnnnnnnnnnnnnnnnnnnnnnnnnnnnnagcctaagaaaaaattataaaannnnnnnnnnnnnnnnnnnnnnnnnnnnnnnnnnnnnnnnnnnnnnnnnnnnnnnnnnnnnnnnnnnnnnnnnnnnnnnnnnnnnnnnnnnnnnnnnnnnnnnnnnnnnnnnnnnnnnnnnnnnnnnnnnnnnnnnnnnnnnnnnnnnnnnnnnnnnnnnnnnnnnnnnnnnnnnnnnnnnnnnnnnnnnnnnnnnnnnnnnnnnnnnnnnnnnnnnnnnnnnnnnnnnnnnnnnnnnnnnnnnnnnnnnnnnnnnnnnnnnntttaatctaatttaatttaatttaaaaattagcacggtggttgggcacnnnnnnnnnnnnnnnnnnnnnnnnnnnnnnnnnnnnnnnnnnnnnnnnnnnnnnnnnnnnnnnnggaattc

SEQ ID NO: 45582 - DNA, 355 bp, Homo sapiens
  misc_feature (1)...(355): n = a,t,c or g
cggacgcgtgggccagactcgtctcaggccagttgcagccttctcagccaaacgccgaccaaggaaaactcactaccatgagaattgcagtgatttgcttttgcctcctaggcatcacctgtgccataccagttaaacaggctgattctggaagttctgaggaattgcagcacttaagatgtacctacccctccacatcagatgaaactgtgtcagccaaacaannaatggncattgnccncagaagcttngatcannaggcacacagagttcacnntcagntntaatntnngagtntaantngggnttccntgtgntttntnattttttttntanctananatnttttgntgcg

SEQ ID NO: 45583 - DNA, 1789 bp, Homo sapiens
taaaatattaattagaacaacttcaaatgctaaggtgatgttttaccgggacttaattaaatacaactttttcctttcgaaaaagactgttcacatttgcttccaggtgtaattattgctttcattccttacccccctcaagcaaatgtgaaaagtatactgacctaagattctcattagttttagttcttaaaacgaatagtaaatgatttcacagcgtaaaatttgatgttatttctggaagctggatgatatggaagagttcatgtgcctggacacacagttccctgtaatcctgccatctagggagataaactctgttaacattttgatgttgtgtttttgcttatttttctatgcatagttatgcatttatattctcaaaaatgaaatcataatgtacattgctttgtagtctgctctatatattgtcaatatgttcccatattaaatattttgctttttagacagctgtaggatattttatttcatgggtataccataactttaagatttatttcctattcagcaatttgattatgtattataatgtaatctgtaaatagtgatatgattaacatcttaatcacatccatagaaaatgacttatttccagaagataccgctctaaaaatgaaattgttaggtgaaagtgtttttgagaatttttatatatattactcactgcagagatcatgttcatttacattcccattagcaatatatccaatgctcagaattgaaaattactacttaaaatctttgcaaattgaataattacagaaaagggctacatttaaaatttgtatttgtttttcttacttagtgaaggttgtgttttttttcatattcattggccatgctatattcattcttttgagaattgctcattcatattttttctgttgcttgcttggagaatttgctctttttttggcatataagttcttaagaatgtccgtcctttgtcatatattgtaactttttttagccttatttgtcatttaacatagtttgtggtatttcagtatagaagttgttttctttaggagtctacctttgtgtatgtgcttgaaagtatttttgtaatccaagaatggataaatgtccttattttcttctagtattttcttatttcacttttacacctatctttaaaaggaatttaaattttgtttatatacattaactaaatcagtacaagtttggggtgaaaaggaaatttttaatccatctcaaatgtatttggttatattatataaggtagggatttgattttatttcgaagaatttaccaattggttcagtatgtgaaaccaccatttcccctctgattagtaatgctatttttatagaatattaaattcttatgtgtcttttgtgtcttaggccaatttctgggccttctgggttttttctacactgtcaataattatcgctttaattggtgttaatatttggtagtacacaggttctcccttgttcttttaaattttgtgaaatataacttacaaataagtacttaaaacagagcttaatgggtaaagcaacagctgtgtaatcacaaactagatgcagaggaggtcttgccagcactccaaaatctctgtgtgtcccctcttgacactcactgtttcccccagagctaactatcctgacgtatggtaattctccctctgtccttttaagaattattttaccagttatgtgtataacaatatggtttacattttgctcacttttgacttatataaaaatagaataatactaaaaaaaaaaaaaaaaaaaa

SEQ ID NO: 45584 - DNA, 1124 bp, Homo sapiens
ggcaggcgtgcagcgctctcgtcttctgcggctctcggtgccctctccttttcgtttccggaaacatggcctccggtgtggctgtctctgatggtgtcatcaaggtgttcaacgacatgaaggtgcgtaagtcttcaacgccagaggaggtgaagaagcgcaagaaggcggtgctcttctgcctgagtgaggacaagaagaacatcatcctggaggagggcaaggagatcctggtgggcgatgtgggccagactgtcgacgatccctacgccacctttgtcaagatgctgccagataaggactgccgctatgccctctatgatgcaacctatgagaccaaggagagcaagaaggaggatctggtgtttatcttctgggcccccgagtctgcgccccttaagagcaaaatgatttatgccagctccaaggacgccatcaagaagaagctgacagggatcaagcatgaattgcaagcaaactgctacgaggaggtcaaggaccgctgcaccctggcagagaagctggggggcagtgccgtcatctccctggagggcaagcctttgtgagccccttctggccccctgcctggagcatctggcagccccacacctgcccttgggggttgcaggctgcccccttcctgccagaccggaggggctggggggatcccagcagggggagggcaatcccttcaccccagttgccaaacagaccccccaccccctggattttccttctccctccatcccttgacggttctggccttcccaaactgcttttgatcttttgattcctcttgggctgaagcagaccaagttccccccaggcaccccagttgtgggggagcctgtattttttttaacaacatccccattccccacctggtcctcccccttcccatgctgccaacttctaaccgcaatagtgactctgtgcttgtctgtttagttctgtgtataaatggaatgttgtggagatgacccctccctgtgccggctggttcctctcccttttcccctggtcacggctactcatggaagcaggaccagtaagggaccttcgattaaaaaaaaaaaagacaataataaaaaggctcattaatgggaaaaaaaaaaaaaaaaaac

SEQ ID NO: 45585 - DNA, 495 bp, Homo sapiens
  misc_feature (1)...(495): n = a,t,c or g
gcgaccgcgtggtatctcccgagggctgcttggaccctggtgggctcgagtgctccaccccgctgtgggcctcagataaccctgtacaaaggggaatggagattgcctgtatccacctagattcataagctgccctgaggcgatcttggcatcaagaaagacagcattgaggcacatctcaccatcagcttcagaggatgtcagcctttgatatgtcccatgggttttttcccagggaaccaatctgtccttttgaagaaaagacaaaggtagaaaggatggtagaggaccaccggtcaaattcttaccagtgaatattggtggaagtgttcattggctcaaaccagcatgtgtttgatgacttaggattcagtgacgtttgatgatgtggctgtggagttcaccccagaggagtgggctttactgggacacnactcagaaatacctctacagagatgtgatgctgggagaactacatgaacctggcctctgtgg

SEQ ID NO: 45586 - DNA, 544 bp, Homo sapiens
gtgctgtagaggatgtggaaagaagggcttcaggaaggaagtctgggttggggtgaggttagtttccctcagtacatgtgggcacagttttcttcagcttaagggaaatcttaggagagggacattgatacttttacttgcctttaatttgtttacattactgcccaagcagatgaaaataaagtagatgggatgaatgccccaaaaggccaaactgggaactctagccgtggtccaggagacggagggaacagagaccactggaaggagtcagataggtatgcttgttctctttctcatctttcctctgatccacatgtttgtgtaattaagaaattaagttcttggttctcagagcactgccagatcgctcattgtgagcaaactaaagtcagccaacgtagacagttaagattctgaaaatctagaagtaatacatcatccagacaacaaggactgttgactagaggtgcctgttcagtgccttgaaactgcatgcatacacatgtttgtattaggcgagtcctttcctaaagacatggtt

SEQ ID NO: 45587 - DNA, 2677 bp, Homo sapiens
  misc_feature (1)...(2677): n = a,t,c or g
agcgtccccgtcagctgagagcatcctcactcggtcagttcttcgggcgagttacggggacgacctgcgggagcacgcgggcagtggccggacgctgaagcccaggagagcgatggagacgtatgcggaggttgggaaggagggcaagccttcctgtgcatcggtggatctgcagggagacagctccttacaggtggagatttctgatgctcttagtgagcgggataaagtaaaattcactgttcacacaaagagttcattgccaaattttaaacaaaacgagttttcagttgttcggcaacatgaggaatttatctggcttcatgattcctttgttgaaaatgaagactatgcaggttatatcattccaccagcaccaccaagacctgattttgatgcttcaagggaaaaactacagaagcttggtgaaggagaagggtcaatgacgaaggaagaattcacaaagatgaaacaggaactggaagctgaatatttggcaatattcaagaagacagttgcgatgcatgaagtgttcctgtgtcgtgtggcagcacatcctattttgagaagagatttaaatttccatgtcttcttggaatataatcaagatttgagtgtgcgaggaaaaaataaaaaagagaaacttgaagacttctttaaaaacatggttaaatcagcagatggagtaatcgtttcaggagtaaaggatgtagatgatttctttgagcacgaacgaacatttcttttggaatatcataaccgagttaaggatgcatctgctaaatctgatagaatgacaagatcccacaaaagtgctgcagatgattacaatagaattggttcttcattatatgctttaggaactcaggattctacagatatatgcaagttttttctcaaagtttcagaactgttcgataaaacaagaaaaatagaagcacgagtgtctgctgatgaagacctcaaactttctgatcttttaaaatattacttaagagaatctcaagctgctaaggatctcctgtatcgaaggtctaggtcactagtggattatgaaaatgctaataaagcactggataaagcaagagcaaaaaataaagatgttctacaggccgaaacttcccaacaattatgttgtcagaaatttgaaaaaatatctgagtctgcaaaacaagaacttatagattttaagacaagaagagttgctgcattcagaaaaaatttagtggaactggcagagttagaactgaagcatgcaaagggtaatctacagttgctgcagaactgcctggcagtgttaaatggagacacataagccacactccgccttcctgttaaaaagggctgccttccttcaaattttatttttgttttcttaatgatgttaagcatttatgctcactggaaacaaacaaaaagcagctgaaaaagtgcatcaactcctctttttctgagaaacatggagcagcgcacgcccaggcgatgccagtctgtgtgccgtgatgccgcactgtgttccccatgacagtggtccatcatcgtgcactcgtcatactcagaagtccaaagttcattcttctttaaagtagcctctataactctgtttattttataaatagtattccttatggctgccactcttatttacctttaaataatttctgaaatttaaccttttcagaatgcattgttgaaacaagataaagattgccttttttgaattttttaaattttgtttttaaaagcatataccaccttagttcattcatgtatcctggtaaagcatcttaatcagacttatttttaattactgaatatttcttagacgttttgggacagattttatgtaatctttataagtatgatttctgaagaaaagcaaatgcattagtatgtttgccttaaacttgtagactaaaccaagtattgtaaaataaacagcgataacagtgatagtttttaactctatggtcattgtatcactctggaaaatgtggagtagctgtaataaatctactcctgtattatgctttacagtgcaggtcttagtttttcttttttctcatttcttttgaaatgggcatctcgaacaaagtccaccaatccctttacaaaagaatgaactgctcctctgtgtgtacttcataggaaggtgggaatcgggacagagggcaggttagtgacagttattcctgaaatacaggagcagagtacagtctgttgtgggtttcccggattccgcggcctagctcagcccaattaagcatgagacataggccattgagccacttagtagttatgcgagtggatagattgggtatgtagagggaaagaggtctgctgtaaagaacaacacttgtttgtctgtggggaaagaaaagcagaatacttgagatgaaagttggcatacaaataggatactatcgccagtagttatattacaaacattatcggcctttctagtgtgaatgaacattagacacattattgtcattcctagtttaaagttaaggttgcgtggttggattttttccactatctttttctaatttttctaccatttgggagaccgtaggcatttggggcctgtcaccccttgggatggggttcctagtttgtttacattttcctgaacctcctgagcgcccgttcttnggtctaatccccagtcgtgatg

SEQ ID NO: 45588 - DNA, 581 bp, Homo sapiens
  misc_feature (1)...(581): n = a,t,c or g
tgggtaattgttgtgcctcggcctccctctgcctcttggncttgggcgattgttccacctcatccgccctccgcctcttgggtttcggtgattgttccacctcatccaccctccacctcttgggtttgggtggtttttccgcctcggcctcctgagtagctaagggaggagtcttgagattatcatccactgagggtggaaagaggagagggtggaagagggacaaagagacagtccttcagattatcatccactgagggtggaagaggagagggtggaagaggatgaaggagacattcggggaggtgtcttgaggctcagggagttatcagttatagaatgttgttgagttggaggaggtggctggtggcccatcctgttttttaaagtttcagctgtgaggtagggccagtagggcaatcctgaagaatgacgatgctccgctgccgccattctgacccagttgcaaagagcctttcttgcagaaggggggattttgcatttgtggtagtcctctgctcgccgccgcaactcttgcgcacgttgaaacattttcctatggattacaatcactttcatca

SEQ ID NO: 45589 - DNA, 5474 bp, Homo sapiens
caggacacgaggaaactgttaatgacttgggctttggaagtagctgttgtaatgaagaagtccgaaacatatgcacctttattctgtcttccgtctttccataaattttgcaaaggccttttagccgacactctcgttgaagatgtgaatatctgtctgcaggcatgcagcagtctacatgctctatcctcttccttgccagatgatcttttacagagatgtgttgatgtttgccgtgtccaactagtgcaccgtggaacttgtattcgacaagcatttggaaaactgttgaaatcaattcctttaggtgttttcctaagcgataacaatcacacagaaattcaagaaatttctttagcattaagaagtcacatgagtaaagcaccaagtaatacattccacccccaagatttctctgatgttattagttttattttgtatgggaactctcatagaacagggaaggacaattggttggaaagactgttctatagctgccagagactggataagcgtgaccagtcaacaattccacgcaatctcctgaagacagatgctatcctttggcagtgggccatatgggaagctgcacaattcactgttctttctaagctgagaaccccactgggcagagctcaagacaccttccagacaattgaaggtatcattcgaagtctcgcaggtcacacattaaaccctgatcaggatgttagtcagtggacaactgcagacagtgatgaaggccatggtaacaaccaacttagacttgttcttcttctgcagtatctggaaaatctggagaaattaatgtataatgcatacgagggatgtgctaatgccttaacttcacctcccaaggtcattagaacttttttgtataccaatcgccaaacttgtcaggactggctaacgcggattcgactctccatcatgagggtaggattgttggcaggccagcctgcagtgacagtgagacatggctttgacttgcttacagagatgaaaacaaccagcctatctcaggggaatgaattggaagtaagcattatgatggtggtagaagcactatgtgaacttcattgtcctgaagctatacagggaattgctgtctggtcatcatctattgttggaaaacatcttctgtggattaactcagtggctcaacaggctgaagggaggtttgaaaaggcctctgtggagtaccaggaacacctgtgtgccatgacaggtgttgattgctgcatctccagctttgacaaatcgggtgctcaccttagcccagtgctgggtgtaagagtgcccagcctgaaacattgtctgaatggtgaatccagaaaaagtgtgctgtccaaaccgactgactcttcccctgaggttataaattatttaggaaacaaagcatgtgagtgctacatctcaactgccgattgggctgctgtgcaggaatggcagaacgctatccatgacttgaaaaagagtaccagtagcacttccctcaacctgaaagctgacttcaactatataaaatcattaagcagctttgagtctggaaaatttgtcgaatgtaccgagcaattagaattgttaccaggagaaaatatcaatctacttgctggaggatcaaaagaaaaaatagacatgaaaaaactgcttcgtaacatgtgaagtccagatccaagggaacctcagaaatccattgaagttccattgttaagaagttctgtttgtttggcaactgctttaaacccgatagaacaagatcagaagtggcagtctataactgaaaatgtggtaaagtacttgaagcaaacatcccgcatcgctattggacctctgagactttctactttaacagtttcacagtctttgccagttctaagtaccttgcagctgtattgctcgtctgctttggagaccacagtttctaacagactttcaacagaggactgtcttattccactcttcggcgaagctttacgttcatgtaaacagcatgacgtgaggccgtggatgcaggcattaaggtatactgtgtaccagaatcagttgttggagaaaattaaaggtatgatctcgtgaaatcttgagagaaactgaatgacgaatgaaactattgttcctgtttcacacagaagaaaactgaggttggcactcatcatgagcccctgttctcattctgcaaatggtgaagctctctattgtcctgaccccacagttcctgtcccatgaccagggccagctcaccaaggagctgcagcagcatgtaaagtcagtgacatgcccatgcgagtacctgaggaaggttatcaatactctggctgaccatcatcatcgtgggactgactttggtggaagtccttggttacatgtcattattgcgtttccgacaagttataaagttgtcattaccctctggatagtttacctttgggtgtctctcctgaagactatcttctggtctcgaaatggacatgatggatccacggatgtacagcagagagcctggaggtccaaccgccgtagacaggaagggctgaggtccatttgtatgcacacaaagaaaagagtttcttcctttcgaggaaataaaattggcctgaaagacgtcattactctacggagacatgtggaaacaaaagttagagctaaaatccgtaagaggaaggtgacaacgaaaatcaaccatcatgacaaaatcaatggaaagaggaagaccgccagaaaacagaaaatgtttcaacgtgcgcaagagttgcggcggcgagcagaggactaccacaaatgcaaaatcccccttctgcaagaaaggctctttgcaactgggtcagaatggcggcagcggagcatcgtcattcttcaggattgccctactggccctacctcacagctgaaactttaaaaaacaggatgggccaccagccacctcctccaactcaacaacattctataactgataactccctgagcctcaagacacctcccgagtgtctgctcactccccttccaccctcagcggatgataatctcaagacacctcccgagtgtgtgctcactccccttccaccctcagcggatgataatctcaagacacctcccgagtgtgtgctcactccccttccaccctcagcggatgataatctcaagacacctcctgagtgtctcctcactccccttccaccctcagcggatgataatctcaagacacctcccgagtgtctgctcactccccttccaccctcagctctaccctcagctccaccctcagcagatgataatctcaagacacgtgccgagtgtctgctccatccccttccaccctcagcggatgataatctcaagacaccttccgagcgtcagctcactccccttccaccctcagctccaccctcagcagatgataatatcaagacacctgccgagcgtctgcgggggccgcttccaccctcagcggatgataatctcaagacaccttccgagcgtcagctcactccccttccaccctcagctccaccctcagcagatgataatatcaagacacctgccgagcgtctgcgggggccgcttccaccctcagcggatgataatctcaagacaccttccgagcgtcagctcactccccttccaccctcagctccaccctcagcagatgataatatcaagacacctgccgagcgtctgcgggggccgcttccaccctcagcggatgataatctcaagacaccttccgagcgtcagctcactccccttccaccctcagctccaccctcagcagatgataatatcaagacacctgccgagcgtctgcgggggccgcttccaccctcagcggatgataatctcaagacaccttccgagcgtcagctcactccccttccaccctcagctccaccctcagcagatgataacatcaagacacctgccttccaccctcagcggatgataatctcaagacaccttccgagcgtcagctcactccccttccaccctcagctccaccctcagcagatgataatatcaagatacctgctgagcgtctgcggattccgcttccaccatcagccgatgataatctcaagacaccttccgagcgtcagctcactccccttccaccctcagctccaccctcagcagatgataatatcaagacacctgccgagcgtctgcgggggccgcttccaccctcagcggatgataatctcaagacaccttccgagcatcagctcactccccttccaccctcagctccaccctcagcagatgataatatcaagacacctgccgagcgtctgcgggggccgcttccaccctcagcggatgataatctcaagacaccttccgagcgtcagctcactccccttccaccctcagctccaccctcagcagatgataatatcaagacacctgccgagcgtctgcgggggccgcttccaccctcagcggatgataatctcaagacaccttccgagcgtcagctcactccccttccacactcagctccaccctcagcagatgataatatcaagacacctgccgagcgtctgcggggagcgtctgcgggggccgcttccaccctcagcggatgataatctcaagacaccttccgagcgtcagctcactccccttccaccctcagctccaccctcagcagatgataatatcaagacacctgctgagcgtctgcgggggccgcttccaccctcagcggatgataatctcaagacaccttccgagcgtcagctcactccccttccaccctcagctccaccctcagcagatgataatatcaagacacctgccgagcgtctgcgggggccgcttccaccctcagcggatgataatctcaagacaccttccgagcgtcagctcactccccttccaccctcagctccaccctcagcagatgataatatcaagacacctgccgagcgtctgcgggggccgcttccaccctcagccgatgataatctcaagacacctcccttagctactcaggaggctgaggcagaaaaaccacgcaaacccaagaggcagagggcggctgagatggaaccacctcccgaacccaagaggcggagggtcggtgacgtggaaccgtcacgcaaacccaagaggcggagggccgctgacgtggaaccatcatcacccgaacccaagaggcggagggtcggtgatgtggaaccgtcacgcaaacccaagaggcggagggccgctgacgtggaaccatcatcacccgaacccaagaggcggagggtcggtgacgtggaaccgtcacgcaaacccaagaggcggagggccgctgacgtggaaccatcattacccgaacccaagaggcggaggttgagctgagaagaggccagtgcactcaagcctgagcaataagaataaaaccgagtagaacaaaataaaaaattcaaaaaacaaaacaaaacccacactccaaaaactaacaaagaataaataaataatataaaaat

SEQ ID NO: 45590 - DNA, 1419 bp, Homo sapiens
aaggtggctgggagcccgagccccacacctgccgggcagcaggtgctggacgtcaacagctgcctggactcatccgtgctggacagctccttcctcacgttctcaggcctccacgctgaggtgagggctctactgggggtcctgccgccttggcgcagcttggactcaagaccctgtgcacctctcagcaggcctttgctggacagatgaagagtgacttgtttctggatgattctaagagtgaccttgaggaaccctgggagctcaggaaggaaggagcgcccagaagcagggacagggagctggttggggaggaccagaaatcaggttatcaatactctggctgaccatcgtcatcgtgagactgactttggtggaagtccttggttacttatcattactgtgtttctgagaagttataaatttgccatctccctctgcacaagttacctttgtgtgtctttcctgaagactatcttcccgtctcaaaatggacatgatggatccacggatgtacagcagagagccaggaggtccaactgccgtagacaggaaggaattaaaattgtcctggaagacatctttactttatggagacaggtggaaaccaaagttcgagctaaaatccgtaagatgaaggtgacaacaaaagtcaaccgtcatgacaaaatcaatggaaagaggaagaccgccaaagaacatctgaggaaactaagcatgaaagaacgtgagcacggagaaaaggagaggcaggtgtcagaggcagaggaaaatgggaaattggatatgaaagaaatacacacctacatggaaatgtttcaacgtgcgcaagcgttgcggcggcgggcagaggactactacagatgcaaatcaccccttctgcaagaaagcctctttgcaaccggtgcacttacaatttggtattacctgggagtgaaaagaaatattacagccatgcctaactgacttcttgaggtcagaatggcggcagtggagcatcgtcattcttcaggattgccctactggccctacctcacagctgaaactttaaaaaacaggatgggccaccagccacctcctccaactcaacaacattctataattgataactccctgagcctcaagacaccttccgagtgtctgctcactccccttccaccctcagctctaccctcagcggatgataatctcaagacacctgcggagtgtctgctctatccccttccaccctcagcggatgataatctcaagacacctcccgagtgtctgctcactccccttccaccctcagctccaccctcagtggatgataatctcaagacacctcccgagtgtgtctgctcactccccttccaccctcagcggatgataatctcaagaaactaaggaagaataaataaataatataaaaataaaatg

SEQ ID NO: 45591 - DNA, 2349 bp, Homo sapiens
caaaagtcaaccgtcatgacaaaatcaatggaaagaagaagaccgccaaagaacatctgaggaaactaagcatgaaagaacgtgagcacggagaaaaggagaggcaggtgtcagaggcagaggaaaacgggaaattggatatgaaagaaatacacacctacatggaaatgtctcaacgtgcgcaagcgttgcggcggcgggcagaggactactacagatgcaaaatcaccccttctgcaagaaagcctctttgcaaccgggtaagtttgcttgttttccttgcttttggacatagtctgccaggtcaggacatggatacatttttctccctacggctctgtgcttcaagccctgcagagggagatggcagagaggaaggctgcctacaagcatcacagtcccatccctgttggtaaccgtgttgcgcaaaaacaccttcatccccacccagtggggcccctgatctaatattcaaagtgtcagaggttccatatttgtaatagcaaatgggccctgactgtaaattagtgaagagtgaatgtaacttattacccacagggacaattcccaaatgagggccttaaatgatgctcagctaagctggttcttgtgtggcctctgtaccttcaaaagctgccgagtcctatgattgcacgcgatgggacttgtacacttgaagtgaaacacagttttaaaacttgctttgtttagaattcccacctcatttttccatggacaaaagtattctttatgtcctagtgcacttacaatttggtattacctgggagtgaaaagaaatattacagccatgcctaactgacttcttgaggtaagattgttctgtcagaaaaccctctcccagttcccctgcagctcttcaggaatccacatctctccagagctctttgttctcatgggtggcacctccagagtgaagaagatcctttgtcaagaagggaaacagaggggaaatgagagggtcctgcaggcagagctggaatcaacttccactctgcctcttgcaagctgtgtgaccctgggcacaatttctccttcctctggaaacctctgttttcttagatttggagcagggtggtcacactgaccttgcagagttccgagaatcagagacagaacataaaaggcctggaaaacattctccaaaaagaagctgcaacatgtgtggacaatgggcttttcatgcctctcttactgtctcttactgtctgttgacctggtgcaagaaacatgctctggtgatggctgtgagggaggaatgaggatagacatagacactcctgtgtctcaaacatgcctctttattactctgttatgactctgtcttccctggggcaggaccccagcctgcctacatttgcagacagacacagtggcatgtggagacaacagtgtgtcccaatgacttttctttactccccagctgtcggcagtactcagtggaagggtgatattatgacactgatactgctattttgaaacctggaggatggaaaggtgcaaaaatctatcaccagcaacagaaggtgcagaccgtgttggtggcggtaattttgtccatcaaatgaatatgtgtgaaaacattcccttcttcggccctacaggtcagaatggcggcagtggagcatcgtcattcttcaggattgccctactggccctacctcacagctgaaactttaaaaaacaggatgggccgccagccacctcctccaactcaacaacattctataactgataactccctgagcctcaagacacctcccgaatgtctccttcatccccttccaccctcagtggatgataatatcaaggagtgtcctcttgctcctcttccaccctcagtggatgataatctgaaggagtgtctcctggtccctcttccaccctctcctcttccaccctcagtggatgataatctgaaggactgtctctttgtccctcttccaccctctcctcttccaccctcagtggatgataatctcaagactcctcccttagctactcaggaggccgaggcggaaaaaccacccaaacccaagaggtggagggtggatgaggtggaacaatcaccgaaacccaagaggcggagggaggccgaggtggaacaatcgcccaagcccaagaggcagagggaggccgaggcacaacaattacccaaacccaagaggcggaggttgagtaagctgagaacacgccattgcacttcaagcctgggcaataagaataaatccgtgggtcggaaaaaaagaaaaaaatcaaaaaacaaaacaaaacccacgctccaaaaacaaactaacgaagaataaataaataatataaaaataaaaaaaa

SEQ ID NO: 45592 - DNA, 1643 bp, Homo sapiens
  misc_feature (1)...(1643): n = a,t,c or g
tttttttttttaaggactgcagtatttattttatttttatattatttatttattctttgttagtttttggagtgtgggttttgttttgttttttgaattttttattttgttctactcggttttattcttattgctcaggcttgagtgcactggcctcttctcagctcaacctccgcctcttgggttcgggtaatgatggttccacgtcagcggccctccgcctcttgggtttgcgtgacggttccacgtcaccgaccctccgcctcttgggttcgggtgatgatggttccacgtcagcggccctccgcctcttgggtttgcgtgacgggttccacatcaccgaccctccgcctcttgggttcgggtgatgatggttccacgtcagcgggccctccgcctcttgggtttgcgtgacgggttccacgtcaccgaccctccgcctcttgggttcgggaggtggttccatctcagccgccctctgcctcttgggtttgcgtggtttttctgcctcagcctcctgagtagctaagggaggtgtcttgagattatcatcggctgagggtggaagcggcccacgcagacgctccccgcagacgctcggcaggtgtcttgatattatcatctgctgagggtggagctgagggtggaaggggagtgagctgacgctcggaaggtgtcttgagattatcatccgctgagggtggaagcggccctcgcagacgctccncgcagacgctcggcaggtgtcttgatattatcatctgctgagggtggagctgagggtggaaggggagtgagctgacgctcggaaggtgtcttgagattatcatccgctgagggtggaagcggcccccgcagacgctcggcaggtgtcttgatattatcatctgctgagggtggagctgagggtggaaggggagtgagctgatgctcggaaggtgtcttgagattatcatccgctgagggtggaaggggagtgagcagacactcggcacgtgtcttgagattatcatccgctgagggtggagctgagggtggagctgagggtggaaggggagtgagcagacactcgggaggtgtcttgagattatcatccgctgagggtggaaggggatagagcagacacacttgggaggtgtcttgagattatcatccgctgagggtggagctgagggtggaaggggagtgagcagacactcgggaggtgtcttgagattatcatccgctgagggtagagctgagggtggaaggggagtgagcagacactcggaaggtgtcttgaggctcagggagttatcaattatagaatgttgttgagttggaggaggtggctggtggcccatcctgttttttaaagtttcagctgtgaggtagggccagcagggcaatcctgaagaatgacgatgctccactgccgccattctgacccggttgcaaagaggctttcttgcagaaggggtgattttgcatctgtagtagtcctctgcccgccgccgcaacgcttgcgcacgttgaaacatttccatgtaggtgtgtatttctttcatatccaatttcccattttcctctgcctctgacacctgcctctccttttctccgtgctcacgttctttcatgcttagtttcctcagatgttctttggc

SEQ ID NO: 45593 - DNA, 371 bp, Homo sapiens
agctgttataatacctgaccacagatgagcctctgagtctcattagtgtctgtgtttactgaacgctgcggacatcttttctatatacagtaattcttccaccctgtcacaacaaagagaagttgagtggcaggaatgggaaatctttacatgcttctttgggaaagaaaaatgcttatttgtacattgttctattgtgtgagacctacatagggttctgtgtaaggccgagtcaagctgtcatcactttccttggtaagtttgagagctttatctagcggacacgttctgaagtgtgatatccacaaggaaatatcagtgtgtagggctccacctgcctgagtttaagtggtagcagaaattagaggcag

SEQ ID NO: 45594 - DNA, 342 bp, Homo sapiens
gtggagcatgccttggagagcttcagcttcctcaatgaagacgaagatgaagacaatgatgttcctggggacagcacggggtgtccagctctggatgctgccttggtccggcacctgtaccactgcagtcgcctcctgctgaaactgggcacatttgggcccctgcgctgccaggaggcatgggccctggagcggctgctgcgggaagcccgagtactggaggcagtatgcgagttcagcaggcggtgggagatcccggccagctctgcccaggaagtggtgcagttctcggcctctcggcctggcttcctgaccttctgggaccagtgcacagagagactt

SEQ ID NO: 45595 - DNA, 982 bp, Homo sapiens
ttttttttttaaattttggtatgcaaattatatttaatgtaatattatttaatatttcatttttttaaatccacactggtagagtcaaacttattttgaacagaagtaaatgctaaataattgaagcatttttaaagcagttttctacagctttatttagtctcttactcttttagatgttttaaatataaattttcttatttcaacttatagtctacagtgctgcgtggttctttgtttaatggaaaccaacgtctatgggaaaactcattttaagaaagacacatacatatgcacaatgcatgcaaacaggtaacagggaatagtaaatatcacttctattatatttttcagtatcttctcaatcaataaaatggaatggtaacacagttccaatgcagcacacatgaatggcaacacaaaggtgaaagtatccttgcttaccatgccaaacggctgcatgtccatcccacagagttgccactgttttccttgcaccatcccataaattatgagagtaggcttctttcaatacattctttctcttataaatgtgtaagaaaataatagtaaggtagagaagaaagatagtaaagtaaggaagtattaaaagtattagtggtgtaaaaacccacaagagatagtttgcaaaattcaaatagtcctccaactgctccacaccaaaccattcttcgagtatgtgaatcagacaaatcatatagggcacagaatcctgtcctacaccacaggtttgatttttgtctatcatttttcttcaggtgaaaatgacaaattcagtttctttcttcattgccatagcaggtcgctaattttgacacagaagttagataaatatcttgtcccaaacttcaatgtctgtattcctagagcggcgacagaagctcttcgggggatcagtggccaagggggcggacagatttgcacggcggattcctccgaagcaacccgtgtgaaagaagcc

SEQ ID NO: 45596 - DNA, 733 bp, Homo sapiens
  misc_feature (1)...(733): n = a,t,c or g
tcccatccctgggactctgggagcagcagtgaagtcttcagatactgccctacctccacctccagtggcctcccaaatttgaagccttcagagaagaatgccggctcctgaacgccccacctgttccaccccgaagcgcaaagcctttgtccaccagtccctccatncctcctcgcacagtcaagccagcgcggcaacagactcgctctcccagccccaccttgtcctactattcttcagggctacacaacatcgtcactaaaactgacacaaatccttctgaaagcactcctgtttcctgctatccatgtaaccgagtgaaaactgattctgtggacctgaaatccccgtttggaagtccttctggctgaagctgtgtcctctcggctctcatggcctaaccattattcaggagcatcagaaagccagaccaggagtgacttcctgctggatccaagcaggagttatagttaccctagacaaaagacgccaggcacaccaaagagaaactgcccagcaccttttgattttgatggctgtgagctcctggccagccccactagcccagtcactgcagaattcagtagcagcgtctctggttgtcccaagtcagccagctactctctggagagcacagatgtgaaatctcttgcagctggtgtgacaaagcagagtacgtcatgcccctgcctttaccccccagggctcccaaaaactagtggaagagaaggtc

SEQ ID NO: 45597 - DNA, 1282 bp, Homo sapiens
tttttttttttgtatcttatttgatgatatttattttctctgccaagctgtatagtaaaaggaaaataagtcacatctggtcattggcatttgtatcgtcattctgtaaagacaaaagagtacctatataagaagctccacgtagtgcaaatcgacatctggtaggctgctcgcccccaggcagcagctagagtctgtaattctctgcgtcatcctcttctttttcttcatttttgctttttcttcgcttgagttcttctctgaaattatatgcaaagagttgtgggtcttcatcacacatttttctgtatacatcacagaggctcttaaagtgtgagatggagagctggcggggccgaagagtagggtctatgtctgccaactctaacagcctgcccgtgctttccaagcgctgcgcttcagggaataacattctgagccctcgatggcagtatttccttcggaactgaaatacattctgaaccactttttccaccagcttgaatggctgctctatcttgggctgtatcaagggagtgaagtgcaccacgcccacgtccacctctggtttggggacaaaagcttgtcctggaattgtaaagatgtgtcgaacattgcagaggtactgagccataacagagaggcgactacgctgtttgcttcctgtattggctgcaagtctctctgccacttccttttgaaaagtcaaagtcatctgagttctgccataaacaaaaggtccatctctacaggaaatattttcaagccacttgataatcagtggagttgaaacactaaaaggcagatttccaataatatgtacatttggaggatcatcttcccagggtcttttaagactttctgaaaaagccttttctaccttaaatgtcaagacatctccatgaacaattctcagtttcccaggtgctgcatcagaaagcatctgtaatcccaggaataaatcgagtgtccttttcaaccaccagaagttcagcgacgtcggcattaagaatagatcttgtgattccccctggcccagggcccacttcgtaaacataagcatttgtcagattgccagctttccttacaatcttatctgtcagcctcaagtccaggaggaaattctgtgatagctcgttcgctgcttgcagtcttaacaacttaatgatttctcgaatcgtgggcaacggagggagacggcaagtgctgagttttccggaggcagccatgatacgcggcaagcaccatccacccctacctcacccaggaccttcaccgccgc

SEQ ID NO: 45598 - DNA, 2718 bp, Homo sapiens
attcggcacgaggtgacgtcaagaaagttcctaaaggtgttcccctgcagtttgacataaacagtgtcggaaaacagacagggatgacgttgaatgagcggtttgggatcctgaaggaacaaagagccactctcacatacaacaaagggggaagccgctttgtcaccgtgggataggtcccatgtcaaaggaacttttgagtgatgactctgagaagttgaattgcttgaagagttcatcacggaaattcaagaaactttacttcaaaatattcacaaggctaaataactcttatttttatttttgaaggtttttttttttaaaaaaaaaaacgtataaaataatgccctgaaagaataatagggattatacctgtctgttcttaaagatttcatggttggctcagacagaacaatcatctgtttgacttctttggttcctcatgcagcagaaggaagacagaaagatagaaattgattatttttatgatagcagtattcaggatctcatcacctttgcccgtgttttagactttgtcatggtaaatcctggtcttcataaacatgagtaggtcccttggttgctgtcacttgccctttaatagtgttgatgtagtcagtgccgttgccttttcttcattagagacacagaacaatgtattagaatttccagctgtgggtttgaagacttagggggacatccagaacgtgcttcctctttcagacggtgtaaagtcccctggaattacacagctttagtgctgagcttttaacaggaaatgtggcctaggtattagtcttagtttaaaatgttggtgtttagagactgtaaatgcatattcacaaagttatctgatagggccttggaggagaaggtccagttttaaaaaatgacagtttgtgtttaataaatgaaggcatgagaggaagtaagtagcaagttgaaggacaggtagttgagatgaaacacttcaaaaccctggttatagatgtactgtttggatgtagcatagtcttgagtctagcgtccacaaagaattattcaaatgatatttagaagaattataactattacattgaatggagtcccttggatattttgatagtaaaattaatagccataaagtcctagacttcttatttgaagttaaaatttcttatttgaaaagttgaaatttatgagctttgaagattgctaaattaaataatttatagctccaaaaacaaaaatatacttgtatatgtcacagagaaaaaaaatgcaaaatttataatagagttacattaaccttgttgtttacctttcactgatttcttatatggtataaattaaagttcaggcatttatggggagaaaaggccctccccaccgacccgccacctgccacctctgacggagtgggagaagttagtcctgtgctaagatagtactgagtccccagatgttgtatactgtaaattacagtataatgccaaatgcagcaaaatcttccagctgtacgttacaagtttggtcattttgaagcttgacattttagtttgccattatgttaaaaacatctaaataggtgttagtttctcaggagtagattgttagtgttgacttttcctgtaaagcagacatcgttcttgggcctgcccctggcattgtatactagatttcattgttgtctctcatgcttcttgagttgcttcatgggtttatgctcgccatggaaagctatcagtaacagtttcatgcttatacccaaagaattaaatctgatctttaatatctgatattttcctggtactcgtactgataagggattattggaagtcagtcacagaatttggaaataaattctagtctctccttagctatttgatgcttttcatataggccaagaactcattgcaaaacatttttgcaaggatgaatgcctgtatttggtctaggaacagtacattttagtctgatttagaattactggtagcttattttaaagcaaggaaaagcagctgagctcaagtttgctgtctttagaatggtttgtgaaaatatggtataaaggtgttttcattttcctgttcttacctattattgtatagagctattcatgccattttttgggaaaactttaaaaattgccccaaatactgacattgagtgcattaaataacaaattatctttgatacattaaacttttattcttcatgcatctgtaatttaattttaagtataatgttttgcctttggtacaactaaattaaaactcttggtggtcacatattgtatataaacaaaacaatatgctttgttgaaggaaaattttctttattggaatgtggttgtaatccttgttcagttcttaagtttcggttttttttaaaaacaggatgcaacttaaacttttctttgcatcaaggtatatgcaaaacattggtgccgtgcatcaccaaatgaaagtttgtatttaacgaggaggtgctttacactgtactttttggtgttttttggaaaagttacatttagatctattctgaagctgttcatttttaacaaataaaatgttacaggtttcacatgatttattctcagctctaaagattgagttgtggtttttagattgttctatgttacgaagaactttgtagtggttatctatatttgtagtttttagggtgtgaaaccttatctactagcaaaattggtaaatcactgtagactcttctatt

SEQ ID NO: 45599 - DNA, 2525 bp, Homo sapiens
ttttttaatgctaagttttgataagcaagtttctattttcctatgttcagggaacggcatcaacagaagaaagctggcactgctcaggatgtcttctttcagttgctaccattaagcatactgcatatccttttcggccataaccacattcacccacttgttatatttcattttcagaaaagcatcattcattgcactcggtttgtccaacagagtataatcaagggttttttttcaacattaatcaagaaattcctccatctgcaaaagtcagcctatgccattaaatacagccaagatcataaaatacaaatgtcattaggtctactgaatcttgagattcattcactagaatacacagggaaaaggaaaaagtttgcccttgtgaaaggtgtgtatcattttttagaagagcttctgaaagcctcaaacatctgtgagtgtgctaagagccgttacaaaggtattttatacaatctatgctgagtcagctaggagttagcaggaggctggatgcagatggtaaaacatacccctgcagatctgttgttattaaggatgacctttggaagtctcaaactgtaaccacaaagggtgtccccactgcattcatactatatacacacatacctgaactgcctttctaccagtaacatttaaaataagcacacttaatactgccagtcacatgtagtagagtgttcactctgtaactgtgtgtggcaaagccaagatatcctaccattccaataaaaaaaaggcaaggaaatagctttaacacaccattgatgtatgctattacacttttccagtggaagataacaaagcccatataaaatttaaagacagaggaaaaactcgattttcagccacttgtacctctctaagttttcatgccctgctatctggaacacttccccacttccctgccagaagtcctctagctctgcattaaggatcttgttgtccctgactgacacccacatatggaacatttggcatgcctccatggcaacacgggatccctgaagtttatgaaagcgttccatgtgagagaggatgctcatatactcctgccccaccctccaaagatgtactaatgatgctaactgactacatccaaggagccagaggaaaaataatctgagggctgcagagaacccactcaagctgtcactgcaaagctggtcttcccaagagcaaaggaggaagcatgcaatctagttcaagtcacacctacttcactcttagacttcttccttcaagtggggcttccctgcaaacaggactggtcttcaaagtctcccagagcccctctatcttagccaggttgctcaagctaattttattctttcccaacaggatccatttggaaaatatcaagcctttagaatgtggcagcaagagaaagcggactacgcaggaacggggagtttgggagaagctctcctggtgttgacttagggatgaaggctccaggctgctgccagaaatggagtcaccagcagaagaactgttttctctgataaggatgtccccaccattttcaagctgttcgttaaagttacacaggtcccttcttgcagcagtagtaccgttagctcattttcccctcaagcggggttgtgaccgtcgttgaaattgcaatgctcaaacttccaacacttgttatacacttgtaaccccagctttggtaatgagacacgcatcaaaatcagatgaacaattgacggctgttttgcagtcagcagttgggttaggacagttgtagcactgcaggctatgacctgaatggcagaagacagccaggacgagcagcagcccgaacaggacagaccctccttggattcccattgtgattgtccacagaacctggaaggaagggacaggaaggaatgtcaggaacgaacaaatgactgctggttgtctcaaaaaccaagggctggaaggccaagaaggcttctgagaggaacatttacagggggagtcaaggcacactgaatcgcctgccatgccccagctctgacccacagcaccatatacccttgagtaggctcagtccctataagccccagtgtgtactaccacactgtgggaataacactatcttccccatcagggtcagtgagtcaaatgacaatatgagcaaattgactcatatagccactgtggttcccactctactggccccaccccaagctgctggctgaaagagagggccacttctcggagccacagcactaagtgaatcagaccaaaggggtgactctggaaggcaccagcatgcattcagcagtggaacagggagcaatggcttagcatacctggaagctctggctcctcactgtaagaagtataatggggacacttgcttgctctctttggggacatgaagagaggtattgagcaactttgtaagtttccattacgtgaatgcctagatgtgtagtgatagcatcaggtgagaagaaggaaagcctgaaatgcctccaaccctactttacccagtaaagaagccaaagctt

SEQ ID NO: 45600 - DNA, 682 bp, Homo sapiens
agagttgtgttctttattcccttgtatctccctaccgatcatttggtagaaaacatcttccaggttttccatatccttgactttgaacacatgttgctcattgtctttcttggaagccaaagcattgatgttcacttggttcaccaaaggcccgaccccaaacacatagacatccagataatcctcccttgggtttttgcgatccttgccaatgtatagcaagtcccggatctcatcaatgacagtaattgggtccccgcccatgttgtgcaatcctgcagaagagacaggaccatgagggtaggagataaggaagataaactggctaaaggcagggatacacatggcagggtgagcaagttgaggaagggttagagatagttgatcacagggcttaggaagaattccttatgaagggtcacaggagagatgaacagccagctatgagtcacattcagggccccaaccatgggtatagtgttacaagtggacttaagggccacatgctggtctgagaaggtggggaggctgggacaggagagaggtcccttctgaccatcagtcatgaggatgatgacatggcgggtgcggttccagccttcaggagggacgtcatctggccagctcatcatgctgtacactgcctggagggccttcttggtgttagtccctgacttcaacc

SEQ ID NO: 45601 - DNA, 1306 bp, Homo sapiens
ttttttttttttttcgtgacacaaacatgcattcgttttattcacaaaacagcctggtttcctaaaacaatacaaacagcatgttcatcagcaggaagctggccgtgggcaggggggcccaggccgcagggggccccctggggacccacccccaccagcaggggaccacgcaaagaagccctttcttctgttgccattagcaaggccagaaaaaaaggacttattttctctaagaaaagtagccaggattggaaatatcgagatggggctccccagatcgcaatggataaacgaacagaactttcatttttttttccaaaatcactgttggggtgggggatcccagtctcgggactgtgggtgcagctcagctggcctggtgctccctccccttctgtgagctccctgctggcagctctgcacgccgtggatggatacagagcggcttctacacggcgccatcaacattctctttatgaacgtgagtggattctcccaggcaaactatgcactatttcatggtcggaaagaatcaaaggaagtttaaatgagggtggagttaaactgtgctaaattacagtagtgcttattagtaactagatttcaaaaggttacagaaaatttacattctctacacaaaaactgcatctcctgcacagacaacatcgacatcgacacaggaaggaaactgattgtccattctttgcccaggaagtctcggtactttatagattcgtctttacctcttttttgttgttgttcttccgaaaaagcagtttaaatttttttctttttctttttatgctagggacgtggagatgttaaaacgacaacaaaaaatatatatataaaaacaggaatgaaatctgtgagagaatatttttggttctaaagacgggtgcatccgtttgtcttcgcccgaatcccttgctggagaccacacgagcagtgacattgcacggagagggcagctttgggttccgccgccgtcactgaaaccaccggaaggcggctcccgtcggaagcatcaccttctggcgggggcgggagacaaaaacaaggagagagttcagtcagggtccgggtaggcctggagcaaagacgttcccccatggatggcctcatggcggagggacaggcatggaggaagagcagccacccctcggagctcctgccaccccagcccagggccaaaggaggcgcttgacctgctgggctgctggaaggccccgaggactctgaggcctcctgagccactgtgcccaggaacctccttccagagaagaagtcccttcccctggcccaa

SEQ ID NO: 45602 - DNA, 2481 bp, Homo sapiens
tgaccaggtctaggtctggagtttcagcttggacactgagccaagcagacaagcaaagcaagccaggacacaccatcctgccccaggcccagcttctctcctgccttccaacgccatggggagcaatctcagcccccaactctgcctgatgccctttatcttgggcctcttgtctggaggtgtgaccaccactccatggtctttggcccggccccagggatcctgctctctggagggggtagagatcaaaggcggctccttccgacttctccaagaggggccagggcactgggagtacgtgtgtccttctggcttctacccgtaccctgtgcagacacgtacctgcagatcttacggggtcctgggagcaccctgaaagactcaagaccaaaagactgtcaggaaggcagagtgcagagcaatccactgtccaagaccacacgacttcgagaacggggaatactggccccggtctccctactacaatgtgagtgatgagatctctttccactgctatgacggttacactctccggggctctgccaatcgcacctgccaagtgaatggccggtggagtgggcagacagcgatctgtgacaacggagcggggtactgctccaacccgggcatccccattggcacaaggaaggtgggcagccagtaccgccttgaagacagcgtcacctaccactgcagccgggggcttaccctgcgtggctcccagcggcgaacgtgtcaggaaggtggctcttggagcgggacggagccttcctgccaagactccttcatgtacgacacccctcaagaggtggccgaagctttcctgtcttccctgacagagaccatagaaggagtcgatgctgaggatgggcacggcccaggggaacaacagaagcggaagatcgtcctggacccttcaggctccatgaacatctacctggtgctagatggatcagacagcattggggccagcaacttcacaggagccaaaaagtgtctagtcaacttaattgagaaggtggcaagttatggtgtgaagccaagatatggtctagtgacatatgccacataccccaaaatttgggtcaaagtgtctgaagcagacagcagtaatgcagactgggtcacgaagcagctcaatgaaatcaattatgaagaccacaagttgaagtcagggactaacaccaagaaggccctccaggcagtgtacagcatgatgagctggccagatgacgtccctcctgaaggctggaaccgcacccgccatgtcatcatcctcatgactgatggattgcacaacatgggcggggacccaattactgtcattgatgagatccgggacttgctatacattggcaaggatcgcaaaaacccaagggaggattatctggatgtctatgtgtttggggtcgggcctttggtgaaccaagtgaacatcaatgctttggcttccaagaaagacaatgagcaacatgtgttcaaagtcaaggatatggaaaacctggaagatgttttctaccaaatgatcgatgaaagccagtctctgagtctctgtggcatggtttgggaacacaggaagggtaccgattaccacaagcaaccatggcaggccaagatctcagtcattcgcccttcaaagggacacgagagctgtatgggggctgtggtgtctgagtactttgtgctgacagcagcacattgtttcactgtggatgacaaggaacactcaatcaaggtcagcgtaggaggggagaagcgggacctggagatagaagtagtcctatttcaccccaactacaacattaatgggaaaaaagaagcaggaattcctgaattttatgactatgacgttgccctgatcaagctcaagaataagctgaaatatggccagactatcaggcccatttgtctcccctgcaccgagggaacaactcgagctttgaggcttcctccaactaccacttgccagcaacaaaaggaagagctgctccctgcacaggatatcaaagctctgtttgtgtctgaggaggagaaaaagctgactcggaaggaggtctacatcaagaatggggataagaaaggcagctgtgagagagatgctcaatatgccccaggctatgacaaagtcaaggacatctcagaggtggtcacccctcggttccctttgtactggaggagtgagtccctatgctgaccccaatacttgcagaggtgattctggcggccccttgatagttcacaagagaagtcgtttcattcaagttggtgtaatcagctggggagtagtggatgtctgcaaaaaccagaagcggcaaaagcaggtacctgctcacgcccgagactttcacatcaacctctttcaagtgctgccctggctgaaggagaaactccaagatgaggatttgggttttctataaggggtttcctgctggacaggggcgtgggattgaattaaaacagctgcgacaacaaaaaaaaaaa

SEQ ID NO: 45603 - DNA, 603 bp, Homo sapiens
aaagaagctgtctccatcttgtctgtatccgctgctcttgtgacgttgtggagatggggagcgtcctggggctgtgctccatggcgagctggataccatgtttgtgtggaagtgccccgtgtttgctatgccgatgctgtcctagtggaaacaactccactgtaactagattgatctatgcacttttcttgcttgttggagtatgtgtagcttgtgtaatgttgataccaggaatggaagaacaactgaataagattcctggattttgtgagaatgagaaaggtgttgtcccttgtaacattttggttggctataaagctgtatatcgtttgtgctttggtttggctatgttctatcttcttctctctttactaatgatcaaagtgaagagtagcagtgatcctagagctgcagtgcacaatggattttggttctttaaatttgctgcagcaattgcaattattattggggcattcttcattccagaaggaacttttacaactgtgtggttttatgtaggcatggcaggtgccttttgtttcatcctcatacaactagtcttacttattgattttgcacattcatggaatgaatcgtgggttg

SEQ ID NO: 45604 - DNA, 1937 bp, Homo sapiens
ttttttttcctattattcttttactattttttctattaccattttttctagtaccattttttctattattcttttactataattgtatataatatggcagctgcttgccacatgtactatgtggagagatgtaccaccctgcatcagcttttaccctacagaaggaaatcagcgttccattatattttattgttatcaacagtttaggaatacatagctttgcttttgcctttttctttccttccccttgtttcccctcgcctcagagaaaagaaggaaaaaaaaattcatctttcctacccccctctttttggatgataggacttgaagacaatctgaaataccacataaactcacttccagatgttttttgtttcatatgcaattgaattgggctcagactgtgtttttaagctgtatggtaaaaatatcactgtcttctagggccttattggggggcagggagagacgtgacactttgtcagaagggattgagtctgctaacttaaactctccttgattcaggaatacaaagtctccagctgtgaacagagactcatcagtgaaatagagtacaggctagaaaggtctcctgtggatgaatcaggtgatgaagttcagtatggagatgtgcctgtggaaaatggaatggcaccattctttgagatgaagctgaaacattacaagatctttgagggaatgccagtaactttcacatgtagagtggctggaaatccaaagccaaagatctattggtttaaagatgggaagcagatctctccaaagagtgatcactacaccattcaaagagatctcgatgggacctgctccctccataccacagccttcaccctagatgatgatgggaattatacaattatggctgcaaaccctcagggccgcatcagttgtactggacggctaatggtacaggctgtcaaccaaagaggtcgacgtccccggtctccctcaggccatcctcatgtcagaaggcctcgttctagatcaagggacagtggagacgaaaatgaaccaattcaggagcgattcttcagacctcacttcttgcaggctcctggagatctgactgttcaagaaggaaaactctgcagaatggactgcaaagtcagtgggttaccaaccccagatctaagctggcaactagatggaaagcccgtacgccctgacagtgctcacaagatgctggtgcgtgagaacggggtgcactctctgatcatagagccagtcacgtcacgtgatgccggcatctacacatgtatagctaccaaccgagcaggacagaactcattcagcctggagcttgtggttgctgctaaagaagcacacaaaccccctgtgtttattgagaagctccaaaacacaggagttgctgatgggtacccagtgcggctggaatgtcgtgtattgggagtgccaccacctcagatattttggaagaaagaaaatgaatcactcactcacagcactgaccgagtgagcatgcaccaggacaaccacggctacatctgcctgctcattcagggagccacaaaagaagatgctgggtggtatactgtgtcagccaagaatgaagcagggattgtgtcctgtactgccaggctggacgtttacacccagtggcatcagcagtcacagagcaccaagccaaaaaaagtacggccctcagccagtcgctatgcagcactttcggaccagggactagacatcaaagcagcgttccaacctgaggccaacccatctcacctgacactgaatactgccttggtagaaagtgaggacctgtaatccagcattcttgttaaagctgaaacactgaaacagccattgccttgaccaacatattcctttgtcacattatgtaaaaggcagaaacatacctttgactataagaaattaaaaaaaaacaccaaaataaa

SEQ ID NO: 45605 - DNA, 385 bp, Homo sapiens
ctctacagccaacttgagcgaaaccgcctgctttctaatgagctgaagctaacgctgcatgatctgtgtgactgatgggcagggctcaatgatgcccattaaactgagcttactgctcacaccactgacctggaccccaacaaaaagctgattgtctttttaaaagttattattttgccctgagcaaattgcattttaattggggcagttagaatgttgatttcctaacagcattgtgaagttgaccattgtgaagtttctgtccctttagaagagattatgggtgaagaagggaggggcctgagagattatagtgagaaaacttgcgagaattttgttttccacccttatttgctgctctttcacttgggcactgactgtagga

SEQ ID NO: 45606 - DNA, 1196 bp, Homo sapiens
cccgctccgtcctcctcgcctgccaccggtgcacccagtccgctcacccagcccagtccgtccggtcctcaccgcctgccggccggcccaccccccaccgcaggccatggacgccatcaagaagaagatgcagatgctgaagctggacaaggagaacgccatcgaccgcgccgagcaggccgaagccgacaagaagcaagctgaggaccgctgcaagcagctggaggaggagcagcaggccctccagaagaagctgaaggggacagaggatgaggtggaaaagtattctgaatccgtgaaggaggcccaggagaaactggagcaggccgagaagaaggccactgatgctgaggcagatgtggcctccctgaaccgccgcattcagctggttgaggaggagctggaccgggcccaggagcgcctggctacagccctgcagaagctggaggaggccgagaagcggctgatgagagcgagagaggaatgaaggtcatcgaaaaccgggccatgaaggatgaggagaagatggaactgcaggagatgcagctgaaggaggccaagcacatcgctgaggattcagaccgcaaatatgaagaggtggccaggaagctggtgatcctggaaggagagctggagcgctcggaggagagggctgaggtggccgagagtaaatgtggggacctagaggaggagctgaaaattgttaccaacaacttgaaatccctggaggcccaggcggacaagtattccaccaaagaagataaatatgaagaggagatcaaactgttggaggagaagctgaaggaggctgagacccgagcagagtttgccgagaggtctgtggcaaagttggagaaaaccatcgatgacctagaagatgaagtctatgcccagaagatgaagtacaaggccattagcgaggaactggacaacgcactcaatgacatcacctccctctgagccccacgccagcgtggccacctcagctctcttctctcctctcctttccattctctctatggggaggggagcaggcaggaggagcagaaattgccaacattgcacagccaggctgggagcagcctagggagagcccccatcatgcccaccacccactctggcactggcttcatcctttacctatccccttccaccctcctttgctgcttaataaattctgaacttggaaaaaaaaa

SEQ ID NO: 45607 - DNA, 1175 bp, Homo sapiens
tttttttttgagaggctagtaacatcagttttattgggttggggtggcaaccatagcctggctgggggtggggctggccctcacaggttgttgagttccagcagggtctggtccaaggtctggtgaatctcgacgttctcctccttggcactggccaaggtctcttctaggtcatcgatggttttctccaactttgccacagacctctcggcaaactctgctcgggtctcagcctccttcagcttctcctccaacagtttgatctcctcttcatatttatcttctttggtggaatactcctcctctgaggccatcagggacttgagggcctggtccatggttcgaagttcctcctccagctgtctggctcggctctcggccacctcagccctctcctccgagcgctccagctctccttccaggatcaccagcttcctggccacctcttcatatttgcggtctgaatcctcagcgatgtgcttggcctccttcagctgcatctcctgcagttccatcttctcctcatccttcatggcccggttttcgatgaccttcattcctctctcgctctcatcagccgccttctcggcctcctccagcttctgcagggctgtagccaggcgctcctgggcccggtccagctcctcctcaaccagctgaatgcggcggttcagggaggccacatctgcctcagcatcagtggccttcttctcggcctgctccagtttctcctgggcctccttcacggattcagaatacttttccacctcatcctctgtccccttcagcttcttctggagggcctgctgctcctcctccagctgcttgcagcggtcctcagcttgcttcttgtcggcttcggcctgctcggcgcggtcgatggcgttctccttgtccagcttcagcatctgcatcttcttcttgatggcgtccatggcctgcggtggggggtgggccggccggcaggcggtgaggaccggacggactgggctgggtgagcggactgggtgcaccggtggcaggcgaggaggacggagcgggactgggacgtcccggccacgcgggcgcctaaaaggcggggagggaccgggcggggccggcaaccaggaccctcccccacctcggcccaaaccttgtaggggcagaagcacggcccggccggggggtgcggtcgc
